United States Patent Application Publication US 2026/0103690 A1 - sequence listing, part 95

SEQ ID NO: 471148 - protein, 467 aa, unidentified
MADSTLCVGGDIHQDELHLRATDKTDGHEVGQPLTVKNNRPGADQAIAHLVQLLTQHGYTHLEFGLEATGLFWLPFYVYLQQSPALMPFQPTWVCFNPKLVAKFKEGVTLSEIKDDDHDALAVAERLRFGHLPVSYVASSEWLALRMLTRYRYRLSRQITQEKLRALTRVFLKASEWHRGQPFSDVWGATSATLLTEFTIAEIAAMSLTQLTDLMQEYARKQFDDPQATARQVQRTLQNSFPVTPDLDVALTVVLQVAWTHIRDLEKLMRRLDREIAQRMEHITNPLLSVQGLGPVITAGIIAEIADIHRFPDEPQLAKFVGLVWRKHASGQFVAEETRLANTGNVYSALLPDRRGEPDTPTQLGIPSLLSAQVCRGAEAPTQARSRFDRSQARPLGLCPAHKESDLCETPSGAIPGGGTSPVTGLHETIASRSFTGGKLDFGSVSSMRPSTETHFQNSSQIRSFPS

SEQ ID NO: 471149 - protein, 382 aa, unidentified
MPDGIRWVGLDVHARESTFAVFDQATGEVITRRVVGRPHELLPWLRAVERPARMVYEAGPTGYGLARRALAEGIELGVCAPGKTERPPADRVKTDKRDAIRLARLLAAGELTLVTIPSVEREQLRDLVRCREDIRVDLARARHRIGGFLLRREIYWEGTGEAWTRKHRSWLTSVRFADHASQATLADYLHAHDVLIARRDQVEADLAQLAVSAPCVHTVARLRCLRGIDTLTAVGLCAEIGEWERFDHPDQLSAYLGIVPSEHTTGQQRRLGSITKAGSTHARRLLVEAAYHYRRGPVVGEALERRQRGQAPEIINISWRAQRRLNARWRQLKDARRKPGGIVAVAIARELAAYCWEIATCPTTAPAPTPTPTTRKRLTNSR

SEQ ID NO: 471150 - protein, 392 aa, unidentified
MVISVGIDVSKDKHDCFIVSSEGEVLADVFTIPNTMDGFHCLLQRIRDCITPQDKIKVGLEATGHYSYNLLGFLLDNGLATYVLNPLRTNLYRKSLSLRKTKTDRVDARTIAAMLLSDVGLKPYTDTAYHNEELKSLTRYRFDKVKERAKLKSSVSRLVCILFPELEKLVPTLHMASVYALLEEFPGAKQIAAAHLTRLKALLESSSKGRYKRDMALEIRDAARNSIGSRMPAKSLELQHTIRLIRELNAEITEIEEQIQSIMDELHSPITTIPGLGFRMAAMILAEVGDFTRFDSPDKLLAYAGMSPSTYQSGQLKNCYPHMEKRGSRYLRYALYNATKYVCHWDPTFADYLAKKRAEGKHYNVALSHAAKKLVRLIFAMEISGMPYRLAA

SEQ ID NO: 471151 - protein, 454 aa, unidentified
MAQRHTKISLKPGKSRTALTVTHPNAADIDIGSASHYVAAPADRDDEPVREFASFTEDLEALADWLKTCDVDTVAMESTGVYWIPLFELLESRGFTVLLVNARHVKNVSGRKSDVLDCQWLQQLMSYGLLRGAFRPDNAICVLRALWRQRGMLLRSQGRQVQHMQKALTQMNVQLANVISDVVGETGQKILRAIVAGERDGQVLAAMKDARIRASHAEIAKSLQGNWRTEHLFSLQQALAMFDFIGTQVADCDREIEAQLSALQAHDGEPPQGKKKARTRNAPKFDLRTQLFKMCGVDLTRIDGINVTTAIAVISETGSDMSRFPTVGHFTSWLGLCPGTKITGGKVMSGKTKRVANRAAQALKLAAAALRSSQSALGAYFRRMCARMDKPKAVTAAAHKLARLIYRMLTKGEEYTDQGQDYYEDRYRERVLRQLAQRAEKMGMRLVPGDIGAS

SEQ ID NO: 471152 - protein, 364 aa, unidentified
MVGLYSNLEELQGLRSRSRPPCKLPGVGLDLAKRIFQVHGVDAAGKVVIRRRLQRSEIAAFFADLPACLVGIEACATAHHWARLIGASGHQVRLIPPSYVKPYVRRSKTDAADAEAICEAVGRPSMRFVPVKSAYQQAALLHHRARDLLVRQRTMLINAIRGHLGEFGIIAPAGRRRVADLVNLLQGADDAEVPALAREALQSLFAELSALEIRIKVVEAVIMREHRSNAVSRRLTTIPGIGPITASALAGTIADPLAFKSGRELAAWIGLVPRQHSSGGKQKMGRVSKQGDRYLRRLLTVGATAVMRRLPGKTDALSLWVRALLDRRPFRLVSLALANKMARIAWAIMVRPETYKASAMTAAA

SEQ ID NO: 471153 - protein, 330 aa, unidentified
MQSVTLVVIDLGKHAFHHHGQDQHGKAVFRKKVSRKQLIEFLATFHTCTVVMEACAGAHCMARKLASFGHQVKLISPQFVRPFVKSNKNDFVDAEAICEAASRPVMRFVTPKTKSQQTLSALHRVRESLIRDRTKTTNQMQGFLLEFGISLPIGQAVITRLPAVLAEHAELPPPLIAILERLHAHFKYLSEQIIELDKEMARQLADDDLGQCLLSIPGVGPVTASVLAAEMGDAAQYGCSRDFAASLGLVPRQYSTGGRTNLLGISKQGDKNIRRLLVQCARAYMQRLDRQSGRLAEWVRVMLTRRHSNVVACAWRTNWREQPGRSLRIA

SEQ ID NO: 471154 - protein, 320 aa, unidentified
MKTWVGIDVSKLTLDVCWFTQDVPIFLKMPNTPAGFGALFAKLPDDVQIVLEATGAYYLRLAHFLMEKGVPVSVINPLSIKRFAQMKLARAKTDKYDAALIAQFGASQEPAEWTLPDTHILEMQQLCALEDELIVQKGMLTNQREAFTQNPFASKTALKTIQGLVARIGKELKKVRAQLNALTKQHYSREAEILGSLPGLGPKTAQALIVATKGFKDLVNGRALCSYIGIAPRPYQSGTSLRGRGHISKMGSGSVRRKIYMCAISAIRNNAACKVFYERLKANGKASKVALIAVCGKLLRQAAAMIKKGQLFDEELAIGA

SEQ ID NO: 471155 - protein, 366 aa, unidentified
MTLVGCDLHSRKQQVAVLDTETGEVLEQELLHEGDAVERFYRGLPRPVTVGIEATGYTLWFHALMQKLEYTLLVGEAAKIRAMVVRKITTDRRDAQHLLDLLKHDRFPTVWMPDPATRDLRALIAHRVRFVRMRTMVKNGLHAIALNHRVALGPALWTKRGLAQLQALALPPHTAQRCGESLELLTWLTTRIAQLDAQIAAAAAADARAQLLLTHPGVGPLTALITVLVLGPANRFPTSKHVVSYVGLAPAINASADTYHLGKITKQGNALLRWILGQAAPLAAAATSPSCIGGDAPRPRSPSPANCSYGSTSCSGIRSTTTSSGAAAAPDARSLHGIPSPRRPCSLRADRWRAPRADVPVRAFSG

SEQ ID NO: 471156 - protein, 314 aa, unidentified
MPVQLTFVGTDVSKDWLDVWVDPVKRHQRIANTPAGYQELLDLLRPFGPPQSVVVAMEASGGYERGLRAFLLDAGFEVRVLNPFRVRLYAKSLGRNAKNDKIDARTITRYAQTAELHPQVLDPGREDLAELVSHRRRLVDERVAISNQTAMLQNKVLKAQNDARLALINQQTAAIDALIKAAISAMPDLVEKAKLLKTMKGLKDVVAATLVALLPELGLLDRRAIAALVGVAPFDHDSGKLKGKRAIGGGRSPVRAALYMAARAAAQSRSPLGAFYRRMIDAGKKPMVASVALMRKMLVMANAILRDKEPWKHA

SEQ ID NO: 471157 - protein, 338 aa, unidentified
MTIVMGLDQHRAQITAEWLDTSTGEIGRARVAPADRAGVRGFVARFRGRELEVALEATTGWRFVVEELRRIGATVHLAEPAETAARRGNKKRAKNDRADARHLRELLMAGRLPESWIAPDHILDLRARVRLRHELVDQRGEWQQRIQAVLYHHGCPQRRNLMTGEGQQWLGAVRLPATAREQITVALAVIDALDRQLAPLDKELRTYARRQPGCRALMGQFGIGEVTAVTILAELGDARRFSSSREAVRYAGMDITVHQSDQRRSPGHLSRQGPPALRWALFEAAQSAARAGSPDRDYYRQAAERPGANRACLSVARKLLKRSYHTLRELGEEALQPA

SEQ ID NO: 471158 - protein, 540 aa, unidentified
MAQRRTRLTRPEVEFRLRAVALQCMSVSRVASALGLFWHIATNAVLAIAQATLLDILATCPLPCWWSRVVRGWASCCGHDVLPLSLDDPGGVVTRSSRALVTADKGNGPQCVRSFVTWVRDLSSTGWPRTHAARGGTKMNIEDIEVFIGIDVGKSEHWATALNRDGRKVFDRALPNEEDRLREVYQRLQANGQVLVVVDQPATIGALAVAVAQDMGFTVGYLPGLSMRRIADLTPGSAKTDAKDAAVIAQAARTMPHALRAVSTSDEDAAALSMLTGFDLDLARQVNQTANRIRGLYTQIHPALEAVVGPWLEHDAVLEVIAAWPTPADLKRAGKARIDARLKKHGCRRHATWAGQIVSALEHQSVVVAGTDAAAVVLPHLARQLIALHAQRADVAAQVETLVQAHPLYQVLTSMPGIGVRTSAVFLAETLGKTFDTGAQLASYAGLAPVTRRSGSSIRGEHVSHGGNKRLKRAMFLSAFASLRSDPVSRAYYQRKRDQGKRHNQAVLALAHRRILTLHAMIRDGALYDPQPATKLPAAA

SEQ ID NO: 471159 - protein, 400 aa, unidentified
MKEFNVETVQIETASALEAVSQAQGERHYPAYIGLDVHKDTIVVSVAQAGRAAPEFRGEIANKPKAVAKLVERLNREFNGEVLLFCYEAGPCGYGLYRQLLGLGHDCQVVAPSLIPKQPGERIKTDRRDASKLARSLRSGDLSAVWVPDQEQEAMRDLTRARDDLKAQERKARQQLNAYVLRHGHAWPSNKTRWTRAHYNWLESLRFAHDLQQVVLQEYINAVKAASHRVADISAQMERALPQWSLAPVVYSLVALRGIDKLAAMVLLAELGDISRFDSPKQLMAFLGLVPSEHSSGGRRRQGAITRTGNGHARRMLVESAWSYRFSARQTMHLKRKAKHASEEAKAIAWQAQKRLCGRYRTLLEAGKNTKQTTVAIARELVGFIWAIVCQEMPKLRQTR

SEQ ID NO: 471160 - protein, 438 aa, unidentified
MSNKVIFNLDELFISVGIDVGADFSWMSIALPNQQFVGKPYKILHNSIDSLTTAVSKIKEAEELYSLESRIFLESTGIYHYPLFCYLRDKGFNCSVINPIITKNSTNINIRKVHNDRFDSKKAALVGLKPDLKVSLMPSDLALNCRNLCREYYDLMDNRSAYVNKLQGELRMVFPQYLGIFSKVTINTSLTLLETYTSPSAFLEADKQEIIDIIKSTARFGLTYAQNKYNAIIQAATDANQFGYIIDSNIKRIRLYISFIRKYDEEINNILESLHELVDANEDADFVKQIHLIETFKGAGFLSAVSIMGEIGDFSAFSKPKQLFAYFGLDPAVKQSGKFEGTKVQMSKRGSAIARRVIHTLTLQSISISRNGEAKNPVLREYYFKKCDSKPKLVAMGAVSHKVCNMIFAILRDNKPFKIIAPQEHIKQYNAAKCDIAA

SEQ ID NO: 471161 - protein, 380 aa, unidentified
MPGLPRNPSSCPCNSKFRDSASIEVAAAAGCPIGPGSFKTAEKLGTPAVIPSNPYSRQGRSKSPFKQGRVAMENIIVGIDVSKDRLDVAIRPTAEIFAVERNAKGLEALAAKLKGLSVHLIALEATGGFETVVTATLSSLGFPVVVVNPAQVRNFAKAIGLRAKTDTIDAGVIAHFAEATNPEVRVLPDDRTQILSDLVARRRQIVEMIGAERQREKRASKNLKKSITRLLKALEKELSSVDADIDDAVRGSPAWKDKEDLLASVPGVGPAIARTPIADLPELGSLNRKQIAALAGLAPFTRQSGQWRGRSFIGGGRQAVRTVLFMGAMVAKRHNPTLKAFFDRLVTAGKPKMAALIAVARKLLTILNAIARDQKPWKIA

SEQ ID NO: 471162 - protein, 410 aa, unidentified
MEVLYPHCAGLDLHKESVVACVRHMAEGKLASSVKTFKTTTQELMALSDWLLAEAVTHIAMEATGVYWKPVWHILSDGEFELVLANAAHVKNVPGRKTDVNDAVWLADLMAHGLIKASFVPGEATQQMRDLLRTRKQFVRERSSHLQRIQKTLEDANIKLDSVISDIAGLSGRRMIEALIAGEADPQTLASLAHGRIRASAAELEAALRGRVTAHHRFMLRLHLDHLDAVDAAIARIDKEVDGNVEPFRTAIEMLTAIPGVGSLAAEVMVSEIGIDMSRFQTGGHLISWAGLCPRNDESAGKHRSNRVKKGAPWLKTTLVQCAWAASRTKGSYLQAQYLRIRSRRGPQKAVIAVAASILTAAYHMLKSGTLYQDLGANHFDNRNKGKQTLRLLKRLQGLGFAVQVTPLIT

SEQ ID NO: 471163 - protein, 323 aa, unidentified
MSVVVGVDVAKRSFDIATPLANGKVRTKARLANDSKGFEQFEAWLQTHTEPGAWVVMEATGTYHEALAEYLHARHYRVCIVNPAVIAKFAEFELRRVKTDKADAKTIAAYAQHKGDSLRQWEPEPEAQRRLRALVRRLDDLKEMRQMEQNRLDVAPLTVQASIKAVIGHITDEMEKTRKAIEQTIDDDPDLRRRRDLITSIDGLDETTAALLLAELGDPLKYESPSAIVAFAGLNPMVHQSGEKVGQTTISRVGSSRLRAGLFMAGTVSMRFNPVVKALAERLNTRRKAYKQIVCAAMRKLLHLVYGVVKSDKPFDPHIALAK

SEQ ID NO: 471164 - protein, 389 aa, unidentified
MQGIATMLNCCCGIDVHKDMIEACIISGIDDAVIFRKQFSTFQSDLQEFVSWLYKNECYHIAMESTGVYWMPVYEAIEDFSPYYENILVINAHHFKNMPGRKSDVKDAEWIATLLRHGLLKGSFVPPRDIRDLREFSREYKNCKSEEVRCKNRIEKFLQHHGFKLSSVLKDITGASGMGILRKLAIKGSLNLCDVSSSLRGHTKHTSDEILCAVCGRLNTNERYLLDDLIDELTHIRRHIDKLVAKMQEISEPYSMQIAQMCSIPGIDTVSALLILAEIGNDLERNFKSPGFLSAWAGLKPRNDESAKKFKSRKILPGNTYLKSILVQSAWAAVASRKSSFHEWFWSRQARLGKKKAIIAVSRKILVLIYILIVRGDFYNPETAFARKD

SEQ ID NO: 471165 - protein, 356 aa, unidentified
MTKVTASFENQTVYVGLDIHKRSWNAAIYLNEQYLRNIHQPPTPQALYHYLQHSYPLAKYVCAYECGKFGYWIQREFKQLGIECLVVNPADIPSTQKDEVYKTDSRDARRIAHALSSGQLKSIYVPQPVQEADRQLVRQRKKIWSDLGRCKNRIKGFLDYKGIIVPSQYDNANWSRNFINWLGKLEFEHSSNRVTLNYLIIEMELLRKELLSISNQVRKLMRSKKYNKLYYLLRSVTGIGPLTAALLITEIGEMKRFKNFYHLNSFIGLMPMEHSSGERELKGRITVRKHRQLRSDLVECAWTARRTDPALALYYSEQIKRGKNGKAAIVKVARKLLSRIRYVWLSGEPYQTAIVK

SEQ ID NO: 471166 - protein, 339 aa, unidentified
MEFFCGLDVGMDQTAICVFDDKGEVLLEVAVMTDPDAIKGALSSYLGLLRRVGHEAGALSPWLHGELLRLGLPAICLATQHVRAALYAQRNKTDRTDALGIAHIIRTGWFRRAHIKTEPCYRLRLLLTHRRNLKRKFLDLENAIRHSLKAFGIRLNRIGRGAFAQTVRDALAGDDALTSELIDAMLNARAALWKEYCQLHGLVVKLVAGHELCRRFKQIPGVGPIAALSFMTAIDDPSHFRRLRDVPAYFALTSRGWQSGTSIDVQGPISMAGHADVRHALYEAASALLTRFKCRDKVKTRGLAVAKRSGHRKAVVAVARKLAVIMHAMWCDGTAHCGD

SEQ ID NO: 471167 - protein, 358 aa, unidentified
MAQRTKKSAKGKGVLWGSEDQVIVGLDVHKKAYHAAVRVNGAFVQTTVVPPTAEAVLALLEPYRAARLQVVYEAGPTGFGLVRALRLAGIAADVIAPSKTPQTPGATNKTDRLDCRQLARYAETGMLRAVGVPTAAEEADRQCIRLRDQVVDGVRRIKQQIQSFLLQHGVAEPPGLKNWSQKGVRALEALELAAPLRFCLDVMLEDLAYRKEQLAQVNRRIQALSQERRHARVVKALRQPQVVGVLTAMQFRLELFQPARFANERQVAAYLGLAPRVRQSGERLRTGPLLKAGHGRLRAMMVEAAWRWIGADREARAVYDRLLRNTANTNKAITGMARRLAIRLWREVVPPEARGRVA

SEQ ID NO: 471168 - protein, 341 aa, unidentified
MKVSTLGIDLAKNVFQLHGVDHEGHIILRKKLTRAKFVQFVIQLEPCLIGMEACSSSHYFARLFTRYGHEVKLIPPQYVKPYVKTNKTDAADAEAICEAVTRPNMRFVQIKTEEQQAVLALHTERGILIRERIACANSLRATLAEFGITIAAGQSHLTRELPAILEDSENGLSPFVRTSIYRQSKHIRELEEQVKQVEEALASWYRTQEACQRMAKIPGVGMLTATYVVAAVGNARQFSTAKQFASWLGLTPKEHSSGGKQQLGGSSKRGDGYFRYLLVHGARALTAWVNRNGAVEENSWLQGLLERKHYNVAVVAMAAKTARIMWSMLSHNTEYQPRQLA

SEQ ID NO: 471169 - protein, 354 aa, unidentified
MKYYTSTTQFNCGIDLHARQMYVCVMDRDGKKLVHTNIRNNDFAFFLKLVAPYRHDLTVCAECMFGWYWLADACQDAGLNFVLAHALYLKAIHGGKNKNDRIDSEKIAHLLRTNLIPPAYVYPAAKRPLRALLRQRILYVWRRSELLARIQSHQLAYNRPTLPQTRSNRDRWEEKLLTQEDNPIRQLALQNDLALIRHYDTQITALEAQLQRLTKAAAWRDYTLLQTVPGIGEHLGLTLLYEIGDIHRFPTVKDFLSYCRLVKGTVASAGKLKGLRGAKLGNAYLRWVFGEAAVIAKRDHTVIGPLAARLEAKLGNKFKANTVLAIKLARAVYFMLRDHTVFDPERLVAALTHQ

SEQ ID NO: 471170 - protein, 344 aa, unidentified
MWIIGCDYHPSFQQIAFVNQATGEFGMLRLDHKSGEAEQFYRSLAGQQARVGVEATGTLRWFERLLEELRMEMWVGDPTKVRAAAARKAKTDKRDAELLLRLLLEKRFPRIWVPTLEQRDARQLVLHRHRLVQARTRAKNQLHAIAANEGLHPKRRVWSKAGQAELMALPLPPWSSVRRQDWQELLGEFNQRIQPLDVALQQQAEQRPEVQLLTTHPGVGPVTATAFVVTLGEPGRFQTSKQVAAYLGLVPREESSGKGKQRLGHITKQGNSLMRALLTEAAHVAVRQDAQWRRKYVRLAMKKNRSIAAVAIARNLAVRLWWMWKLGLDYGQIKESRSHAEQLA

SEQ ID NO: 471171 - protein, 474 aa, unidentified
MVAGVWCRRDGREFQETRGEGHVHMVDTTAIDLFLGLDLGKEFHHAHGRTGDGRTVHDKRLPNTEPKLLELFSKLVARFGTVLVVVDQVANIGALPLTVARAAGCRVAYLPGLSMRRAADLHPSEAKTDARDAFVIAETARTMPHTLRAVDRDDEVLAELTMLTGYDNDLAGEVNRATNRLRGLLSQIHPSLERVLGPRLAYPYVQALLQRHGSPARLRKLGQARCKALLKAHGSRKAHHLTTEIFDALAEQTLVVPGTEASALIVPGLAAQLAAAHAQRQATDRRSRPAGGPPSFPPPDVTARHGRQDHAAVIVAIGDGSGFRTAGHLASYAGLAPATKSSGTSIRASTPPTAATACSNVPCSRPLSPRSAAGATCPRGSTTTASAPAADPHPGHPPPGETTRERHPRDDPHRHLLRTTRPSTSPPEHPTCPVTPAHRHGHPPSRPPARPHDTRSSRERHAPRDAPGNHHEPL

SEQ ID NO: 471172 - protein, 326 aa, unidentified
MNLPAVVLGVDIAKLKFDVCLIKENQKVKHKVFANTRYGFEQLVAWLNSHQVGSLHICLEATGSYGEALALFLHEAGNRVSVVNPAAVKAFAASRLTRTKTDKVDAELIARFCLAQQPEAWRPPAPEVQQLQALVRRLESLIEMRVAEENRLSSGITVNAVRQSLEEHIKYLVEQIKQTEKMIREHIDNHPDLKVQSDLLDSIPGIAQTTAALLLAEIVNIKQYKSARQVAAYAGLVPRERRSGSSVRGRVQLSKIGNARLRKALYFPAITALRCSDFFKVWADGLQARGKCKMAIIGAAMRKLIHLAFGVLKTGKPFDPNWAKTA

SEQ ID NO: 471173 - protein, 348 aa, unidentified
MPKLKQYVGLDVSLEETSIAVIDETDNLVWRGSVASTPEAIAAALRKHAPRAERIGFEAGQLSSWLYHGLKAKGCPVICIDARHAKAVLSLKVNKTDPNDALGLAQIMRVGWYREVTVKGHDCQALRALLVARAQIVSQITTVKNCVRGILKTFGHVLPKKLRATYIASAREIIEGHATLEPILMPMLRTLAATMEQLQVYDRAINQFARHSETARHLMTAPGVGTVVALAYITGVEAPARFSRSSAVGAYFGMTPRRYQSGEVDHAGRVSKCGDGMVRTLLYEAAKVLLSRSAKPSDLQAWGHALARRSGKKKATMAVARKLAVILHRMWTTGEPFRWTAAPAPTMA

SEQ ID NO: 471174 - protein, 400 aa, unidentified
MLLFFEVITMIFDGIDVAKDTHYAAVSDDSGAVLVKPFAFQNNAEGFCLLLKKLSEFDRSKLLIGLESTGIYSENLICFLYESGFRLAVINPIQTATLRKTAIRKTKTDKVDTMLIIKSLMVNSYRLYSQRDADSLKLRTLCRFRQNLKNSKARLKIQLAGYVNLVFPEFGKFFKSGIHIAASYALLKKYSSPKEIAALRTSTLCTLLSKASHGRFGKDTAEALKSLALSSVGVKNPYISIQIAQTIAQIELLEQQIKDLNSAIEEAMESINSVLMTVPGIGAVNAACILGEIGDIKRFSKPCKLLAYAGLDPTVRQSGQFTAKSTRMSKRGSALLRYALINSAWQLTLNDTTFKAYYDLKRSQGLNHYGALGHVAHKLTRVIFKLLTSDTPFNPAKLVA

SEQ ID NO: 471175 - protein, 347 aa, unidentified
MNSVGIDLHRNRSHIAVIDEQGELSLSRRIVNDRETFLELLGDLDGESQIAVEATYGWEWLAELLEDAGYDIHLAHPLRTRAIAAARVKTDAVDAKTLAHLLRADLLPEAYVAPRELRDVRELLRHRIALTRMRSAIKNRVHAILAKHGITRQHSDLFGKGGREFLAQLQLRDAPRRRLDSLMSLVEDFDREITETTKEIDQRAKADDRVDVLTQIRGVGRYTAMLIIAEVGEIGRFPDARHLCAWAGLTPTVRSSDGKARLGHISHQGSPALRWALVEAAQKCTTGGGPLREQFERITKRRGRKVAKVAVARQILTLSYYGLRDGEIRCLARRSRASAKEKLAVAA

SEQ ID NO: 471176 - protein, 316 aa, unidentified
MGNNDMPDLHFIGIDVSKDHLDVAVRPSGERMQFANQDDGIDQLIQRIRSFSSTLIVLEATGSYHRVLLSRLIAAALPAIAINPRQARDFARAIGRLAKTDAIDADVLAEFGEKIRPELRSVADEATQQLEAACTRRRQLVGMLAAEKNRLQSSPSSVRPQIKKHIQWLEKHIQQLEKDLDHQIRSTPAWREKDDLLRSCKGIGPTTSHTMLACLPELGRLTRHQIAALVGVAPFNQDTGRHRGRRHVQGGRTDVRSTLYMATLAAIRHVIRHFHQRLIAAGKLKKVAITACMRKLLTILNAMLRSHKPWNANFAS

SEQ ID NO: 471177 - protein, 349 aa, unidentified
MQFYTKNHQYYCGIDLHARTMYICILNQAGDVLVHRNCQSNADRFLSIIAPYRDDIVVSVECIFTWYWLADLCAQENIAFVLGHALYMKAIHGGKAKNDKLDSHKIALLLKGGMLPQAYAYPAAMRATRDLCRRRMHLARQRADLMAHIQNTVHQYNRPSLGISLGKANRRQDVAKHFPHSVVQQMVQLDLDLINVYDEQLGRLQRDLVKQAKKHDQRMYALLTSMRGIGPILALVILYEIQDIQRFPTSGQFLSYARLVRCAKESAGKKVGKSNKKIGNSYLRWAFGEAAVLFLKGNDPAYQWYLKKSSTHGKGKALAILAKRLGETAYAMLSKNQFFDEEKFMSHLR

SEQ ID NO: 471178 - protein, 351 aa, unidentified
MIIIGVDYHPSFQQISFLDQETGECGDRRLNHSDGEAERFYKELKERGVSVRVGLEATGYSRWFERLLAELGFEVWIGDAAEIKRQRGRKQKTDCEDGRLLLRLLLENRFPRIWTPNPENRDLRQLLWHRHRLVQMRTRIMNQLQAVAMNEGYRWKKKLFSEKGRALLEKLSLARWASRRRKELLELLDQLDPKIAELTAALEREAHQRPEVVRLMTHPGVGPLTGLAYVLVIGTPDRFPCGKKIGSYTGLIPSEDSSAGHQRLGHISKQGNALLRYLLGEAAQAAARCNPDWRRRYRHLMMRREKRIAKVAMARKLAVRLYWMWRNNWQYSQLVEFGSNAGKLGTGHGVK

SEQ ID NO: 471179 - protein, 315 aa, unidentified
MAMPVSVTKPIVGVDVAKNELMIYHAELDLLEAIPNNKAAIQKWLKVLSGPVAVAIESTNIYHLEFADLAYEAGCTIYMVGGYELSHYRKGVNVRAKTDALDARLLARYLKNEGDDLHPWTPPSPLYRQLLSLFRRRAALVQARVGLVQSWANEPLLKSAFAAQVKAMQQLEALVEKTINDHLKEAGLLGQLRRCLKVEGIGFLTGARLLTAFQRGDFRNADAFIAFLGMDLRVSKSGQKDGRRSLTKRGDPEARRLLHNAAMSASRTPAWKGFYEDQRARGFSTTQALVILARKLARVVFALLKGQSEYQPKAG

SEQ ID NO: 471180 - protein, 429 aa, unidentified
MQNESTPDARGPVFCGVDTHADSHWLCVLDWRGRRVLSRRFPADAAGYEALAGAIAAAGEPACVAMEGTSSYGAGLTRHLASLGMPVREALSPAGTQRRRPGQGKCDEADAERAARAAMSGSKLGTPKSQDGWVDGVRCMLAARSGAVKARTSAINTARSLLTTAPEGLRSRFRGMGGPRLMEELPSVRAEGALGAALGALADLWAAARDAALDMELAIEASLEENCPALLAMYGCGPVSAAKLAVAAGDNPGRLRSEASFAAICGACPIPASSGKTVRHRLNRGGDRQANSALHEIARQRVMRDPETAEYAERARGRGKSDREVMRCLKRYVAREAYRALMRPHEIRRPEDASELVAARRAAKVSQVRAASILGTSEKYISMLERGQRELKPIRRAYEAWVEAGLPLDWDRQAFEAERKMDSKKHLAK

SEQ ID NO: 471181 - protein, 375 aa, unidentified
MERAYFIGMDVHKQTTEIAVTTKGGRLSRRERCQTAIPELRAILERTRRPRYAVLEEGPLADWLLQNLEGSVDELMICDPRRNNLIAKDSDKDDPIDAEKLAQLYRGGFVKPVHHADSRERMLFKERVALYHDRVRNRVRQANRIISQFSRHGVMLTETGFANAVERATALRQLPRGAMVREDFEVLLLGYDVAVEQEDRLRGALTRVARKNETIRRFTAIPGVKWIRASTFYAYVDTPWRFKSKSALWKYLGIGLERRTSGQGPVKLRVARNANRCLKNMILGAAKTAAIKKDGNPFGEQYRRYIDEGLTPKNARRSVARSQAATMWGMWKNGDAYRPELVGPILRSEEMNEGHDRSLHLRGRRSSPGGIGPVR

SEQ ID NO: 471182 - protein, 344 aa, unidentified
MNIASIGIDLGKTTFHLVALGERNKVLVRKKFSRATLLTYTANLPAALIGLEACAGAHFLGSALRAQGHQVRLIPAQFVKPYRKSNKNDFIDAEAIAEAVTKQNMRFVQIKTQEQLDWQAMHRVRDRLMQRRTALINEIRGFLLEHGLTFAARPIYLRKNLPTVIEDAEQNLSPLLRWLLARLWQEWKQTEIDIKAITDEIERISNHDARCRRLRQIPGFGPLVSTATVAAIGNGSAFRRGRDFAAWVGVVPRQYSTGGKQRLYGISKRGNVYLRRMLIHGARAVLLRVKYDTGGFGQWVHRLAQRAPRNKVVVAIANKLARMAWAVLSSGKEYRHQPLQLAAA

SEQ ID NO: 471183 - protein, 391 aa, unidentified
MIYVGIDVAKDKHDCFVTSSDGKVLFPVFTIQNNREGFDDLFSKIQSVSSEVSNIKVGLEATGHYSYNLLGYLIDKGLTTYVINPLHTNLYRKSLSLRKTKTDKVDARTIAMMLMSDVNLKSYSDTSYHNEALKSLTRYRFDKVQERARLKQSVSRLVTILFPELEKLVPSLHTASVYALLSELPSAGKIASCHLTHLTKLLENASKSRYRREKAIEIRDAARISIGSNMPAKSLELRHTLRLIRELDSEIAEIESEIKRIMDQISSPILTIPGISYRMGAMILAEIGDFSRFDSPDKILAYAGASPSTYQSGQLKSSYSHMEKRGSRYLRFALINAAKYVCHWDETFGAYLQKKISEGKHYNVAIAHAAKKLVRLIYAMEKSGMPYIKTA

SEQ ID NO: 471184 - protein, 316 aa, unidentified
MSDALYVGIDVAKDSFDVASNPAGLKLSLPQDPKGRQRLLDSLQVHAVALIVLEATGGYERSLVAELLQAGYNVVIANPRQVRDFARGIGKLAKTDRIDAEVLAHFGRMVQPKPRSQPSQQTTNLAELVTRRRQLSDLSTQESNRLPMARHAKVRKSLQKIIRALEQQIIDLDKLIRDNIESDDGLRRKDDILQSFKGVGPGTSAMLLSHLPELGRLNRQEIAALAGLAPWDIKSGAWAGKSRIRGGRKEVRSLLYMAALSAIRSNQIIKKFYQRLTSQGKAFKLVITACMRKILVILNTLVRNNCLWSPHPAENA

SEQ ID NO: 471185 - protein, 365 aa, unidentified
MRKLEDTQSYKLSFKGENVYIGLDVHLKQWHICVRTRHISKKPFSQPADAGALRAYLDREFPEATYHSAYECGFSGFSAHRELLKHGIDNIVFHAADISDSQKERMRKTDAVDCVKICRNLMEGGLTAIFVPDETVESHRELLSQRNRLVTARTRLKNRLKSSLHRHGIGYPEEFKSATRHWSRAFLGWMEEEVAPRLAPVSGDIMLDNISELRHVSDLVKKADRDILTKLLPRYKEMDGLIRSIPGIGRLNSAAICAYVVDINRFESDDHLAGYVGLVPDVRASDDKKTTLGITVRGNRMLRSLLIESAWRAVALDPAMGMVFTNYKKRGLKSNNAIIRIARKLVNRIRYVLRTGNKYENGILK

SEQ ID NO: 471186 - protein, 307 aa, unidentified
MAINIGIDVSKHTLDWCPGPSGKIQQTRNEPRCMASLVQRVSAVEPERIIVESTGGYERKLVLKLAEANLPVIVVNPRRVRSFGEGMGMLAKTDAIDAKLLALYGEKAQPPIRPILQGRDRLLADLTARRRQLIATVVSEKNRRETAARPVQRSIATLLRVLEREIKRIDQQIDQSIEEDVDRSELSELLQTAPGIGPGVTRTLLIDLPELGHLGRREIAALVGVAPFAKDSGQYRGRRSIRGGRASVRTALYLAAMTASRFNPTMREVYQRLRESGKPPKLAFIAVARKLLIALNAIARERRAWQS

SEQ ID NO: 471187 - protein, 336 aa, unidentified
MNDATWFLGIDVAKRKLDIALLVTDKIKSKVFDNNTSGHAALTRWLIERGAIQSHTHICLEATGPYSEALAIALVDAGWHLSVVNPARIKGFAQGELARNKTDRADASMLARFCAAMRPGFWTPPSSEWRELRGWVDRLQALKDMHQQERNRLEAHLASGQAALVTAVQTHLDWLTKHIEQLERNIDDHIDRHPELKRDAELLHSIPGIGNTTIAKVLAYAGDVRRFASAKALAAFIGVTPRQRLSGTSVKGRSMMSRTGHADLRRALYMPGLVARRHNPLLKVFGDRLSAAGLAPKAVVGAVMRKLAHLIYGVIKSGQPFDPKFSTARLDFQDGI

SEQ ID NO: 471188 - protein, 341 aa, unidentified
MQRTNYFIGIDVSADTFSASTISNPENVIFFQDDVSNTYDGFEQLNQQIIQHKIPAKETIICLEATGVYAEKLCYYFASKSYRLWLAAPHKVNHATKDSPRKNDHLDAQRIAEYAYRYIDKLNLWQPRAEILEQIKVLLSTREHISEQLIGNQNALKALSRKYYQTPLANKVYQETITKIKEHIKEIDKEIKSLIDKDNSFHQYVNLAKSVPGVGLLLAANLLVLTNGFTENVNYKKIASYAGICPYEQKSGSSLNKKPRSRRCGPHKLRKLLYLASLSVRTHNLAFKKYFLRRVQEGKPNRLILNNIANKILKLACAVINSKISFINNYQSVNPMFLKTA

SEQ ID NO: 471189 - protein, 445 aa, unidentified
MSESLISAASEPEWAAFAAIDWADQKNFWRLVPAGSQHFEQGELENTPEAVEAWAAGLEQRFGGRPIAVCLEQSRGALVYMLTKYPHLVLFPVHPTTAAHYRETFCPSGAKSDPNDTASLLDLLLRHRERLRPLQPDTVETRLLHFLVEERRRTVDEKTRQSNRLTDCLKLYFPQILRWFDDVTTPLVGDLLGRWPSLDQLQRAHPGTLRRFFHEHNCRSQQLMEERITAISQAVPATRDQAVLEAGTMMARGLVALLAALRSNIAAFDKRIAELVQAHPDGAIFASLPGAGPALVPRMIAAFGTRRDRYQNADEMERYSGIAPVKKGSGKTELVHFRFACPKFLRQTFHEFASHSIEQSEWAKAYYEHLRNDEKKDHHPAVRALAFKWIRIIFRCWKDGKPYDEQVYQQSLRRRGSMLGAALASATSVGWKPIAGFQKLSENNA

SEQ ID NO: 471190 - protein, 349 aa, unidentified
MLIIGCDYHPSFQQIALVDTDTGELQERRLEHREEAEKFYRGLGVQGMKVRVGMEASGHARWFERLLGELNFELWIGDATEIARKRERKQKTDRQDAQHILRLLLKDDFPRIWVASWENRDLRQLLWHRHRMVQARTRIMNQLQAVALNEGLRSKKRLWREHGREQLESFRLAPWASRRRHDLLELLDRLNPTIAELSQAIEQEVEKCPEAQRLMTHPGVGPLTALAFVLIIERADRFQCGKQIASYLGLVPLEDSSGNRRRLGHITKQGNSLLRFLLVEAAQVTVRSLPEWRSKYFHLAMRRGRKIAKVAMARKLAVRLYWMMRKEWDYEQVKKFGSHAGQPGHRDGD

SEQ ID NO: 471191 - protein, 426 aa, unidentified
MTNQVTNTFERVIGFDSHPDSFTAAILRGSTPAQALTEKVFNQVPMSQLISWAKKHSTAQDLFVLEASGNSFQVVRSLAASQRRALVLESCQLGKLKEAHANNDRISAVRIAKAYLAGTAKTVWVPDPKTQERRDCFHAHRKATKRTTQLRNRLGSYLSDQGVRLKKGTRLAQSDTAAQAQIRSAKEWSPRQWQIIEGMLLELRQAEQQRAYWRRLIAQEVLHDPDLLAIVRLCGVGDRIAFALGALIGDIKRFARPGSLVKYIGLNPAFDDSGQGQWRGGIGGHGRKDLRCLLIEAAQSILRSKDPLAQWGKRLMARKSSAKLAVAAMARKLTVAIWYLMRGQWTPLEEMDQLLERKVSKIISALGPEGLKELRKTRRQFRDQVHQLLKHGKTYVLRGTVYVQDASGRVTRGLKAPAHAVTLAAE

SEQ ID NO: 471192 - protein, 360 aa, unidentified
MKTLRNSEAKTIPSRTTVGLDVGDRHSWFCILDEAGEVVAEGRVRTTSEALNEHFTRWARSRLVLEAGTSSAWISRLAMTAGHEVIVANPRELRKIHQSDRKNDRSDAQVLARMARFDPQLLAPITHRSAAMQNDLAVVRARDVLVRARTQCVNAVRGLVKTAGGRLTTCGTECFARKAVAQLPSGLESALGPMLKTIESLTEQIRAYDRVIDELASRYPVTEVLRQVTGVGALTAVTYALTLADSSRFGSSRDIGAYLGLVPRQHDSGNHVSQLSITKAGNTLLRRLLVGSAHYILGVHGPDCDLRRYGERLMTRGGKNAKKRALVVVARKLAVLLHRLWVNGEVYDPLHSEQRSLQAA

SEQ ID NO: 471193 - protein, 462 aa, unidentified
MQDKRNHERVENRRGQLEGLPVIRRRMAGIDLGSEQHWVCAPTADGNGREIGTFGGTTPELMRLAEWLKERQVESVAMESTGVYWIAPHEILEAQGLQILLVDTRQLTQVPGRNKKTDPTDCEWIQRLHSCGLLRGSFRPQPEICMLRTLVRDKANLVAESSDWLRRMQKSLDQMNVRVHRAVADINGTTGMAILRAIAAGERDARELARLRDRRCRKSEEQIAQELSGHWREDHLFSLQQALKMYDAIQERIAAYEQEILQKLHRMEREEQRGQTAPPLQNNRKARTIRHRGQEAKRQALYRMSGVDATQIDAIGVETVEVVISEYGPDLSRFPTEKQFISHATLAPHVTKSGGKPVKKRKRNSASTRVAAALRMAALSLRHSETALGAYYRKIANRIGGDIAVFATARKLATLIYRLLRWGQPYVDEGAQAYEGRYRKQRIQSLAAKANALGYQLAPVTA

SEQ ID NO: 471194 - protein, 344 aa, unidentified
MICGVDVSQQSLEVRIEQDGPGASFSNTKAGIFQLAEFCRIHQVHLVAMEASGGYERLPLLLLSAEQIPVAIVNPRAVRKFAEAMGYLEKTDALDAGVIALFARTRKSQPSSPGSAQLQHLRALVTRLRQLTDLQTAQRNQQLLVTDPTVQQLGQQLLQVVKTQIRSLEKAIAQLIDADPLWQQLNQSFRSIKGVASRTVSRLMAEMPEIGTLSNKKIAKLAGLAPLACDSGKMRGKRVIAGGRRPIRDTLFMVAGVVARFHPDFIAFRQRLTAAGKAKKVVRVALAHKLLTRLNAKAREVRLQFTQITPPAKPAENSLPRRRTCGKAENARRFPRQLDRKSVV

SEQ ID NO: 471195 - protein, 353 aa, unidentified
MKKYIGCDMHKKYSVFVAMDEKGHLEPAVTVSNDLLELRSYLATLPAGTPIAVEATGGWYWFVDELEQAGLEVHLVNPLEAKKRMRGRNKTDKLDAAGLAMLLRNGTLPEVWIPPAQLRDLRGLLRARLGLRNHTTILKNRIHGALRRYGQYEPGEPKNLFAGKGRVHLAVYVGSLPQETRLGTRHEWALVDEVEEHIKALEMRIRLRLGQLGWVRLLKTLPGVGDILSATIYLEIGEVSRFASPERLASYAGLTPTVQASGGKVWLGPTSPVANHYLKWAFVEAANCVVMRKQKYQNTHAVQLYERLRASKNHGKAAVALARHLAEASWWMLSKKQAYREPAPASMSSSKNG

SEQ ID NO: 471196 - protein, 343 aa, unidentified
MHVNTIGVDLAKNVFQVHGVDSAGKVVITRQLRRKQVLEFFSKLPGCLVGMEACGTGHHWAREISKLGHTVRLMPPSYVKGYVKRSKNDAADAAAICEAVTRPSMRFVPIKSTDQQAVLMLHRTRDLLIRQRTQLINALRAHLAEFGLVAETGREGVAQLGAIITDEGNREALPSAMKQALQAIVDQLAALELQVGALDRAIHAHHRANDMSCRLETVPGIGVIGATAIASTVADPSGFKSGRDFAAWIGLVPRQHSTGGKERLGGISKQGDRYLRRLLVIGATAVVRQARLHPQKHPWIMRLLAKKPAKLVAVAVANKMARIAWAIMAKGGYYRAPELAVAT

SEQ ID NO: 471197 - protein, 403 aa, unidentified
MIFAGIDWAEDHHDVCIVDADGRVLWRRRIGHDPAGVRQLREAIAHIEPDPLQVAVGIETGRGLLVGELVQAGYVVFPINPKAAERFRDRRAVSGRKDDRLDAEVLAQAVRTDRASLRVLLPDSPQALEIATLARDHANLTRQQTRLRNQLRSALLEYFPAAVGSFELGAKSTLAFLERYAEPETAARLSVAAVARFLRSQRANRDANAKAEAIVAALRAPALRARPEIARAKARLVRTLCTQLLALHPALRAYERELADLLKTHPEGEIFLSFPGLGVVLASRVLAGTGDNPRRFATGYGPYAGTAPIVVQSGKRRVVKARVAAPKYFRDAVQQWADQARRWSPWAAAYYARHRARGHLHNESTRALADQLLRLLFDVRRLGVPYEESVHIANVERAAARAA

SEQ ID NO: 471198 - protein, 367 aa, unidentified
MEKKIAYIGIDYHSETLSLAVIVDGKKDFFDSITMKNNDKIILKYLKKLSKEFELKACYEASCNGYTFQRKMKNWGFHCDVIAPSLIPKKPGDKRKNDYRDARNLTQLYANGQLTIVHPPTEEQESIRSIIRCRLSLKENEKNVKLQINSFALSHGFRWPQSKWTVKHRTWLSTLKLRDDYSQQVLAEHLGHLEYLSVRISSLDEVIREIAGSEIYEPSVKKLRAFKGIGTLSAMILITEITDFRRFPNPRSLMAFLGLIPSEDSSGNKQKGGAITKTGNHRCRTQLIESVQHLMKKPIISYKMKQNLEQADPASANIAIKCMHRLNKRFWALTMKGKSRNKAITAIAREFVGFIWAMMTQPEPATI

SEQ ID NO: 471199 - protein, 465 aa, unidentified
MARKSKNVKSKDHKRLPRSLKTIYANAAGIDLGSREHWVCGPPREDGTPNVERFGTTTPELFRLAYWLKEQGVNTVAMESTGVYWIPLFEILDSRGLEVLLVNARHISNVPGRKTDMLDCQWIQLLHACGLLRGSFRPSDDICWLRALIRERNTMVEQRSDWVRRMQKALDQMNVCVHHAVSDITGVTGMAIIRAIVEGERDPLALARLRDARCRKSEKQIAEELTGNRRPEHLFNLRQALKMYHQLCAVIEDYDAEILTYITKHQPKDAASHPAPAHSSKSKARALAKRGQEPLRQALYGFSGFDLTTIDGIGVDTASVILSELGLDFSMFPDESHFVSYLRLAPNLSISAGKKVPNKFKPTTCTRVSTALRMAALTLRHSKSALGGLYRRIAWRKGASVAIFATARKLAQLIYRLVRYGQAYLDTSTEAYDARFNQRRLRFYTKALKEMGYTLQPLTENALTT

SEQ ID NO: 471200 - protein, 416 aa, unidentified
MEDDFGMRALYRRVAGIDVHRMLHVVTVLLEQPDGSMQRQTRQFGGFRRDCRELAAWLAELHIELVVLESTGIYWKSVYAHLENAGVNAWVVNAHRVKHVPGRKTDVADSEWLAVLARFGMVKASFIPPKDLRELRLVSRYRRKLNAMRASELNRLHKVLDDGGIKLGGVVSDIDGVSARAMVKALIAGQPIEHMLGLARGKLKQKREELGASLEGDLSARHLFVLGHIEAHIETLQRELAEIDNYMLNALQPYAWAHELLQTIPGIDEIAAALILIEIGDDMARFGRAQSLACWAALSPGNDESAGKRKSARTGHGNSVIRCILCECANAARMTKSTLAAKYRSLMVRKSHKKAIIAVAHKMIRLIYLMLSRRQPYIDQGINYAAMSAKKNAPRWIKQLKCIGRWPSPKPAAPSV

SEQ ID NO: 471201 - protein, 359 aa, unidentified
MKKKWLWAGIDLGVETASVCIIDDTGAILHEGDCPAATKNVRRELACFRRTRFASVACEAGTGMHVARGLRSLGYPVELYEARQLSKFLRIRRNKTDAGDAQGIAEAARIGASTVSKVYLKSIDSQALQSLLAIRRHMVRQRVAAVNMLGRQIELFGGRLHCKPLRGEVRPALDAEIKTLFRNVSSDVVGQLRYLADHCDRLATYQHVLDLELKHAARDNEACRRMMEIPGVGPLCALTFYAAVDDPHRFSRSSEIGSYFGLAPKVHESGLTSRKARISKMGNKSVRSLLVHAATLFIHHRGPDCALRDWAMRIEQRRGRAPSRVALARKLAVIMLAIWKSGDHFKPMEILPFARPSSG

SEQ ID NO: 471202 - protein, 425 aa, unidentified
MLKIENTSEYNETTDWQVSKILLNREVSTMKSNTQNAKIEAITEKTLVLGIDVGSETHYARAFDYRGIEYSKKPFKFSNTEAGFVTFKEWILDLKERHEKDKVVLGMEPTGHYWFNLGKFLQDNEMKPVLVNPHHVKKSKELDDNHPTKNDRKDPKVIAGLVREGRYMIPYLPEGVYADLRTASNIRFQLQAELTRIQNRISRWFNIYFPEYKTVYGKPDAKSGILILKEAPLPEDILTLGIDGVNQIWRDAKLRAVGKARAKTLIEAAEHSVGSKEGTVSARMEIRMLLEDYESRNIRLQEVMALIEELVAQIPMAEKLLEIKGVGIRTVSGFLAEVGDISRFNNPKELQKLAGLALVENSSGKHKGETTISRRDQKRFRYLLFEVAMSLVAKLIRAFYAMLAKGVNYDPKKMMGDSERPAVYL

SEQ ID NO: 471203 - protein, 359 aa, unidentified
MKIVGCDFHPSWQQVAVFDPESGEWMERKLMNGDGEAERFYRELEAPALIGIEACGNSQWFIELAEGLGHVVWVGDAAQIRASYVRRQKTDRRDAGHILKLLMEDRFPRLWTPTSEQRDMRQLLIHRHKLVEIRTRVKNGLQHLALNKGLQKKNALWSVRGRAELEKLPLAGWTLRRREDLFGLLKELNRTLEQLDEAVERTAQDHPQARLLMTQPGVGPITSLAFVLTIGDVSRFRHSKQVSSYLGLIPREHSSGGKQRLGAISKQGNSFMRQLLVEAAQTANRLDEGYRRQYQARCHHKAKGVAKVATARKLAVRLYWMLRQNVGYPEIALIESSPRVPLIGASQSVTLNERSRIQQ

SEQ ID NO: 471204 - protein, 439 aa, unidentified
MKALSGYFEGPGGPYAAIVGIDWADQSHRVCLLCEGSAKEERMQIGSDPASVIKFARWLHARVGSGKVAVVSEQSRGSLIYALLDFAFIDLYAINPQAAAKYRKSLYPSGAKSDDIDAEGLMRMLFTHRDRMIRVRRNDPASARLDAYSRHRRGLVDQRVQRCNQLGSYLKQYYPQALPMLGDELFAPINLAFLSRWPCYAKLARTREDSLRRFYHGQGSRSTAAIQRRLEAFGASHPLSADPMLDEICAMKVHDCIAQIRLLNRQISQIDKQLHKHFHAHPDRAIFASFPGAGPAMAPRLAAAWGTQRERYDHVTQAQAYSGIAPITVQSGNTWRVFTRRFAPVFLKQTFHEWAGLSIQYSDWAKACYRLMRDRGKSQHEAKRALAFKWMRIMFRCWKARTCYDESLYIQALIRRRSPVVDKMVEMGLLSEKEKLLCA

SEQ ID NO: 471205 - protein, 377 aa, unidentified
MSQVRFIGLDVHAETIAVAIAEPTGEVRPVGVIPNRPESIRKLVKKLGPAEQLRVCYEAGPTGYVVYWQLAALGVTCEVVAPTLVPVKPGDRVKTDRRDALKLARSYRAGDLTPVWVPDAAHEALRDLVRAREAAKKDQLRARHRLGKFLLRQGRRPPTAMKAWTQGHLTWVKSAVHFDHAAQEATLLDYLHEVDHLAGRIERLERAIDAAVQTAPVRIRAVIEGLQALRGIALVSAVTIVAEVGNLSRFVKPRQLMGYSGAVASEDSTGDRIRRGGITKTGNAHLRRIVIEAAWAYRHRPAMGATLRKRQAPVDDEVKAIAWKAQHRLHARYRTLTAKGKTKQQAVTAVGRELLGFIWAIGVTVEAKGHHAQPAAA

SEQ ID NO: 471206 - protein, 319 aa, unidentified
MLIGIDVAKAELVIASRPGGERWTVANDERGMRTLVDRLQREPPELIVLEATGGYELLCVAGLVAASLPVVVVNPRQVRDFAKATGQLAKTDRIDADILALFAERVRPEVRVLPDADTQELDALLSRRRQLLEMLQAEKNRLGQVFGRGKRPVRKSLQTHIAFLERELRIADSDLGRMVRESPAWRERDDLLQSVPGVGPVLSLTLLADLPELGRLTRRQIAKLVGVAPLSRDSGTLRGRRFVQGGRASVRGVLYMGALVATKRNATIRAFYQRLLAAGKPKKLALIACMRKLLTILNTMVRMRQHWCADYSAGALVTA

SEQ ID NO: 471207 - protein, 329 aa, unidentified
MKKNWFIGIDISKKTLDVVIYDQVNKKPGKHFKVLNETKGFKELLRFLKKEGIKFAETFICLEYCGIYGLEIGFFFEGKIDFTFCAPLQIKRSLGMTRGKNDKLDAAKIARYCYMFREELKASSMPTQTMIKLKSLMSERNRVTKGLKTEKIVLKELSKQLDKKSLKRTQSRLKMFTADITTIEKEITELILKDNKLSKNYILLLSITGIGMVNAVMMILCTNNFEGINNARSFACYCGVAPFEYSSGSSIRGKTKVSNLANKRMKADLTNAARSALIYDPKIKIYYKRKRAEGKAHGTVMNAIKFKIITRAFAVINRQTPFVKLRQAG

SEQ ID NO: 471208 - protein, 357 aa, unidentified
MSYIGVDLHSDKFTAAFRDKMNKDILKSYYIDENEIDNFKKSLKKDDYIFLEASTPTFAFTDLLKDTVKKTIVIDPFKFGAIADSRKKTDKIDARQLAKMGKYHVEIDKNFLPEVYVVEKRIRKLRSLFTTYRLLNKEITMIKNRIHSLFKQNLKPYSKKHIFDEIMTGLEPINLDEEYKIQVEVLFDVLSKLEEKKVEIKEKILLTGEPFIADIDILVSISGISVFVTLGLISDYATIERFKNAKQFSKYLRSTPKSEESNKKVRTGKTQKNGRKLSIELMLQSINHFRRESLFIDKFYRRLKKGKGGCKARIAVVRKMFVAIYFMLREREYYRYMNKKLHDKKMREYKRFLAKNK

SEQ ID NO: 471209 - protein, 349 aa, unidentified
MVTVGVDAHKRTHTIVAVDGNGAEVGQRTVAATSAGHLEGLRWASQWPERRWAIEDCRHLSRRLTTELLVAGEAVLRVPTKLMAAARRGARTRGKSDPIDALAAARAALREPDLPVAQLDGPARDLRLLVDHREDLVAERTRIENRLRWHLHELQPGEEPPTRSLNRHATLRALEATLAGQPGVVARLARELVVRCRDLTVAINALEREICERVSGMAPRVLALLGCGALSAAKIVGEVGRISRFRSRNAFAMHNGTAPIPVWSGNHERFRLNRGGNRQINCALHRIAITQMQRPGPAQDDLTRRRAAGDTKTEAIRALRRRISDEIYRRLRADEAAANTQLRDFLAAA

SEQ ID NO: 471210 - protein, 340 aa, unidentified
MDKTLPAVGIDVSKLSLDVRVDAQERPRRSPGHLANSGEGFLQLQGWFQEHGMPRVHACLEATGTYSDAIARFLFEQGHQVSVVNPARVAAFRTSEGIRTKTDRQDALVLARFCTQKRPALWSPTPASVQQLQVLLGRHEEVQVTCRQERNRLENHRLDPLTRQEIQQHIDWLQTQSAHALQRADNLLLEHGELRQACAHLDSIPGIARLTAMRLYSVFFDQQRFDGAAKLVAHAGLCSAKEESGTSVHRKASISKKGNALVRKWLYMSALAVKRCNPDFRQWAAELKARGKSGMCIVVAIMRKLLHLVHGVLKAGEDYNARKAFPSHYGRPTPPVEESA

SEQ ID NO: 471211 - protein, 343 aa, unidentified
MKIYALGIDLGKTVFHLVGLDASGQVVVRKRCSRTQLLAFTANLQVQLIGMEACSGAHFLGRALRAQGHEVRLMPAQYVKPYVKTNKSDYIDAEAIAEAVQRPRMRFVPIKTEEQLDLQALHRVRERWVMRRTAVVNQIRSLLLERGLTLPKGRRYLEEQLPRILEDAELNLSGSFRVLLSQLKLELEQLAGRIEQMDRVIQKMAKENEDCQRLTEIPGVGPVTATALIGAIGNGSAFGKGRALSAWMGIVPGEHSSGGKQKLLGISKRGNKYLRRLFVQGARSVMQQRHKQAPGLRDWLARLLGRTHQNVVVVALANKLVRMAWAVLCKNERYRAPILAMTN

SEQ ID NO: 471212 - protein, 428 aa, unidentified
MLKINPLSTLYVGIDVSSKSNYVCALDFYKNKYINSSFANNQPGAEELAQKILECLKEHPDLNTVVAALESTSVYSIHIANYLSSCEELLHLKLYVFVINPKCTANYKKSYIGVGKSDPIDAFVIADYARAGNIETDPWRGSQFLALKRLTRHRLHLDECMTREKAYLVSNLYLKFSELQMLEKEDQPFCDIYGATSSSVLTEYLSPEEIVSSSEENLISFLAEKSRNRIKDKSKTADLLKKAARDSYRLDKTLYEPLNVSIASSFNCIETFKKEIKVIDAAIEREIKGLNPNAFIILQSIDGIGPVFAGGIVAEIGDISAFHSSDALAKYAGLMWKSNQSGDFDGEDTPMSKAGNRYLRYYLGEAANSMRKHNVEYGAYYRKKYDEVPKHQHKRALALTSRKFVRLVYGLLARNQLYSGVSLDTSNE

SEQ ID NO: 471213 - protein, 339 aa, unidentified
MSRLCVGIDIAKRTFVAALWHGDTGQELGEFPNTPAGFAQWLQATQQATGSLPGDAWSLVLEPTGGYELAFALFAYEQGIRVSRPNPKQVRDFARGLGQRAKTDRLDALLLARYAAERKPSRWAPLAREVSELESLLERQRELEAMVAQERRRQQALARRPGVAARVPESLQQVIESLEGALKEVQEAIREQLEQHPQLQAEAKQLQQVPGVGARNVLWLLVLVRRWHTLTEGKGAAKGLVAFAGLDPRTHESGTSVRGRGTISRMGDRRIRPQLYMGALGGVKGNNPLRAFYQRLVKKGKAKKLALVACARKILVWAWAVYRDQTEFRKSTCQAEPAA

SEQ ID NO: 471214 - protein, 404 aa, unidentified
MNAVGIDVSKGKSTVAVLRPYGEVVVSPFDVAHTGSDLRALADLIKKLPGETKVVMEATGNYFESIARYLHEQNIFVSVVNPVLISDFGGNTLRKPKTDKKDSVKIASYALTYWLDLKEYTPQEDLRKSLKLLNRQYQQSIKLKTMMNNNLISLLDLTFPGINKLFTSPSRESDGHEKWVDFVLEFSHCDMISKLTIKAFAKKYKKWSDKNSYHFAESSCDKIYAFAKDCVSSVSSDKAIVFSVVQAAKMLISATENCHAIQSEMNRVASKLPEYDTVMNMYGVGKAVGPQLMAEIGDPRRFHSRKAITAYFGYDSENNDSGQKTTRSNPMTKKGSGALRRTLFIIMQVLLQTKPQDNPVYDFLIKKKSEGKHYYSYINAAANKFLRIYYARVKEVLNVSEQMT

SEQ ID NO: 471215 - protein, 356 aa, unidentified
MKSIRESKVINFQGQEFFIGIDVHKNNWRVTIRFNHMELKTFSQNPSPEDLYHYMNKNYPGGCYYSVYEAGFCGFWIDRELNRMGFNNIIVNPADIPTKHKEKDQKRDPVDSRKLARELENGSLEGIYIPTKEQQSLRSLSRLYYQTIKKRIQIKNRIKSYLHYHGIKIPLHSDIKHWSGAFMQWLKTIKMDKDNDQYYLDRQIKNLEYHRKETLELLKRIKAYSIHNLIIQCIQSIPGIGILTAFIIYAELMEMRRFKNLDKLASMVGLIPSVSCSDEKEKNYGITMRYSKYIRCLLIESSWISIRKDPVLTLKFNEYIKRMSKQKAIIKIAKKLLSRIRYVWLNQQKYVLSVVE

SEQ ID NO: 471216 - protein, 467 aa, unidentified
MAARKQRQKRMSAQVVEDEDYQLRYEVVAGIDVAKESAVVCVRMPPAEGRKHRTSHLQAVPATVPAITGLAAELTAAGVQMVSMEATSDYWRIWFAVLEEAGLAVQLVSSSQARNLPGRPKTDKEDARWIARLTEMGLLRSSFVPPPEVRALRVYTRHIWDLTADRTRYWQRLEKLLEDALCKLTSVVSRLAGHQTARAVIEAMIAGERDPRALAALGQGRMRNDKLPALAEALSGMRFGPQHAHAAASLLRAIDLLDAELRDLQERVTAHLAAIPGSWGVDADGVTGPEAGRAADAAALPAAERLDEIPGLGREAAAALIAEIGLDMSRFPTPEALVSWAGLTPTARQSGPRSGRGKKGHGNTYAKRIAVLAAYAAANTDTFLGERFRRLSSRPGGGGRKKAGCAVGRSILIIVWHLLNDPAARYRDLGSDWHARHTDRSRKARNARRQLEALGYDVIITLREDAA

SEQ ID NO: 471217 - protein, 343 aa, unidentified
MQEITTIGLDIAKSVFQVHGIDASGAVITCRQLRRRQLLPFFKKLPRCLVGIEACATSHHWARELEKLGHEVRLMPPRYVKPYVKRNKNDAADAEAICEAVTRPTMRFVPIKTPEQQSVLMLHRTRQLYVRQRTTLINAMRAHLAEFGIVAGIGRNGVEKLLELITRGEDERLPSAARECLMALAAQLELVKRQILEADRRVRAWHRTSKTSKRLEAIPGVGPLVATALVASIPDPHVFRSGRDLSAWIGLVPKQNSTGGKDRLGSISKAGNRYLRQLLVVGALSVIRRAKQLGYTRHPWLVRLMARRSVKIAAIALANKIARIAWALMARNERYQTPPPQSA

SEQ ID NO: 471218 - protein, 350 aa, unidentified
MTISHYIGFDVHKKSVSYCVKTADGRIVEEGKLRATHEALRQWASQRPEPWHGAMEATLFSGWIYDTLQPFAAKLQMGHPAQMKAIFASKKKNDKLDARKISDLVRVDLLPACYVGPPEMRELRRMLRYRNLVVAQAVQMKNRMSGMLMEVGAAYSKQRLHGKEYFSELLDQLEEVPESVKDLLRLSRGALDLFESVQRQLLDRLRKEPLLRQRVELLRSIRGVGAVTALTWALEICDPQRFASIGDAVSYCGLTSALVESADKQQRGPISKQRNAHLQTVLIEAAKLAPRWNPQLAAVHERALQHGHRNRATLEVARKLVAYLLAVDKSGQPFQVRTAPTSETEAQKVA

SEQ ID NO: 471219 - protein, 349 aa, unidentified
MEKITTVGIDLAKQVMAACGMDAQGRVVMRKVLRRDQLLRWTAALPSSVMVMEACGGAHHWARALAQQGHTVRIIAAEFVQAFRKSGKNDANDAEAICTAARQPTMRFVAVKSVEQQAALCVHRLRQGLVEERTAVINRLRGLLTEFGVVAPLSPEKLRRELARCQDPEDTRLPATVRQLVGDQVFALDQLDARMASYAAMISTQAQQSEIAQRLQTIAGVGPTTAAAMVATVSDATDFRNGRQFAAWLGLTPRQHSTGGKTRLGRITKRGDAYLRTLLILGARSTLQSALRKPPEARHRLQQWIVAVLGRIGYHKTLVAIANKHARIIWALLVKGGGFDVRRLVQQTL

SEQ ID NO: 471220 - protein, 387 aa, unidentified
MPEDAPRPAQAAIRTDLGAIFVSLELSRRAWLVTSLSPGGGEKMSKHSVQAGDIAGLLRRFAQLKEKARARTGRDFPVITIQEAGLDGFWIHRVLQSEGIESHVVDAASILTSRRRRRAKTDKIDGETLVRTLLAYKRGEPRVCSMVKSPTREEEDRRRICRERRALVAERVQHTNRIKGLLFAQGAFDYEPLKRNRRAHLEDLKTGDGRPLPVNLKAQISRELDRLEVVLQQLQTVEAERDALLEPASEASPAPAAMLSQLKGIGPEFATILYTEGLFRGFDNRRQVAAYAGLAPTPWQSGSVDHEQGVSKAGNPRLRTTMIQLAWLWLRHQPDSALSRWFQDRVQRNGGRMRKTTIVALARKLLVALWKYATSGVVIEGAVLKAA

SEQ ID NO: 471221 - protein, 465 aa, unidentified
MTVRSVGIDFHQGLHRVRCLDEQAQACDGFGFQTTPEGLITLEERIFKDSSNPIIVFEPAGIPWLTVAAYLRSRHPDCRLVKAKMQKVAALRKYLKGPVKSDRIDALTLAKMPFIDPEQLEEVYLPSAEIHALQRLTRQRKRLQSDISGRKVRIEAIIDGYLPGVRKTFSAPWSIQFREFLRSRFNPFGIVRDGEKTFVSFLTKASYREKVSKTESQHIFQACQSIAAICKVSETVSAINEDFFVELQDEVTRELRLMEAEEAESELLEQRISEIYHKLHPSNNLCTIPGVGEHTAPIFLASIGDPTRFRNQSSFANWTGVVPRSRQSSNMEAKGLRMTKAGPSIMRLALFQSGDIGRRWDPQMAAIYYRQMVNHGKNHKQALGAVMSHLGARVWKVLLEDRPYELKDMQGKPITRQNARSLILTKYHVPEEVRKEKRRRMNKTGVVRETATNSICETAKTPQPA

SEQ ID NO: 471222 - protein, 408 aa, unidentified
MKAEEKKRSASCYRGLRTGVRRATCRAPEGDSLQSQRRQTMSEAITSFVGLDVHVDSIAVGLAPEGREEPRFLGTVVPQWAALSKTLSRLGPPQALKIVYEAGPCGYTLARQLRAHGYACEVIAPAKIKRAPGDRIKTDRRDALLLARAARAGELVNVTIPDERDEALRDLSRSREDAVRARLKARQQLKALLLRHGHRYTGKSSWTQAHERYLAEVSFSQPAQDIAFAEYRSAVRDAHERVERLTESLRSQLEHWRMRPVVEALMSLRGIDLIAAMTLVAEIGDFTRFARPRELMGFLGLIPTEHTTGTHRRQGPITKTGNSHARRVLVEAAWNYRFPARISRVLEARQQGQPTVVREIAWRAQLRLAQRYRKLAARQLPFNKICIAIARELSGFVWDIACQVKPST

SEQ ID NO: 471223 - protein, 373 aa, unidentified
MKSITKYVGLDVSKKSVDVAVADHGREAPRYWGKIPNCPEAVSKLMRKLGDPKELLVCYEAGPTGYDLYRQLTRMGIQCIVVAPSLTPVRPGDRVKTDRRDALRLAQLLRAGELTAVWVPGEEDEALRDLTRAREDAKKDLLAARHRLSKFLLRHGLYAPEKVKPWGAAHRRWLDGLHFENKALQVTFQEYLHAIDEITERVKRLEAEIHEQASNSVHAPVIQALETLRGVAEVTAVTLVAEIGEFSRFSNPRQLMAFAGVTPREHSSGGTTRKGGITKAGNAHVRRVLLEAAWSYRYAPALKGGLRRRQEGQNPQLQAIAWKAQNRLHRKYHRLVLRGKSPAVAATAVARELLGFVWAIACKVEETRRTMAA

SEQ ID NO: 471224 - protein, 321 aa, unidentified
MNLKEKHYVGVDCHKDTIACYINGRFKEFKTDFKGFTKALEWVKEIEPNCAWAIEGAYSYGLTLSKFLLSSGCEVYEFNALVTAKARKALSISGEKNDMGDAKVISIFAKQVKMQEVSLKTIELKRLITTRRLLVKQRTEIVLSIKQYCMKEGIVLPFNSLTTKKAFSWLLNSDNVNLNVMANNLKVQYESIKKLEEQIQKLTPEKVNKLREITGIETLTASIFYTETKGKKMSKAEFASYCGVAPVESSSGLSTRFRNNKRGNRTLNSLLYSISIFQSRFDEEGSKYYQKKLAEGKSKRLARKCLARQVSNLIWKVLFAA

SEQ ID NO: 471225 - protein, 338 aa, unidentified
MIHVGVDLHQRFCYMTALEARGKILQAGTVTNEKLALRRYFRQFRGKEVQVAVEACGFWPAFREVVEPEVKRLVLVHPQRVKAIASAKLKNDRVDSATLAHLLRCDLLPESWKADRGTQARRQQVRLRATLVRHRTRLKNQVHAVLHQQGLRSPVTDLFGKRGRLWLAEVKLPVQARESVNVCLRLLDGYSEEIQKQNLQLSEKAKQDKRAEWLMTIPGIGECSAMMLLAEIGDIGRFQDKEALCSYAGLVPRVRESAGKAARSGITRQGSPWMRWILVEAAQVATRCSPAAKRYYERLARKKHKHVARVALARKLLIAVYALLRDGVVFDEQKFATV

SEQ ID NO: 471226 - protein, 313 aa, unidentified
MDHNSAFVGIDVSKNKLDSFVSTTGQVEQFFNTQEDIHRLAKHLKAQDPVLVVLEATGGYERLAAAELCAAGLPVVVVNPRQVRDFAKATGRLAKTDALDAQVIAEFAQAVKPEIREIPDEHARELADLLTRRRQLIDMIVAEESRLKQAVFKALRRDIKAHIIWLQKRLKSTDDDLHEAIKASPVWKANYDLLREVAGVGNVLALSLLAMVPELGKVNRKQVAALVGVAPFNCDSGQYKGRRRIWGGRAEVRSVLYMAVLSSKRHNPVIERFYNHLLATGKTKKVALVACMRKLLTILNAMVRDQKHFAEMA

SEQ ID NO: 471227 - protein, 348 aa, unidentified
MAMTIVEADRTVIGGVDTHLDVHVAAALDPIGGVLGVESFTVTPRGYRALLEWMRSFGSLSTVGVEGTGAYGAGLARFLMRAGVDVVEVDRPNRQVRRQKGKSDPVDAIEAARGVLSGRSVGRPKTRDGNVEAIRVLLVAKRSAREGRLRTLHQMRQLSYTAPDELRRRFKGLSGADLVAEAAAMRPRRGTDPVEYATKVSLATLGRRALELEEETAHVDTLLAELVETSAPSLLGVFGVGIDTAAVLLVAAGDNPERLRSEAAWAHLCGVAPIQASSGKVVRYRLDRGGDRNANQALWRIVMTRLSFDPRTREYMERRTKEGRSKREVIRILKRYVAREVFRHLPRA

SEQ ID NO: 471228 - protein, 339 aa, unidentified
MKYIPVGVDIAKHLIQVHFINEHTGEVVDKQLRSKDFLTFFSNREPSLIGMEACGGSQHWARELKKLGHKVRLLQARFVKAFVMGNKNDVMDARAIWMAVQQPCKEIAVKTEEQQSILVLHRSRNQLVKFRSAQINAIHGTLLEFGETVHKGRTAMSKEFPAALERMKAKLPPYLITALEDQYNRLSELDMQIDGLEKQLNSVAKQNETCKRLMEIPGIGPLIATAAVATMGEASAFKSGREFAAYIGLVPKQTGSGGKVRLLGISKRGDKYLRTLFIHGARAASLLAKEPGPWITELKKRRPTGVAIVAMANKLARTLWAIAAYNRKYDKNHVSIKPI

SEQ ID NO: 471229 - protein, 416 aa, unidentified
MKIVRPICCGMDVHKNIIVATIGITNKKTRITEYIQETFSTLNSDLLNLKQWLINHKCFDACMESTGKYWIPIFNILEDEINIYLTHPKYVKAIKGKKTDKKDSKWICDLFKHDLIKFSFIPPKEIRALREISRYRYKLVGMRSSERNRYQNCMTVSNIGIGSVFSDPFGKSAQAIMKEVLESDIIEDKKILKCIHGSCKNKDKILDSIKHCNIEADQRFKMNESMTHMEELQVHIDNCEIEMMKRAAPMFDQFMHITQLPGISTLSAILIISEIGVDMKQFESDKQLTCWAGLAPANNESANKKKSVRISKAGQYLKPLLVQCALGAIKDKEGYFGIKYSRIKKRRGHKKAIIAIARMMLVSIYHMILTGETFNPSDYESFRNPKPPIKQQDLTEESAIEFLKKSGFDVSKLTKP

SEQ ID NO: 471230 - protein, 331 aa, unidentified
MNTLMMPAAAARFNHVIAFDVAKATLSLHILPTGESLCLENDGAAIRRLLKREQKRNRKQGLGPMLVICEATGGYEDAVLKAASELGLECHLAHGSSVRAYAKFRGRHAKSDPIDAFLIAEYGRDKPDLRLYKPPRPEESALRALMGRRAELKEMILAETSRLEHASLKAVRLSLESHLVALKEQLALIEKEIRALTRRDEAFTHKSRLMQTLAGIGAIAAQTLLAFLPELGQIPSSAAVALVGLAPYDRDSGKERGKRRIFAGRSQIRRCLYMAALAAIRSHAVFRDFAERLSRRGKPFKVAVTAVMRKLIVILSAMLRHNQPWKHAQTA

SEQ ID NO: 471231 - protein, 362 aa, unidentified
MDFFCGLDVAIEETAVCVVDDRGEVHLTVKVATEPEALLAVLKPFVGRLKRVGHEAGALSPWLHPELKKLGLPAICLETQHVRAAMSAQRNKTDAADALGIAHIMRTGWFRQAHVKTESCYRMRLLLTHRRNLKRKFLDLENAIRHSLKSFGIKLGGTSRGKFDQAVREAVADDPLSCELMDAMLSARAALWKEYCRLHDLVVKLVAQSELCRRFMAIPGVGPVTALSFMTAIDDPSRFRRSRDVAAYFGLTSRRWQSGTSIDVQGRISKAGDSDVRRALYEAASGLLTRFKGKDKVKAWGQEIAKRSCHRKACVAVARKLAVIMHAMWSDGTFYLGDPAASTADAAQRAHTKDRKLLGAHR

SEQ ID NO: 471232 - protein, 360 aa, unidentified
MRHRRAKLVFRRITRNREPSMNEITTIGLDLAKHVFQVHGIDAQGRTVLRKRLRRGQVLAFFSRIPRCVVGLEACATAHYWARELGALGHEVRLMPAQYVKAYIKRNKHDAADAEAICEAVQRPTMRFVPVKTAEQQATALLHRGREQLVRQRTMLVNALRAHLAEFGIVAAQGLRNVGELIAIVRDDGDRRLPDVARQVLQVLAAQLEQIEAAIAALEKQLMAWHKANAVSQRLASIPGIGPIIATAIATTVADPGVFRSGREFAAWLGLVPRQNSTGGKTRLGGITKRGNRYLRRLLINGASANLLRSKATKADPWVIGLRRRRPPLVVAVALANKTARIAWAVMLREREYQPRAVAA

SEQ ID NO: 471233 - protein, 339 aa, unidentified
MKLYAAFDLHSSNNYLAVIDEEGKRQMQKKLPNEAEAIVMALSPYRKKIVGIAVESTYNWYWLVDLLMAKGYEVHLANPAAIQKYKGLKHADDRHDANWLAEMLRLNILPEGYIYPKEERSLRDLLRKRGHLVRLRTSLIISLQHIITRNCGIMVNVNDVKLLKEDRISPLLQDNEDILMAGGVSKETIDYMTRKIKGIEKIIEEKIELSSSYQLLLSIPGVGKILALTIMLETGPISRFQKVGNYVSYCRKVSSTWVSNGKAKGKGNKKNGNKYLAWAYSEASELARRFDDCARAYFQRKAQRSNRMIAHQALAHKLARAAYYIMRDNVPFMAEKLFV

SEQ ID NO: 471234 - protein, 403 aa, unidentified
MNAVGIDVSKGKSMVTILRPFGEIVSSPFEIKHTSSDIHSLIKLIHSIEGESRVVMEHTGRYYEALAHQLSAADLFVSAVNPKLVKDFNNDSLRKIKSDKADSVKIARYALDKWQSLEPYSITDELRAQLKVMNRQFHFYVKQKTAMKNNLIGLIDQTYPNANTYFNSPTRSDGSQKWVDFVSTYWHVDCIRKMSLNAFVEHYQNWCKRKKYAFNKSKTEEIYTKTKELVPVFPKNEITKHIIRQAIDQLNSTSVTVETIRTLMNETASKLPEYSIVMQFKGIGPSLGPQLMAEIGDVTRFTHKGALTAFAGVDPGVNESGSYAQKSVPTSKRGSSNLRKTLFQVMDVLIKTMPQDDPVYQFMDRKRTQGKSYYVYMTAGANKFLRIYYGRVKEYLSVLPDPS

SEQ ID NO: 471235 - protein, 354 aa, unidentified
MTLIAQNTQPQIVVAGVDTHADTHVVAVLTMAGQLLDAARFTADSAGYAALTAFVASFGVIDRIGVEVTGAYGAGLTRHLRAAGIEVLEVDIPHPHRRARSGKDDVIDAEEAARKVLAGIATTIPKDTTGPVEAIRVLKVARDGAVKARTAALQQGRDLLVTAPAEIREAVTGKGLATRLRHFLHTNPDPARIHEPGTAVATALRTLAHRVADLDTEIAELDRHLDTLTLQHAPTLRALPQVGPQAAAQLLITAGTIQNRIRSEAALARLTGVAPIPIASGKTHRHRLHRGGDRQANRTIHLITVGRLRYDPRSRAYRDRRTQDGLSKKDIIRCLKRYLCREIHQALKTDLGWT

SEQ ID NO: 471236 - protein, 369 aa, unidentified
MTDVTLFVGLDVHKKTISVALVDAAASATVRFYGTIVNTPDALLGLSKKLSKDGQALHFCYEAGPCGYGVQRQLTRLGHRCDVVAPALIPRKVGDKVKTDRRDAMMLAQTLRAGQLTAVWVPDEAHEAMRDLVRLRAQAMRDLRKTRQQLLSFLLRHGLVSPYGHWTKMHRRWLGELVFAHPAQHLAHEEMLQRIERAEALCDRLKGAILDLVPQWSLAPVVQAIQALRGVSLIVASVIVAEVGCFTRFDNPRQLMAYLGLNPSEHSSGSTIRRGAITKTGNALARTCLVEAAWTYRFPARVTQIIRDRLAGLPEPIRNVAWKAQVRLSARYRKLVAAGKPTPKVVVAIARELAGFIWAIARMVEPKFA

SEQ ID NO: 471237 - protein, 407 aa, unidentified
MRHEQRIVYGGVDTHLDVHVAAVIDSTGRLLGTKSFPTTPLGLRGLEHWTARHGQVAKVGVEGTGTYGLGLSRVLQAAGHEVVEVNRPNRQTRRAKGKSDTIDAESAARAVLAGHATATPKGHDGIVESIRVLLVAHGSSRRSIDRIGGQLRSLVVTAPEALRVEFANAPTQAIAAKAARLRPGDDCADVATATKTALRILARQYQALVDDLTSIEAGLETLTTQANPGLRQVHGVGPIVAAKLLVAAGDNPDRLACDAAFAALCGVSPVPASSGKTTAMRLNRGGDRQANSALHRIVLVRISHKHPATMDYRARRTAEGMPSRSIIRCLKRFVAREIYRHLVNPQPAIQTDDLRARRKATGQPMRVVADALGAHIMSISCLERGTNHDADLAHRYRTWIQQQEAAS

SEQ ID NO: 471238 - protein, 348 aa, unidentified
MRFYTKTHKHYCGIDLHAKKMFVCILNTDGVVLLHRNIATSPEDFLKVITPFREDLLVGVECMFAWYWLADLCSQDVIEFVLGHALYMKAVHGGKVKNDKIDSHKIAGLLRGGMFPLAYVYPPEMRATRDLLRRRCFMVRRRADLLAHVHNTAIQYNLPEICGRISKENNRNGIDELFPDPEVRKIVQLDLAMIDAYDNVVGVLERKLETTARRHDWHTLLLLRSIHGIGRILALVLLYEIHDINRFESVQDFASYCRLVKCSHESAGKKKGTGGAKIGNAYLKWAFSEAAVSFLRHNSSGKQLVEKLAKKHGKGKALSILAHKLARAIYYMLKNSTPFNLEKFMATA

SEQ ID NO: 471239 - protein, 343 aa, unidentified
MSISMIGLDTSRSVFQIHGVNEAGKAELKRKLRRSELIAFFEKQERCTVVMEACGAAHHWARILTGLGHTVKLIAPEAVKPFVKTGKKNDAADAAAICEAAARPDIKFVPVKTVAQQGILAVHTARALLVKQQTMLANAIRGLATEFGHVVAKGLYNLEPLVALVDADEDMPEQARQAVAELHKHFGELANGIQSCETEIVKHARTDPTARRLATIPGIGPITASLIVATVVDISRFKSARQFAAWLGLVPRQHSTAGKTRLGRITKAGNKEIRRLLVLGATAMVGHAEGWHSALGAWLRDILQRRPVRLVTVALANKMARIAWAVMTRNEVYRPAGGVAAKA

SEQ ID NO: 471240 - protein, 417 aa, unidentified
MRTKSQKVSRVNRQTMVVSLDIGKGSHFGYFRAPDGKDASPFGFTNCRDGFNQFWKKLCRFKKAHRLCQVLVGFESTGPYAEPLLHFLRQKPVQLVQINPMHSKRLKELTGNSPNKTDRKDPRVIADVMMLGHSLTVVVPEGAAAELRRLSQARERAIKERTAILNQLQHLVFVIFPEFLKVIKTVSCKTGLYLVRHCPAPDAVLALGLDALSRDMRRVSRGRLDHQRAMQLFQAAESSVGVTEGRQSMVEEIGYLVDQIERINTFVDQLQSRMRSHLEQIPYSPYLLSMRGIGLITVAGLVGEVGDFRQFSTLSEITKLAGLDLFEISSGKHRGRHHISKRGRPLMRKLLYFAAINTVKTNGIMHAPYSRMLERGMPKIKALVAISRKLLVVMFALARDGSIFIEDYNTHRYQLAA

SEQ ID NO: 471241 - protein, 418 aa, unidentified
MEVMYARCAGLDVHKETVVACVRIVEGGEVSRSVRTFATTTASLIELGEWLEVNGCTHVAMEATGVYWKPVWQVLADSSFELVLANAAQVKNVPGRKTDVNDAAWLSELLAHGLVRARFVPEPAIQELRGLLRTRKQLVREKASHVQRLQKTLEEANIKLETVLSDVMGRSGRAMIQALIDGETDPAKLAALAHWKVRASAATLREALHGRIKRHHRFLLRLHLQQVDALDAAIAEIDREADAGLACFRDAVKQLSTIPGVSELSAQVILSEIGTDMGRFASAAHLRSWAGLCRATTKVPASAGRLACAGESPGSRPCSFNALGLPRAPKLPTYTRNLCDCAVDAGRRKRSALLLPPSPRPPISCSETARSMKISEPFTSIVGGPRRKRAASSNASPNSAFPSNSSPWPPSHEQSVSL

SEQ ID NO: 471242 - protein, 335 aa, unidentified
MQIKHFVGIDVSKDTLDLSLVVDGKCLQHYCIKNRTVELKSTINKIMKALGATIDDTIFCMEHTGMYNLPLVKWLQSQQGKMWLESGIHIRKTLGLVRGKNDKVDSIRIAMYAYMNRHQIRLWKAPRKLIERIAALLSQRSRLNKAKKQLNTANQEQRLFLDKDIMKSLNKYTHKTVIVINKQIEAIENEILGLIKEDEKLNRMYQIITSIHGIGFVTASYILVTTNEFININNPKKYACYSGVVPFEHSSGSSVRGKTRVSQMANKNIKTLLHLAALSTIQIQGDLQEYYKRKVAEGKNKMSVLNAIRNKLILRVFACVNQNREYEKLYSYKFV

SEQ ID NO: 471243 - protein, 402 aa, unidentified
MPKAFVNSESAATIQTSLAAIFVSLELSQKTWVVTSLSPGDGERMSKHSVPAGDVTALLTRFAELKGKARARSGNAFPIVCIQEAGLDGFWLHRMLTSEGIESHVVDPASIAAPRRRRRAKTDRLDGEALLRALMAFKRGEPRVCAMAVPPSPEEEDDRRLGRERKALLVERVRHTNRIKGLLFSQGISDFEPLNRDRRQRLEELQTGDGRPLPHRLKVAIGRELDRLELLLDQIKAVESERDEMLEIKKWKVQKADERESDEPADAPSSACAKRLHGLNGIGPEFAFVIWHEGLYRDFDNRRQLASYAGLAPSPWQSGSIDREQGVSKAGNPRLRCTMIELAWLWVRYQPQSALSLWFKQRVEGGGRKKPNIVAMARKLLVALWKYIRFGVVIEGAVMKSA

SEQ ID NO: 471244 - protein, 321 aa, unidentified
MTDTAVVVGIDVAKATLDVAVTPSGEGWSVANDADGLRGLVARVKGAAPVLVVLEATGGYERALVAALAAARLPLVIANPRQVRAFARAVGQLAKTDRLDAAILARFGQQVRPTPRPLPDETVQVLDALLARRRQLIEMLTAEKNRLGIAPAPLHRGLRQHIRWLERQLAALDDDLDGQIQASPVWRAKDNLLQSVPGVGPVRSRTLLGELPELGTLSRRQIAALVGVAPMARDSGTARGIRRVAGGRAPVRTALYMAAVTAAHHNAAIRPFYQRLRAAGKPPMVALMACMRKLLTVLNAMMRHNTAWQHQLAVSHDTVAS

SEQ ID NO: 471245 - protein, 405 aa, unidentified
MNVYVGIDWSENKHDICFLNEGGEVLRVLQIAHTVAGFRELDRARQSLGIGAQEVTIGLETAHNLLVDYLWDQGYPSIYILPPQAVKSAQGRFRQSGAKDDPWDARLIADILRTDHRRYRVWKPDQALTRQIRAEVRFATQIGQELVRAGNRLRSTLLRYYPAGTEAFSRTEALVALAFLQAYPTPHQAQALSFEELRAFLRHHHHTHPRVWPNIYACLHRDDAPPAPEVAAVYAPLMVAQARLVEQFVRSRTECLSRLGKLYAQHPDHEIYDSLPRAGALLAPALLAKLGDDRDRFPTPAVLQAVAGTCPITQRSGKYTHIYFRSACDHGFRHIVQQWARLTCEVSPWAAAYYRSVRPRCRSDSDAIRRLANRWLEVLWRLWVDRKPYDETLHLRQHTLRSQAD

SEQ ID NO: 471246 - protein, 375 aa, unidentified
MSKIRCIGLDVHAGTIAIAVAEPNGEVRSVGIIPNRLESIRKAMAKLGPAKQLKTCYEAGPTGYVLYWQLTQLGVACEVIAPSLVPAKAGDRVKTDRRDAEKLARCYRNGDLTAVWVPDAAHEALRDLVRAREDAKQDQQRARQRLGKFLLRHGAQAPADIKKKWTAKYMTWLHDHVHFEQPALQATLADYVHEVHHAGERTARLEKAIDEAIASAPEQIRSVIAALQALRGVAQMTAVTIVAETGSLSRFQNPRQLMSYSGLVSSEYSSGNRIQRGRITKTGNAHLRRVMVEAAWAYQHKPWVGGFLLKRQQGLAQDIKDIAWKAQWRLCTRYKKLAATGKNKPQIVTAIARELLGFAWAIAVKTEPQPQQQAA

SEQ ID NO: 471247 - protein, 387 aa, unidentified
MPQPNDLSRSLVALDQNSTIIAVVELSQSSWLVGGVLPGIERQPCKKLEPSAERLLGLLHRWRDEAVRAGSSITRIALAFEAGRDGFWLARWLQAHGVEAHVIHPSSVAVSREHRRAKTDRLDTELLKRSFLGWLRGERGHCSMARVPTMLEEDAKRPNRERECLVGERTRIVNRMKGTLARLGIRTFKPTLRKAAERLATLHTPEGSPLPPNVSAELQHDMARLSLLISQIREIENARRERLEQEPETGPHAMVRLLARIVGVGIETADMLVNEVLSRRMRDRKAVARYAGLTGSPDESGTKRREQGLARAGNARVRRGMIQLAWRFLLFQKESALALWYRARTADSRLGTRKTMIVALARKLLIALWRFVTTGETLEGVVLRPAG

SEQ ID NO: 471248 - protein, 409 aa, unidentified
MERVIERGAALDVHQKTIAACVRVPGAGGPRQGQVQTFGTTAAQLLALRDWLLAHGVTHVAMESTGVYWKPVYYVLEEHVTCLLVNAAHVKQVPGRKTDVRDCEWLAQLLEHGLLRGSFVPPAPIRELRDLTRYRHVLVQERTREANRVHKLLTDAGLQLASVASNVLGASGRAMLMALIEGTTDPALLADLAQGKLRRKLPALREALVGRFRPHHARLLTQMLAHLDYLDEALAELTAQIEEALAPFATEAARLDTIPGVGPRTAEILIAELGVDMRQFPTARHAASWAGLCPGTHESAGKRRPVRTRKGNRWLRTALIEAALAAVNVRDSALAARYRRLVRHRGHKKAIVAVAHTLLTTAYRLLAEGCEYREPGAGYYDASRKDRAIRHAVHLLEHHGYRVSLNTAA

SEQ ID NO: 471249 - protein, 330 aa, unidentified
MRHYLTVATQNFSEAVQSAVHEKFTNNKEGFQAFVKWIKSSVKKITPDELLLCGEKTGKYSLPLSNFLYAKGYSIWLDSGLRIKRSLGISRGKSDKADSLKIALYAYRYQDMAVCYVPLSKNVSRLKELFLYRQHLVSQVKAMDVRKNVTDDFKKELGDVKFIVDSAAKIIQQIKATIKKCEEKMQELIEEDDELKTTHDSITSIKGISLINATAFIAYTNNFKDFGGNAKKIATYWGVAAFAQESGTSVHKVARVSKIASKMLKSLLTQAARITVRWEPKFRQYFEQLISRGKHQGVALNNVKNKLIHVITALAVSKEKYNREYEYIKR

SEQ ID NO: 471250 - protein, 351 aa, unidentified
MNIHHYIGFDVHKKNISYCVKTADGKIVEEGALKATHEALEEWARKRTEPWHGAMEATIFSAWIYDGLKPFAAKLDMGHPAMMKALSASKKKNDRVDARKIADMVRCNILPTCYVAPPEIRNLRRQLRYRNLVVEQSVQMKNRMSGLLMEVGVEYNKKRLHGAKYFNELLDQLEDVPESVKELLQLGRGALETFTATQRKLLDRLQQDPRLKKRVELLRTIPGVGEVTALTWALEVCDPKRFPSIGDAVSYCGLTSAQNSSAGKDKRGPISKQRNAHLQTVLVEAAKLAPRWNKQLAEVHERELKNGHRNRATLEVARKLVAYLLAVDRSGKPFQVRNQPTKETTEVTTTA

SEQ ID NO: 471251 - protein, 322 aa, unidentified
MQGKMTSVGAAQAVYAGIDVCKAWLDVYLHPIGQSFRVPNSKDGCRSLVSKLSSAAAGLVVMEATGKLHRLAHRLLSEAGFAVAVVNPSRSRKLAEALGALAKTDKIDARVLAFYGAALGPSPTPVPAKSLAELQELVLARQAAKAEETALKNRIGAAESRVLKGLLEAQLKAHARLLARLEAAIAALVAKNAGLKRRCEILASIKGVGPIAAVTLVACLPELGRVTGRQIAALAGVAPMACESGDMKGLRRIKGGRPHVRTALYMPGLTASRCNPDLKAFFCRLREAGKPPKLALTAVMRKLLVLANTLIREDRHWTPDYA

SEQ ID NO: 471252 - protein, 351 aa, unidentified
MASSTIAEPAVVVTAGIDTHADVNVAAALDQRGRLLGAAPFPTTASGHRQLEAWLADFGQIDAIGIEGTGAWGAGIARHCTAQGHRVIEVDRPNRQTRYRRGKSDTIDAEAAARAVQAGTATGTPKARTGLVESIRALRVARRSALKDRSSAMHQIHSLVSTAPDELRSQLRGLAARRLVTTCASFRPGDLTDPVQATKQALRSIARRHQRLTEEIAELDTQLGPLVTTAAPKSMLARSGVGIDVAGQLLVTAGDNPDRLHTPAAFVHLCGVAPIPVSSGRSSANRLNRGGDRAANAALYRIAICRLRWDPNTRAFIDKKIKEGKTKKGAIRCLKHYIAREIYNDLRQITP

SEQ ID NO: 471253 - protein, 344 aa, unidentified
MKLFIGLDVSLAKTAVCVVDEHGKIVKETEVASEPEALSAFAGTLPGTVAIIGLEAGPLSQWLHRGLTEAGLDVVLMETRQVKGALKAMPIKTDRRDAEGIARLLHIGWFRPVHCKSVSAQEVRALLGARKAIQQGMIALEMSLRGLLRNFGLKVGAISRGRYDMRVRELVEGNAMLEAATVPMLKSRAALRSELANLEREVRGLAKDDPVCRLLMTMPGIGAVVALTFKSAVDDPARFKSSKRVGPWVGLTPSRHQSGERDVIGGITKAGDVNLRRALCQAATVMLHRGRPSWLRTWAARVAKRRGSKRAMVALARRIGVVLHRMWRDGTEFNHATPPIVGGI

SEQ ID NO: 471254 - protein, 348 aa, unidentified
MKNKSFVGIDISKNVIDVSIFREDTNIKMFPHEVFNNTRKGFGDMCSWLKKNLVVLSQALFGMEFTGCYSLDLEKFLTSKNYSFCMLSTRIVKHHPMGTIDKRDKNDSAKIADFLYRYDDTECAKPYKLPSKAMQQLKQLVNERKFLVEQRTNFMNRMQMFETKEDSAMYESYIKKLNHDIEKIDQEECELMSKEEDVFDTFQNLLTIPGIGFVNATNIIAITRNFTAFDTARQYARYVGVAPCSHTSGTSVKWRARPSAHCNGQVKADLSMAALRAVEYDVEMQMFYNRKLGGRKDSDTKRKALNAVKFKLIRRMFAIGKQKRKWEVLNTSDDRKNLHIEKSKASEL

SEQ ID NO: 471255 - protein, 402 aa, unidentified
MYNAVGIDVSKGKSTVAVLQPAGVIIRKPFNVNHTSSELDELAKYIGSLEGETRVVLECTGRYHEPVVKTLSEAGLFVSAVNPHLIKNFGNNSIRKVKSDPADAKKIARYTLDNWIELRQYSSMDNTRTQLKTLNSQFSFFMKQKVAAKANLIALLDNTYPGVNKLFDSPVRDDGSEKWVDYAYSFWHVDCVRKIGLKTFTERYQAFCKKHHYNFQPAKPAELFLASKDLIAVFPKEASYKLLIQQSIQQLNLASSHVEELRSKMNELASTLPEYATVMGMYGVGKTFGPQLIAEIGDISNFSHREALTAFAGVDPGVDQSGTHNSKSNKASKCGSNHLRKTLFQIMSTLLQTAPEDDKVYQFLVKKRAEGKPYYVYMTAGANKFLRIYYGKVKECIRNLEQ

SEQ ID NO: 471256 - protein, 340 aa, unidentified
MTSQVYHLGADISKATIDCHLLPADTTSGRTRNGAGASVRVANTPAGYAALETRLRAKIDTGARVLVTAEATGGYERGLHHALTHAGIPVAIVNPKRIRDFGKALGQLAKTDRLDARLIARYGQTFNPRPTPMPSPARQTLREWLAFRAQIASEIATRAQQGKAYTDPTLHALADQELRHLRAKIKELDRQIAALLNAHDDPEIAATVHILRSFTGVGPIVAATLIAHLPELGTLNAKQIASLAGLAPFARDSGEKRGIRTIFGGRAPVRHALFIVFRAGLRYNPVIRDTFDRLTAAGKPGKVAMVAAMRKILVILNAMVKTNTTWRKPQPKPTPMPVAA

SEQ ID NO: 471257 - protein, 397 aa, unidentified
MKSLHGGIDIGSESHHVIIMDDGKVLFDRKVSHRFSELREAIGEFREIEKLHQGEITFAIEGKNGYGSHFDRILIENEFKLYNVDNLKLRWFRDVFGAEWRNDRRDAKMLAKMLKLKNHVDAEGEKAFIAVGKTPVVHEKLRILSRYQQSLIDEKVRLQNRLRKRLLEVCPDILEYGDTDSKKLLQLLKKYPDFSRYKNITLGALLKIETIGKKTAVSILEGLRNIQYVEELAVIYKAIISSYSRRILELKEEIEMLDRELEETGANSPEVKRLNSIRGIGTKLSSRLIGEIGRFNRESQLAVYCGVACIDDDSGKKKQTKAVYKANKICQSTMITIAGCTIRYIPESRAYYQKKMAEGKSHNHALRCLARQLIKVIFRMLKEDRDYIVKEGMKKAA

SEQ ID NO: 471258 - protein, 375 aa, unidentified
MQNKVRFLGLDVHADTIAVAIAEPDGEVLSLGTIANRGESIRKMVKKLGSVEQLRACYEAGPTGYVLYWQLAELGVNCEVIAPTLVPMKAGDRVKTDRRDAERLARSHRSGDLTAVWVPDAGSEALRDLVRAREAAKQDQLRARHRLSKFLLRTGLRPAQGIKAWTLGYMAWIKQIRFAQMAQEATKLDHLTEVEHMGERVARLEKVIEEAAKLASPEIQEVVKDLQALRGIAPISAVTIAAELGNISRFEGARQLMGYSGAVPSESSSGKRTQRGSITKTGNAHLRRIAIEAAWSYRLRPGVGPALRKRQDGVPEEIKEIAWKAQYRLHKRYSRLEAAGKDRRKIITAVGRELLGFIWAIGTRAEAAVKQRRAA

SEQ ID NO: 471259 - protein, 419 aa, unidentified
MTQREDSKIIGIMHPICCGLDVHKETISACVIFPDKDGVDQYDIKVFGTFTDDLMHLRSWLLDHGCPVVAMESTGIYWRPVHNVLEDSVQVVLVNARDIKNVPGRKTDIGDSKWLAGLLRHGLLRGSFIPMKEVREWRDLTRLRKKYVHTVGDYRKRAHKLFESANIKIDSVVSDLFGVTGRNLMNLLVFDRKALTLEDIHQCVRGKLKGKEEELYRSIQGFFSDHHRFILKRLLHTIDLLEEEISMFDAQIRHLMKDQNALLDRMKKAAGIADVSSREILAEIGPDLTAFPTGEAMISWSGLCPGNNESAGKRKSGKSPVRKHHLKTIMIEVAWAAVKKKGSYFKDKYYRLKARRGAKKAIVAIAHRILLGLYYVIRDGVEFRDLGEDYLAQRNKAQKMSHLRKQAQLLGFNLVPQTT

SEQ ID NO: 471260 - protein, 408 aa, unidentified
MELANERGGRRLWVGIDIGKGHHWASAVDESGGQVWSRKILNDEADILAAISSVLGLADQVSWAVDITSGPAGLLLALLAGRGQQARYIPGRTVHAMSAGYRGEGKTDAKDAFLIADISRLRSDFSLVQVPAQLVAELGLLTSYRADLVADRIRLISRLRELLVGVFPALERAFDYSRHRGALIVLTEHQSPEALHRRGQSRLTAWLGKQGVRRPAQVAEKALAAADAQRASLPAQAVAGQIVADLARQILSVDERLARVDKQIHAAFAQHPQAKVITSMPGIGTILGAELVVAAGDLSVYADAGRLASAAGLVPVPRDSGRRTGNLHRPRRYSRRLRRVFYLSAQTSIVRDGPNRDFYLKKRGQGLRHVQAVIALARRRVDVLWSLLRDNRLFTTTPPPARTGTLAA

SEQ ID NO: 471261 - protein, 403 aa, unidentified
MEPSEIGVFVGIDMAKTEHFAQATATDGVELFARSVLNDQTSIEQLIDDAGAHGNVALVIDMTASAAQLLLTIAAERAVPVAYVTGLQMRRAADLYAGSAKTDPRDAWVLADFARRNADRLAWLDVSDELLLRLRVLNGRDVDLATDANRVINRCRDALTAVSPGLERAVGQRLVQAGVRDLLGKWSTPAALREAGRTKIRNAIKKRSPRIADKVADEIWAALNAQTVVLPAEDTWGEVIADLLGDLERISTRRGELATQIEETFLSHPLGQVLVTLCGFGPRTGARTLAEIGDPARFANGSRLAAYAGLSPTDWRSGRSINGAFQHRGGNHRLKNAMFLAAFVATQHDPDARAYYQRKRAEGKKHNAAVICVARRRCNLIHAMLTTATPYDPTRSKNPAEAA

SEQ ID NO: 471262 - protein, 412 aa, unidentified
MNRKARRCCGIDVHQASLSACIRLHGKGRKVSEEIRTFGTTGDELLALHDWLKEHQVTEVAMEATGVYWKPVYYVLEDGFRVILVNPAEIKRMPGRKTDVSDCAWLAQLLDHGMLRPSFIPPREIRELRDLVRYRVSLKHDHTRIANRLHKVLQDADLKLSSVMSDLLGVSGRQILSQLAKGNCDPVALADLARANLRGKLPQLRQALSGRFNAHHAFLLSRLLADLDNTEEAMAQVAQRIEAQLVPFAAELERLCTIPGVKQVAAAAILAEIGAEMSWFPSTADLDSWAGMAPGNNQSGGKRRRAKARKGNRWLRTMLVESGNAAGRTRNTALSALYRRMIVRGGRKHAAFVVGRHILNIAYHLLRERTTYRELGPTYFEQRRVEQLKRRCLDQLRNLGFDANLVPLPKAA

SEQ ID NO: 471263 - protein, 397 aa, unidentified
MWTLGIDIAKRKHVAALLDDNGKKVFKNFSFTNTLEEVNRLLDRINQVGFSIENLLIGMEATGHYWMILYHFLSNAGFQVRLINPLMTSARRNAGIRGTKTDSVDAELIANILREADPKFSAVPDDEVRQLRNLTRLRYECSQTFVAEKQRLIGLLDLVFPEYSEHFSDIFGAASRQLLAQYSTAEDIKKIDIRKLTRILKEASKGHMGREHAKRLKSAAKNSFSLSASNLSFALEIKFLVQRMNILLHQIEELEKQAKKYMKKNQKLLQTIPGIGPVWAPTILAEVLPVFHPEEKNGARKLVAAAGLDVRLNESGQYKGKGKMSKRGSRYLRTAAIQAAEVAALVAKDPMFRTVYEKQKAKGKKHLVAISHVANKLLHVVFSVLKNQKPYEVRLIH

SEQ ID NO: 471264 - protein, 449 aa, unidentified
MKKPSSERYSLPVIHNCAAGIDIGSRFHVVAVPADITKEPVQTFKAFTADLERMADWLVELGITTVAMESTGVYWIPVYEILETHGLHVVLANARDARAVPGRKTDVNDAQWIQRLHACGLLRASFHPDREIAALRSYLRLRERHLDYAAAHIQHMQKALIHMNLQLHHVVADITGATGMRIIRAIVAGERKAATLATMRDTRCKSSVETIQSALVGNYQPEHVFALAQALTMYDAYQAQLEICDQQIAKSLLQLSQQQPSPSEALPKPRHRTRQPNALNFDVRTLLYQLVGVDLTQIHGIGPYLALRLVAECGTDLSRWRTAHHFTSWLTLAPGCRISGGKVLSAHTRKTKNRVTAHLRLAAVTVGKTNTALGAFYRRLSARIGKAKAVTATARKIAILFYNAMRFGLAYQDPGVDRYEQKYRERVVKGLHRRAAEFGFTLQAVECVS

SEQ ID NO: 471265 - protein, 408 aa, unidentified
MNPLYVGIDVSSKNNVIYLMLPNGDKHSSFSLANSHDGSTQLVKRIFTAMTSNNIDSVLIGLEATSVYGDNLVYFLKEDTTLASFDRKIHVLNPKQVNKFKESYNDLPKNDYVDAFVIADCLRFGRINKEVYMDDYRYKALQNLTRARYFAVTNLTKEKQRFINVLFKKYSTMTQEKVFSDTFSTTALAVYEKFESAETLAKMDLQELTAFIMEKGKNRFPDPDAVAKALQKAARSSYRLPKTVNDSVNQVLAISITSIRSLESQIKAFDKAITKQMELLPNVLISIPGIGPVLSAGIMAEIGDINRFQNQAALAKYAGLAWQQHQSGDFEAQTTRMIHSGNRFLKYYLCEAAFSLVRCDKEYSDFYRLKYKEVNRCQHKRALALTARKFVRLVFRLLKDNRLYCPAK

SEQ ID NO: 471266 - protein, 412 aa, unidentified
MEPIYTSCCGLDVHSRNIQACVRRTGKDGRIHHEVRTFSTMTRDLLALADWLCSEEVTQVAMESTGVYWKPIYNVLEGRFTILLVNARHIKNVPGRKTDVQDCQWLAQLLQCGLLKASFVPDRPQRELRDLTRHRAQLVNEKSAVVNRVHKVLEDANIKLGTVATDILGKSGRDMLSALIQGEKDPGEMAGLARRKLRGKIPQLCLALEGQVTDHHRFLLGELIGHLEYLEGQIERFSQRIEEVSGPFEEAIQEVTRLPGLERRSAENVIAEIGRDMGQFPSEDHLSSWAGMCPGNNESAGKKKSGKTTKGSRWLRRALTQAAWAASKKKGSYFQAQYRRLVGRRGKKRALIAVGHSLLVVIYHMLKNRTGYKELGADYFDNLNSKRLVPYLVKRLENIGYKVNLIPFENVA

SEQ ID NO: 471267 - protein, 412 aa, unidentified
MQDILTCAMGLDIHRDVIVACLAKGELGTDPEIEIRSFSTLIPEMRKLRDWVLEAECRYVAMESTGIYWQPIYKMLEPCFDGQISILVVNARHMKNVPGRKTDMRDAQWIATLLRAGLLKGSFIPDKTFRELRHLTRYRKSIVRDITAQKNRIDKFLQSSGFRFTAFLSDAFGASGRNIIRHLMEYGNISREALDRCLKTQTRKRIDEILIALNGSLSEHQRGFLRMIFGHLEALEQHRHTVEDAITKEITKHEEALSLLCSIPGIDVTAAAAIIAEIGTDMSAFPDSQHICSWAGLSPGNNESAGKRKSAHINKGNPYLKSMLCEVGWVISGKRSLYLSGWYWRIKQRKGAKRATIALARKLLALIYTMLKTGSPYNEDCFEIRRKQSERKRTSRMVNELQKLGYFVVAPG

SEQ ID NO: 471268 - protein, 347 aa, unidentified
MDKELYIGVDVSKQTLDLAYYDGESIDWKKAHIKVSNNNAGFKKIGSWVAKVSKRFDIVLFCMEYTGLYTQNFRLWLEEKHYIYRMVEPRKMHRFEPDLDDGLRSLDRIKTDELDSFRIAIYCEQNHRKILRNPSKLPPPVYFKLKRLLAERKQTVKQSVLYKQQLHDICAYDTDLSVERKNGQLKTLNDALKGIDNEIDMYIKEDADINKNFSLLTSIPGIGRVVALETIVLTENFMAIDNPRKYACYIGVAPFKKESGTSVRKSSSVSKKGFKQAKADLSIACLVCMQHIPNIRDYWERKRKEKCSGIVFNAIKFKMILRMFAVIKRGTPYVETDNYRNGKNKQP

SEQ ID NO: 471269 - protein, 356 aa, unidentified
MVTGLKHQKEKRSMDHFAGLDVSVKETSVCIVDDTGKIVREVKVASEPEALLQVLKNPAYHFKRVGLEAGPLSQWLFSALAEAGLPVICVETRHMRAVLKAQINKTDRNDARGIAQMMRAGLYRPVHVKTLRSQKLRMLLTHRKLLQSKAISIDNDLRGTLRNFGLKVGVVGKVRFEARIRELVENLPDLAVLVEPLLTVRRVLREQFCILHRRLLAIVRNDEVCRRLMTTPGVGPVVALTYRATVDVPARFRKSKSVGAVFGLTCAKYQSGESERSGRISRCGDEMMRVMLYEAAQVMLTRTNKWSWLKAWAMQIARRRGMKKAIVALARRLAVIMHRIWVDGTEFRWTRDVATA

SEQ ID NO: 471270 - protein, 433 aa, unidentified
MPTNHPYDLVIGLDRSDRKADLHLIDTHTGNAQKQTVATSPEALHDWLARLRQDHPQDRVAICLEQPAANLIVFLETYSWISLYPINPISLQKFRETFVTSRAKDDGKDARYMAELVLSHHDKLKPWQPDDSQTRQLQQLVLHRRAVVDERTGLTNRLTALLKQYFPQALELSGEDLWRPLATAFLLKWPTLQSLKKVRKESLKQFYYLQGSRSQMLIEQRLERIDKAVPLTDEIALLQSYTLRVQLICKELQLLLKTLQQFDEQIAQVFQQHTDRPIFEALPGAGPVLAPRLLASMGSERERFARPENLQSFSGVAPVTKQSGGKCYIHRRYMCPKFLRQSFHEYAKESILHSRWAAAYYGQQRNKGCGHHTAVRALAYKWQRIIWKCWQTRTIYKEQIYEAALKKNKSPLTGLLDQIELGKSPIKTREKKS

SEQ ID NO: 471271 - protein, 407 aa, unidentified
MELVALHKRVIGLDVHQAQITACALIEEEDGTTRIEQRQFGAFKRDRRALAAWALALRPDEVVMESTGIYWKSPYAALESVGLRAKVVNARHVKNVPGRKTDVGDAQWLAMLARAGLLRGSFIPPAKLRDLRLISRQRQKLVGQLASEKNRLHKVLTDSGVRLGVVVSDLHGQSARAMVKALIAGKPPHDVLKLASHRLKASREELFDALQGDLTDSHQFVLNELLQHIEEIEARIGRFDAKLLGELIDERNTLALLQTLPGVDLIGAAMLLVEIGTDMEAFGSADRLASWVGLCPGNHESAGKRKSGHVRQGNRYVRRLLCEFAHAASRTQSVFKSKFQALVVRRGYKRSIVALGHKLLRTLYVMLKRREPYRDSTTDYEALSVQRNAPRWIKALTKFGFLSQTTA

SEQ ID NO: 471272 - protein, 338 aa, unidentified
MKITTIGLDIAKLVFHAVAVNKAGKLVRKKMLKRKEVLGFFAKLEPCLVAIEACGGAHYWNREITALGHQVKLIPPQYVIPYRQGNKNDYNDALAIAEAAQRPNMRFVPAKSIEQQDVQMLHRVRERLTQQTTALVNQVRGMLAEYGIVLAKGKTAFRSQLPDILEDGENALTAKGRAIFHGLYNEFVELENRLKGCEKQVLQENADNPICQRLGTVLGVGPVTATAFYAAVGEGKAFHNGRHFSAWCGLVPRQHSSGGKDNLLGISKRGNAYLRTLFIHGARSILRHCEHKTDKLSLWAKALVERRGFNRACVAVANKLARIAWVIATKEETYRPAT

SEQ ID NO: 471273 - protein, 426 aa, unidentified
MDILQESCAGLDVHKKSVSVCVRKVDQAGKVTSKVREFSTMTEGILAMGDWMAAQGVQHVAMESTGVYWKPVWNLLEARFELMLCNARDVKNVPGRKTDTRDCQWLAQLLQHGLLRGSFIPPRPQRELRDLTRHRAQVTGEHTRVANRIAKTLEDANIKLSSVASDLLGQSGRLMLKAVIAGETDAERLAELAQRRLRGKIPELKKALRGGVSAHHRYMLGMLFDHLTYLEKTIAELEGRIETVMGSEALNEAPKENDTLPFDQAAELLNTIPGIEKRTAQAVLAEIGTNMAQFPSSGHLASWAGLCPGNNESAGKRKSAKTTHGNRWLKRALSQAAWAASHTRDTYLNAQYRRLARRRGKKRAIVALSHTLLTIIFHMLDQNTVYHELGPEHFDTLSPENRARFHKKQLEKLGFKVTLEIQEMVA

SEQ ID NO: 471274 - protein, 372 aa, unidentified
MRRPAVTQSPKVLQKGDRPAMKNDTTELRTMGLDLGDKESTYVVLDRDGVVEAEGKVATTAPALRKLLGKRERTVVALEVGTHSPWVSVLLKEMKHHVIVANPRQIPLITRSQRKTDRTDAETLARLARVDAALLAPITHRGQRAQEGRALILARAHVVAARTALVNHIRGTVKAHGGRLPQCDADAFAMRMWERIPERLQASLGPLLELVRQHTLLIKAYDGEVNRLAEKEYPESGVLRQIHGVGALTAVTYILTLEEKGRFKKSRQAGAYLGLAPRQQASGEQNPQLGITHAGDRYLRTLLVECAHRVMRGTDCDLRRFGERLTARGGKNQKKRAIIAVARKLAVLLHHLWVSGEVYEPLRSESSAPMAA

SEQ ID NO: 471275 - protein, 468 aa, unidentified
MASFVPQAAARPFIASPLPKLRDGQLFYFPSVLRTPATPLRSSQRRSNPLSGASGTIMQVVHRCCAGLDVHKETVVVCVRRVDDRGRATEEVRTFGTMTSQILTLGDWLVECGATHTAMESTGVYWKPIWHLLEGRVELMLVNAQHIKQVPGRKTDVKDCAWIAQLLQHGLLKESLVPPQAQQELRELTRQRTQLVGEQSRVAQRIQKVLEDANIKLASVASEVMGLSGRAMLRSLIAGETDPAKLANLAQRKMRGKIPALTQALAGRVTEHHRFLLKLHLEHYEQLEAYVERLNTRIGEALAPSVPVRELLETIPGIAQRAAEVIMAEVGTDVKPFRTSGHLASWAGLCPGNNESAGKRRSGAMRKGSVWLRTVLIQAAWAASRTKDTYLSSYFRRVSARRGRKRAAAALAHTLLVVVYHVLNRRRPYQDLGADYLDRLEPERLTKRLVKRLERLGLKVTLEPQTVA

SEQ ID NO: 471276 - protein, 341 aa, unidentified
MKQYVGLDVSMEETRVCVLDDSGTVVFEGSAPSRPEALAKLLHAQAQLAERIALETGSLSSWLWHELRAAGLPVVCLDARHAKAALSMRINKTDRNDARGLAELIRMGWYREAKVKSMESRQIRAVLAARSKLVDLRRDLENQMRGLLKSLGLVIGKAGVRVLPSRIATLLRDAPHLRSLIDPLMAAHSTLAKQVAKYDVQIRDLAKADQTIRRLMTVPGVGPITALAFASTVDDPHRFARATDVGAYLGLTPRRYQSGELDRNGRISKRGDRLTRYYLFEAANVLLTVVRRPSSLKSWAAKLVKRVGPKKAKVAVARKLAVILHCIWTDGTEFDWGRTAA

SEQ ID NO: 471277 - protein, 325 aa, unidentified
MDDTGRIVREVKVASEPEALLQALTNPGYHFKRIGLEAGPLSQWLYSALAEAGLPVICVETRHMRAVLKAQINKTDRNDARGMAQMMRVGLYRPVHVKTLRSQKLRMLLTHRKLLQSKAIAIDNDLRGTLRNFGLKVGMVGTVKFEARIKELVENLPDLAELVEPLLVVRRVLREQFVIQHRRLLAIVRDDEVCRRLMTVPGVGPVVALTYRATVDVPARFRKSKAVGAVFGLTCSKYQSGESERSGRISRCGDEMMRVMLYEAAQSMLLHSKKWSWLKAWAMQIARRRGMKKAIVALARRLAVIMHRIWVDGTEFRWTREAAVA

SEQ ID NO: 471278 - protein, 365 aa, unidentified
MNSVALSEGPIHLGLDVSKTKIAVGILRWDEHVPATEVIYNDEYHVRRLIDRFPDRGRVRVCYEAGPTGFGLYRLLRSIGVACDVVAPALIPRAPADRVKTDRRDCRRLARLHRAGELVAIRVPTEAEEAVRDLCRARAAMVRDRTRAQHRLSKFLLRHDRIWTDTAWTLQHQRWLDGQRFDDAALTATYDRYQAVLAARDAEVVAVEADLVHWYQHGPFAEAVARLAAYRGVAHLGALTIASEVGDWRRFPTARTFMGFTGLVPSEYSSGDAIHRGHITKAGNAHLRTQLIESAWAYQHRPTLGAVLRRRQTGVDAATAARSWTAQQRLCGRFRRLSTKKSSRNIVAVAIARELAGFLWAEMTA

SEQ ID NO: 471279 - protein, 354 aa, unidentified
MIIIGCDYHPGFQQIAFVDTETGDYGERRLEHSEGAEKFYRDLAAQGKKVRVGMEASGHARWFERLLVELTFELWIGDASEIRAKRVRKQKTDRQDAQHILQLLMENRFPKIWVPSGENRDLRQLLWHRHRMVQARTRIMNQLQAVALNEGLRCKKRLWRDAGREQLESFRLSPWASRRRRDLLELLDRLTPTIAELTAAIEQEVEKCPEAQRLQTHPGVGALTALAFVLIIGRADRFQCGKQIASYLGLVPLEDSSGQRRRLGHITKQGNSLLRFLLVEAAQVTVRSDQEWRSKYFHLAMRRGRKIAKVAMARRLAVRLYWMWRKEWNYGQLKKFGSHAGESGHRDGVKSNTE

SEQ ID NO: 471280 - protein, 473 aa, unidentified
MSKGSGVSRSERRRNARKERLRGILPRDGAVIGIDLGEGKQALVVADHDARVAWRKTARVRAHELGDVLDLAAGAARAAGFARVTVACEPTGARWMQVQRLCGERGLDMVCVQPLVSHIAREQQDYTSHKRDESDAALIARLAAELHCYVPEAQGEAWAFLRQLGRRREQLVRAATASVLRVRDFLSTAWPAAGTAAAVPFRSATWLACMEVVTGRCGADPARLAAVGEEEFLALVTDAARGWGASRADRRVARQVRGVLDDPDAVCWSRRGLLRRVADELADLRGCRARLKAVEADMTAVLAGELGLSRLGGIPGLTLLGAAVILAEAGDPRRYETSKSLVKHAGLSPADKSSGAFEGESRISRRGRPGLRTAAWRAVFPLLLHNPVMAAKYQAMVAAAEEAARESAARARPGSARAAQASRAVRSARAKARVACAASLLRWVYFMTVHGAGWDPAAASGGRLGPAPQAEAA

SEQ ID NO: 471281 - protein, 571 aa, unidentified
MIDELGKAKTIAELERITGASKNIIAKLEANAQMPKHRLPHNLCIDEVKAFPKRIAIRRGEPHMASCIYDADEKTLVDMLAGDDPKTVTAYLESFTKGERDAVATISCDLNGFYISLAEKFFPGAVIYADKTVCPERQDLGDHRPGRKGPPAQTGCDNEIPVSECGAQERAAEEKEDPLMTKYAVESEYCSVFGMDVHARTTTIKGLDRSTGETRMKRFNDAPAPAAIASWMKQNFAGPWYAAYESGCTGFHLCRELRREGIGCDVVAVSSIARSADDKQRKNDSRDATRLLSELVSMEKTYTAVWTPDPETEAMRDLCRARVAAVDAVKVAKLQTSAILLRHGYVWNEKTPDGTLKNSWTKNFVAWIKSADLGDACANEALAFSLRAVEEGAERVKDLEAKLDTLCDLPRWKPYVDAISLLRGVGKLTALTLACEIGSFHRFRSGRDVSKWLGTVPSHSESGGKGHHGGITKAGNAVCRTLLVEGITGSGRYKYKSSKALRAGQVVSPDVKAVCRKADRRLAKRRQHLSEQKKHPNKIKIAIANELIRWVWVIGCMVEDEQTVRIISRPA

SEQ ID NO: 471282 - protein, 321 aa, unidentified
MNAPIYCGIDVAKRNFVIGFSHQKKTKTETNNAKGIQHTLDYLSQFNVALITLEATGGLEIPVAKALARAGYRVFIANPLKASEFAKSQTRAKTDAKDAVNLAFYGLTCELKGEVEHQLYVPLSEQEEQLEALVVRRRQLVDMRVAELNRLQQSHETQLDNIQQHIEILDKLIAELDKDIDDQSKHFSDKADLISDIKGVGKNCVAVMMSSLPELGKLSSKRIASLVGVIPHPQESGQWKGKSFCHGGRAIVRNALYMAALSAIRFEPVFKAFYTRLVAKGKAKKVAIMACMRKLLTIMNALVRRNEKWDATRYLSTESVG

SEQ ID NO: 471283 - protein, 316 aa, unidentified
MSTEPVCVGIDVAKASLEVAVHPPADRWAVDYTDPAVATLVTRLTALAPALIVLEATGGLEVPLVGALAAAGLPVVVVNPRQVRDFAKATGQLAKTDTLDAAVLAHFAAVVRPRLRPLPDPATQALAALVTRRRQLIGMLTAERNRLGCAPKVLHKELQTHIRWLERRIASLDTDLDQAIRTSPVWRAQADLLRSVPGVGPVVARTLLAQLPELGTLSPKTLAALVGVAPLNRDSGLLRGRRTVWGGRATVRAVLYMGTLTAVRFNPVLRAFYLRLRAAGKLPKVALTACMHKLLTILNALLKHQRRWDPTYAKTR

SEQ ID NO: 471284 - protein, 303 aa, unidentified
MSIVGGFDVHRRQISFDWVDRATGQARRGQITPATAEVLGRWLAQLPCHDGAFAVEACTGWRFVVEELQAAGWQAYLAEPAETASLRGPKRRAKTDRTDAQLGRELLEQHRLPQAWIPPAHLLELWVLVRLRKTLVDERTAWQQRLHAVLFHHGLPCPDHALLTQATRGWLEQVTLPQASRLQVATALRQIDQLDLELDPLERWLRAFARRQPGCRALIDRHYGIGMLIAPTILAELGDARRFANGDAVVRHSGLDITVHSSDSKRSPGHLSRRGPQVLRWALFEAAQCAARRPLPTMTSTPR

SEQ ID NO: 471285 - protein, 354 aa, unidentified
MDIKYIGMDVHKETISIAVMKDDGKLVMESIIETKASTILQFIEGVRGDLHVTFEEGTWAAWLYDLLKPHVTELVVCDPRKNALMKEGNKSDKIDARKLADLLRGGYLRSVYHGENGLRTVKELARSYLTISKDLTRVMNRVKALYRSWGICCAGQQVYAPRHRSEWLNKIGETGVRRRAEFFYQQLDALRVLHKAVRRDLLAESRKHSATKLLREIPSIGAIRAALLLALIQTPQRFRTKRQLWTYSGLAIDTRNSAQHRFVDGQLQRSKKPQQLRGLNQNHNHDMKAVFKSAATMASGGEGPFHDFYQGLLTKGMEPAMARLTLARKIAAITLTIWKKGAHFDAKQLKPQAA

SEQ ID NO: 471286 - protein, 346 aa, unidentified
MEVTYYTGIDVSLRSVSICVVNDKGKVCLEAKVAAEIDAIVDRLRRFSSDVKSVGFEAGTLTQYLTYGLQAAGFEVICLEARQVSVTLAAMRNKTDRNDARGLAQILRTGWYSRVHVKSLHSHQVRALLASRKAILKKCVDLENELRGLLKVFGIRLPSRVGHGSFDAELRDTVSGDEMLACALVPLLDARTVLYKTYLKLDNAVKGLVRVDPVCRRLMSIPGVGPVTALTFKAAVDDPSRFKSSRTVAAHFGLTPRRFQSGELDNPGHISRAGDADVRSALYVAAHSLLTRNAQWSTLKAWGVGIAKVRGHRRAVVAVARKLAVILHRMWIDGSEFRWGPAPASA

SEQ ID NO: 471287 - protein, 355 aa, unidentified
MAVYVGVDVHKRFCQAALMNENGLIRELRFENTLQGASCLVNLARSIDPHVKAVVEPSANYWIKIYDKLEDEGFEVKLSNPSRTKAIAQARLKMDKQDAKTLAYLLRGDLVAESYVPTKKNRERRTLIRHRASLMKMRVEVKNRIHTLLDKHDLTYEYTDLFGKQGLEWLRSLNLSATDDHILKSNLQILEALNEQIQDADIQIAKDAVNEEQAKLLMTMPGVDYYAAMILLSEIGEVKRFASPEKLVSWIGLAPQVHQSGETHWTGHITRKGSKRARWILVQCAQSARQHDPKMREFYERIERKHGSSKATVAVARKMLAIMHVLLTRNEPYHGMNRQLTIQKHKRLERIANSA

SEQ ID NO: 471288 - protein, 346 aa, unidentified
MTTSIVGVDLSKSVFQLSMADVKHHVIERKRLSRTQFHRFLARTTPVRLVMEACGTSHYWARTAHLHGHEVKLLHAKYVKAYVRRTKTDVADADALVLADRDDSLHPIPIKSEELQALQGLHRIREQWKRARIGRICEARALLAEFGISAPLGARGIGKKLTLATEQVPVLLQPTLLDLIQEIGDLEQRLKRVDHTLAAYADTNCDVQALMGINGVGVTIATAAVARVPSIHMFKRGRSFASWLGLTCREYSSGQTRRLSRITKQGDRYLRMMLIHGARAALMAARRKAANGRRLTRLETWAVNTQARVGHNKATVALANKMARIMWAVWTRHELFNGDDALRFAA

SEQ ID NO: 471289 - protein, 343 aa, unidentified
MDSFAGLDVSVKETSVCIVDETGKIVREVRVASEPESLLAVLKNPAYHFKRIGLEAGPLSQWLFSALAEAELPVICVETRHMRAALKAQINKTDRNDARGIAQMMRAGLYRPVHVKTLRSQKLRMLLTHRKLLQSKAIAIENDLRATLRNFGLKVGGVGTVKFEARIKELVEKAPDLMMLVEPLLVVRRALREQIGILHRRLLAIVRDDDVCRRLMTVPGVGPVVALTYRATVDVPVRFRNSKAVGAVFGLTPSKYQSGEINRTGAISKCGDEMMRAMLYEAAHILLVRSAKWSWLKVWAMQIARRRGLKKAIVALARRLAVIMHRIWVDGTEFRWTREAAAA

SEQ ID NO: 471290 - protein, 350 aa, unidentified
METLSLGIDVAKATVEVAAWLDPRGHKLGRFPNTTEGHERLGERLAALAARQEATQLQVTLEPSGGYELALALWLHAHGYRVLLPNPASVRHFAHTSGRRAKTDGQDALLLAQFGAAHPSAPAWQPLPPHVAALEALLGRQAAVEDLLQQEQHRQGMLAAQPHLPAVVRQSVAQVIAALSSELASLGTAIREHLAAHADLSEELDLLRSVPGVGVRTAPWLLVLLRRWALLTHDAGTAKGLTAYVGLDPKPYESGSSVRRHAGISRQGSAAMRRTLYLAAFGGVRHDNALRAFYLRLRGRQKPAKVARIACARKLLVWAWAVYRSRTAFDPSRAGARQTAQPHEEVLLTA

SEQ ID NO: 471291 - protein, 359 aa, unidentified
MLYVGIDQHKRHLTVYVRNEQGDMTVRRQVRTGWEEVDSFLESLLSQSLAVGGYVAIMEVCGFNGWLVQRLVRWGCHRVYVVAAPPRVRNKTDRRDAAKLSEMLWINRERIAKGQRLLQVHETYQPTPAEQEARQLVHLRQRLGKERTRVKNRIQGILRRHNLEQECPTKGTFTRQGYRWLTRVELPAIDRLELDMCLNQYVLCSYNLDKVAALIRDRALEQPAVKLLRTLPKIGEYTALALWAHIGPITRFPRARSLANYFGLTPGCRNSGESDRPGRITKAGHPAVRFLLSQAVLGALRHDPGLRSWYRQVKRRRGVKTARVAVMRRLCESVWHMLSKQEPYRCVGSVKKEEPSGVA

SEQ ID NO: 471292 - protein, 411 aa, unidentified
MDVLIERCAGLDVHRDTVVATVRRPGPGGARRSETRTFTTMTGQLEALADWLTAQGVTLVGMESTGIYWRPVYYVLEDRFPVWVINAEHLRNVPGRKTDVADSMWIAQLIEHGLVSPSFVPPRNVRLLRDVTRHGRRLTEERTRTIQRLEKVLQDAGIKLTSVASTILGKTGRAILAALLAGEEDPTVLAELAKGRLRPKIPALREALTHRFRLEHHGALIAQMLAHIDFLECSIAETNQRVEVLLRPVADMVELVMTIPGVGRRVAEVLIAEVGLDMTVFPTAGHLASWAGICPGNNSSGGKRRPGRTRHGSMWLRIALTEAAHVAARGKNTYLAAHHAQIRGRRGTQKAIGATRHDILIAYYHIVRDRVPYQDLGPDWNNRRRSTEQQTRRLVRQLERLGVNVTIESMS

SEQ ID NO: 471293 - protein, 450 aa, unidentified
MSKGSGVSRGDRRRNARLAELRLLVCRENAIVGIDLAEDNQAVVVTDHDSKVLARRSPRCKAWQLGEVLDWAVGKAKARGFESVTVACEPTGSRWMHVQQACAERGLNFVCVQTLVTHNARVAEDYTRDKSDQKDAVLIARLTAELRCYRPEVIEEEWAVLRYLGQRRDALVTGALRCRQQITDRLALAWPAALGAAAAPLDSVTFLACLQVTADRCDGDPGKLRRYGLAEFTQLVRGVLPRWGGQRICHRIVACFHAALGDSRGAVPARRRGALKLAGHALADLRRARELQLRAEAEMIAQLDVLGITDVLASIEGLSLPVAACILAEIGDPARFGSSRALVKHAGVAPCDNSSGNSAGQARISRRGRPVLRKTAWRGTWAMIHGANPVLAAKYGHLTSRDTGKLAKGQAHIACVATLLRWIYSVITTRTAWDRRVAGGTISHTAALAA

SEQ ID NO: 471294 - protein, 322 aa, unidentified
MQQDEVMVGVDVSGTQLDVALWPSGENFSVSNDMQGVEQLLTRMVEVHPRAVVVEATGGLESLLVGELCAAQVPVALVNPRQVREFARSLGQLAKTDRLDARVLAQFGHSAHRSGRLKLTQLLPAADAELKALVRRRRQLIEMLGAETNRRQRASKVVKKSIVATIRSIKRTLAELEQQLRETVKNSPAQQNKAAILEQVPGVGPQLARTLIAEVAELGQLGRRQIAALIGVAPHAHESGQFKGRRMIWGGRAGVRRTLYMTMLTATRYNPLVAPFYRRLLEAGKSKKLAYIACARKLLVILNAMFRDHTTWNPKLDLQHSR

SEQ ID NO: 471295 - protein, 376 aa, unidentified
MEVLHTHCAGLDVHKDTVVACVRHMAGGAVKREIKTFKTTTKDLMALSDWLSAEGCTDIAMEATGVYWKPVWHVLSDGEFVLILANAAHVKNVPGRKTDVNDAAWLADLLAHGLIRGSFVPDEQTQEMRDFLRTRKQLVRERSGHIQRIQKTLEDANIKLDSVIANIMGVSGRAMIEALITGETDPAKLASLAHRQIKAPRDDLNEALRGKVTKHHRFMLRLHLQQIDALDAAIAQIDQEVDANVEPFRALIEILSSIPGISALSAKVILAEIGADMSRFPTDAHLISWAGLCPRNDESAGKRRSNRMRKGAPSQDHIDPMRLGGGPQEGLLSPGPIPSPALKARRQESHRRRRRIDPDRRIPHAQGWHMLPGPRP

SEQ ID NO: 471296 - protein, 340 aa, unidentified
MPLYGGIDLHANNSVVVLLNDQDQVIYQKRLPNHLSAILEPFTLHHGEVKGVVVESTYNWYWLVDGLMEAGSHVHLANPAAMQQYNGLKYTDDHSDARWLAHLLRLGVLPEGYIYPKAERAVRDLLRKRAHLVRQHTANVLSVQNIMVRNTGARLSVKRLRELTKRELESLLPEADQVLAVTSSLAVLDCLSQQIKTLEQTVQQRLRHTPAYEQLLTVDGIGTILAQTITLETGSIGRFPTVGNYASYCRCVDSTKISNGKRKGQGNVKNGNPYLGWAYMEAAQFALRFNMGAQRFYQRKLAQSKNNTILARKAVAHKLARAGYYIMRDLVPFDTRKAFG

SEQ ID NO: 471297 - protein, 309 aa, unidentified
MIAEPIVAGIDVSKDRLDVHVLPGSDVLSVDHSPKGLARLAAYLHRLGVERIGLEASGGYERQALNTLAEAGFEVCLVPPARVRALARALGRHAKTDPIDAWMIARYVQLTPGQHDYQPDPARQRLDELAGLRRQLVAERNKLVSRLDIAKDKLVRTLLSRMHIMVQANIARLDREIVDHIRASHLNERYTIMMTIPGVGPVLAATLLCDLPELGHATHKQLASLVGVAPHARQSGRTARAGRCSGGRASVRNVLYMATLSALKARVPALRTFYDRLRANGKPFKVAINAAMRKFISILNAIIKQSTVA

SEQ ID NO: 471298 - protein, 370 aa, unidentified
MKEYSEAFIGFDTAKKKHAVAIADVGREGEIRYLGEIDSSPLTIERMIRKLAGRYEKLHFCYEAGPTGYGLYRQVRGLGHDCSVVAPSLIPKKSGERVKTNRRDAVSLARLFRAGELTSVWVPDTVHEAVRDLVRARETASQDLRRKRQQLLSFLLRHGRIFSGRQHWSRAHLRWLAQQKFDHPAQQIVFQDAVDAIDDAAARLRRLDEQVAAIVPSWSMAPVVEAYQAMRGVSFVVAVTFVAEIGDLRRFDNPRQLMAFLGLVPSERSTGERVRRAGLTLAGNKRARRVLIEGAWSYRYPARVSQTLQARLEGLPKAVREIAWKAQIRLCARYRRLNAAGKKLPVVIAAIAREMAAFLWAIARHVAPAA

SEQ ID NO: 471299 - protein, 407 aa, unidentified
MICVGIDVSKRKSTVCFMAPGDKIIRRPFDVKHTKEELQPLVDEIRVQAKYDEIKVVMESTGVYHLSIAYFLQQNGIFVSVVNALKVANFNKAENFRHTKTDSIDSTNIARYGIAYWAKLPQFDLNGDKYFLLKRLCDAYLNFSEERSRILLQLQSQLEQTMPGIFDLFGGFDINSGKDKLLDFLEKYCHIEDIIAKSEAEFIASYCGWAKEKGYRSNESKAATIYAQAKNGIPSIPNNPIVRETIMWYVGLLRRADEALMASLTRMEDIAKDLPEYELVGEMGGVGRVTRVALIAQIGDVRRFKNKHSLICFAGLTPSIHESGKFRASQNHIVKKGPARLRKVLYQVMMSLVMHKIPKDDAVYRFIKKKEAEGKYKKVAKVAGMAKFLRIYYGRVMHLYRDLGLAA

SEQ ID NO: 471300 - protein, 345 aa, unidentified
MNITTVGLDLAKNVFQVHAIDEAGEVVVGKALRGHQMMPFFSKLDPCLVGMEACATSHYWARQLSQLGHQVKLMPPIYVKPYVKRGKTDAGDAAAISEAVTRPTMRFVAVKSLDQQSMLALHRTRDLLIRQRTQLVNMIRGQLAEFGIVLAKGIQHVFKFTGQLLGGEAPDIPPLAVSVIVTLAEQLRDLHARIGGLDKDIRTWSKDNEVVKRLQTIPGIGIVTASALAATVTDPHQFTSGRQFAAWLGLTPRANSSGGKERMGRISKMGDQYLRRLLVNGMTSQSQSVRRNPDAYPWATSLMRRKPDKLVAVAMANKTARIVWAVMTRGEVYRAPLPATVKEAA

SEQ ID NO: 471301 - protein, 457 aa, unidentified
MKKRGFLGIDVSKGYADFLLLDSDGNVMEEGFQLADNKQGRQKLKEIIASWQKKGLEELFCGVESTGGYENNWYAYLKTGFKDSKVYVCRINPRGVKAVGDASLKRTITDAVSAENIATYMISFPKKLDYGIDTLPVDQGFKEGRQHMTYIRMLQKQKVQLSNQLEKLLYQYFGETLIYCRHGSPVWLLTMLVKYPTAAAVLKAGVTGLSIIKGISQEKAKAIIAKAKSNTQDSSPQIAHVITVTAREILHKDVLIKEEKAYLTGMYQTAKEVALMSTIPGIGIDSAVAIMLEIEDVRRFETVKKMASFFGVHPTFKQSGDGMWGNHMSKKGRGEIRAILYMATLSAIRFNPILKQVYARFRAKGMKHHQAAGIVMHKLLRIIFGILKNQTPFNAETDELNQQKATEKQHDQEQKDKAADKVKKQKKHRFQETSTDAPISRRAEQKIRKQIASQASD

SEQ ID NO: 471302 - protein, 415 aa, unidentified
MALKIVYQICCGIDVHKTFVVACIASTNKQGVTTYKRHRFSTFTQGLKELLQWLLDNHCKDVCMESTGKYWIPVYNILEKDCSIVLAHPKYVKAIRGKKTDKKDAKWIADLFKHDLVAGSFMPPADIRQLRDLMRYRFKLTCFMSSEKNRLQNCLTVSNIQLASVVSDTFGKSSQRILDKILENPDDTSFDIEPLIHGSMKKKLPELELAIDGFITPEQAGKLKVIKKHFEDLESRKAELEKLILALASPYQQELDLILTAPSFKNKFTAIGIISEIGVNMEAFPSAKHLCSWAGLTPTNNESAGKKKSVRVSKAGCYIKPLLVQCANSVVKSEKHPEIRNRYLRLRKRRGHKKAIIAIARMLLTALYNMLKNKEPYNAELYRKSDVLPVNREITIEQAILMAQFQGYKIKSATA

SEQ ID NO: 471303 - protein, 410 aa, unidentified
MEVLYTHCAGLDVHKDTVVACVRHMANGEVRREVRTFKTTTKELLALSDWLAGEGSTHIAMEATGVYWKPVWHVLSDGDFTLVLANAAHVKNVPGRKTDVNDAIWLADLLAHGLVRGSFVPDAPTQEMRNLLRTRKQFVRERSSHVQRIQKTLEDANIKLDSVISDIVGLSGRRMIEALIAGETDPATLAALAHRRIKASPAELEAALRGRVTEHHRFMLRLLLQHIDAIDAAITQIDQEVDGKVEPYRAAIALLTTIPGVSVLSAEIVLAEIGRDMSRFPTAGHLISWAGLCPKNDESAGKRRSTRMRKGAPWLKTTLVQCAWAASRRKASYLQAQFHRLRARRGAKKAIGALAASILTTVYHMLISGELYHDLGPDHFDRRAKARQTSRLVTRLQNLGYAVQITPLAA

SEQ ID NO: 471304 - protein, 450 aa, unidentified
MSTLETPQPTPAVAQPPAFAAHIGLDWADQKHFWTMLVDGHKTRGQLDNTPEAIEVWAAELAQRWGGRPVALALEQSRGAVIAVLSKYAHLVLFPIHPTSLANYRKSFSPSGAKSDPVDGDLILDYLVKHPEQLRCLRPDTVETRSLQFLTAERRKLVDAHTATLQSLIHWLKQVFPQIMRWFDDPGAPLVADLLLRWPTLQELQKAKPKTLLRFFHQHNCRSEERTQERLQQIRQAVPATNDPALLQAGILSIHNAARILAGMRQGIAEFDRQIAVTYQAHPDRFITESLPGAGPALEPRLIAAAGSLRDRFDSAYHMECCFGIAPVTEGSGNSLWIHWRWACSKFVRQTFHEWAACSIRTCDWARQFYDRQRANKKDHHAAVRALAYKWIRIFFRCWRDRVAYSDQRYEQALRTRAAQSKPVVTDSQVDFSVEWKSCGGFSKPAKVSS

SEQ ID NO: 471305 - protein, 391 aa, unidentified
MAMYFVGIDISKYKHDCCIISAVDQKIVSKLTVKNDKAGFEQLLTVFNSLSNPEDIKIGFESTAHYALNLELFLENAHHSFMEINPLLIKEYKKSTSLRRTKTDSVDCESIARWLMTVEYKPHSKGFYHSYSLKSLTRLRDRLIRQRSFYLVKITNVLDHTFPEFKPFFHERLSKTALYLLENYGSAEKMAKMNSASYEKLRSLSRGKFSPQQFIRLKELAANTVGVNNSIFDVELNSLLTLYKSLIKEIDTLEKEINRLIEEVHPHYMSVPGIGPISAAVIYSEYGDISNFSTPAQVLAFAGIEPGINDSGTESHGGRMVKHGSSQLRYVLINCCLPLIRFDMTFAAYYAKKRGEGKPHRVAVTHVAKKLVRVIYALERQGVDFNALKLR

SEQ ID NO: 471306 - protein, 416 aa, unidentified
MSLALPPAEFLVGVDWAAEVHAVCVINIEGKVLSQFTVAHSADGIALLLRRLAKFGEPIDIPIGIERRDGRLVDLLLEAGHPVVPVSPNAIKTWREGEVLSGAKSDAADAAVIAEYLRLRRHRLTAAAPYSAETKAVRTVVRTRDDLVQMRVAAVNQLAALLDAYWPGATAIFADLESKIALEFLSRYPTPTAAAHLGEKRIAGFCAARGYSGKRSAAELLTRLRAAPAGTTEPHLTVALHDAVLALVGVVKAVNTAIKDLDKSVAARLGEHPDGKIFTSLPRSGQINAAQMLAEWGDCRQAYEAPDSIAALAGCTPVTKASGKHKAVHFRWACNKRFRVAITTFADNSRHASPWAAKIYNDARTAGKDHPHAVRILARAWIRVIWRSWHNNTPYDPTRHGAAQPLSAHSSANLAA

SEQ ID NO: 471307 - protein, 356 aa, unidentified
MDEILSAEVVVGVDTHKHLHAAVAVSALGARIGIKAVPVGEEGYRELEAWARSLGTVRAFGVEGTGSYGAGLSRFLSGQGYTVLEVNRPDRQLRHQKGKSDPIDAEAAARAVLGGQVTALPKSGTGTVEMIRHLKVARDTAVKGRTQAMLTIKAIIVSAPEALREQLERVSGKMTLLRHLAALRPSPLTSTTASAKASLRAIARRWLALDEEIKNHDKHLEALAAERAPELLQAHGMGAGTAAEMLLIVGDNPERIRSEAAFAKLCGACPIPASSGKTTRHRLNRGGNRQANAALYRVVVTRLRGHRPTLDYVSRRTAEGKSKSEIIRCLQRFVAREIFGYLCRRLNQSAMAPAAA

SEQ ID NO: 471308 - protein, 364 aa, unidentified
MDVHRDSFTLAHYALDMKQPTGIVKTDNDYRRIVAYVHRLREKYGKETRIVCGYEAGCLGYTLYHQLTKAKIESIILAPTTLPSPRGGKRVKTDGRDAANIAQCLAYGTYSPVHVPSAEDEQVKEFIRMRNDHCQMLKKLKQQILSFCLRHGYQYSGTRSNWTQAHMKWLDALQPEGLLGDTLEEYLTSFRYHQNKLERLDRRIEEISREETYREPAGKLCCLIGVKPLTALSVVSEVSDMHRFPTAEKFAAYLGLVPGEHSSGNSVRRGGITKAGNVHVRALLTEAAQCYTRGKVGYKSSALKKRQSGQSETVIAYADRANERLRRRYYQMTLQNGKRGNVAKTAIARELACFMWGLLTDHVA

SEQ ID NO: 471309 - protein, 453 aa, unidentified
MAKKAKKIKTAKGLRLKIVNPDSAGIDIADGEMQVCVPEDRDGDNNRRFGSFTEDLHAICEWLHACRIKTVAMEATGVYWLSLYQLLKEEGFDVVLANPLQVKNLMEEKTDEADAEWLMLLHSYGMVRPSFQPENIVRQIRNITRHRATIINKAGQETQRMQKALEMMNVKLSTVITDILGKTGQSIIRAILAGNHDPVSLSQMTDKHCKASKETVAKSLEGTWDEDLLFMLRQSVECYDFYQGQLRDCDQQIESLLARYVSQIDNEGAKQLERVKKRRSQKNAVAVDMEMYAHMIWGTNVMAIPGMSTNSMLQLVAELGHDFTDKFDTCAKFCKWCNVVPNNKVTGGKLVSSHIPKRKNPVGLVLRVCANSVKAEKSEMGTYFRRMKAKSGHMQAIVATAHKMARILYAMVKNKQAYDPAKVGCDEKELLIRKIERTKRALQRLDDRLRDTG

SEQ ID NO: 471310 - protein, 428 aa, unidentified
MIRRLVGVDLGIASAHTVRVLTEDGREVCRRRCEPTVDSLRRVEAAALAGAPAGTVLEVVMEPTGPAWLPIAVFFTARGHRVFRVSSGKAADLRRFLSRHAKSNGIDADTLARLPLVDPAGLYPLELPGTEAAALDRRVRATDRLTVLAAQHKVRIKDLTRQLLPCSPLTGDLGVADLAVLERWADPRALLAAGPARLTALIVKASNGHLGADRAQQWRAAAAAAVELYGDHPAIAWTDLAAEVGTEVRLLRATQAELAAHARERETAYRYADLGGLARSLPGVGDVGGPVLVAGMGRPGRFPNGAAFKSYTGLAPRAAETGNTDRKGQPMSKAGSSLLRTTLIRAADTARKQDPQLHADGRTRRRAPQSGVRGRRGARRTHLDRHEPADAVRDLRYRRHTGHPGTGETDHRAELHRPRRGPPPAPQQ

SEQ ID NO: 471311 - protein, 466 aa, unidentified
MKPFYLGIDVSKGYADFMIIDAQKKPVTQGFQLDDTFVGHQALYNIVGRFLSKHSDSMLFVGMESTGGYENNWYNSLVAFQGSLDIQTARLNPLGVKRNSQADLKKNTTDKISAQNIAEYLVAHPEKVAYQQQDQLAGLRKQWGFIQMLTKQRAQFLNQFKGLLYISNPELLRYCQSETPAWILKLVVKYPSATRLKKARVKTVAKIPYLPKTKAQQVVADAKRSVASATDMATEQLVVATAQQIIHLNKTIDGQTRRMIEACAVPEVELLKTFSGINDKSAIGLIIEIQTVERFKNAKKLASFFGVHPVYKISGDGVGGIKMSKQGRKEPRHILYMVTLSALNYNPLIKKIYEKYQKNGKHNMAAMGICMHKILRIIYGMLKHNKPFDPRIDIANRRRGMQARKASPERNLSRRFQAYDTKAPVSRRQKKKRLERDRSHSVPDTKSGITAPVPVGDIIANILPEL

SEQ ID NO: 471312 - protein, 392 aa, unidentified
MNTITKSAASITGCTSTILAIDLGKYKSVASVHDQASGEIGFTTIDTTRAELRKLIDREQPGVVVIEACLLAGWVHDLCAERGVRCLVANTASEAWKFKHLKRKTDKDDALRLAQLYALGQLPTVTLPPTTVRQWRSLIAVRQTLVGRRVAVQNRIRALFVAQGLPAPRGAKAWSATGLAGIASHAKPLPACEPAELWRGLLELALTEYRQLGELITRAEARLDQIGQQSADVKLLETAPGLGPRTAEVVAAYLNDAARFKTGKQVSAYSGLVPRQHQSGEMDRRGRIGKRGPALLRKLLVECAWCMLRYNGWARGIYLRLTGGGQRRKKQAIVALARKILVRCWAMLRDRRAWRDPQAGPKQRLSPSKRLRQAQSAPRAAARAAPKAAAPA

SEQ ID NO: 471313 - protein, 324 aa, unidentified
MTITTIGLDLAKNVFQVHAVDEAGTVVVRKALRRVQVMPFFARLAPCLIGIEACGTSHHWARELQKLGHEVRLMPSAYVKAYVKRGKTDAADAEAICEAVTRPTMRFVPVKSRDQQAALSLHRVRSLIVKQRTQLVNMARSHLAEFGVCIPQGIGNALHLLQQSLDGNSELDLPEPAQAMLQILARQALLAHEQARDIDRQLQALYRTDEIARRLATIPGVGPVGATAFAAAVADPAQFKSGRQFAAWLGLTPLQNSSGGKERLGRITKMGDKYLRKLLVAGATALVKQFKVRPDRRRLQERRDMMAISVRPRTETTHCVSKAS

SEQ ID NO: 471314 - protein, 433 aa, unidentified
MKVLYERVAGIDVHKDMIKVAIRSPGDKPWTRKTEIFEFRTFYGVLQQMARELRKRGVTHVVMEASGVYTEPVYYALAEQDFTEVAVINPAHAKALRGHKTDAKDCARLAELFECGLLRGSYIPVPELKEVRDLTRYRIKTVQARTSEIQRLGKALESAGIKLGSVASSITGTASTAMIEALIDGERRGGVLADLAIGRMRTAGKLADLSMALAGRFTDHHALLCRLHLDRIAVFDDAVDGLDKRIAGKAARWQREQGLLTSVPGFGDVVAQAWLGEIGPAPHRHFASCEKLASWVTLCPGNNISARKRKHGRTGDAGTYIKPMLVQAAWAAIRVRGRLQARYNRLVRRFGGARNPGAKKKAITAIAHTLLKIAYQVLKSGVPYQEPGADFYTRRESPEHKQAWLERQLQKLHPGCTVTITITPPEAALPPGA

SEQ ID NO: 471315 - protein, 346 aa, unidentified
MYHVGVDLHKDSMTVAVGNEVGEIVRTEKIPCKCINKVRDFFSQPEISSSRVAVEAVGFYHWFWDEVSPKVAQMVLANAIETHKYSKDPKTDFRDAKRLAHLSCSGEFERNQSLNVFVPDLELRTLREVTRHRDSLARNRASVKNRIRRYCLKKNLPGPKVLDAASYQKWLFANEDKFSSFHRFALRELEDQLILLSRQIKDTERIITEFMEKERLKETKRILCSIPGVGEIVAATIIAEVGDFSRFPSAEQLTSYAGLVPRVFQSGQSERHGRVTKEGPANLRWMLQQAAWVAIRQDRRIHQTFERIARKAGRKKAAVAIARKILVWAWYLIKDKKEFRATTDAV

SEQ ID NO: 471316 - protein, 323 aa, unidentified
MDTLDFLGIDIAKKTFDAALLRDDKFRNKKFPNNLEGFKQLDAWLVKQGVIQIHACLEATGSYSEALAVHLHQAGHTVSLVNPARIKAFGQSELQRNKTDRADAMLIARFCLKQRPASWTPAPPEIRELQALVRHLDVLIATRAQLRNRLSDGVQIESVLESLRSLIKTLDAEIKLTRKKIRQHLDSHPGLKADHDLLVTIPGIAEQTATKLLAEIEHLGQYKHARQAAAYAGLSPMLMDSGTSLKRSRLSKTGNGRVRKALYMPAIVATRYNPVLREFSERLSRRGKSKMVIIGAVMRKLLHLAFGVLKTRKPFDPNHAIAA

SEQ ID NO: 471317 - protein, 487 aa, unidentified
MKKRAYRSTTVKSVKVAEVLKALPDGPVWIGLDIAKAEVLAVLRDATGQVLRPWKTKQPSEIRDLTALLSQVAETHEVNVAMESTGTYGDALRQALEDAKLPVYLVSAKFTHDFSEIMDGVPSQHDGKDATIVAELAAMGKASPWPCPTLSADEDALHEEVQWLDAQQAILQVWLGRLEALLARHWPEATELLALDSVTLLRTLTEHGGPQALAQDPQARQKLAKWGGRLLLPEKIAAVLESARTTVGVRMTAATQKSMQRCAEAAHQARTAVRRTKASLTRRAKKHPILSRMAKAVGHATACVLWAAVGNPQDYHCGEAYRKAMGLNLKERSSGQYVGQLKITKRGSSMARRWLFFAALRILQQEPVWTWYLKKKHKDNERGGKAVVAIMRKLALALYAVAKRDVPFEVARLLPGRPAPKPRREVKSILGALPPAPRDLSPSCRSRTNGAAQTRGLAPPKRSVPAPELALGSVPTGALSSAQARQS

SEQ ID NO: 471318 - protein, 411 aa, unidentified
MHNRQNYLYVGVDLHKEQHTAVIINCWQEKLGEIQFDNKPSAFSKFLLEVETYVCDGITVVFGLEDVGGYGRALAKYLVDHERVVKEVNPALSFLERKSQVMIQKNDSWDAECVARILVNKFNQLPDAKPNDLFWAIQQLVSRRNALVKAQSALKNQLHIQLNHHYPSYKKFFSELDGKTALAFWQQYPSPSCLEGTNIKQLTAFLLDVSNNTCSVKKASDILKLVKEDGQTMKEYQETRDFLVRSIVRDIEFKKKEMKYIQRELKRLVNLLDYQLETMPGIELVTASALIAEIGDVRRFPNANKLARFAGIAPVYFGSGGKGKTHKSKQGNRALHALFYNLAVQQVQVAKGSKLPRNPVFHAYYQKKLKEGKTKGQALVCIMRRLVNIVYGMMKYKTAYELPVVEEKEVV

SEQ ID NO: 471319 - protein, 359 aa, unidentified
MTNLKYSIGIDIAKDEFKACISLIDHQQKVTVKSTGSFKNNSTGFNDFYVWVTKHIREPISSHFLMEATGIYYEQLAWYLYNKDCQLSVILPNKAKKYLQGLGQKSKNDKIDAKGLARMCAEQSLDLWKPLSKNIYRLRALTRLHEDLTIQTTSLKNRLDALESSMFDLSDSRKSLSKLINATKKELKNLESQIEETIQQDQLLKAKYDKISRIKGVGLMTFAVVIAETNGFELFHSISQLTSYAGYDVVENQSGKKSGKTRMSKKGNSHIRRVLHMPAFTVVKHEPSFKIFYNRVFTNTTIKMKAYVAVQRRLLTLMYTLWKRDTEYNTNHSEAGIADPLWVDSEGIKKSQAQSALAL

SEQ ID NO: 471320 - protein, 426 aa, unidentified
MKNLNVLTTLFVGIDISSKNNVVYAMDFHSNKLLNVSVKNNHVGALELTDHICSIMEDSTFTSIVFAMESTSNYAIHLATYLSSDSKLLAFNPYVYCLNAKTISNYRKSFVGLPKTDNQDAYIIADFARVGRIQSDPWRGSQFLALQRLTRHRLHLVDAVVREKNYMVANVFLKFSELSVLKDDEHPFTSNYTATAEAVLTEFFSVQEIIDLSIEELVEFLCKKSKNRFSNPNEVASILKKAARDSYRLDDTLYEPLNAAIASSFNCIATFQKEIKDIDKAIIRAIKGLNTNEYQCLLSIPGIGPVFAAGILSEIGSVKSFNSHDALAKYAGIVWNKNQSGDFDSDVTSMSKAGNRYLRYYLIEATNSVKNHMPEYNAFFKKKYDEVKTHQYKRALALTSRKFIRLIYGLLAKDQLYSPSKVGETK

SEQ ID NO: 471321 - protein, 313 aa, unidentified
MEQSVQGIVVGIDVSKARLDVAAAGAYWSVTNDLDGIRKLVVRLQALLPGLVVVESTGGLERGVLTELSAAGIPIALVNPGRVRDFAKSIGLLGKTDKIDARLLVRFGEATKPKPTQLPDSDVQQLSAWMTRRRQVVDMLTMEKNHLSSAHPATRASVQKIMDVLQHELDELNRQIEDFIDHHPGFQQKENILRSAPGVGPVTAAILLSDLPELGTMDRKKVAALVGVAPFNNDSGHHRGKRRVKGGRPSIRKVLYMATVCATKHNPVIHSFYQHLLSLGKEKKVAIVACMRKLLTFLNAMIRDSRKWQPATT

SEQ ID NO: 471322 - protein, 404 aa, unidentified
MIFVGVDWAEAHHDVCVLDGEGQVLGKRRITEGVTGLADLHALVADHAEDPEEVVVGIETDRGLLVSALIASGFAVYAINPMAASRYRDRHHVSGAKSDPGDAKMLADLVRTDRHNHRRVAGDSDLAEAIKVLARAHQSAIWARQRQSNALRSALREYYPAAIEAFGTDLTSTDALGVLGVAPTPELGRQLSRSKLAAALRRAGRQRNVETRAEAIQAALRTDQLGQPAVLSGAYGHVTSSSVRMITQFNVEIAELEGALAEHFEQHPDAKIIRSLPGLGTILGARVLAEFGDDRTRYADGKSRRNYAGTSPITRASGKSRVVLARFARNRRLADALDQWAFCSLTHSDGARSYYDQLRSRDKTHRQALRQLANRWVGILHGCLDYQCLYDESVAWPSPATAAA

SEQ ID NO: 471323 - protein, 372 aa, unidentified
MSKVIMAGCDLHDRSMLIRYSIDTDEPQQLTFKNDATDRRRMISRLKSLAKKSGVKRIVFAYEASGLGYGLADQLHAEGIECHILSPTHLPKTRKAAKAKTDAKDAQMILEQLRGHVLAGNKLPVVWTPPQRLREDRELVRARIDIADETTRIKNKLLSTIKRYGVVRPQWYTPQWSKRFVRWLRQDVLPTLDLAVCAVLEQLVDQYEQLIASRAKLDKAVRELSRENRYAVAFQKLLEIKGVGTLTAMSFLTEMGDLHRFANRRQVAAYLGLCPASYESGETNDRKGRITRQGPARLRRVLCQAAWTSVVHCEQAQQDYHRIKQGQKKRTKKALVALMRKLGIRMWHLAMSAGVSSELQGRGGPNELVQAA

SEQ ID NO: 471324 - protein, 338 aa, unidentified
MIGVDLAKSVFQLHAASMTGEPKFRKKLPRSAFAAFMAAQPSAVIVMEACGSAHYWAREMIRLGHEVKLIAPHYVKPFVKRQKNDAADAEAIVIAAQRPEMRFVDPKSEEQQSRAILFRGRERLVHQRTELVNAVRAALYEYGHVVPQGINQLCRIADILDELNSDLPVLMREECRDLLAQIAEKTERINIRTKKIKALAAETDAAKRLQTIPGVGPLTALAVEAFAPSMESFRCGRDFAAWLGLVPRQFSSGGKERLGRISKAGQADIRRLLIIGAMSRLNWMGRRSIPENSWLADMLARKPRMLVAIALANKMARTIWALIKNGNEYRIPAQAAVA

SEQ ID NO: 471325 - protein, 408 aa, unidentified
MEVLHPKCAGLDVHKDTVVACARIASGAEVKQEVATFGTTTKELLSLNDWLTERGCTHVAMEATGVYWKPVWHVLEDAFELVLANAMHIKNVPGRKTDVNDAMWIADLLAHGLIRASFVPETPIQDLRTLTRTRKQLVRERAQHVQRIQKTLEDANLKIASVVSDIMGKNGRLILQALIDGKTAPDDLVAVTDGRLRASREVLSEALRGRVTKHHRFLLKLHLDQIVALEASIDAVDEEVGSVLDPFQVAVATLKTIPGVSDVSAQVILSEIGADMSRFPTAGHLLSWAGMCPRNDESAGKRRSTRLRMGAPWLKTILVQVAWAATRTKNTYLGAQFRRLKGRRGPKKAIMAVAASILTAAYVMLRDGVPYRDLGHDYFDRLDRTKTITRLVRRLKDLGCDVEVKAAA

SEQ ID NO: 471326 - protein, 355 aa, unidentified
MVLHVGLDLSRRRVDVCAIGETGELVGQFRSPVDRDGLYGLSRRLEPYGEQVRAVVESMNGARFVHDELTAYGWRVLVADAQRVKGLAPLACKTDKVDARVLAELSWRDLVPAIWLPTAGVRCERERARYRMHLVKHRTTLKNRVHSTLIAHGHQAPVSDLFGAQGRRLLASLELPDPWAGTTTATLELIDDLDRRIAGIERELQRAGAEHRYVPILMTAPGIGWILAYTIAAEIGEIERFPTAKRLVSYTGLCPRVHQSGEVDLRGRLSKHGPRYLRWALIDAAAHASRHPIYTERYQQIKRRVGRQRGSKVAQIDLARRLAEAIWHMLTKNEPFTPFTPTGATRPLAATTAPH

SEQ ID NO: 471327 - protein, 349 aa, unidentified
MQETITATIGCDLGEKQSTVSILWPDGRMERPKPIKTTAEAMRLFFTRPKAHVVIEVGTHSRWVSALLEELGHQVTVANARRVKLISQSDSKSDQVDSELLARLGKADVKLLAPIRHRSMEVQSDLAVPKARDGLVGCRTKLINSCRGLVKSFGRRLPKCSAQTFHVKAKEHVPAVLKPALEPIFQALERIHEAIQKENQLIESLAKKYVDVELLSQPSGVGVLTALVFLLTLEDKNRFQSSRMVGPYLGLRPRKGQSGDNDPQLRITKAGDPLLRKLLVQCANYILGPFAKESDLRRWGMELMKRGGKNAKKRARVAVARKLGVLMHRLWVTGEVYEPVGYAAKRLVA

SEQ ID NO: 471328 - protein, 325 aa, unidentified
MEKLYGGIDIHKENLAGCIMDKDGNITREHIFPSSKKAIENFLKNISNSEITIVIEACGMWRGIYNVLIENGYEVKLANPKKTHDIACKKKTDKVDARILADLLRTNYLPEIWIPDERVLKLRDLTRHKSNLTRLRVQIQSKIKGYLLRKGVKYGKLWNKKSLSKLAEGDQDINNLVNVYHSLKDEEREVTRRINAFARNMKETTLLMSIPGIAEFSSLMILAEIGDIRRFKTPKELVSYTGLCPGIYQTGSTERTVRNNAVNKWLKWIIYECSGKAILLNPRFQKYFSKVQQRKGYQTGRRATARKMLTIIWYMLTSEEPYRAS

SEQ ID NO: 471329 - protein, 350 aa, unidentified
MLIIGCDYHPSFQQIAFVDTDTGELQERRLEHREEAEKFYREFAVQGRKVRVGMEASGQARWFERLLAELNIELWIGDATEIARKRERRQKTDRQDAQHILRLMLKDDFPQIWVPSGENRDLRQLLWHRHRMVQARTRIMNQLQAVALNEGLHCKKKLWRERGRQQLESFALAPWASRRRHDLLELLDRLNPTIGALSQAIEQEVEKCPEAQRLRTHPGVGPLTALAFVLIIGKPDRFQCGKQIASYLGLVPLEDSSGNRRRLGHITKQGNSLLRFLLVEAAQVTARSLPEWRSKYVHLTMRRGRKIAKVALARKLAVRLYWMMRKGWDYEQLKKLGSHAGQPGHRDGVK

SEQ ID NO: 471330 - protein, 352 aa, unidentified
MNKLCKAKADGDVCKRSMFVGMDVHKNYLQVAVLDEKGKVLNNSRVDNDLTKVNEFFDSIHPNRNTKVVMESSGMWYNIYECLSKRHLNVRLSNPVKTRAIASAKIKTDKLDAVKLADLLRGGYIAECYVPNKRIMGLRDIVRHRAALVRMRTKLKNKVHSITLMKGIDASDVDSPSTFSKHNMDKLEGHDDYRINGCLRVIKSLNDEINSVSKKILLLAKEDEIAKLLMTIPGVGYYSALLIVSEVGDIDRFPDSYHLCSYAGLVPSTHSSGGVTHYGSSITKAGSRYLRWILQECVHAHIRTEKNSNIAQFYYRIARKKGNSKAAVAAAAKLLKVVYWIMKERRTYERLG

SEQ ID NO: 471331 - protein, 371 aa, unidentified
MEHTRFVGLDIHKERISIAVAESGRSGAVEYLGEISNDPVAIGKLCERLVRSGKKLAFCYEGGPCGYGVHRQLTGIGHRCDVVAPSLIPTKAGDRVKTNRRDATMLARLHRAGELTPVWVPDADHEAMRDLIRLRGVVRQIVTRARQHLQGFLLRHGRKHGRGTAWRMAYRRWLSTLAFKHPAQQIAFQDYVDAVMDAERRLKRVEEQISDLLPEWNLRPVVDALQAMRGIALINAVVLVAEVGDFTRFTNPRQLMAYFGLVPGEQSSGETIRRGGITKTGNTYARRALVEGAWAYRMRARIGRHKVDRIEALPKIIRDIGWRAQVRLCTRYRRLRARGKTANVVNVAIAREMVGFIWSIACTIQSMPKTA

SEQ ID NO: 471332 - protein, 345 aa, unidentified
MTVKCMAGIDLHSNNLFCAIVDMNGKRVFEKKLPCELESVLLALKPFKRRLEQIAVESTYNWYWLVDGLQDAGYPVVLANPAAMEQYNGLKHADDKSDGFFLAEMARLNILPTGYICDRTIRPVRDLLRRRMGLVQQRTGLMLSLKSLHTRMTGRDLSTGRIKGLAPEDAEKLFEHPADRLITRLDLALVEQLGRSIQEIETRILAEAKRMPRYQVLQTMPGVGRILGLTIMLETVDPQRFASPGDYASYCRCVDSRRMSNGKKKGENNRKCGNKYLAWAFVEAANFAQRHDPACRKFYDRKKAQVNGIVATKALACKLAKAAWHMMSGNRPYDSGRIFPQVKRN

SEQ ID NO: 471333 - protein, 478 aa, unidentified
MVTARAAGLNRKQRKELARRLRVEDPGLEVMHPHAAGIDVGNSAHYVAVRPDRDPHSVRRFECFTADLHRLADWLQQCGVTTVAMQSTGVYWIPLYEILYARWMEVYVVNARHTKNLPGRKSDVQESQWLLKLHTYGLLRNSFHPPTEIRVVRTYWRQRGDHVHAVSTCIQRMQKALTQMNIQLANVISDLSGWTGQRIVRAILAGERDPDKLAALSHPGIHATRDTIAKSLEGTWQPDLLFVLQQEVAMYDAYQERIAECDQALEQHLKGVGDKVAERAADGEPSPTTPRKGLRSGPKRRRKAGSHAPQFDLGRELHRISGVDLTRIDGIDVGVAQTVISEVGVDMTRWKTEAHFASWLGLCPDNRITGGKVIRKGTRHVVNRAATALRLAATTLLRSQSYLGAQYRRLRARLGAPKAITAMAHKLARLVYRMLQWGHEYVDKGLQYYEQRHREQQVQLLKKRAAKLGLQIVEPDAA

SEQ ID NO: 471334 - protein, 423 aa, unidentified
MKSQSDMEFTVFVGLDWADKKHDICLQAAGCEDREFDRFAHRVSAIEQWALSLHQRFGGRIAVALELAKGPIVYALQKYDFLVLFPINPSMLAKYREAFKPSRAKDDPTDAELALDLLVRHRERFQPLQPQSEPMRTLQYLVEQRRRFVDDKVRYTNRLGIALKQYYPQALDWFADRDTVLFCDFILRWPTLMQVKRARKASLVSFFRAHNMRFPKLIEKRICAVKASAPLTQDGAVITAYKLQAQVLVEQLHVTLQAIRRFDQEIATITPKLPDYALFHALPGAGSALAPRLLVAFGEQRDRFAGADECQKYFAVAPVTERSGNKTWVHWRWQGSTFLRQTLVEWAGQTINKSFWAGAYYRQQKEKGSSHQAAVRALAFKWVRILYRCWQTHTPYDESKYLEALRRRGSPLLKQLGETMQNT

SEQ ID NO: 471335 - protein, 362 aa, unidentified
MRIIGCDLHTRQQTLAMLDTETGEVVKMTLTHEEDNVREFYSALPRPACVGIEATGSMQWFVNLMEELGIECRVGNPARIRAAEPRKQKHDRRDADLILTLLAENRFPAIWLPSKELQDLRALLRHRHQWVRMRTRVQNALQAIALANGLRRGPSLWSREGQSRIASLPLAPHTAHRRNELQAMYVKLEADIEKLNQRVEEQAGQRPGARLLMTHPGVGSVTALATDVFLGNPKRFADGKTLASYVGIIPREYSSGGRQRLGGLSKQGNALLRFLWGEAGAHAARRDPELQRFYRRKLVQKGLGIARVAVARKLGIRLWIMLRDQIDYNEFCRRGQKQQRSGAACAGMPETRYGATSHRPVD

SEQ ID NO: 471336 - protein, 362 aa, unidentified
MDNATHVGLDVHRDTIAVAVLAPGQVVPDERTISATPEALSRLVRSLRARGPLVACYEAGPTGYDTQRLLTRLGVGCDVIAPAMIPRRPGSRIKTDRLDARNLARLHRAGELVAVRVPSPSEEALRDLVRVREDLKAERRRARQRIRSFLLQHGRPWRGTAGWSRKLEDWAATQRFDEPVAQATFEILLAAQSARAAEVDALERRIVEAASSSAAADRIARLRCFRGIDTLIAVTIASEVCDFARFPTGPAFMAFTGLVPSEHSSGMSTRHGAITKTGNRHVRRVLVEAAWAYRHRPAIGVELRRRSQDQPADVRAFCWKAQLRLHARYQRLSPLKGSRKAVVAVARELSGFVWALMNDRID

SEQ ID NO: 471337 - protein, 356 aa, unidentified
MRIIGCDLHTRQQTIAMLDEHTGELVEKQLNHEGEEVRQFYSALPRPVLVGIEATGSMFWFLRLLEELAIDFRVGHPAKIRAAEPRKQKNDRRDARLLLRLLVENRFPAIWMPSPRLRDLQVLLRHRHRLVRIRTRVQLGLQALALSHGLRRGSSLWTPGGQHQLRALPLARHAAAQRETLLTLYPQLQHSIDCLDRQIETQVNERPQARRLMTHPGVGPITALATEVFLGDPRRFANSKAVASYIGMIPEEKSSGGRQRFGKLSKQGNTLLRFLWGQAAMQAVRRDPELLRFYRRKLVQKGLGKAIVAAARKLGIRLWIMLRDEIDYTEFCRRGNLLRQCGAAYAGMPEGDSGPR

SEQ ID NO: 471338 - protein, 350 aa, unidentified
MIIIGCDFHTRYQQIAMMDEATGELIERRLDHESGEADRFYRNLPKPVRVGMEATGPLHWFERLLAESGHELWIGDSAKIRASEVRKQKTDERDAQLILELLLTNRFPRIWVPTAAERDLRQLLWHRHKLVRMRTMLGNQLHALAMSQGLCRKEKLFTRKGRAELARLGLDPWASRRRGELLQLLDQLDPPIAELDRAVLEEAKRREDAVRLMTHPGIGPVTSLAFVLAIGPVTRFHRSKKIASYLGLNPSEHSSGGKRRLGAISKQGNSMVRWLLIETVHHAVRQDPELRQDYQRLKFRRGHAVAKVAIARKLAVRMYWMLRSGAEYAQLVRRQGSPAATLVDARPSLG

SEQ ID NO: 471339 - protein, 391 aa, unidentified
MIYVGIDVAKDKHDCFITNSDGEVLFKAFTITNNLDGFNELHQKIASVMDDVTKVKVGLEATGHYSYNLLGYLIDKGLPTYVINPLHTNLYRKSLSLRQTKTDKVDARTIASMLMSDVNLKSYSDISYHNEELKSLTRYRFDKVKERAKLKTSVSRLVCILFPELEKLVPTLHITSVYALLSEFPGAKHIATAHLTRLTNLLSEASKGRYSKDTAITFRDAARTSIGSNMPAKSLELKHTIKLIQELDSEIDEIEKEIKIIMDEINSPILSIPGINYRMGAMIIAEIGDFNRFDSPDKILAYAGFSPSTYQSGQLDGAYAHMEKRGSRYLRYALYNATKYVCHWDPTFTAYLAKKRAEGKHYNVAISHAVKKLVRVIYHLEKTKQQYIKAA

SEQ ID NO: 471340 - protein, 343 aa, unidentified
METVTTIGLDIAKSVFQVHGTDAAGQVVIRRQLKRRAVLAFFQKLPPCLVGIEACASSHHWSRELQALGHAVRLMPPAYVKPYVKRQKNDMADAEAICEAVTRANMRFVPTKTPEQQGCLMLHRTRHLFIRQQTAVINSIRAHLAEFGIVAPVGRKGVMELLQVVADPSDKRVSEVTRACLTALGNQLLSLKEQILEFDRMIMAWHRSSEASKRLDQVPGVGPVLATALVASIADPKTFRSGRDFSAWIGLVPKQNSSGGKERLGNITKRGDRYLRSLFTTGALAVIRYAKIHGTRHRPWLTALLARRPTKVAAIALANKMARMAWAMMAKGERYKEPAALAA

SEQ ID NO: 471341 - protein, 409 aa, unidentified
MRYVGIDWADTHHDLCCVDEQGQKVSRLHIDNTREGLDKLLEYLQELGRQAGGAERILIGIETSHLMLVDVLLNAGYSIYPLNPKAVDRYRDRYTASGAKSDTFDAELIAHALRTDRDRFRKLMPDSELLRELRLLVHDQRRFIRTQTLLGHQLRDSLKAYFPVAVDLFSDVTSPSALAFLAAYPKPGLIPVKKLEKLLRQARYPQPEKKAPQIVEQVQQGHIEINDFVVRAKSRAVVTLVEQLQTLRRRLDQYEKEIETLFEKHPDASIMKSLPGSGPSNGPRLLVELGDNRQRYDNPDGLQCEAGTSPVTKASGNGRIVTVRRACRKSFRDAVHQFAFCSTNQSAWAKHFYRQQRARGKSNASALRALGDKWLKIIYRLWKDRVPYDENIFLAARTRQVFHQVPVPA

SEQ ID NO: 471342 - protein, 430 aa, unidentified
MPYRIAGIDVHKKVLAVVVSDVEVDGEHRFERRMFGSNPEQLRSLAAWLLEQEVEEVVMESTAQYWKPVWEALERYWKPIREKREGAGRRSGTLHLALAQSNRGRRGRKRDFPDAERLVRRLVARELTLSFVPDAEQRLWRTVTRRKYQLTRDHVRQQNQLESLLEEAHIKLSSLVSDLLGASARRMLKALAEGETNPTALATLADERLRATPEQLCDALGACTDLKPVYRRLLKMALEQLQFLEQQIGQLDQEMASLLSQHQDAVERLAEVPGLGVDSAQQIIAEVGPTAATFPSEKCLSSWVGACPGDDESAGVNYSHRSPKGNRHMRRVLNQTANAATRTKGSIFEIVYRRSVPRLGHNQAIGAIAHRQCRLIWLILHQGVRYEERGPAVTKQSKQRRTARMLRQLRSLGYRIEPPNPQHPSPAQVR

SEQ ID NO: 471343 - protein, 335 aa, unidentified
MKKIHVGIDISKEKCNLCYRSGLEIVREEECPNDVKALKKAFKAALKVLGASFEDVLVCAEYTGRYIYPLTVACQELDIFLWMDDPTRIKNSMGLTRGKNDAIDAARIAEYAFRYSDKAERYAIPDAALVSMKSLLADREFLLIDRKRYQSQLTDQKKYMAPGDFKHKNSRWKKVIKSIDEQIAAIDAEIEALIEADPVLTRQKDLLVSIDGVGERIAINMIAVTGGFTRFQNARQFCSFAGLTPYKYDSGTSVRSKAKISKRANQTMKALLHMSAVNVATRMKAGEYKDYYERKLKEGKHIMCILNVLRAKLVHRMFSVIKRDAEYTKEYKPAC

SEQ ID NO: 471344 - protein, 400 aa, unidentified
MRSIGMDVHRSFAQVAILDGGRFTEECRIELEHDAVLAFGQRLRKDDEVVLEATGNTAAIVRLLTPFVARVVIANPLQVKAIAHARVKTDKVDARILAQLHASGFLPEVWAADDETQNLRRLVSERAVLVRSIRRVKSRVQAVLHANLVSGYAGHLFGKGGRSWLATAPLPKAERDLLARHLDELDWLDAKLEKLDRVLARTSLDDARMRKLMSIAGISSVVATSVVAAIGDITRFPSPDRLASYFGLTPRVRQSGDHRAVHGRISKQGNTVARTMLIEAAWSAASVPGPLRAFFLRIKDRKGVNVAAFATARKIAGLIWQLLTKEAPYRWARPAFVAMKMRKLELRAGAPKAHGSAGPGRDYWIKELRHREMDLVAQAEAAYAAMVEAWRERPPKPQKG

SEQ ID NO: 471345 - protein, 348 aa, unidentified
MGMAMTIAVLGTDLGKNVCSLVGVGPSGTVVLRRRVKRETLIGLAAKLPPCAVAMEACCGAHHVGRVFAAHGHDVRLMSPEYVRPYVKAQKNDDRDAEGIAEAATRPSMRFVELKSLDQLDMQTLHRARERLVGERTALMNQMRAILLERGIVVAKGKRKLAEALAALIDEPGGAGLSPRVVALIADARAQWEQLDQRIAAFDAEFVGWAKENEAARRLTTIPGFGAMTASALVAAVGQAESFDRGRDLAAWLGLVPRQFTTGGKPKLLGISKRGNKYLRKLLVHGARAAMPYVAERDTPLGRWAKALLDRAHPNVAVVAFANKLARIAWALLRRGETFVAGRSPVPA

SEQ ID NO: 471346 - protein, 385 aa, unidentified
MDEHGEEQYDIKEFGTFTNDLLEMKEWLTDNNCPVLAMESTGVYWRPVHNIIEGFMEVIFVNARHIKNVPGRKTDISDCKWLAGLLRHGLLKGSFIPPKEIRQWRELTRLRRTYTESLADYKRRVHKLFETANIKIDSVVSDLFGVTGRNLIFLLCNESELSLSKIKENAKRGLKAKAKELHRSVHGFFEDHHRFQLIGMMEMIASFEKRITEITKRMDTLTAGHQDLLNRLDEIPGIDKKSAQSIVSEIGVTLDEFTCMAALASRAGLCPGNNESAGKRKSGRTSVRSHPFKTILVEVSWAAVKKKGSYYRAKYYKLKARRGAKKAIVAIAHRISKAIYNIIKQGNTFMDLGKDYLTVQTRQRTINNMKKRARQLGYNLVPCEN

SEQ ID NO: 471347 - protein, 316 aa, unidentified
MNKYSIFFIGLDTHKEFIEVAYIEDNRGAQPIHFGRISSAKVVIKKLIRQFESKYPNATLHFVYEAGPCGYWIYHLITSLGHCCYVVAPSPIPKKRYALNLAKLLKSEDLTPIYVPEPEDEAIRDLFRAREIAMKDLKDAKYQLKVLLLRNNINYAGTANWSLKHLRWLTELVLSHPAQQIVLQEFIQTITERTARLERLDNELSHHVYQWRYYPVVKAIQAMRCVRLLVAAGVGDLTRFDHPRKLMSYLGLVPSEHSSDGKRHIGAITKCGNGHARRLLVEGAHSYRYAANISKELKNGKKAYQNRLLLSHGKRN

SEQ ID NO: 471348 - protein, 354 aa, unidentified
MSQKLNSEIAVIGIDIGKNSFHLVGQDRRGSIVLRQKWSRGQVEARLVNLQPCLIGMEACVGAHHLSRKLQALGHDARLMPAKYVRPYSKGEKNDYRDAEAIAEAVQRPTMKFVATKTADQLDLQALHRVRERLVSQRTGIINQIRAFLLERGIAVRQGLHFLRAELPGILAKRTDVLSPRILRIIEDLAGDWRRLDERIESLSAEITRVVEQDPACQRLTTVPGIGPIISSAMVAAIGTGDAFAKGRDFGAWLGLVPKQMSTGDRTILGSISRRGNRYLRRLFVQAAWVVLVKVGPEQWERYGLKSWIEAAKKRLHHNVLAIALANKLARIAWAVLHKGRAFECVKTNGPRPA

SEQ ID NO: 471349 - protein, 341 aa, unidentified
MQDWTRLIQWIGLDVSSKTFTAAFTNAFTNQTVRPKQEKFEVNRRGVRQLLSWARDIGGGEPFGIAMETTGTYSERLAKLISDERKDLHVSLCNASSISHYVKSFTEAKSDKADASYIARYAAERRPAPRILRTPELEMLRAATRDRERLVEQRVRMLEANATISSKFVLQVNSGVLKAIDKAIAELDAKIKTLVMSDAEIAREISIMVTCPGVAFISAATIYAELGPLAQYTRRQLSALSGVCPVRIESGTSVHRSRLSRRGSKALKRILFLDAQFAIRKVPAIKALHDKLMTRVDSSKLTARCACMRKLLLTLRGMVVSQRAFDPDYKPESYKKNELTA

SEQ ID NO: 471350 - protein, 391 aa, unidentified
MVCVGIDVAKDKHDCCILDSDGTIRADCITIPNNMDGFKQLLQTIRDCTKRSDKIKVGLEATGHYSYNILGFLLDNDLAVYVMNPLHTNLYRKSLSLRKTKTDRVDARTIATMLLSDVDLKSYTDTAYHNEELKSLTRYRFEKVQERAKLKQSVSRLVTILFPELEQLVPTLHIASVYSLLGEYPGAKQVSEVHLTKLTNLLVTASKGRYGKDKAIQIRDAAKTSIGSVMPAKSLELKHTIKLIRELTSEIDEIEDSIQQIMDELHSPLLSIPGMGIHSAAMILGEIGDFSNFESPDKILAYAGCSPSTYQSGKLTNCYAHMEKRGSRYLRYALYNATKYVCYWNPVFAKYLAKKRAEGKHYNVALSHAMKKLVRLIYALQKSGKAYLTAA

SEQ ID NO: 471351 - protein, 367 aa, unidentified
MKKISTAEGKQARNFEDRQLTIGLDLGDRSSWYCVLDETGEVLLEQKLSTTPKAMREVFGAMPRSRIALETGMHSPWVSRLLSELGHEVIVAHARNVRLIGESRRKDDRLDARTLARLARIDPQLLAPVKHRSAQAQSHLMVIRARAGLVRARTSLINTARGLTKSYGERLSGCNPRNLNAEKARQLSPELQAALEPLLGAIESLSERIYEYNQQIAKIAKESYPQVARLEQVKGVGTLIALTYMLTLEDAQRFRKSRDVGCYVGLQPGRRNSGQSEPQLHISKEGDPYLRTLLVQGAHHILGPFGADSDLRRWGLKLAERGGKNGKKRAVIATARKLAVLLHRLWVSGEAYEPLRHSRPVRLPAAA

SEQ ID NO: 471352 - protein, 418 aa, unidentified
MSAEIKIVYPICCGMDVHKSFIVACIAVTDQRGQTKHHIRRFSTFTGDLRRLAEWLSSYNCKDVCMESTGKYWIPVFNILEKTCNVCLTHPKYVKAIKGKKTDKRDAKRISELFKCDLVRSSFIPPLDIRQLRDLCRYHAKLTYMNTSEKNRAQNCLTTSNFKLDDVFSDVFGKSATRILDKLFEQGNSDFDVAPLLDKRCKATVDEVTAALDGEFNVSQSEKLKLIRKHQECIAELQTNLETVIRGLAEQFQPQIALLMSVPGISTQLTAIRILAEIGVDMSVFETSKHLISWAGLCPQNNESGGKKKTTRIARAGAYLKPLLVQIALNVGKSDKCPELKNKYQALKKRRGGKKAVIAIARKLLTAIWHILDKGEFYNADLYHKADKPPVNRVLTPEQAFALLRSKGYEIINPNPAA

SEQ ID NO: 471353 - protein, 351 aa, unidentified
MLSATGTLLACESFDISTHGLAELIAVLADTGAVIERIGVEGSSGLGRPVVRALTAAGYDVREVQASRTNDRRRRRHRAKTDIADAQAIAAETLADPGLPPAGKHATDPPAAWEALHTVRTWRESLVLQRVRHLTEAEPVLTSLPIAIRDQLPATSRVMAALTALSTLQLNHSSLTPADRLKLARLIATRDAVITITAGLKDIDLQIPDLLDALGCTLTELVGVGVVTAMTLLTEVGDPTRFRTEAQFARWCGAAPVATSSGEGHGSPKRYRLDLAGNRQVNSVLHIVHVTQARMHDPAKTYLTRRKSEGKTAREARRCHKRQLANVLIRHMWKDTARLARAATASTSAAA

SEQ ID NO: 471354 - protein, 334 aa, unidentified
MEKITTVGIDLAKSVFSLHGVDEAGRVVLKRTVRRDQLLEVVAGLSPCLIGMEACSGAHEWGRRFQEFGHTVRLMAPKFVAPYRKSGKNDGNDAEAICEAVTRPSMRFVPVKSAEQQALLAMHRVRQGFVVERTATINRLRGLMSEFGVVLPLRSVTVRRQAAAAAENLPELARRVIGDLLDELRLLDERIGGYDREIEAQAKLCEPAQRLMKIRGIGPTTALAIVATVGNAREFKNGRQFAAWIGLVPGQYSTGGKPRLGHISKRGDAYLRNLLVQGARSVLNSAGMHQDRMSRWALELQPRRGYYRTLVAIANKNARIAWALLAKNETLRTA

SEQ ID NO: 471355 - protein, 366 aa, unidentified
MKRLVLKDGGKQAQRAQPRAPAVGEVVILGVDLSRSKWVYACRWGGQEQRRFGSPGELKHLQAVVREYQQRGCDVHVVYEACGFGYQIAWWVEAHNARVIVVAPSCVEKAPGAQVKTDGLDAGSLALKYERGMLKGIYIPTREQHEYRQLSRTYGQALKDRSRQQVRLRLLLQEHGYTPPAAGSSWGALERWVSAQQFAPPLGLCVTELMGLRTSAGSSARRLANELRAVGRLPQYVELGKALAAQSGVGRFTAIRFVLEVGDIHRFATADSLPNYLGLAPKEYSSGDMVHRGRIRKCGPGSLRAWLVQCAWAAVRADKDGPLVECFKRLEPRVGRKRAIVAVARKLALRLRARWLAFEEEVQQAA

SEQ ID NO: 471356 - protein, 356 aa, unidentified
MKRIAKPKPAAVATLGVDIGKNTFHLVGLDKRGAIVLRERLSRAQVEVRLANTAPCLVGMAACVGAHHLGRRVAALGHDVRLMAAKYVRPFCCKQKNDFNDAQAIAEAVTRPTVRYVALKTPAQLDLQALHRVRERLMSQRTGVINQIRAFLLERGIAIRQGWRALRAELPRALTLTDRLTPRMVHLVEDLATDWRWLDQRIAAVSTEIEELAQADDGAVRLMSVPGIGPIISSATVAGIGKGDVFRKGRDFGAWLGLVPKQTFTGGRPILGRISKRGNRYLRQLFVQAARVVLLRPQSWERYGLNHWIAAAARRLHYNKLAIALANKLARIAWGVLHSGRKFETRTESDHVPQPA

SEQ ID NO: 471357 - protein, 414 aa, unidentified
MPETVYALYVGIDWGTVTHQVAVLDAQRGLRGERVIAHEAVALHAFTEWVMQLAGGEPARVAVALEVPRGAVVDTLLERGFHVFALNPKQLDRFRDRYTVAGAKDDRRDAFVLATALATDQPAFRALKPEDPLLIELREWSRVEDELREEWGRLASRLREQLHRFYPQALALCPAADEAWFWALVGLAPTPAAALRLRRAAVVTLLREHRIRRLTADQVLAALQSPPLRLAPGTVKAASAHVALLIPRLELVDRQRRDCARCIERLLDALATTGKHQGHRDVTILRSLPGVGRVVAATMLAEASRLLAARDYHGLRSQAGVAPVTRQSGKRLLVGMRYACNPRLRNALYYWGFISVRYDAHSRQHYQLLRGRGHSHGRALRGVVDRLLTVLMAMLAAQTTYDPTRRSAMLALAP

SEQ ID NO: 471358 - protein, 354 aa, unidentified
MYYNTIYVGMDVHKNSFTLCAYTIESEMASHFQKTEADYKKVLKYLEFLRTIYGNDTKFLCGYEAGCLGYTLYHQLSARNVDCVILAPTTMLEQRSRKRIKTDRRDAEIIAKCLAQHNYSPVHIPTATDEETKEFIRMRDDHKLALKKVKQQILAFCLRRGYRYDGNSHWTASHMKWLKALNPEALYKEILEEYLLTYTILSDKLERLDQRIEELASREEYRESVKKLCCFIGVKTHTALSVLVETGDFNRFASAQTFASYLGLVPGEDSSGDDKTQLGITKAGNRHVRMLLTEAAQCYARGQIGYKSKALKSRQSGNSLQVIAYADKANERLRRRYYKMVLAKGKNTMLPKQP

SEQ ID NO: 471359 - protein, 425 aa, unidentified
MDEVDEQELHVERVAALDLGKAVLEACVRVPHESRPGRRMQELRGFATTTSALLAMADWFRCWGVTRVVMESTSDYWKGAYYLLEAEGFECWLVNAREVKNVPGRAKTDKADAVWLAKVAERGMCRASLVHPKPIRELRNLTRYRRSLIRDRTREMQRVEKLLEDAQIKITSVVSDVFGVSGRAILHALIDGQRDPAVLAGLAVGRLRPKTAQLAEALRGFFTDHHATILAMMLDNIDRLSAQITALDTTIGDAVDPFAHQVAQLGEITGAGRTAAQELIAELGVDMTRFPSDAHLVSWAKFCPQTRESAGKPKNKGRAKGSPWLAATLGNIAASACRTDTFLGARHRRIAKRRGTQKAIVATGNAVLVIAYHLLADPTVRYHDLGADHYDTRINKHRRARNLATQLQALTGQKITIRDGKAIIA

SEQ ID NO: 471360 - protein, 400 aa, unidentified
MRSIGMDVHRSFAQVAIHDDGAIVANFRVAMEHDAVVAFGRSLQADDEVVLEATGNTATIVRLLTPFVARVVIANPLQVKAIAHARVKTDKVDAKILAQLHAAGFLPEVWAADDETLALRRLVSERAAVVRSIRRSKSRVQAILHANLIPKYAGHLFGKGGRRWLAKAPLPKTERDLLERHLDELNWLAGRLETLERDLIHISLDDPQMRKLMTVAGISSIIATAVIASIGDISRFATPQKLASYFGLTPRVRQSGDRGAIHGRITKQGNATARTMLVEAAWGAASVPGPLRAFFLRIKDRKGANVAAVATARKIATLIWHLLTKEAPYQWARPAFVAMKMRKLELRAGAPKAHGKAGPGRDYWIKEIRQREMELVANAENAYARMVEAWREKPPKPKTG

SEQ ID NO: 471361 - protein, 409 aa, unidentified
MDQLIERCCGLDVHRDTIAACVRVPGPNGKRQHEVRTFRTTAVELLALRDWLEAHAVTHIAMESTGVYWKPVFYVLEEAFTCLLVNAAHIKQVPGRKTDVKDCMWIAQCLEHGLLRGSFVPPAAIREIRDLTRHRKVLIQERTRAANRVHKLLEDAGIKLASVATNILGVSGRAMLEALVHGTTDAEVLADLARGKLRKKLPALRQALAGRFRPHHAFLVSQLLTHVDYLDEAIATVSEEVEGRLAPFAAQLTQLDTIPGINKRTAEVIIAELGVDMSSFPSDRHLASWAGICPGNNESAGKHKTGKTRKGNRWLRMTLIEAAAAATRTKDSALQARYRRVMRHRGHKKAVVAVAHAMLRAVYHLLAEGTTYREPGAAYYDRRHTHRVTRRAIQLLERQGYRVVLEPAA

SEQ ID NO: 471362 - protein, 426 aa, unidentified
MLVPVCNAIVGIDLADNKQMVVVTDHDSKVLARRTFRCRAWDLGLALDWAGHQASKAGFAGVTVACEPTGHRWRVLGQLAADRGMAFVCVQTLLTSWARRSEDLTFDKTDEKDAVLIARLTAQLRCYVPEPLDERWGRLRHLGARRERLLAETVGQVQQIRDLLECVWPASLDTAKQPFRSRTWLAGMSVILARTDGDPARLRRLGPARFEAAVRREVVARQGKRPCLRIARLLFVAAADPRGVTIHRPGALERAQLLLDDFRDTQRRLGEAEARMVAVLDELQLSELVCSIVGLSALGGATILAETGDLTRFASARAVVKHSGLAPREKSSGTFTGRTKLTGQGRPGLRAAAWRAVWGAQKANPVYAAKFTHLTSRTENKLNRGQAHAAIAAALLRQLYAVVSTGQRWDAAIAAGGRCEVIRPAA

SEQ ID NO: 471363 - protein, 303 aa, unidentified
MKMAMLSFCGIDVSKDRLDVVVLPEGWFFSVSNDTAGWAELVVRLRPLTVSAIGLEPSGGYERGIIRALLAAGMSVRRINPNKLRQFARARGVLAKNDRLDARLIAEYVAIMPTRVVQRDAAVERLAEIVTMRRQLCDEHVAAENQAAHLEDAMLRRLSKRRQTRLEADIRLLDKRLAEMVAANVALAQRYELLTSMPGVGPVLAFTLIALLPELGKMTRKQIAALVGLAPYDFDSGKLKGHRSIYMAALSASRYSPALKAFHNRLADADKKSKVIIVAVMRKMITTLNAMLRDNAAWQPQSA

SEQ ID NO: 471364 - protein, 348 aa, unidentified
MLADQVDYVVGVDPHRDSHALAIVHVLSGAVVFEAEVAASSRGYAEALQLVEAHAAGRRAFAVEGSGSFGAGLTRFLTGRGERVLEVSRLRRERRSGGKTDALDAVRAARSVLGQERPATPRAGGERQALQALVAAREGAVNGKCAGLAQIRDLLITTPEPLRSELRPLTQAPLLRRLAATRPEGRRDPELRGSMLALRSVARRVLQLQAEERELGRQIEALTRKLAPQLLDQPGVGPYAAAQLVLSWSHHGRIRSEAAFARLAGAAPIPASSGQTARYRLDRSGDRKPNRALHLILVTRKRTHPPTRPYIERRIQEGKTRREANRCLKRYLAPNLYRLLEHGPPIAT

SEQ ID NO: 471365 - protein, 328 aa, unidentified
MNRTRTVAGLDVHKDSIYLCIMGYDQAIIWENTYGVLTPDLRQMHHDMRAHGVTEAAMESTAVYWVPVWNELCESMELRLVNPYFIKQLPGRKSDVKDARWIAECLLKNLIKGSFVPEPIVQDMRKLNRRIMDLCEDTTYNSNKLDAALQRCGFRLSNYVATTKSKSYRSVLKAIIDGQTDPDELLRLVHGRILNKHGRERVKAALTGSFSETDLIVLRQLKETLDLIEKQTADCQQELVRLCKEHYPKPYERLQTIPGVKERAATAIIAETGVDMKMFATAASLVGWCGLKPRNDVSNGRFKSRKVTHGNRYLRQILIEIAWAASRT

SEQ ID NO: 471366 - protein, 388 aa, unidentified
MNKFKYFVGIDVSKNSFSLAVKDTDFVIENKFFHMEKEGFNSLDKLLSQFKHSCIIGMESTGIYHTNLFYFLKNKGYNTVVINPYKMKQFFKFISDKPTKTDRKDAKAISEFMEISGDGNILSEQEKYQLRYIVREKENIIHQIAKVKTDIKRLLVLLFPEIEKYNVFTSSILNILLHFPSASAIRNISEKQFIKKCEKLTKNNGRKSTLTPEKIYHFASNSIAYQYPVYEKLLIMKIKSLLSLQDQLKNIKILINQIADNLFKREIQILTSIPGIGKTAAIHFISEIVDIKRFKNVSKLVGFCGLDTVIKQSGNYQGKWKISKRGNSHARRIVFIMASCVKRSCPQFREYYLKKRNEGKSYTEAVIATSTKLLRTIFALLNENRLFI

SEQ ID NO: 471367 - protein, 332 aa, unidentified
MYYYIGIDISKTSINVHIATNKQDLVYDNSIKGFKSLYSKLKKLYKKEIDKIVFIYEPTGSYSETLRKFCFEKQILCFIINPKQFSNYAKALGAEVKNDIEDAKVLSKAIVLAKDGEVKIPHYDEDVELIKELMSYYKLLIKQIIQQQNHLESLGAKEGSKFAINELKKMVKETKVKSNNVLDEIEILINNNPQYKSDYENITSITGVGRISGIVLLHLFLKYPEANQRQITSLAGLNPVYKQSGSSIQSKYSISKTGSKLYRGTLFMGIMSAVRFDENFKAFYERLLANHKHTTQAQIAVMRKVIIIAHSLYKNDKKYDKNYGQSKGNSDD

SEQ ID NO: 471368 - protein, 439 aa, unidentified
MSSVRVLDARAAFVDVGSEQMHVSIAGGPPRVFGTVTAQLHALRDWLLAQAVHSVAMEATGVYWLPLYGVLEAAGMEVAMVNGRQSRNVPGRKTDMLDCQWGATLHAHGLLRPGFVPPAHVRRLQDYLRLRADHISLAASHIQHMQKALERMNVKLHDVISSLTGASGLAVVRAILQGERDPDRLLLLCDVQIRRTKAERVKESLRGTWAEEHLFGLRQALQSWEHYQRQIAECDRAIQALLPAPADNDPPGSSPEGKARKRPSVHAPDIPNLRSIVAQMCHCRDLTILPAHTEYGVLQLIAEVGTDLTKWPTEKHFTSWTGLAPGSRQSGKRRGSVKRNRNRAGRIFCVMARSLARSKNIGLGGFYRRMAARRGGLLANVALARKLAVLFWRAMVKGIDYVEQGLAAYEAKVLETKHRTLRRLARQLGHQILPLPAPA

SEQ ID NO: 471369 - protein, 356 aa, unidentified
MERYIGIDVHAASCTIAVISEAGKKLKDFPVETNGQALVEAIRMIPGHKHLVFEEGLQSAWLYETLGRHVDETVVAGVTESRGQKDDRRDAYGLAEKLRRGTLEKRIFKAPRQFRVLRELSRIHVTAAHDLVRVQARIKSLYRSRGIGVPGGSVYSARHRESWQERLPASVQTRATRLYEQFDFLAEQKKQAERDLLGESRKHPIVRILETAPGFGPIRSARLVPIVVTPHRFRTKRQFWSYCGLGIVMRSSSDWVQTADGGWIRVPIQQTRGLSRQYNHVLKDIFKGAATTVITQQNKDPIYADYQRMLDSGIKPNLAKLTLARKIAATVMRMWKDEEAYQPEKYRRPSETDRKA

SEQ ID NO: 471370 - protein, 412 aa, unidentified
MEVIYPRCAGLDVHKETVVACVRIAAGVEVSQSVRTFATTTASLVELGEWLEANGCTHVGMEATGVYWKPVWQVLADSSFELILANAAHVRNVPGRKTDVNDATWLSELLAHGLVRGSFVPEPEVQELRSLLRTRKQLVREKTSHVQRLQKTLEEANIKIESVLSDLMGRSGRAMIRAIIDGESDPAKLAALAHWKVRASEATLREALHGRIKQHHRFLLALHLQQIEALECAVTEIDREADAGLACFRNAVRQLSSIPGVSELTAQVIISEIGTDMSRFPSAAHLRSWAGLCPRNDESAGKRRSTRLRKGAPWLKATLVQCGWAAARTKATYLNAQFLRLRSRRGPKKAVCAVAASILTAAYHMLKDGTFYNDLGPHHFQRRRPEAQARTLLKRLADLGFSVQVNPVAAVP

SEQ ID NO: 471371 - protein, 345 aa, unidentified
MHYVGVDYHKKSSYVTVMDERGKVVKEGQIANTPEALAALLDGTGEGASAVLEAGRNWPVMYDWLDELVDEVTLAHPAKVRVIAEAKVKTDRIDSRMLAHLLRADLIPAAYVPGAVTREQRRRLRQRMFLVRLSTMVKNRIHTLIDRHPELSRRAGGWSDLFGKAGRAWLEQLELPASELQLLRTDLDLLTAIQEHIKASNRWVSQLARKDARAKLLVTLPGIGDFFAVLLAVEIDDVHRFSRPQKLAAYAGLVPSTYASGGYVHHGRITKRGNKWIRWACIEAAYPAIRQDPELAVLYQRLKVAKGANVAKVAVAKRLLTIAYRVLNEGRSYRPAEEQARVRRR

SEQ ID NO: 471372 - protein, 312 aa, unidentified
MAMLSFCGIDVSKDRLDVVVLPEGWFFSVSNDTAGWAELVVRLRPLAVSAIGLEPSGGYERGIIRALLAAGLSVRRINPSKLRQFARARGVLAKNDRLDARLIAEYVAIMPTRVVQRDAAVERLAEIVTMRRQLCDEHVAAENQAAHLEDAMLRRLSKRRQMRLEADIRLLDKRLAEMVAANVALAQRYELLTSMPGVGPVLAFTLIALLPELGKMSRKQIAALVGLAPYDFDSGKLKGHRSIYGGRMPVRNVLYMAALSASRYSPALKTFHKRLAAADKKSKVIIVAVMRKMITTLNAMLRDSAAWQPRSA

SEQ ID NO: 471373 - protein, 366 aa, unidentified
MKQGTTFVGLDAHKSQIFVAVLYPGRKDAVEWQLANEAAAVRRMVRKIKREAGGGEVRFCYEAGPCGYALQRQIEACGEGVTCVVVAPSLIPRKPGERIKTDRRDARKLAEYLRAGVLTEVCPPTEAEEALRDLVRARDDVREDVMRARHRLGKLLLRRGFVTHQTSWTQAHRRWLRNLKFEHASDQAVLDDYLLALEQLEERLRGMDERLKQVAQQEPYAQPVGRLRCFRGIDTLTALSLVAELHSFMRFNSPRELMAYLGLVPSEFTSIKQRRGSITKAGNRHVRRLLVEAAWHYRHRPGLGALRKRREGQPAAVIAIADRAQSRLYRRYRHLSEKGLMPGKVVVAIARELTGFIWAAMQPLAA

SEQ ID NO: 471374 - protein, 364 aa, unidentified
MEEPTHIGLDVHKETIAVAVLRPGTVACDERVIPNTPEALRRLLSRYPDGAALRTCYEAGPTGYDTQRLITSLGISCDVIAPSLIPRRSGARVKTDRADARNLARLHRAGELVAVRVPTPAEEALRDLVRAREDLKNDRRIARQRIRSFLLRYGKRYPAPGSRWSFRFEVWLRALRFSEPASRAAFEALLGAYFMRDSQLGAVDKQIAELALAEPLAGAVARLRAFRGIDTLTAVTLLTETCDFRRFGSAGSFMAFTGLVPSEHSSGQSRHQGSITKTGNAHLRRVLVEAAWAYRYAPAVRGKLRGRQIGQPPEVVAYSWAAQCRLHGTYRRLAAKKGPNKAVVAVARELSGFVWGAMSDRMAV

SEQ ID NO: 471375 - protein, 343 aa, unidentified
MKLRTITIDLAKTVLQACGVSEHMKPQFNTRSKRDQLLDFMRQQAPTMVVMEACYSSHYWGREMAKLGHDVKLIPAQHVTPFVRGNKNDHNDAFAIAQASQRPFIRFVPIKTEHQQEICCLHRIRERLGKNKVALSNQSRGLLSEFGVVFPCGHAAFLHGLTSIIDNPQYSHRLQDMVIDMLSEYKTTINRLKRIEKQLTEFVDGCESGRILLSIPGIGVINASAFLASIDKGQAFSSSKEFAVWLGLTPKQHASGNISKMGGITKRGDRYLRKQLIHGARALVSRAPKSSDPLALWAMKLRVTKPFNKVAVAMAHRLARLIWVLLTRQEHYRAMPASLEVSA

SEQ ID NO: 471376 - protein, 317 aa, unidentified
MYHEKKEVKKIESITRINQRHNKDYIKDIGNNENKRETNAHYYVSIDIGKKNCVVCISDKDGLIIEETKYGNTFSEACFFAQHIDRQYDSSNCIAVVESTANMWIKTYKALEQAGIQTKLANPFKTRVIAEARIKTDKLDARILCHLLRSNLIPESYVAPDSIREDRSILRLRINLVQDRTRVVNRVHSLLDKYDMDQACNHLVGKKGLNWLKSLKLEGNNDQFQLNNHINNIEFLNNEIMQIDKKVSSQAVKNKDVKILMSMTGIDYFSAMLITSEIGDITRFSDPSKLVSWAVGAMSNHTSIRKHVIHGKDERWK

SEQ ID NO: 471377 - protein, 339 aa, unidentified
MNSIAVGVDIAKQVFQVHYVDRETGEIVNKPIKRAKFLEHFANRARCLIGMEACGGAHHWARELTRMGHEVRLMPAEFVKAFNIRNKNDAADARAIWLAVQQPGKPVAVKTEMQQAMLALHRMREQLVKFRTMQSNGLRGLLTEYGEVMSKGRAKLDKEIPAVLSRIAERLPAALIDTLREQWNGLAKLDEQITEIERRMREWKKEDRAVKMISEIPGVGLLTATAAVAMMGDPKAFRSGREFAAWAGLVPKQTGSGGKVNLHGISKRGDMYLRTLLIHGARAVLTHAKEPGPWVEQMKKRRPTNVVIVALANKMARTIWAVLAHDRPYRKDYVSMKPA

SEQ ID NO: 471378 - protein, 389 aa, unidentified
MKIFVGIDIAKLNHFAAAISSDGEILIEPFKFTNDADGFQLLVSKLESFDKNSIIIGLESTAHYGDNLVRYLVAEFYQVCVLNPIKTCQMRKNNVRKTKTDKVDTFVIAKTLMMQDDLRFITFFDLDMMDLKALGRFRQKTIKQRTRLKIQLTTYVDQVFPEIQYFFKSGLHQNAVYALLKEAPSPKEIASMHMTHLANLLKVNSHGHFTKEQAKELRVLAQKSVGANDSAISIQITQTIQQIELLDSQLEKIEVEMTDIMKFNDSVIMTIPGIGYINGGMILGEIGDIHRFSNPNKLLAFAGLDPSVYQSGNFQVKTTRMSKRGSRVLRYALVNAAWNVVRNNATFKAYYDAKRAEGRSHYNALGHCAGKLVRVIWKMLTDEVEFNLE

SEQ ID NO: 471379 - protein, 482 aa, unidentified
MASKGRVEGSKGQRLTRRQRKELGRRIWSDHPGLEVVHRDAAGIDIGSREHYVAVGPDRDAEPVRTFGCFTADLNRMAEWLKQCGIQTVAMQSTGVYWIPVYDVLERHGFEVWLVHARDTRNLPGRKSDVHESQWVLKLHTYGLLRKSFRPTAEFRALRTCWRERGEYVEQAGACIQRMQKALTEMNVQLATVLSDLSGVTGMSILRAIVAGERDGLRLAEFRDPHVKASKETIALSLEGTWLPEQLAVLKRQLEDWDHIQRQMTACDQDLEAMMQKLPQANDEPAPPAQPAAGTLTGRKRNKSSKSSKNEPDFDLAAALRRVTGVDLTRIDGVKVNTVQTVITEAGLDLTQWRTEDHFVSWIGLCPRNDLSGGKVLNRKTRKVVSRLATALRMAASTLRESDSYLGAQFRRLRTRLGAPKALTAMAAKLARLIYRMLRYGQEYVDKGTAQYEQKYRQQQIKLLAKKAAQHGFALVPATNRA

SEQ ID NO: 471380 - protein, 402 aa, unidentified
MNAVGIDVSKGKSMVAIMRPFGEIVSTPFEIKHTSSDINSLVKLIKSIEGESRIVMEHTGRYYEVLAHQLSEANLFVSAINPKLIKDFDNDSLRKVKTDKADSVKIARYALDKWQNLKQYSVMDELRNQLKTMNRQFGFYMKHKTAMKNNLIGILDQTYPGVNTYFDSPARSDGSQKWVDFASTYWHVDCVRKMSINAFIDHYENWCKRKKYNFSKSKAEEIYGKAKELVPVLPKDDITKLIIKQAVDQLNSASITVESLRTLMNETASKLPEYPVVMAMKGVGTSLGPQLMAEIGDVSRFTHKGAITAFAGVDPGVNESGSYEQKSVPTSKRGSSDLRKTLFQVMDVLIKTHPQDDPVYQFLDKKRAQGKPYYVYMTAGANKFLRIYYGRVKEYLASLPES

SEQ ID NO: 471381 - protein, 390 aa, unidentified
MQVKADRPEAPSAIRSDLGAIFVSLELSRSTWLITSLSPGAGEKMSKHSVPAGDICALLARFSELKQKAFARTGQSFPIIVIQEAGLDGFWIHRVLQKEGIESHVVDPASIATSRRRRRAKTDRIDGEALLRALLAYKRGEPRVCAMVKAPAPEDEDRRRLCRERKVLIAERVQHVNRIKGLLFCQGVSGYEPLRRNRRQQLDALKTGDGRVLPDHLKAQISRELDRLELLLGQIKAVEAERDALFTAAKAAAPTPAPVTMLLEIKGIGPEFAAILWMEAFFRSFANRRQVAAYAGLAPTPWQSGSVDREQGVSKAGNPRLRTTLIQLAWLWLRHQPQSALALWFKERVTRNGGRFKKTTIVALARKLLVALWKYVSAGVVVEGAVMKAA

SEQ ID NO: 471382 - protein, 429 aa, unidentified
MKKSRAYQSVRVNKVDWNRTNRFEEQQAVHVGVDIGKFELMSVLRWPDGSFERPWQAKNPGEIGSLVDLLFRVHESHQLTVALEPTGTYGDAVRQALDDAGLCVHRVSPKASHDYAEIFDGVPSQHDGKDAAVIAELSALGKSGSWRYESPSLIDQEMSYWVDWMDAHRRQKAMWVGRLESLLARHWPEATRLLKLSSSTLIRVLEHYGGPAALGNDKEAINQVKAWGGPRLMLSKVGQFVWEAQTTMGVRQGTIDVQRMQQYARQARAAGNEIKTSQQHLKRLSKGNKVLEAQGAAIGIPTACVLWVHLGDPSNYHCGSAYRKAMGLNLKERSSGTWKGRLTISKRGSAQIRNWLFFAALRLIRGQPVKEWYDLKKAKDNDGATRALVGVMRRLAMALYQIGACGQSFDAGKLFPGGQLIYENSIQGR

SEQ ID NO: 471383 - protein, 309 aa, unidentified
MDVKNYGVDVSKDKLDVACDGRVVQIDNEKKAIKSFVKGMPIGSLVVMEATNTYHLEMADICHARGMRAFVVNPRITSHYRKANGFRGHNDRMDALALSRYIEREHDGQREYVPKSADQGRLKTLVRRRWKLVGIRTQLQESLGSLKELSRELEALLARIDALIAKLELLIDKQLEGNADRARIETIKGVGPIVSAVLLSDLACCEFARADAFVAFYGLDPMPDDSGKRKGRRKLSKQGDRLARAMLYNAAMSAVKSKDWKPMYDRCQARGLTKVQALIVVARKIAKTAWSIHTHKTTFNPDRLFQALT

SEQ ID NO: 471384 - protein, 446 aa, unidentified
MGNGSGLSRGDRNRNARLARLRELVPLSNAIVGIDLADGTQAAVVTDHDSRVIARRRVSVRAWELGDLLDWAVARASEAGFASVTVACEPTGHRWRVLDQLAAGQGLALVCVQPLLVYRAREGEDLTRDKSDPKDAVRIARLASELRCYEPERADAVWARLRHLGARRSQLTTEATAAVNQIRDLLECAWPAVLAAAGSPFRSVSWCASLAVVLDRCAGDLSRVRRLGLDRFTAAVRRELPRWGGIRPRLRIIRAVFAALADPAGVTAHRPGALERAHLALGDWRDTRARLADTETRMGAVLDDLGLTGLVTTIDGLTVTGAAAILAETGDPARFATARALVKHAGLCPRDNSSGAAQGKTSISGRGRPALRVAAWRAVWAAMPNNPVMAARFAHLTTRQDNRLARQQARTACAAALLRWIHVVVTRRVTWDPAIAAGGTPLRQAA

SEQ ID NO: 471385 - protein, 346 aa, unidentified
MNHYAGIDVSLKSSSVCVVDASGKIVREGKVASEPAALIAWFGSLGFEMMRIGLEAGPTSQWLYAAMRDAGLAVELLETRHVHDAFQAMPVKTDRKDARGIAQLIRLGWFRPVHCKSIEAQETRAILTARKLVQSKLHDIEMSLRGILRGFGLKVGRTTPKQFEGRIKELVSGHPSLQVIADALLAVRAVLLREFNGFEKRVRTMARANKQAKLLMSTPSVGSIVALTYAAAIDDPARFKSSKTTGAHFGLAPKKYQSGETDYSGRISKIGDAAVREALYQAAHVMLTKPLKGCSELKSWAMRIAKRAGMNKAKVALARKLAVIMHRMLADQKPFNPTVRAKPAAA

SEQ ID NO: 471386 - protein, 346 aa, unidentified
MNITTIGIDLAKSCIQVHCIDVHGKRILNKKLKREQVVPFFSNRPACLIGMEACGSAHFWANKLQALGHTVKLMAPQFVKPYVKTNKNDAADAEAICEAVSRPNMRFVPIKNSEQLAVLAMHRARQGFVKARTAQANQLRGLLAEHGIIIPKGIRHINQHLPDILEAGDNGLPGRFRQLLDRLSAHFKELDKQVRELDVQLQSWHQDSPASQKLAKIPGIGPLTASALVATIGDAKQFQNGRQLAAWLGLVPRQHSSGGKPTLLGISKRGDTYLRTLLIHGARAVLRVVKSKAQHAGSWLEGVMARRNHNVAAVAQANKTARIVWALLANDREFDAQYSTGTILAA

SEQ ID NO: 471387 - protein, 359 aa, unidentified
MSELTFIGLDVHARSVAAAMLNAGTGEVRICSAPARTAELLPWLRAQGESVSVAYEAGPTGFGLARACEAARIPCLVAAPSRIARAPGERVKTDRRDALRLAKLLRLDELVAVRVPSLEEEAARDLVRAREDARSDLMRARHRLSKLLLRQGLVWEGSAWMQAHERWLASQRFEMRGLALAYGEAVAAVESVRARRDALDVAICEEAAKQPWAATVGRLSCLRGVSTLTAFGLAAEIGDWQRFDGRSIGAYLGLTPSESSSGERRRQGAITKTGNGHARRLLVEAAWQQRRPASRASRELAGRREGQPAVVRVRAETAGRRLQRRWAAFDARGKRSTVAAVAVARDLAGWCWSLATMDA

SEQ ID NO: 471388 - protein, 382 aa, unidentified
MRESIKTPSVAPVTIPALTVGLDVADKYTIICGIDAQGEIVERSRIRTTPAGVEGRFRGVERCRVVLEVGAHSPWLSRLLKDCGHEVIVAHTRKVRAISDNPSKSDDVDAEMLARLGRVDPKLLSPIQHRGPEAQAHLAVLRARDTLVRSRTLLVNHVRGVIKSSGSRIKKCSTESFARQADDDVPESLREALAPMLKLIESLTEEIRRYDRRVEQIANKSYPETELLRNVRGVGALTALAYVLVIEDPKRFKNSRMVGAFLGLRPRRAQSGDKDPQRRITKMGDRMLRRLLVGSAHYILGPFGEDCDMRRWGLKLCERGGKNAKKRAIVAVARKLAVLLHHMWTTGIVYEPLHKASREEPATSVKKHETVKPGRKRALARA

SEQ ID NO: 471389 - protein, 343 aa, unidentified
MNITTVGIDLAKNVFQVHGVDERGKVVLRKSVKRAELTKVFANLRACLIGMEACGSAHYWARRLMELGHTVKLMAPQFVKPYVKTNKNDARDAEAICEAVTRPNMRFVPVKSVEQQTVLAVHRSRQGFVVARTAQANQIRGLLYELGIVIPKGVRHLERRLPEILEDAENGLPDASRELFARLFEHFRELGAHVQELEHQIKAWHRESEASRRLEAIPGVGALTASALVASVGDAKTFKNGRQLAAWLGLVPRQASSGGKEQLLGISKRGDTYLRTLLIHGARAVMFHRMRRAADADGWLLKLLARRNRNIAAVALANKNARVVWALLAHQREYCANAIAAAA

SEQ ID NO: 471390 - protein, 387 aa, unidentified
MNVQTVNNLPPAAADDAIVRCLLAIELSKKSWIVAVNTPLSEKISRYTLKGCDWKGLLELIEKIRTRVARELNRPVEIISCYEAGYDGFWLHRLLEAHGVRNHVIDPASVQVDRRARRAKTDNIDVAQLLRSLMAYLRGDPKVWSVVRVPSVAEEDDRRLHRERDRLITERVQHVNRIKGLCAVHGIYDYQPIRSDRMLRLEQLRTGDGRKLPPHLKAEIVRELQRLELVLAMIKTIEAERKAIISAKTPHVNVTKIQDLIKIKSIGPGIATVLTGEVFYRKFNNRQQLGSYVGLAPSHFQSGPMSRDQGISKAGNPKARTVMIELAWIWLRYQPNSPLSVWFHERVGTAKGRIRRITIVAVARKLLIALWRYLETGLVPTGAIVRG

SEQ ID NO: 471391 - protein, 470 aa, unidentified
MVRVLGRDRLVLFVKTNTQDIFEGCANEWAIWTSLTRGKACSGVLKPTIPMKAQDTLCPYTVTIGIDWADSKHDVFERYLDGSICQHQIASAPEAVREWLWALRSRAKGGRVAIGLETSRGPLFHSLSQHVDWIDIFPINPQSLARYRQAFYPSRAKDDPVDSQLLEELIRSHPDRLRIYRPGPEMERKLDLLCQQRRKVIGMAVELENQLRATLKEYFPLAIDLCASNGLRNKLALDFLQRWPTYALLMKARPQTLRSFYYAHNARNQALIEARLARFSSSVPLTEDPAVIEPLSIVAKMLVCAIRAIERTVEQLQDKIATLFGQHPDHLLFENLPGAGKNLAPRLLCVFGSDRSRWPDAIAIQKYSGIAPVIERSGKSSWVHRRLFRPKFLCQTFHEFAGQSIHQSKWAAAFYERQRGKGKSHTCAIRALAFKWIRIIFRCWKSRKSYDETLYLRSIENQYKRSLKII

SEQ ID NO: 471392 - protein, 341 aa, unidentified
MRTLYVGMDIHKNFIQAAAMDETGTIIIEQQFKSTEKDIKRFIKTLKVKNIQAAIEATCTWYHVYETLDALGVKTTLVNMRRTKTIAESKIKTDILDAQTIAHCLRTGFIATAYIPPKTIMEQRTILRHRMSLRKEITRYKNKIHAILLRNGIQHSDYSDLFGPGGMTFLRNLALSDSEQYSLTSYLNILETLIHEKTQTAETIETLCKNNHHAMLLTSIPGISYYGAMIILTEIGEIHRFSHPKKLCSYAGLVPRTIQSGSHVYHGRILKECNQNLKWILDQCAHIHIRHCPNSSITRLFYRVEHKKGRNKAIVAASRKLLTCIWYMLMKNETFKYSNDD

SEQ ID NO: 471393 - protein, 436 aa, unidentified
MNSSEVKRKSPTEGIAAWVGLDWADQQHVLCVYEVETGQSEITRLEQKPEAFESWLSQLRQRFGGAKVAIVLEQARGAVIYALLGLDFVVLYPINPQALANYRKVYTSSGAKSDPADAVLLMEMVRHRPECFRPWKPDDADTRSLQLLTENRRQLVNQKTAFTNQLTNLLKSYYPQALELAGDLDSDQACDFLKRWPTLEALQTARPAQIRKLYLDYGRPRPEQLEQRLEQIRRARPLTQDPAAVLSGSMMVEVLVPQVRSLLRAIEQFDRQISVLFRKHPDRPLFECLPGAGAALAPRLLAAFGADRDRFQSAQEIQQLSGIAPVTEKSGKQYWVHWRWACSKFLRQSFHEFADHSRKWCGWAKALYQQLRRRGQNHHAAVRMLAFKWIRILFHCWKTRTCYDESIYLKSLQKRNPSLWTEIQALPPRVRRQPAA

SEQ ID NO: 471394 - protein, 404 aa, unidentified
MSVHVAPVTSSTIVVAVDVGKTSAMLSVTDCARKRVFGPVEFSMTRSGLVATVHRVEAVVVASAQVKVGVEAAGHYHRPVLDYGWPTGWEVLELNPAHVAEQRRVVGRRRIKTDAIDLEAITDLLLAGRGQLITEREVLIGELSAWAGQRSRRVATRSATKNQLLAQLDRAFPGLTLALPDVLGTKIGRLITAEFADPARLCAVGVSRLIRFAAARDIQLRRAVAERLVTAAREALPTRDGVVARRVLAADLGLLADLDTQIETAERELAALLPASPYATLTSVPGWGVVRVSNYAAALGDPDRWPGPRQIYRASGLSPMQYESAGKRRDGTISREGSVALRRALIDLGLGLWLTEPAAKAYAAELKSRGKPGGIIGCALAHRATRIAFAMVRDHTSYDPSRWA

SEQ ID NO: 471395 - protein, 343 aa, unidentified
MEESQAVVVGVDTHKDSHSAALVDELGGLVASTDVGANQRGYVQLLDWARSRSSHRTWVVEGTGSYGAGLASFLAGCGEVVYEGDRPQRRKHGAGGKSDQLDAIKVAREALAREHHALPRQRGNREAIRVLLSTREGVVTAYRQALNQLYALVVTAPEPIHERLIRLKGEQLVNACLRLRCTAGDIETSVTTRVLRRIAHRIRSLQVEAADYESQLEVLVAETVPALLSEPGVGAITAAQLLVSWSHAGRIRNENAFAAMAGVAPVPASSGRVVRYRLNRQGDRRLNRALHVVAVCRSGFHTATKNYIARRTAEGKSSREIRRCLKRYLARRFFRLLQGLDTP

SEQ ID NO: 471396 - protein, 392 aa, unidentified
MYIVGIDIGKNHHEASIVSPEGKQIGHSLRFATTHKGADSLMSFIFNNIGNSSCIFGMEATGHYWYPIYSFLKARGYTIYVINPIQSDSLRKMYIRQTKNDSIDSFLIAEVIRFGQFTTTSMADENILAMRQLCRYRDSVISSRTEIKLRISTIMEQIFPEYEKQFSSLWLSTSMGILEKYLTPENIENAPIDELFEIIKDKSHNKLTMKKAISIREAAADTFGIKIAQDAFSFQLKQLIDRMNFLDKQIEALDIEIMKYYEQFDCYLHTIPGIGIIGAATILAEIGDISRFKNSSALVAFAGIDPTVRQSGEFNSTHNHMSKRGSPYLRHAIFLAATTCSFHNSPLNAYYKKKRDQGKHHLTATGAVARKLTTVIYAVLRDSKPYEPKKFC

SEQ ID NO: 471397 - protein, 453 aa, unidentified
MCLEDRPILEPNAAGIDVGAREMFVAVPPGRDQNPVRVFATFTEDLERLTDWLEQCGVTTVALESTGVYWIPLFEILEQRGIRPCLVNTRHMKNVPGRRTDWHDCQWLQFLHSVGLLRAAFRPGQDICAVRTLLRHRNELVSAASQHVQHMHKALTQMNLQIHHVINDITGVTGLAIVDAILAGQRDGTELAKLRNPHIKAEPETIRKSLEGNWRPEHLFTLGQSRDLYRIYQQQIMNCDLAIEKMLPNFEPRVDPTERALPADQKRNRAGRRRRRKNGHPHPEFDLRTETYKLFGVDVTQIPGLEENALSLFSEVGRDMSRWPTAAHFVSWLALCPDNDISGGKLLWRGTRRIKNRAGHLFRMAAFSLHHSLTPLGNYLRRMKAKLGPKGATMATAHKIAVLFYTMVKNQVEYEESIWAARDAQREKRFEAKLKRQAKQLGYELVPIEPKAA

SEQ ID NO: 471398 - protein, 391 aa, unidentified
MVYVGVDVAKDKHDCFIMSSEGEILRDVFAIPNNMDGFCSLFREIQLASGDRSKVKVGLEATGHYSYNILGFLLDKGLATFVINPLHTNLYRKSLSLRRTKTDKVDARIIAAMLMSDVNLKSYTDSAYHNEELKSLSRYRFDKVKARATLKQSISRLVTILFPELEKLVPTLHLASVYALLSEHPGARQIARSHLTHLKALLQDSSKGHYGRDKAIEIRDAAKDSVGSHMPAKSLELRHTIRLIQELSVEIDEIEAAIKAIIDQMASPILTIPGISYRMGAMILAEIGDFSRFDSPDKILAFAGLSPSTYQSGQLTSTYARMEKRGSRYLRYALFNATKYVCIWDSTFAAYLAKKRAEGKHYNVAVSHAAKKLVRLIFALEKSRQPYRQAA

SEQ ID NO: 471399 - protein, 401 aa, unidentified
MVSIGIDVSKGKSMVCILSVEKMLALPYEMQHTGAELQALIERIRSYPEECRVILESTGIYHMPVLLSLHEAGIFVCVVNPMLMKKYISSCSIRKAKTDRADAIRIAQYGLDHWFHLENYILTESIYEQLRLLDRQYEHYSNMKVASKQALDTLLSQTMPGLKPLLCSKKTSRPEQDKLSDFVERYWHYDLILKQSEKQFVSSYCTWAQKKGYRPSIAKAQEIYAAAQNGIPTLSSKTASTKMLVLEAVRVLKEINRTLSRILTQMQELATTLPEYSVVREMNGVGDVLAVRFIAEIGDIRRFHSGSSLVAYAGIDSPPYQSGAFSATRCKISKRGSPILRKIGFDAMKVLKSVKPTQDDAVYRYILKKETEGKPPKVAKIAGLNKFLRIYYARVSAVYAN

SEQ ID NO: 471400 - protein, 429 aa, unidentified
MSYIVAGIDVHKKVLMVAVADAGQMDPEFDCRGFGTTASELKHLIAWLQERGVAEVVMESTAQYWKPVWLALEPHCKPNLAQAQSNRARKGRKTDFKDAQRLVRRLIAGELILSFVPEAEQRSMRTITRRRVQLVRDRIRLHSQLECLLEEARIKLSSVISDLLGATGRRILTEIAGGESDPEKLAARGDQRLKCTPEQLRDALTASPEPVPRQLLGMYLEQVAFLDGQIEKVSLLAAETMLQYQDAITRLSAVPGIRVISAQQIIAEVGATAASFPTARQFSSWVGASPGRQESAGENESSRCPKGNRYLRRVLYNAAQAAVKTKNSSFQTLLYRLLPRLGYKKTIWAVARHLTLVIWKILHDNVQYEERGEASTPQANKRRALRLLQELRKLGYAVDFTPALNPSLADDFRRSGRPSIRYCLENRCT

SEQ ID NO: 471401 - protein, 408 aa, unidentified
MKTLQKRCAGLDVHKKEVVACLRLVIRGKATYEVRRFPTTTRGLLELADWLEQAGCTHVAMEATGVYWKPVWHMLEGRFQQILANAAHIKGVPGRKSDTNDATWISDLLAHGLIRASFVPPQPIQELRDLTRTRKQLTREIVQHTQRIQAVLEEANVKLSSVITDILGLSGRRILKAIVAGETDPVRLSELGGTRLAATRSELADALHGRVHSHHCFLMGQHLKTIEQLEETITAFDARIEAALDLFRDAVERLKDVPGLSETSAQILIAEIGMDMKQFPTAGHLLSWAGLVPRLDESAGKRRSTRVRKGAPWLKPVLVQCAHAAARKKNSYFEAQYLRLKARRGPKKAVVAVAASILTTAYHMLADGTCYQDLGADHFARRNPRRVVAKLASRIRSLGYEVVIKAAA

SEQ ID NO: 471402 - protein, 334 aa, unidentified
MKYQHVVGMDIAKDSVQASCFDGTTFFDFSFPNQEKSFLKKIQKSIPKSDPSHILFVMEATGTYHLKLATALDKEGYSVAVVNPFIIKKYAEMLLKRAKTDRNDARLIAQFGFYQEVTLFAPKENLAEEITQVLKGLDQLKKERTNLKNYQEALTHHNEINSVVRDIYQKQLKEVEKAIKTLEAEAKRLVCQYAPKEYQLLLSIKGIGKCSATALLGFLQKMDRFSRGKEVASFLGLAPQISQSGKDKGKAWLSKKGNGYLRRLLYLAALSASRSNVQCRELYQRLLAKGKPKKVALIAVANKLLRQAFAVLKSGCPYDPHYLKLKSNLEVVLT

SEQ ID NO: 471403 - protein, 413 aa, unidentified
MRTCGLDVHKSFIVAYIFDVFFEKDDNGKPVVKAKDVALGRFERTWEGLDKLVEFLEKNETKKVVMESSGPYSYMVYMALDNTGFDVWMVHPRDNKTNNQLKTDKRDAERLVKRFVVGEIRAYKLPTDPKIIRLRRLTRFRMKMVSRLISVKNEIRKTLDEVGIDLKKAFSTLGKGAIAIVSGLVRGLSVDAIISSNQSLAKKRDVIDEILKSRGKLDDALIFEIKSLLRLLREIERQIESVEKRIENALSDLEEETKLLTTILGVGLQSAAIILAEIGGISRFPSPKNLASYAGLVPSVYQSGDEIVYGKLRKDCNRRLRYILYQVALKAIKYSPRLRRFYEHLRSRGKKHKQAVIAVARKIAMAIWHILTRRTPWSENLKRGYVPRRRRFKRITMKQALKILRELGYEVLA

SEQ ID NO: 471404 - protein, 411 aa, unidentified
MKKNSKTKVEKKLGSSTKQGKRARQSMRELKGFLATLDLHEASQSENGNRAATAAVDSKPAWFIGIDLGDKSSRYCFIDAGGKIAAEGSLRTEEAEFERYFTGIGPSRIALEVGTHSAWVSALLEGCGHEVYVANPRKMESIHKNRRKNDKVDARTLARLVRADPELLYPIQHRGVEARQALVLLRARDSLVAVRSKLINSVRGLAKSVGGRLPQCSAESFHHHAAALPEGVRDALLPVMKQIESLTQTIRSYDRQVETMAGRYADTELLQQVKGVGGLTSLAFVLTVDNPDRFAKSRDVGPYLGLVPRQDQSGEHSPQLHITKTGDKMLRRLLVTSAHYILGPFGEDCDLRRFGAQIAARGGKNAKKRAVVAVARKLAVLLHRLWVTGEEYEPLRNARMQEPALAAGAKP

SEQ ID NO: 471405 - protein, 430 aa, unidentified
MDQVNRNRLEEFRQLRKEIRHSEEHLIVGIDIGKEHHHAFFGTATGKTLLRRLVFSNHGGGFRKLLDQAEALGVRHGLRKVVYGMEPTGNYHKPLGEYLVRMGRTVVLVSGVAVKHNRESLDGRWDKHDDKDSASVADLISQGKCLYYEYPRAQLRGLRGLLSLKRRLKRQEQSYRIRIRNHLIAQFFPEMDSDYGRSEAQGLAIVRGCFPVSQITEIDVDPFIERVTSRRIGMGQRRRLEAIWEKAGESIGCDGVPGVEHEAKVMVEGLKQIREMIKETEDKIEEICKQFPEYQYILTMPGFGPDVSAKVLAAVGEPDRFLNGKQVLKLAGYDLSADRSGKGSGKAIPEISKRGKADLRYALYQAALIASLKNRDVMIYYTNKIRGREKERGIHTKMRVKLAAKLLVIAWTLMKKKEPFHPGYLRGELN

SEQ ID NO: 471406 - protein, 350 aa, unidentified
MLIIGCDYHPSFQQIACVDMETGEFGERRLVHREEAEQFYRELKQRGLSLRVGMESSGHARWFEGLLQELGFELWIGDAAEIRTKRVRKQKTDRHDAQLLLQLMLENRFPRIWVPDAENRDLRQLLWHRHRLVQMRTRVMNQLHVVPLNEGLRRKKALWRPAGRKELESIALAPWASRRRQDLLDLLDQLTPKIQELTRALEQEVEKRPVTRRLMTHPGVGPLTALAYELVIGTPARFHCGKQIASYVGLVPEEKSSGDRRRLGHISKQGNVLLRFLLVEAAQVTVRSQPEWRGKFFHLAMRRGRKIAKVAMARKLAVHLYWMWRQGCDYGPWQKLGSHAGEPGNPDGVQ

SEQ ID NO: 471407 - protein, 389 aa, unidentified
MKIFVGIDIAKLNHFAAAISSDGEIILEPFKFTNDADGFQLLVSKLESFDKNSIIIGPPSTAHYGDNLVRYLVAEFYQVCVLNPIKTCQMRKNNIRKTKTDKVDTFVIAKTLMMQDDLRFITFFDLDMMDLKALGRFRQKTIKQRTRLKIQLTTYVDQVFPEIQYFFKSGLHQNAVYALLKEAPSPKEIASMHMTHLANLLKVNSHGHFTKEQAKELRVLAQKSVGANDSAISIQITQTIQQIELLDSQLEKIEAEMTDIMKFNDSVIMTIPGIGYINGGMILGEIGDIHRFSNPNKLLAFAGLDPSVYQSGNFQAKTTRMSKRGSRVLRYALVNAAWNVVRNNATFKAYYDAKRAEGRSHYNALGHCAGKLVRVIWKMLTDEVEFNLE

SEQ ID NO: 471408 - protein, 358 aa, unidentified
MKKIVIGIDISKEKIDATAIDVRDSRLGVVKLDYQVYENRPMGYRRMLVWARHLINGIGLEDVLFCCETTGGYDRSLCDYVYAKGLDIWREGALQIKRSMGVRKGKDDKADSLMIAEYAMRHIDKAVTYETPDERVRELKALFLYRHKLVQERTEKKVRASELKATAAKSASMRFIVRDAMKGVRALDKSIRDCEKQIQALIDGDESLKRNYGHIDSIPGVSIVNATAFIAYTNNFKGITTANKIASYWGCASFRDQSGTSVDKKAYVRCYSSSLLKATLTQAAECTIKEHGIYRDYYLRLEKEGKPYGIIVNNVRNKLIHLVFSLVTNDMDYEKNHEFLRKKRKSEQGMSAQLEIIN

SEQ ID NO: 471409 - protein, 384 aa, unidentified
MVAVMIGIDPHKASHTAVAINGAEEPLGELRVRACASQAEQLQAWARAWPERTWAVEGADGLGHLLAQQLLSAGERVLDVQPKLAARVRLLATGDINKNDPNDARSVAVAALRSRGVREARRDDHAAVLRVWSKRYRDLGRTRTQVACRLHAVLCELVPGGMPGEITAGQAARILASITPVGPVEAARRELAAEFTEDLRGIDTRIRDTRKKLAIAVAATGTSLTGLFGAGPVTTAAAIGDVRHASRFPSRDHFAACNGTAPIEVSSGGRKVYRLSRRGNRRLNHAIHMIAVTQIRYRHSPGRAYYDKKLAEGKTSKEALRGLKRQISDAIFACLQADARRAAAYVKSPGGQPGNGSASSAAGSHPERRLFGQVVVSLCDAVPA

SEQ ID NO: 471410 - protein, 350 aa, unidentified
MIVLGADTHKSSHTIAAVDTSTGRVLADKTVAVGARGFAALVLWARGLDGERVWALEDCRHVSGALERFLICRGERVVRVSTRLMAGTRRSSRERGKSDQIDAVSVARAALAAGIETLPTAALAGPELDIRLLVDHRERLVRTRVALNNTLQWNLHDLWPELTLPGGALFSKKWTTKIARRLARAEQTMRVRIARDELRRMRELTQAIKALQAEITVLVTEIAPQLVAEPGCGPLTAAKLVGEIAGAERFTSDAKLARAAGIAPIPASSGRTDRHRLDRGGNRQINAAIHRMAVTRARCDPETQDYIARKKTEGKTQRDAIRCLKRHLARRIWHLLQPPPPTETSLNLLT

SEQ ID NO: 471411 - protein, 357 aa, unidentified
MKIVGCDLHARQQTIAMVDTETGEFVERALSHEGNALREFYGALEGPVVVGIEATGAMQWFLELLQELGIQCRVGHPAKIRAKETRKQKHDRRDAGLILELLIEDRFPEIWMPSIEERDLRTLLRDRHQWVKMRARLQHTLQAIALNHALRRGHALWSQAGQNTLQALPLPPYTSQRRTELLSLYEQLQQRIQELDKEVEAQARQRLQARRLLTHPGVGAVTALATDVFLGDTSRFDTANQVASYIGMIPCEHTSGKRQRLGKLTKQGNSLLRYLWTEAGMHAVRKDPELQRFYRRKLIQKGMGKARIAAARKLGIRLWIMMRDQIDYEQFCRRGRLRQKGKAHAGMPDFNSGPAMQ

SEQ ID NO: 471412 - protein, 347 aa, unidentified
MDFVGIDLHKTSSQICILSEGGELIERRIKSTRAAFDEVFAGRPRARILVEASTESEWVAQHLESLGHEVIVADPNFAPMYATRDKKIKTDKRDARALCEACRLGAYRPAHRTSEHQRRIRAQLLVRSTLVRTRSKYISLVGSLARREGCRIATGGSANFITRVEAANLPAHVMAAIAPLFESLRMLNRQISESDAELEKIVREDEVVRRLCTAPGVGPVTATTFAATIDDAGRFGAAKQVRSYLGLVPREYSSGERQHRGRISKAGGSRARTLLVEAAWALLRWRNARNQALYDWAMRIAARRGRARDCVALARKLAGILYAMWRDGTEFDPEALKHGVAEAAAVA

SEQ ID NO: 471413 - protein, 370 aa, unidentified
MKEFSKYVGLDVHKDTIAVAVAEGGGGEVRYVGEIAHTPEAITKLLRQLKRGGGRISWCHEAGPCGYGLYRQLSTAGEDCQVVAPSLIPKKAGDRVKTDRRDALSLARLLRAGELTAVWVPDQAQEALRDLTRAREDMKHLQQQARQRLSAFLLRHDRRFTGKCKWTQIHLRWLEKVKFEQPVQQIVFQEYVDTVLSLSTRVHGLDEQLERVARESVFWPVIEALMALRGVNLLSATTIVAEIGDLHRFASAPQLMAYLGLVPSEHSSGPKQTRGAITKTGNGHVRRLLIEAAWTYRHPARKSTPLQRRAERTPAAVQHIAWKAQKRLCQRYRHLTARGKQSVQASTAVARELAGFIWAIGQAMPRAAAA

SEQ ID NO: 471414 - protein, 455 aa, unidentified
MVAGQELEQVEEPGELVARAAAIDVAKDSGMVCTRLPHESGSGRRVQKVWSVAARFAAVTELADHLRCQGIERVVLESTSDYWRIWFYLLEAAGLQVWLVNARDVKNVPGRPKTDKLDSVWLCKLNERGMLRPSFVPPEEIRDLRALTRLRVTLTAECSRHKQRTEKILEDALVKVSAVASDLFGKSGRAMLRALVAGERDPKVLADLALGRLQAKKAQLAEALTGRFREVHAYETGLLLDLIGTLEAKIADLDTTIEAHLAALAGVPPACPDCGLIGGGHSPGCGSHGTALLSLTERLDEIPGVGPRTAQVIIAELGLDMAQFPTAGHASSWARLSPQTLQSGARTRPGKTGKGNRWLRGGLGDAAMAVGKTDTYLGERYRRIRRRRGKQKAIVATARAILEIAWHLISDRALRFHDLGAGYYDRLDPGRQTRNKIRELERLNPGMKVALTPAA

SEQ ID NO: 471415 - protein, 328 aa, unidentified
MKMAQFEGIVGIDVSKARLDVHVLPSHEARQVANEAAGCEALIGWLKSLGVRMAVLEASGGYERLAAKALRRARLVVRVVDPKRVRHYAKAIGRLAKTDPIDAQVIAEFGAILPRQDRHREIVVEDAAREPLAALVGARQDLVDHKSCLEQQAAAIAPGPARRALEAVVAVVARQIDRLERRIVAAIAEHPPFAALAKRLDTVPGVGPVSIAAIIAWLPELGLVSRQQIAALVGVAPFDDTSGERVGQRYIHGGRGQLRNVLYMGTMAATQHNAVLKAHYAHLMAGGKKHKVAVIACLRKLLTILNTMLARQQDWRPRVATAPAPAVS

SEQ ID NO: 471416 - protein, 324 aa, unidentified
MNIIGIDVSKAKLDCAWLRDENKVKTKVCANHPEGWNALITWAQENTGSDFCELHFMMEATGIYHENLATWLHDSGAKVSIVNPAHVKHYAQSLGVRTKNDKKDSAVLARYGLKESPTFWQPAPLEIRTLKALLTRLAAIEKDLHREKNRQEKAIVTDTPASILKSIAQMIGHFETEREELDKLIDNHIKAHKNLKENKALLESIPGVGKVIALQMLMVLGSHQFESASQCAAYLGLVPVQKESGSSIKGRPQLAKNGNPAIRAKLYLAAVTATRYNPDIRAQYERLTGKGKSKMSALGAAMRKLVQICFGVLKHQKNYQPQMG

SEQ ID NO: 471417 - protein, 343 aa, unidentified
MEHYVGLDVSLKQTSICVVNQAGKVLREGVVDSDPDAIGAFVRSNAPGVVRIGLETGPTATWLWTELKRLGLPVICIDARHAKAVLKMQINKSDRNDAAGIARIMQTGWFKEVRVKDLDSHSVRALLASRALLVKIKRDLENQVRGLLKNLGLVIGRAKFNVFAVRAEELIEDRPELVAAVRPLLEARKAIEQQVDDLDRKVLKLARHDLQVRRFMTAPGVGPITALCFKATIDDPTRFKRSRSVGAYVGLTTRRHASGEVDWSGRISKCGDAMLRTYLFEAANVLLTRVPKWSALKAWGIRLAKRNGLRKAKVAVARKLAVILHRMWVDGTEFNWSTKKAAA

SEQ ID NO: 471418 - protein, 309 aa, unidentified
MSLSIGIDVAKKKLDIFDGERAFTIDNDEKAITKAFEGYPRDSRIVIEATGKYHRLTHSVLHEMGFKVMVINPFQSRHYAKAMNIQCKTDGVDAKVLSRYGNGVEFKESVPESANQAQMRELSRHLDDLKQMKTELELRIRESERFILASLECVRESLLKQIEETETRLKEISSSDDDMRRNRDLLTTMPGVGETTAIMLCSYLKELGKVSKTEISALTGLAPMNNDSGTFRGKRRIRGGRHEVRRALYMPVLGAATRHNPRLMALYKRLIEAGKPKKVALTACSRKLVVWANAMLANNQTWQEANACK

SEQ ID NO: 471419 - protein, 329 aa, unidentified
MDSPVLLPIVGIDVSKASLAVCYHRGQQVQHLEVSNTKSGFQQLLKACGTDCLFVLEATGSYYLALAYYLHEQGARVAVLNPLVVKRFIQMHLGKGKSDRKDAQWLLRYGQQQPVKVWQPEETVLVECRQLEQVSEQLLKQKTMVSNSLEALQQHPVVSKLAVKQLRHTLRLLDQQVQEIEAELLRLLAQHFATEMQLLCSIPGIGRKTAGQLLLFAGGFTRLDNYRQLIALAGLSPREHTSGSSIRGKARITKMGGALIRSKLFMCSFAAKKRNAACKALYDRLVANGKNGKVALIAVCNKLLKQAFAIVKSGVPYQADFTSKLTPNP

SEQ ID NO: 471420 - protein, 371 aa, unidentified
MKDIRHVGFDVDSEKLAVAVAEASGEVRSLGTIPYREESVRRLVKKLGPASRLRVCYEAGPHGYGLYWQLTKLGVHCDVIAPTLVPVKSGDRVKTNRRDAEKLARCYRSGDLTAVWVPDAAHEALRDLVRAREAAKKDQLRARHRLGKFLLRRGLRAAGGVKSWTKAHLSWIKTLHFEHPAQEATFLDYQHEVEHAAERVVRLEHAIDQAIEAAPPEMRALIAGLQALRGIKKVSAVTIVAEVGPVSRFARPKQLMGYSGMVSSENSTGNSVRRGAITKAGNAHLRRIAGEAAWAYQYRPAMSPVLKKRQEGLSEEVKEIAWKAQHRLCSRFRRLSAKGKLRQKVTTAIGRELLGFVWAIGIQVEKEQQRI

SEQ ID NO: 471421 - protein, 348 aa, unidentified
MKCTSQIKSIGIDLGKTTFHLVALGTRSQVVVRKKFSRQQLLLYTANLPSSLIGMEACVGSHFLGRALREQGHEVRLMPAQFVRPFVKSNKNDYRDAEAIAEAVERENMRFVPIKTEDQLDLQALHRVRERLVSRRTSVINQIRAFLLERGISFAKGPASLRRQMPEILENADEKLTARMRHLLDFLWQEWKHLQLQIESLSEDLEQIASSDAACVRLQQIPGVGPLVATAVVSAIGNGAAFHKGREFAAWLGLVPRQWSTGGKTKLLGISKRGNPYLRKMFIHGARAVVLRAKREGSYLGQWMKGLEGRAARNVVIVATANKLARISWAVLSSGENYHPMPALAVAS

SEQ ID NO: 471422 - protein, 391 aa, unidentified
MIYIGIDVAKDKHDCFITNSEGEVLFNAFTIPNNADGFHDLFQKISSLTNDFSNVKVGLEATGHYNYNLLGFLIDKGLPTFVINPLHTNLFRKSLSLRQTKTDKVDAHTIALMMMSGVNLQSYSNTSYHNEELKSLTRYRFDKVQERAKLKTSISRLVNILFPELEKLVPSLHMVSIYALLAEFPSSAQIASCHLTRLTNLLANASKGHYNKEKAIEIRNAAKHSIGSNMPAKSLELKHTIRLIQELTSEIDEIECSIKSIMDEIRSPIFSIPGINYRMGAMIIAEIGDFNRFSSPDKILAYAGLSPSTYQSGQLDGCYSHMEKRGSRYLRYALFNATKFVCIWDNQFSAYLAKKRSEGKHYNVAISHAAKKLVRVIYQLEKSGQLYHRAA

SEQ ID NO: 471423 - protein, 321 aa, unidentified
MFQVTVGVDIAKKKFDAALLIENKYKHKHFTNDIVGFGAFIAWLLTFDLPVQPLVCMEATGAYSLPLADFLVVKGYPVSVVNPAKINAFAKSELSRAKTDKADAKLIARYALSMQPALWTPPPPEMRRLQALARRIEHLLEIEQMERNRLDTADGSVKESINTLLKTVEDEIKAIRQAINDLIDNDPNLGKRRELLESIPGIGAATVAHLLIALSPHQGFTNAKQVVAFAGLAPALRESGQWTGKTRISKNGDPILRKILYMPALSAWKHNPPVRTFCERLKAKGKNGKAIACAAMRKLIHIAFGVLKSGEPFDPLRAYSK

SEQ ID NO: 471424 - protein, 361 aa, unidentified
MHNHKTLVGLDVHAKATVAAVLELESGELRFGRIGGAPRSVANYLEGLPRPVLAIYEAGPVGYGLARETTPGIEVRVCAPGSIPRKPGDRVKTDRRDAERLVRSLLAGELSFVRVPSVEEEQFRDLARCRECARADLMRARHRLARFLVRREIEFAGPGGNWTEAHHRWLRSLEFSDHASRSVFEDYLAGVVFLEQRRARLDREIEIAAPRSPWAVRIANLRCLRGISTTTAYGLCCEVGDFRRFERPTSLSSYLGIVPSEHSSGERVNRGSITKAGSPHARRLLIEAAQHYRHKPAVSATLQRRQRGQDPRACAIGWRCQQRLYRQWQRLRLERGKPGNVVITALARELSNFVWEVGQLH

SEQ ID NO: 471425 - protein, 340 aa, unidentified
MGDKVHSICILDASGTVRECAEVSNTRAGIYKFFAKMEPSLIALETGTHSSWVSRILEELGHEVLVGHARKLRMIWNNPQKNDMRDAEMLARIARFDRKLLHPIQPRSMKAQCDLAAIKARDQLVKVRSSLIAHVRGLVKSVGARLPTCSPECFAKRAAEAVPEELALALEPVIASIAELTVRIRHCDHLIQKLADEEYPATKRLQEIPGVGPITSLAFVLTLEDPKRFARSRDVGPFLGMTPRRNQSGQVDQQLPITKAGNAYMRRLLVQCAQYILGHYGPDCDLRRFGLKLAERGGKNAKRRATVAVARKLAVLLHSLWKTGEEYEPNRCRRQNRKTA

SEQ ID NO: 471426 - protein, 338 aa, unidentified
MKTTTFGVDLAKRVFQVHWVDMDTGEINRKQFKREQLVSFFAKQAPALIAMEACGSAHYWARRFAGFGHQVRLIAPAFVRPFVKRNKTDVADAQAIWEAAQRPEMRFVAVKSEAQQAVLTLHRVRQQLKKMHRMQTNQIHGLLYEFGATVHRGWHSMDDATRQLTELADTLPAMVIDTLREQLQRVETLAQDIRTIERRLAAWQRQDEAATRLVAIPGVGLLTSTAAVATIGQASTFRSGREFSACIGLVPRQSGTGGRVKLLGISKRGDVYLRTLLIHGARSVLTHSKHLDDTLQRLLARRPFNVVVVALANRMARMIWALLAHGRTYQPGYAVHAA

SEQ ID NO: 471427 - protein, 355 aa, unidentified
MDSKKYIGMDVHKESISIAVMNGAGKIVMECVIETKASMILQFIDGLRGDLQVTFEEGTSAAWLYDLLKPHVTKLVVCDPRKNASMREGNQSDKIDARRLAELLRLNHLNPVYHGEHGLRNLKELVRSYLTITKDLGRVMSRVKAIYRSWAIPCSGKQVYAPRHRVEWLGKITEPGVRRRAEFYYQQLDALRTVRQEVRRELLAEGKKHQAWKRLCQIPSIGPIRSAVLLGILQTPHRFRTKRQLWTYSGFGIATQSSADHRSVNGQLQRAMKPSSIRGLNRNCNHDLKNLFKGAAIVASSKPGPFQEFYTTLLTKGIRPEMARLTLARKIATIVLIVWKRGACFEAQHLKPQTA

SEQ ID NO: 471428 - protein, 351 aa, unidentified
MSRSSASAAIATLGIDLGKNSFHLVGQDQRGAIVLRIKLSRSQLTQRLANIPPCLIGMEACAGAHHIGRQLQALGHDVRLIPAQYVKPFLKGHKNDYRDAEAIAEAVQRPTMSFVAIKTPEQMDLLALHRVRSRLVSQRTGVTNQIRGFLLERGITVRQGLVPLRQALPGILSSSSDALSLRIVHLIADLAEDWRRLDERIAHVSAEIEALAAEDEHCQRLMSVPGVGPIISSAVVAAIGTGAGFKQGRDFGAWLGLVPKQESTGDRTILGKISKRGNKSLRTLFVQAAHVVLVRRPHGARLGLWPWIETAGRRLHRNMLVIALANKLARIAWAVLARGHAYQPRSASHAV

SEQ ID NO: 471429 - protein, 417 aa, unidentified
MRKARAIVGVDCGEQRHRFVMINENGEREASYWVENDLGKIFQAFDELGSLSKTAKLEVVTESIGSLGAMVSQAVRGRGDELFVVSTKALRHYRDLEGQPHKSDDRDAYLAARMQLFGMEGVRTPAPVSEEEQALARLIRLRFRLTDQKKALGLRLRSRLLELAPVMASKDWEGPRHSSRAMVAILQRWPGLVGLERAHRKSIEKLLRKVTRNGDACVKMAKRLREAAKTIALEGLPREVLTMEMTILVAQLEANHQQLEQVRKREKELVNAHPVGQRLLTMPSVGYRTAAVLLAESLPQARVRSEAQLATYSGLTPLSRQSGNSSRSRLSRGVNRFLASAHYMSAVNACTRSPIDKSYHDKKRKDFKGHPAEFKKATIALARQRHKVIYRILAMGEVYDASRLAASTVNRARKTAK

SEQ ID NO: 471430 - protein, 366 aa, unidentified
MKKVSIAAVRQSRSISHAKLTIGLDVGDRNSWYCVLNEAGQIQLERRVGTNAKALREVFGSMPRSRIALETGTHSPWISRLLSELGHEVIVAHARKVRLIGESRKKDDRLDAQALARLARIDPELLCPVKHRSAQAQADLTVIRARAGLVRARTALVNTARSLAKSYGGRLRVCNVRNMNPEKAEGLSPELQSALEPLLAEIESLSERISEYKDRIEALAQHSYPQVALLKQIKGVGTLIALTFLLTLEDPHRFRKSRDVGCYLGLQPGRRNSGQSEPQMHISKEGDPYLRTLLVQGAQHILGPFGVDCDLRRWGLKLAERGGKSGKKRAIIATARKLAVLLHHLWVSGEAYEPLHNSSRATAAAA

SEQ ID NO: 471431 - protein, 375 aa, unidentified
MYEITRGAIVRVGADLAKRVIQVHAVDAAGRRVVARALKREQFMAWCAQLPAGCLVAMEACSSAHHWARKLRSLGLDARLIAANFVSPYRMEGKSGKNDMTDAAAICEAASRPSMRFVPVKTCEQQGVMSLHRVREGLKEERTGCINQIRGVLAEFGLVFAQSPKVLRTVLADVIEDASNELSAMARRVLQRAFDHWRELDEHMRWCDSQVGQHVRSSPAARRAAKIIGIGELGASALTAGVGDFHQFKGGHQLGAWMGLVPSQNSSGGKTSLGRITKRGDDYLRTLLIQGAKSAVMSAGKRDDPISRWLVQLTARVGWQKACVAMANKNARILWAVMTRDQGFDARHVSEKPEAKKAANERIAAPTPTMTPCPA

SEQ ID NO: 471432 - protein, 328 aa, unidentified
MSEYQRVCGIDVAKDSLQVHIATPGDTRCFLASNDDSGYAKIIEACKRHEVQIVAMEATGGYQRAAAVALASENIPVAVINPARIRYHALSDGVMAKTDKVDARIIADFAQKKAIKPMTLRTSQQEFLVALVARKAQLLKCKSAEDNRLQQTADKEVSRSIQRHLNFIQREIKKIDQKVDEIVQLDPQLQAKAEAADSVKGIGRATATALVSVLPELGILTRGQVAKLAGLAPFNDQSGNREGERHIQGGRPAVRRLLYMCAVSALHGGGVLREFYDRLIAQGKSPMKALTAVMRKMLVIINARARDALNALPPQGRGGVVIAAGGRT

SEQ ID NO: 471433 - protein, 365 aa, unidentified
MSGEGTWVGLDVHARSVVGSAIDETSGEISTRRLGPRTAQITEWVCSHPGPVMACYEAGPTEFGLARALAASGIACEVVAPSKLERPAGDKVKTDRRDAERLARLLRIGELPGVRVPTEAEEAARDLVRAREDVRTDVMRARHRLSKLLLRQGLVWDATAWTGAHEQWLRGQRFDHRGVALAFDEALDAVFTIGARRDRLDAAIVDMAETAALAGSVGRLRCLRGVSTLTAVGLCVEVADWHRFTGATIGSYLGLVGSEASSGARRVQGGITKTGNSHARRLLVEAAWHHRRQLRPSRERARRGQGQPVVVRARAEAGNRRLHQRWARFDQRNKRPTISAVAVARELAGWCWSLAVLDDPHAAPR

SEQ ID NO: 471434 - protein, 351 aa, unidentified
MYLIGVDYHPSFQQIAFLDQETGECGERRLNHSDGEAERFYRALQQRGVSVRVGMEATGYSRWFERLLAELGFEVWIGNAAEIKTRRVRKQKTDRLDAQLLLKLLLENNFPRIWVPSPDNRDLRQLLWHRHRLVQMRTRIMNQLQALAMNEGKRWKKKLWSEQGRAQLEKLPLAPWASRRRQDLVELLDRLNPTIAELTAAIEQEARKRPEALKLMTHPGVGPLTALAFLLIIGTPARFRCGKQIGSYIGLVPSEDSSADHQRLGQISKQGNALLRFLLVEAAQAAARCNPDWRRRYFHLTMRRQKNIARVAMGRRMAVRLYWMWRNGCEYSPSLEFGSYAGQLVTGHGAK

SEQ ID NO: 471435 - protein, 346 aa, unidentified
MKILALDLGKYKTVGCTYESESGAHQFQRTFTTPADLRRLVQEVRPDRVVIEVCSIAGWVCDLMGQLGTEVQVANTSDDAWRWRKVKQKDDRRDALKAARLSAVNQLREVYIPPREVRQWRALITYRQHLVGRRTKIKNHLRDLLVREGQLLPRGRSCWNQLGQAQLNTMARPFAEVEAAELWRGELWEELQQLQMIQERVASVEEKLNAMGAADKRVQLLRTIPGVGPRLSEAIVALLDQPQRFRKASQVSSYIGMVPKAFDSGESERRGRITRQGNRLVRSLLVEVAWVGLRHNSWLRQTYQRLSGGKKARKKIAIVAVGRKLLVRCWAMLRDNRAWSWQPQIT

SEQ ID NO: 471436 - protein, 310 aa, unidentified
MGVIIDKGCGLDVHKETVVACVMGSGIKKEVRTFSTMTGDLFRLKSWLSEKGITHVAMESTGPYWKPVFNVLEDSFEVILANARHIKNVPGRKTDVKDSEWICKLLRSGLLAASFVPPKAIRELRDLTRYRRKLTQAISSEKNRVQKVLEDANVKISSVVSDTFGVSASRMIEAIMAGTLDTEAISDLAVGRLKGKKEELKKALVGNFQEHHRFMIQASLDHIESLEKIITGLDREINRKLKDYHREFELLQTIPGVKEQGAASILAEIGVDMDIFPSDGHLSTWAGMSPGNNESAGKKKAERRPTAIRI

SEQ ID NO: 471437 - protein, 318 aa, unidentified
MQQSAVMWVGIDVAKDSLDVAWGSGDESRHLSAANAPSGLAALVRQLPPAAESRVVVEATGGYERALVTALVEAGYRVAVVNPRHVRDFAKALGILAKTDRIDALVLARFGHQVQPRVLEEDPTEREELSQLVARRRQLIDLRVMESNRLQQTSIRVAQKSIQHVLKLLAKEIDQLEAEIAQLLQSDDDWRAKIELLSTAPGVAQVTSATLVAEVPELGRLNRQAIAALVGVAPFNDDSGRHRGNRRVAGGRASVRRVLYMAALSARRYNPVIRAFSERLAAQGKKPKVIITACMRKLLVILNTMLKNNTPWKDCHVG

SEQ ID NO: 471438 - protein, 414 aa, unidentified
MPCKIAGIDVHKKVLMVVVIDATTPEEKPERRRFATMPSEMRRLSVWLREQGVEEAVMESTAQYWRSVWLELEPYMRLHLAHAFSNRAPRGRKHDFKDAERLVRRLIAKELILSFVPDGEQRTWRSLTRMKLQLTRDRVRLQNQIECLLEEMRIKLSIVVSDLLGASGLRMLRALATGETDPKKLAQFGDARLRCTEEQLVDALTGRVQPMHRAMLGLQLERLQLIDRQIAKLNALIAQAMKPHQEAVMRLAEVPGLGVDSAQQIIAEVGVQASTFPSAAELTSWVGTCPGKDESAEKNHSSRSAKGNKYLRRVLNQAAHAAVKKKGSHFQVVFRRLLPRLGYQSAIWAVAHRLCRMVWKILHEGVRFIEQGVEPDPKAKNKRVRTLARALRKLGYEVAITPITPVAATNGMQM

SEQ ID NO: 471439 - protein, 369 aa, unidentified
MTSSNILFIGMDVHKESIEIAIAEGASHEVRRYGKIGGAHDAMRKMLRKLVSQGKSLHFCYEAGPCGYELYRYLVSEGHDCWVVAPSMIPKRPGDKVKTDKRDAVQLARLFRAGELTPVYVPDREDEAIRDISRAREDTMLVRKSARQRLKSFLLRHDIRYQGKTSWTEAHLRWLADEVRCPSAVQQIVFQECVNAVTESQHRLQRLDKQIEHFVKQWRLYPAVEALMSMHGVQMVVAVTMVSELGDISRFENPKQLMSFLGLTPSEHSSGPRTRRGGITKTGNGHVRRILIEAAWCYRYPAKVSREMQRRQAKVPLAIREIAWRAQCRLTQRYQHLQRKGKPHNVTVVALARELAGFMWAIAKEVKYP

SEQ ID NO: 471440 - protein, 361 aa, unidentified
MVGTMTWVGLDVHARSTHAAAIDAVTGELSRMRFGAGAEAPVEWLRSLSGPVRACYEAGPTGFGLYRALTAAGIATQVIAPGKTPRGPSDRVKTDRKDAELLARQLLAGSLTEVVVPAIEVEAAREMTRAHDVCRQELMRARHRVSKMLLRHGLVYPKPKTWTAEHRRWLSERRFEQAPSDAVFADLLGAVDGITSRKAAIALAISGLAGDERWWPTVSRLRAFRGIDTLSALSIHLELGGDWSRFDRASALSSWLGLTPSLSQSGESSRQGAITKTGSMLARRLLVESAWHYSRQPRLGATLANRQVGQPDHVLAIANRAQQRLYRVNRRMRARGKPHNVTVVACARELACFLWAAATAD

SEQ ID NO: 471441 - protein, 342 aa, unidentified
MQIAILGIDLGKNSCSVVGLDVAGRVVLRRRLRRDGVIKLAAGMPGCVMAMEACCGAHHLGRLLRDHGHQVRLMSPEYVRPYVKAQKNDDRDAEAIAEAATRPTMRFVELKSEAQLDMQSLHRARDRLVGERTALINQLRAVLLERGIVVSQGRRKLERYVDALLAEEEIRLSPRTGLLVEDLRAEWRELDRRILAFDDEFAAQARTDETARLLTSIPGIGPLNATALTAAIGNAQTFGRGRDLAAWLGLVPKQVTTGGKPKLLGISKRGNEYLRRMLIHGARAALPTLSKGETPLGAWLRGLLARAHVNTVVVALAAKLARIAWAVIRRGEKFNIKATTAS

SEQ ID NO: 471442 - protein, 355 aa, unidentified
MDTSKKTIMVATLMPGEQIPVTERIANEEAAVRRFIARLGDPSQLRACYEAGPGGYDLYWLLTSMGVACEVVAPSLIPKGGSDKVKTDRRDACRQARLHRAGELTPVRVPTRAEEAVRDLVRVRAGLLADRKRAQQRLTAVLMRHGCIWCHGSYWTGAHRAWIAAQRFTEPALTAAIAHYRAALDTREAELAAIEAELAPWARREPLAGPVARLGCYRGIAELGALTLASEITDWRRFPAARAFMSYTGLVPSEYSSGERTRRGHITKAGSEPVRTTLIEAAWAYQHGPAIGATLRRRQAGAAPGTLARSWKAQRRLHARYRHLISCGKAPGEAVTAVARELAGFAWAEMTADPA

SEQ ID NO: 471443 - protein, 361 aa, unidentified
MPMVEQRTKLSFKEEQIFVGIDTHKKNWKVSLYHQQTSLKAFSQDPNPELLVNYLHRNFPEADYYCAYEAGFSGFWLQKYLSKNGINCIVVNPADIPTSHKEKEFKTDPRDCRKIAKALRSNLLEAIYVPTDAGLEYRKVVRLYHDMSKNYTRYKNKVKGILNFYGINYPPEFESSNNHWSSSFFSWLGGLRLTNSFGDWTLQFYVQECLKAKELKRIATSKVRELSRTDTFKRQVLLLRSIPGIGLITAMTIITEIEDINRFRNLDTLCSYIGIIPSTKSSGEKERTGGLTHRGNKFLKGLIIESAWMAIRRDPGLLQTYTRLKNREENKAIIRIARKLTARIIYVLVNQKPYDMRYGIE

SEQ ID NO: 471444 - protein, 351 aa, unidentified
MIELLSTIKWEKTKMKITTIGLDIAKRVFHVVCCNQQGHLMKKKMLRRAQVHSFFQSHPTCLVALEACATSHYWAREIEKCGHTVKLIPPQHVKAFLIGNKNDFNDAFAIAVAARQAHIKSVGIKSIEQQDNQAQHKARSLAIGQRTALCNQARGLLAEYGVCLPRGVSTIRKNIPIFLDDNNEELSGVFKMTLRQLAEQLASLDASIAVFDKAIIQAVKNNDICKRLQSIPGIGPMVSSAYFNEVGNGSAYRKGRDVAASLGLVPKQHSSGGKDVLFGISKKGNNYLRCLMVQGSQSVVTSARKKDDKLSQWLNRLVETRGHNRACVAYANKMARMAWAVTVSGEEYSLS

SEQ ID NO: 471445 - protein, 316 aa, unidentified
MNTQVFVGLDVSKQHLNVAVRPQGRHFVTPNDDRGIKQLVKRLGALKPQLIVLEASGGYEFLVTAALAEAQLPVALVNPQAVRKFAGATGKLAKTDKIDAQVLAHFAEALRPEPRPLPDQAQQVLKAALQRRQQVVKMIAQEENRLEKTFILAVRRDIQEHLTWLRRRLEELNRDLDDQIRQSPLWRDRDRLLQSLTGIGPVVSRAIIAQMPELGTLSGKKAVALAGVAPYNRDSGRFRGKRMIRGGRSYLRRMLYMAAVVASRFNPVIRAFYQRLLAAGKPKKLALTACMRKLVIILNAMVKHNQPWNQLATQVP

SEQ ID NO: 471446 - protein, 330 aa, unidentified
MLFHAIDLHKRTLEVATLMSGDEGEPRVVQMPACERALGTYLAQWPASRHRVVVETTGAWYWIADLLRERGAELKLAHAAKVQAITAAKVKTDSVDAVTLLTMLRLNLVPEAHVISPELRELRDLLRMRLRLIEKHTSAKNSIARLLEKYNRASVEALPELARVQVGFHRGQISLLAAQIKALEKHVHRELRPNPIVRRLRRIPGIGRLSAWTLYLEIDGIERFAAERNFFSYCRLVPGSDNSGGRTRNKRSKAGNRYLKLAFSHAGIRATQRYAEVGAAYRKKLRKKNKPLAQAWVRQQLARIVYQVLKKDVDYDDTFRGVALSRPKRA

SEQ ID NO: 471447 - protein, 407 aa, unidentified
MVVTIGIDPHKGSRTAVALDEHETVLGQLRVRTGADQLARLCEWAKAWPGRTWAVENASGLGYLLSQQLVATGEKVVDVPPKLAARARLLDNGDANENDPNDARSVAVAALRAKHLSEVAKEDHAAVMRLWARRRKDLTSSRTRVANRLHAVILELVPGGYTGEIYATKVARLLEATEPAGAVAGARKELAEELLGDLRRLDAQLKELKGRLALVVAASRTTATKIFGVGPVVAAIAVGLTGDVGRFPDKDHFAAYNGSAPIEVSSGPKKIYRLSMRGSRQLDHALHMAAVTQVRHRHSEGRAYYDRKVAEGKTGKEALRALKRRISDALYAAMVADARRERQESQASGGPGGQTGNGSVACAAGSHPTGPALRPSHSRANPKTTALRQAARSSQPRPDQRKIPKAS

SEQ ID NO: 471448 - protein, 342 aa, unidentified
MNHYAGIDVSLECSSVCVVDASGKILREARVASEPEALIAWFRQSGFEFERIGMEAGPLSQWLFAGMKAAGLAVELLETRHVRKAFEAMPVKSDRNDARGIAQLMRLGWFRPVHCKSISAQETRSLLTARKLVQSKLLDVENSLRGILRGFGLKVGKTTGQTFAGRIEELVHGHPHLPRIAKALLAVRAVLRTEFAAFEKQTRRMVRSDMQARLLTSVPAVGPIVALTYASAIDDPTRFKSSKQAGAHFGLTPKKHQSGETDYTGRISKIGDASVRTALYEAANVMLTKPLKGCSQLKSWAMRIKKRAGMSKAKVALARRLAVIMHRMLADGTPFNAAAAAA

SEQ ID NO: 471449 - protein, 348 aa, unidentified
MTVYIGVDFHARQQTISYLTTETGEIQHLVLLHQELTTVRAFYAQFAGQRVVLGFESSGYAAWFEELLEELGCEIWIGHALYIRQFAKRRQKNDRRDADLILDLLVKGDFPRIHRYSRRTREILQQLRYRQRLVKMRTMAMNMLLFMASSRGVSLRTQLTSKRGQARLAQLTLPQPLNSQRDELLQLLQALDEKIKTVEQWLQRETKADAAVQRLQTHPGIGLLTSICVRYTLEQVERFTTTRQVSAFAGFDPMEDQSDERQRRGAISKQGSRWLRFYLVEAGQIAIRKDADLARVYKRICVRGGHAKAKVAIGRRLLVRAFIMLRDEIDYDEFLRRGVAARSSRGTA

SEQ ID NO: 471450 - protein, 310 aa, unidentified
MSISPKVLGIDISKHHLDVFDPRSGRVEHLENQPQAISAWAEQALDGIDLVVFEATGRYDEALRAELVGRQVRFSRVNPSQARDFARASGFLAKTDAIDCRMLSLMGQALALRPAEPVSPQRERLVRLGRRRDQLVTQRVQEKTRLKEEDDPEARASLQSHLAWLDAEIRRFETCIRQLIASCRELARTSALLRSVPGVGPVTASSLLALVPELGARSPKTIAALIGLAPLNADSGTRRGQRTIRGGRKRVRDALYMAAVSCIGRQNRFACAYRAFVSAGKPPKLALIAVARKMLITLNAIARDQQPFRA

SEQ ID NO: 471451 - protein, 400 aa, unidentified
MRVVFGIDVSKVSSEVAILVNGEKVHNYTMSNDAIGFSRLLGDLRTVHKPEIIFEATGVYSRRLQAFLDEHGYAYTRLNPLEAKKQLDSLRVRKTDQIDAEKLAQSQFVLNRKPTYVQEEVYQNLRDLSRFYQNLTEDIVRAKNRLHKALQVTFPELENILSTPTGEQYWNLVIAFPCKDFVLELSKDKLSESIRQSTSKRISDKRAAYLAEKLIALANQSYCAVKKTSPMLEEVRYYTKELLRLSEQRQAVLNEMVELAQPLPEYDILLSIPGIAETTATSIIGELGDIRRFQSANQINAFIGIDLRHYESGNFLAKEHITKRGNPYARKILFKCIHNIASASHTNPCHIADFYEKRKRQSQTTSTKPHTIASIHRLIRTMYYLIMHNKLYDYASTQNR

SEQ ID NO: 471452 - protein, 430 aa, unidentified
MKQYELLHSLFVGIDVSMKENVVHAVPFSPEDHPGHAHLRFSAPNTPAGSVGIVEKVSDFLKFYPDVIQVVIALEATSVYSFHLATFLSVAHFNGHIPAIVYSVNPKEIHAYKKTFTDVGKDDYVDAMVIADYARSNKIRSRPWKGPELLGLRVLTRLRFRIAKLMGIVKNSTGNSIYLECSGLMTGENPFCNVWTTTCQELLTTFQGPDEILSLSDEELLNFITEKGHGRFSHPLDVVEKVKKAARNSYRLDKRVYEPLTSGLSVSFFIIHSLEAAIKKLDKSIETMAKSFSSDSYQILLSIDGVGPVIAGGLLAEIGDIKRFKTDDALAKYIGLTWRGKQSGQSESPVKHLSKAGDVYLRYYVLLATGQIINYSAKYREAYERIRSRKTLFPYRAALNLVARKIVRLIFTLLDKHQLYSDNKVMVTLE

SEQ ID NO: 471453 - protein, 343 aa, unidentified
MESIHYVGLDVHKKTIAYCIKTVAGKTVQHGTVRSERQALRQWQSEIPGPWMGAMEATLFTGWIYDFLKPYAVELKVAHPEMLKAITAAKKKNDRDDAEKLADLLRVNLLPECNMMSEELRELRRILRYRNMVVRTSVKMKNKISGLLMEVGAPYEKRRLHSRSYFNQLLEKVEDVPDSVKELLKLSRSNLELFEAIQKRLIKTLRQETQIKERVECLMSIDGVGEITALTWVLEIGDPARFNNSRQAISYCGLCSAQKESAGKDHRGPISKKRNKHLQTILVEAAKLAPYWNPHLAAVREKELSQGNRNRATLAVARKLVEYMLAVDRRGTPFVSEEPPQVV

SEQ ID NO: 471454 - protein, 347 aa, unidentified
MSIAMIGLDTAKSMFQVHAVDEAGKVEIKRKLRRSELISFFEKQAACTVVMEACGAAHHWARMLTGLGHTVKLIAPEAVRPFVKRGKKNDAADAAAICEAASRPDVTFVPAKSLEQQGILALHSARSLLVKQQTMLANAMRGLAAEFGLTVPLGTDKLEELMALVQADEAVPKGARQAVRGLLDHRQVLAKSTKDFEAAIVAHARQDETARRLATVPGIGPITASLIAATVADIGVFQSARHFAAWLGLVPRQCSTGGKTRLGRITKTGNREIRRLLVLGATSMVHRAAGWNSAAGAWTRGILERRPVRLVTVALANKMARIAWALMTRKEVYHATGRVAAAAEAVA

SEQ ID NO: 471455 - protein, 387 aa, unidentified
MPQPNDLSRSLAALDQDSTLIAVVEMSQTSWLIGAIVPGVERHPLKKIVPEENELLRLLYRWRDEAIKAGRRITRITVAYEAGRDGFWLARWLRARGVEAYVIHASSVAVSREHRRAKTDRLDTELLKRTFLGWLRGERDHCKMAAIPTLAEEDAKRPSREREALVRERTRLTNRMKSALARLGIRNFKPQLRKAAERLAAVRTPEGEPLPPHTLAELHRDIARLQLVKGQIEQIERARLERLRQPPTDAPHAMLVQLAQVYGLGIETADMLVHEVMVRDLRDRRAVARYGGLTGAPDESGARRREKGLARAGNARVRRGMLQLAWRFLRFQKQSALVKWFAARTADGRMATRKTMILALARKLLIALWRLATVGEIPPGVKLRPAA

SEQ ID NO: 471456 - protein, 379 aa, unidentified
MMNEETRNKLSANPNTLYIGADVGAAEMKLAAADRQRSRPLEKTLEPFDDVGLMDWLKAVRKGLGLEAGPVVFVHEAGRDGFSLHWWLEMLGVQSVVVDPASIETSSRRRRVKTDRLDARLLLTKARGYFGGDGGVFSVVRVPSEEVEDARRVSRELKALKEEATRGKTRINGLLAQKGVKLALSKDFVARLKEVMTPWGTSLPPHLKAEILRQVERLELAESQIAQLEQAHQVAMAEGATDADRQGAKLVQLVSIGMATAVTLPKEFFWRDFKNGKEVGAAAGLTGTPRVTGTSTDIEQGISKAGNSRVRTLMIEIAWMWVRLQPNSPITQWFYARVDGTKRSKRKNIVAVARKLLIALWRYATMDVVPEGARLKTAN

SEQ ID NO: 471457 - protein, 361 aa, unidentified
MFVAGLDAHTRYVVVSVVNSRGELLVRPTRVRVEDRQRVLALLAPYRPLEVVMETSSSWPWLYELLSGAGATFVLAHARRLRAIAEATYKSDDIDAELLARMRLAGCIPAVYATPATQREWATLIRHRTTLVRQRTMLVNRLHAQLHTRGLHLERGRLLTRAGWQWVKTEAWPHLSTEQRAVARSHRRLLRDLTPLIRAADHHIAQVAAPIPQAQLLMTIPGIGAHRALVVCAEVLPIARFRTPNHLASYAGLAPCSKQSGQGPVRHGPIPGGANRWLRGALVRAVVSHVQHAPTSWLTQYYTQQKARVGWPVARVATARKLARVMHAMLRTKSYWQNDPPRGELARVHAAADALTASASD

SEQ ID NO: 471458 - protein, 391 aa, unidentified
MIYIGIDVAKDKHDCFITNSDSEVLFKAFTIFNNLDGFNDLYQKIESVMDDVTKVKVGLEATGHYSYNLLGYLIDKGLPTYVINPLHTNLYRKSLSLRQTKTDKVDARTIASMLMSDVNLKSYSDISYHNEELKSLTRYRFDKVKERAKLKTSVSRLVCILFPELEKLVPTLHMASVYALLSEFPSAKHVATAHLTRLTNLLSESSKGRYGKDTAITFRDSARASIGSNMPAKSLELKHTIKLIQELDSEIDEIENEIKIIMDEINSPILSIPGINYRMGAMIIAEIGDFNRFDSPDKILAYAGFSPSTYQSGQLDGAYAHMEKRGSRYLRYALYNATKYVCHWDPTFAAYLAKKRAEGKHYNVAISHAVKKLVRVIYHLEKTKQQYIKAA

SEQ ID NO: 471459 - protein, 409 aa, unidentified
MRRVKGKRSASSIVGCAPKCAEPHAETPEGVLPQTFRGGRPVSETITSFVGLDVHKDSTAIGEAEAGRENPRFIGTVGPDLGQLLKALKSLGKPETMLVVYEAGPCGYGLARQLRSRGYSCEVVAAGKIARRPGERIKTDRRDALTLARLARSGDLVKVIVPDEGDEAMRDLSRAREDGVRARLKARQQLKALLLRHGHRYGGKSSWTLAHERYLAAVSFAHPAQDIAFAEYRQAVREGHERVERLTEALRTQTEHWRLKPLVAGLATLRGIDFVAAVTLTAEIGDFGRFAHPTELMGFLGLVPSEYSTGDTRRQGDITKTGNSHARRVLVEAAWNYRFPARISRVLQIRQEGQPKAVREIAWRAQLRLAHRYRRLSSRKLHPNKICVAIARELAGFLWDIARQVKLAT

SEQ ID NO: 471460 - protein, 374 aa, unidentified
MNIIYIGVDFHARQQTICYLKTETGELVTCELQHQDKQAVRAFYAQFPGPAVIGLEASGYSPWFEALLEDLGCEVWLGDATEIRRRARWRQKNDRRDAELILDLMVHKEFPRLHRPAIESREVLRMLRYRQKLIKIRTMSKNSLQALALQSGLAKGSRLFTKAGQQELNSAVMSPVMQWQCEHWLQLLQPLNQQLLETMVWLKLQSKGDVQITRLRTHPGIGLLTSLCLVHTLQPISRFRNQRKVAAYAGFDPVERSSAERKCFLGISKAGSRILRYLLVEAAQTAVRKDEDLKRFYKRLAERRGRPKAKVAAARKLLIRAYIMLRDEIDYAEFRRRAVAARLARRGQGPNVPAVLIGQPASADYRDDLPSASQ

SEQ ID NO: 471461 - protein, 412 aa, unidentified
MSKLLRRVGIDWGSESHQVCRIDGEEEPKQRSFPHSGEGLRALVEFVIEGEMDREQIAVAIEVNHGAVVEGLLGKGLRVYSINPKLLDRLRDRFSMAGAKDDRRDAFVLASCLESDAHAFRKIELGNEENTRLQAATRLREDLKSERRANANRLWNELREYRPALLTLCPGADESWLWVLIEKAPSPSEGAKLTSARIGAVLKKHHIRRLTAEAVRTVLRGDVLSLRSVYIESHVARVLVLIARLKLAQAQIVAIETQIKTALAERVKSEEQTERRDLTILLSLPGFGSLTVATALGESGDAFERRDYNALRSICGAAPVTKQSGGTRYVVMRQVCQPRLRVALHLSALQAIRVDPKFGDLYARARARGQSVGRAIRNIVDRLLFLAIQLLKKNQLYDVGLRQIAPEVAATA

SEQ ID NO: 471462 - protein, 342 aa, unidentified
MYYIGLDVHKKTISYCVKDVSGRICQEGKVGATRWELDIWIKSLPQPWTVAMEATIFTGWIYDHLKPHAAAAKVAHPLMLRAIAAAKKKNDSIDAGKIADCLRCDFLPECYMAATEIRERRRTLRYRHLLVRQMVQMKNRVSGLLMETGVSHNKQRLHKVGYFPELLANADAVSASIRPLLQLSRESITRLQRTEGAIIRSLQRDPLLAERVRRLQTIPAVGKVTALSWALEMGDISRFRSIRQAISYCGLCGDEKRSADKVARTPISKQRNKHIQRVLVEAAKLAPRRNPDLALVYENARQKGNANCATLAVARKLVAYLMVVDREQRDFEPVRGLAGIAA

SEQ ID NO: 471463 - protein, 401 aa, unidentified
MTVHSEDPAVVGGADTHADTIHVAVVSVHGRDLADREFPTTTAGYRDAISFLTSHGSMEAVGIEGTSSYGAGLARAAKAAGLRVVEVNRPDRAERRRRGKSDPIDAYQAAHAVRSGRAATPPKDEAIEGIRALHNARHSAVKARTAAINQIHQMLITSPDNIRTKYAALKGKPLIDTLAGIRIVNSDPVINVVLASLKALAKRCRFLTQQHTDLGALLDALVTAANPGLRAAYGLGPDTTTQLLITAGGSPDRLRSEASFAALCGVAPVPASSGKITRHRLSRGGDRAANNALYRIAMVRMSSHATTQAYVARQVTAHKTKAEIIRMLKRAIAREVFRYLSQHIPVPEIADLRPTRQAKNITLTHVANHFGVWPMVISKIERGTRRDDDLANAYRTWLNTA

SEQ ID NO: 471464 - protein, 454 aa, unidentified
MAQRNRNVIPKPGTSRAAALTITHPNAAGIDIGSASHFVAVPPDRDDQPVREFPSFTVDLNAIADWLMACGVDTVAMESTGVYWIPLFELLESRGLTVLLVNARHVKNVSGRKSDVLDCQWLQQLMTYGLLRGAFRPAEQVCMLRALYRQRGMLLRSQGRHVQHMQKALTQMNIQLTNVLADIVGESGQKILRAIVAGERDGQVLGAMKNVRVRASVEQIARSLQGNWRAEHLFALKQALAAFDFVGTQLADCDTEIELQLQRLQAHDGDPAKGKKRGRARNAPKFDLRTQLFRMCGVDLTRIDGVDVTTALAVVSEVGTDMSRFPTIKHFTSWLGLCPGTKITGGKVMSGKTKRVVNRAAQSLRLAAAALRSSKSALGAYFRRMCSRMDKPKAVTAAAHKLARLIYTMLTKGEEYTDKGQDYYEERYRERVLRALSQRAAKLGMQMVPIAQPA

SEQ ID NO: 471465 - protein, 356 aa, unidentified
MSVYIGVDFHTRTQTVCWCDTADGVIHQRTLDHQQDDVSGFYAQFAVPAVVGLEATGYARWFHRLLEAQGHRLLVGDAYVIRKCAVRRQKNDRRDAELLLDLLLHGDFPSVHVPTVASQEVLRLVRYRQRLVEMQTKLRNGVQAVALNHRLRLGPKLWSIKGRQQLQALELDRADGLQTENSLELLTEIRTRIRTIEKELTARADPDARVRLLRTHPGVGLLTSLTVVHTLEPVTRFDRARRVAAYCGLDPRESSSGDTVRMGHISKQGNRLLRHLLVEAAHRAVHGKADADLRSFYFRLMERKKNGAVVIVAVARKLVLRLYRMLREEIDYTEFRRRGRDARRARKTPSPASGGC

SEQ ID NO: 471466 - protein, 373 aa, unidentified
MPTNLRYVGLDVHAETIAVAVAEPDGEVPFLGMIPNRPEAVAKLIRKLGSRDHLRACYEAGPCGYVLYWQLTRLGVPCDVVAPTLVPIKPGDRIKTDRRDAVKLARCYRSGDLTTVWVPDAAHEALRDLVRAREAAKQDQLRARHRLGKFLLRHGLRPPAGVKPWMQRHRRWLDSVGFELGAQRATIADYLHEVDHAVARLERLERALDEAVAAAPAAQRAVIAALQCLRGIRQVTAATIVSELGPLSRFPHPRQLMGYSGTVPSEHSSGDRMHRGAITKTGNAHLRRVLIEAAWAYRFTPKCAKGLRQRQRGQPEAITDIAWKAQQRLCTRYRRLLARGKPTPHVITAVARELVGFIWAIGVAVERGQAMAA

SEQ ID NO: 471467 - protein, 466 aa, unidentified
MRDAIGIDPDSTGFISALVSAGSGHAKTKGFLATEAELGKFVKWVKGQGDIIVAIEGSNGLSKPLEKALRAAGVVFYSFKPADTDKFRKAVLGQNKDNEKDAEGVARFAMALEAQGKLDRYRRVWFADVELQLLTRRYERKSSAKTAEVNGLWKLIRHASPDLYLALGGKHPEVEFSENTLQNLGILTLLGERPNLGEWKELSEEELLAAMGGNRNGRREWIQELRKVAGTFPAVSPAVALMIRDSARNVMRLKREEADISKMLEELTKNSPEMQMLKQKRGIGTVTAATLVAEIVDIRRFVRENNLAGYAGLGRREHSTGDTTREVASQMFNRRLKDALMTAARNYVHFNPDSHLTGYYRNLIKGGMKPMEATKRVARALVRVIFRELYALQQADADPVEAEEAKEGESDVASGATRSERSHSSDTSPSSLRSKEPPRSGKVKVRKAGRSRTERRRKTSVSKKNT

SEQ ID NO: 471468 - protein, 461 aa, unidentified
MKSNKPAGKRKESAGPKVDWKALEIVHPNAAGIDVGGSEHWVAISPDRDLEPVRRFGCFTADLREMGQWLVEKGVRSVALQSTGVYWMPVFEILEQQGLEVYLVNAQHTKNVPGRKSDVQECQWLLKLHTFGLLNNSFQPTDEIRVARALWRQRGNLVADASSAIQRIQKVLIEMNVQLSNVLSDISGVSGMNIIQAILDGQRDPWELAAWAAPGVKATAEEIVKSLEGNWRQELLFVLRQQVELYRTYQEKIRDCDLELRRHLESLGSKVDLEAQPLGPKPKGKKSGRNTPRFDLRTELYRITGIDWAQVNGMDVVTAQTVIAECGADLSAFPSEKQFTSWLGLVPTNEQSGGKILKRRTRKVVNRAAMAFRNAAMTLLRSQSYLGAQYRRLRTRLGAPKAITAMARKLACLFYRLIKHGQQYVDKGMEYYEARYREQQIRSLLKRAQKLGFQLVTTKAG

SEQ ID NO: 471469 - protein, 347 aa, unidentified
MRFYNTPHKHYCGVDLHARTLYLCIINCEGVVLLHRSLPCDPQRFLLAIAPFREDLVVAVECVYSWYWLADLCAKESITFVLGHALYMRLIHGAKAKNDRIDSNKTAVLLRGGLMPQAYAYPADMRATRDLMRRRLHFVRQRGSLLAHIQITHHQYNLDAPGKRITYRSNREGLGEGFEDPSVRHSIAADLALADHFEVVIGDLELAVLRQARVHDPGALHLLTSVPGIGKILALTILYEIHDISRFPTVRDFASYSRLVKCERSSAGKSLGNGGNKIGNAYLKWAFSEAAVLFIAKSEQGRAVLARLERKYGKPKALSVLAHKLGRAVYFMLARKQPFDPQRFAES

SEQ ID NO: 471470 - protein, 382 aa, unidentified
MSRHRVEADPLEPERHRCARVEMLRNHSRDRGSTMNITTYGLDLAKRVFQVHWVEPDTGELRRKVLQRAEVTAFFARRDPGVVAMESCGSAHYWGRVLSRLGHQVRLIAAQFVRPFVKTNKTDAADAEAIWEAAQRPGMRFVALKSEEQQAVLSLHRMRAQLVKIRAMQSFQVRSLLYEFGVVAPKGFRALADKAGPVLSESSCAIPELLRGELLRQLEGLRTLSARIEELERRIGGWQRRESECERLATIPGVGKLTATAVVATVADARSFRSGREFAAFLGLVPRQSGTGGRVKLLGISKRGDPYLRTLIIHGARSVLLTQSRADRVMDPWLKDVLARRPKNVAIVALANKMARTIWALLAHGRSFDRNWARPVAAAATE

SEQ ID NO: 471471 - protein, 366 aa, unidentified
MKRVMAGMDLHGNNVMIGIVDADGTRLRHRRLACDLEEVIAFLNPYKPLLDRVAVESTFNWYWLVDGLKAAGFPVVLANPAKIDQYEGIKHADDKNDAYFLAELLRRGILPTGYIYDPESRPVRDLFRRRMGLMRLRTTLLLSSKSLHHRTTGHSLAVGQLKALSPADLAALYSHPANRLTAEIQKELIEALNQCIRRIEKTVASEALKKPYYKRLQTLPGIGGILGLVISMEVGEIERFAEPGRFASYCRTVDSNRVSNGKKKGSNNEKCGNKYLAWAFVEAAHAARRYDAHCRRWFDRKSAKKGTTIATKALACKLAKAAWHVMAKAVDYDPARMFPELAAGRIDQISGGQTSASKGVGPEPEN

SEQ ID NO: 471472 - protein, 323 aa, unidentified
MQGQKSPERSAEPGVYVGVDVCKDWLDVYLHPIGRKLRVANTPQGLKAVKRRLAELPVALVVMEATGKFHRQAHRTLHAAGLAVAVVNPLRARLFAEAVGQLAKTDRLDARVLALMGQALEPSALAPAPEALEALQELARARAAAIADQTALSNRRGASQTAFLKAELGRRLKVLAAHIERLDAEIERRIDADAALKRRYDIVLTIPGVGPVAAVALVIGLPELGACSGKAASLLAGLAPLACDSGAKAGERHIRGGRAFVRTGLYLAALAAARFNPQLRDDYKRLRDAGKKAKVAIAAIMRKLVVLANVLIKEDRPWRPIHA

SEQ ID NO: 471473 - protein, 351 aa, unidentified
MNATTIGIDLAKNCFQLAIADERYRVQRRERFTRKRFVQFMANHPKSLVLMEACGSANHWGRELTAMGHEVKLLPAQYTRAYVKRNKTDAVDAAALIEASRSEEIKPVPIKTIDQQGMQQLHRVREQYKRTRNARMNLVRGILREYGVEVPEGIQRGKAAAREALEVADNELPNAIRPYIQNLLQEVDDLHGHMKQVERSLAALSKEDAVVQRQLQNPGVGLLTATALRAGVVDVQRFPTGRHFACWLGLTNRECSSGEKRRLGPISKRGDVYLRMLLVNGARAVLQRAKVVKQGGKPLDRLRSWALETEARAGYNKATVAVANKLARIIWATWKYERSFDGNWSVHHAKA

SEQ ID NO: 471474 - protein, 402 aa, unidentified
MNAVGIDVSKGKSMVAIMRPFGEIVSAPFEIKHTASDINSLVELINSVEGESRIVMEHTGRYYEALAHQLSEANLFVSAINPKLIKDFDNDSLRKVKSDKADAIKIARYALDKWQNLKQYNVMDELRNQLKTMNRQFGFYMKHKTAMKNNLIGILDQTYPGVNTYFDSPARSDGSQKWVDFASTYWHVDCVRKMSLNAFIVHYQNWCKRKKYNFSQSKAEEIYGKAKELVPVLPKDDITKLIIKQAVNQLNSASTTVESLRTLMNETASKLPEYPIVMAMKGVGASLGPQLMAEIGDVSRFTHKGAITAFAGVDPGVNESGSYEQKSVPTSKRGSSDLRKTLFQVMDVLIKTHPQDDPVYQFLDKKRAQGKPYYVYMTAGANKFLRIYYGQVKEYLSSLPES

SEQ ID NO: 471475 - protein, 483 aa, unidentified
MATQHKNKYKPAVMPGPVEIPDAEHELVIERVAAIDVAKAAGKVCVRLPGKSGRRFSRVWDVPARTGAIGELAEQLIETGIEKVTVESTSDYWRIWYYLLEAAGLSVQLVNARDVKNVPGRPKTDKLDAVWLAKLTEKGLLRPSFVPPAEIRRLRDYTRLRADLTRDRTRYWQRLEKLLEDALIKISSVASTLVTLSTRDMIEALIAGERDPYRLAELARGKMKAKRSELIAALDGRFDEHHAELARMLLSQIDVLNTQIDTLSARIEALIAELPDDTGAIDHGTGGDAPGASTGTDIAAEPNTGGANPIRVDPAIDAQCVLSTVERLDEIPGISAGNAQNILAEIGTDMSRFPTPKHLVSWAKLCPRTIQSGPVTRAGKTGKGNPYLKGALGEAATAAAKTNTFLGQRYRRLVKRRGKLKALVAVARSILVIIWHLLVNPATRFHDLGPDYYTNRIVTERRLRNYVAQLAAMGYRVTIEPAA

SEQ ID NO: 471476 - protein, 405 aa, unidentified
MTKVFVGHDWAEAHHDIHVEDDQGRRLAKARLTEGVEGVARFHELLAPFVEDPAEVTVATETDRGLFVGALVASGYRVLAVNPMSTSRYRERHSTSGAKSDPGDAFVLAELARTDGHNHRPVAGDSELGEAIKVLARAHQGLIWTRQRQLNQLRSTLREFYPGALETFDELGSADALAVLAIAPTPTLGRGLSRSKIASALRRGGRQRRVDDRAIEIQTALRTTQLEAPPIVAAAMGATVTALVAVAVELTTQTARLETDLSEHFEMHPDAKIIRSLPGLGMILSARVLAEFGDDPNRYANAKCRKNYPGTSPITRASGKHRVVLARYARNKRLADACQQWAFCALTASPGARTFYDQHRTAGDTHHRALRALANRLVGILHGCLHHETLYDEHTAWAHRAQLAA

SEQ ID NO: 471477 - protein, 384 aa, unidentified
MLKPDKRQVHKPRLFANTAAGFHRWQDQLASLDVPAAQVLIGMEATSRYGDALFHFVQEQGYQLCLVHPGQTHQFAQRRGLRAKTDQLDAITIGHVLLSGEARVGSVPDELISSYRELVRLHTQLTDDSARYKHEIHALLQVLFPEFTQVFADPCRPTALAVLQRYPSAACLSTVSVEELTTLLRGLAPRHYGRKTAQSLIALARASVSPGVAQRARSKSMQILADQLVHTRENLAQVEAELAQVPEKDSGWQRLSGVPEFGDKTVAVLRAELGDVARFQRIDQAVASAGLDLQIRTSGKWQGQAKLSKRGSGLLRRMVYLAAARSTHMRDSAFGAYYHRLVARGLRKGSALIAVMRKMLIVAVQLLKTEQEYDPSKVARACGG

SEQ ID NO: 471478 - protein, 308 aa, unidentified
MSCMGAGIDVSKATLDVAVHGQAVQLKAANDAAGWAKVTQWLAQYAPEQVVLEATGGYELAALEALFAAGLPMVRINPRHARRFAQALGQLAKTDRIDARVLAHMASVLTLRRYYPLDEKARILKRFYERRQQILQMLVAEKQRRRQVTEPMLRQMLEQNIARLEADRAIIDSAMAEQIQGTPQATAVATIRGLGPITVIALVCDMPELGHLSGKTMANLSGVAPLARDSGTARGRRVTWGGRPRPRSVLYMAMLNVVRYDPLIKAFYEGLVARGKPKKVALVAALRKTIVLLNARLRDLLHEPIRVA

SEQ ID NO: 471479 - protein, 397 aa, unidentified
MNKIVHYIGLDVHKDSIAVAIAPGNSTEVRRYGIIGGTLDAVDKLFKRLSQPNLELRVVYEAGPCGFVLCRHLRSKGIPCELVCPSLIPKKASDRVKTDRRDADQLARLYRAGELSPIQVPDQEDEAIRDLIRARTAAVRDQRQARNRLKGFLLRLGFRYTGRTSWNDAHKRYLSGLLMPRPAQQIAFQEYIHAVDEAADRLGRLTQAVEAALPGWKWEPVVRALLSLRGLQVLSAMTVVAEVGDLTRFENPRSLMHFLGLTPSEHTSSDKRVLGGITKCGNAHCRHALTEAAWHYRSKPLVSEAMQKRQEHQSKEVRLIAWKAQQRLHKRFRQLAVRKKSVVAVTAIARELVGFVWAIACKVKPAQPPPAPEVIRTCHGKVYLLDPEKKLPKTKAK

SEQ ID NO: 471480 - protein, 340 aa, unidentified
MTITTVGIDLAKNVFAVHGVDQNGKTVLIKPKVSRAALPELIASLPPCVIGMEACSGAHYWARLFRQYGHEPRLMAAKFVSPYRMAGKSGKNDAADAQAICEAVRRPHMRFVPVKDESQQAMQCLHRTRQGFIEEKTATYNRLRGLVSEFGIIAPQSTDALRHVVSEQKHSLPLQVQQCVTDLLEHIDRIEENIAEYDQILSKAAKTDHRSQRLMALKGIGPTTACALVASIGNAHDFKNGRQLATWLGLTPSQYSSGGKSKLGRITKAGDSYLRTLLVQGARSVLIGADKRTDSFSRWVCMLVERRGYWRAVVAIAAKNARLCWASLRYGDDFRLYSAS

SEQ ID NO: 471481 - protein, 424 aa, unidentified
MATITPVTATVKSEDLMQVCCDVSKEKIDVYSRVGHEGALFEMMDTIRNCGSVLQRQLKAWQELAQAHGHAGVLVVCEPTGGHERKLLALARQAGSRTAYVSGEAVGKARVIESNDTGKTDRKDARIIATLAGMGKTLKVRQLPDEYERLRELNTTYDLECTTVATIRNHVHDQVRQLFPDLDGEDGFVFSATGRAIRQLFGLNPARIRECSWREFVAKVKTFVKAARLERLEKVWAAAASSLLHQCPATGRAMREERLGELFEDLDRHLGRKLQLRTRILDAYGKTEESRKLADIPDASSFQLARVIAESGPLADFRHASQLLRYFGMNIRERQSGKWTGKNRISKKGRALGRKVLYQLVFSSLIGEGKLFADPYRRKKADCACGMKAIVCLMRKALKMILGVFRSREEFSRDRVFASLPAAA

SEQ ID NO: 471482 - protein, 397 aa, unidentified
MVDMWAGIDAGKREHHCVVIDSDGTQLLSQRVTNDEETLLSLIAEVCEIADGGHVTWAIDLNSGGAALVLTLLANHDQLVFYIPGRIIHHGAATYRGDAKTDAKDAAIIADQARMRRDLTPIQTNGQLSQDLRMMASHRTDLIHDRVRTINRLRAVLLEYFPALESAFDYSKSKAVLILLQGYQTPKALRAMGEARLAKWLHARGARNSAVVAQRAVNAAKTQHSTTPAESYGQTRVRSLAANLIRIDAELAVLEREITGMLMRHEHAETLLSVPGFGPILAADFIANTGGDMSAFGTCDRLASVAGLAPAPRDSGRISGNLHRPKRYNRRLLRTCYLAALSSLKSSTASRTFYDRKRGEGKTHKQALIALARRRINVIWALLRDHTTYQEPTPTMA

SEQ ID NO: 471483 - protein, 413 aa, unidentified
MEVIHPRCAGIDCSKKDAKVCIRIQGQGPRVKTSTVSTWGATTGQILTLREQLVAANVTCVVIESTSDYWKPFYYLLDDDLDVILVNAASVRNLPGRKTDVSDAAWLADLGAHGLVKASFVPPAPVRALRDLTRTRTVITRERTREVQRLEKLLEDAGIKLSAVATDITGVSGRAMLEALISGQRDPAVLAELAQRRLRSKIPALTEALRGRFNDHHAFMTRLFLDRIDAHTADIGRLDERIEEAMQPFRPTRDLLMSIPGFSRIVAEVFIAETGGDMSVFPTAGHLASWAGVSPGSNESAGRVKSTKTRPGNRYLKGVLGIAALSAARSKSTYFAAKYKRIATRRGPMRAIVAIEHAMIIAAHNMLTNGDFYRDPGANYYTAHQPARTKSRAINQLESLGYRVTLEPLTESA

SEQ ID NO: 471484 - protein, 366 aa, unidentified
MKKVSTVAVEGIQIFKDNQLTIGLDLGDRTSRYCILNEAGEIILEQELPTTPKGFEPVFSKIPRSRIALGTGTHAPWVSRQLTELGHEVIVAHARNVRLIGESSRKDDRLNARTLARRARIDPGLLGPVRQRNAKAQIHLTVIRARAALVSTRTALVHAARGLAKSYGARLPKCGTEQINRGIAKGLSQELREALNPLLAEIESLPERIAEYDTRIEQIAKEIYPEVARLKQVKGVGPLIALTYVLTLDDPHRFRRSRDVGCFVGLRPGRRNSGMSEPQRHISKEGDRYLRTLLVQGAHYILGPLGQDSDLRRRGLKLSERGGSNAKKRAVVAVARKLAVLLHKLWVSKEIYEPLRNNRQAMARVA

SEQ ID NO: 471485 - protein, 375 aa, unidentified
MSNVRFIGLDVHAETIAVAVAEPHGEVRALGIIPNRAESIRRLMKKLGPAEQLRACYEAGPTGYVVYWQLTAIGVACQVVAPTLVPVKPGDRVKTDRRDAIKLARSYRAGDLTPVWVPDAAHEALRDLVRARATAKKDQLRARHRLGKFLLRQGRRPPTGMKAWTQRHLAWVKTVEFEHAAQQATLLDYLHEVEHATERIARLERALDEAAQTAPESMRAVIAALQSLRGIARISAVTIVAELGQISRFAKPRQLMGYSGGVASEHSSGERTARGGITKTGNAHLRHVVIEAAWAYRHRPAVGASLRKRQAPLDDEVKAIAWKAQYRLNARYKALLAKGKTPQQAVTAVGRELLGFIWSIGVIAEARGPAAQAAA

SEQ ID NO: 471486 - protein, 385 aa, unidentified
MLRYIGLDLHKEYVHGCEWVPDADPGHKERHFRFPNTSASWSRLIAQLTRDCWVAIEVTGSAFEIHDLLSPHAGRVLLANPVELKRLGSGRHTDRSDALRLAKLLATDAIPAVWVPPVPVREVRRLLHYRARLLTHHHRCIYQARAVLRRHGILIPHGADVGRWATEVPETVPLGDRLIFESALRQVAMLAEELAGLDIHIARVVADVPAVELLLTITGYGLIAAAATWAAIGDPRRFIHPKQLTRYAGLDPSVLQSGEEHYQGRISKNGNSLLRTVLVEAAHTVALHDTGSLRQFYLRKAKQIGHMKAIVALARKLLIVAWRMLLTGETYRAAKPHLVTRKHRHLQKLSTARSGANGDRVLAALVRQYWNPRVREARSRTKAPA

SEQ ID NO: 471487 - protein, 341 aa, unidentified
MNAIGIDTHKATLAACVVDDLGGAVAERTFANDPPGHAALLGWIRTIAPGARIGLEGSACFGAAAARSLLEAGETVCEVPPQLSHRERLRTRRAGKSDPGDALAIARVAAREPDLPPVRTADATREIQLLVEAREDLVTEATRVRNRLHADLVVLLPGYQVSVANLVALRNRRSVGARLRALRGIQAELARGRLARLGRLMAEAKTLETRLDGLVGDHPLRTLPGVGALTAARIIGEVGDVGRFRSADAFAMLAGVAPIPASSGQTSRMRLNRGGNRQLNRALHSIALSQAWHHPPATAFIARKRAEGKTWREALRALKRHLARVVYRLLVDPPIVAQPAA

SEQ ID NO: 471488 - protein, 316 aa, unidentified
MQTILDLGSDVDSHSIVIACAAHSFAVQRIANERHAIRAWLREVPCGSRLGVEATGSHHELLADLAHAAGLQVFVLNACDVRRYAQGVGQRGKTDRIDAEVIARYVAREHAELHAYAPPSKQQRMLSRLIKRRAKLIVIKGTLMQSLRGLPGMRQGLQQVTVRLERLIGQIEALMQYALQQLPAAQQAAQRIATIPGYGSLGSTCLVHTFTRLPFANSDAVIAYTGFDPRPDDSGQRRGRRRLSKRGPSETRRVMFNCAMSAAKTKLWRPYYEAQRAKGLSSTAAIVILARKMLRVAFAVYKHDQPFDPTRLRVIA

SEQ ID NO: 471489 - protein, 360 aa, unidentified
MKKDTRDGSGLIVGVDLGDRFSRYCVLDQKGQVLEEDTVATTGRAFRKLFGDRPAARVVIEVGTHSPWVQRLLQELGHETITANPRYVRLIYSSGSKNDQLDAERLARLARVDPKLLHPIQHRGGAAQADRALLRSRNALVECRTKLVNHTRGVVKSIGGRLPTCSTSSFHKRVRQDLPEELKPALTPVLDTIAALTLKIQKLETRIERLAAKRYPETGLLRQVSGVGPLTALSFVLTVEDPQRFKSSRAIGPYLGLRPRQSQSGDVDPELRITKAGDSDLRRLLVGSAHYILGPFGPDTDLRRWGLALAARGKKNAKKRAVVAVARKLAVLLHRLWVTAEVYEPLRTNQPAIVAEAISA

SEQ ID NO: 471490 - protein, 333 aa, unidentified
MNEQAVGIDVSKKKLDICVAIGNKFKSKVFANSPGGHEALNTWLQQRDIPVDTPVVLEATGPYSEAVAIFLADLGWSISVVNPSRISGYAQSELSRNKTDKADARLIACFAQRARLESWSPPSLAVRELRALVDRLQALIDMRQQELNRLEALSQTSTSSVEKMMKEHVDWLNDQIKKIQSDIDDHIDGSPELKNDADLMQSIPGIGRRASSQMLAYIGDVRRFKNAKALAAFIGVTPRQRQSGSSINKRSAMSRTGHVAARKSLYMPGLVAKHHSPVVVAMAVRLQTRGLSPKAIFGASMRKLVHLIYGVIKSGIPFNAEIAMNRLDLQEGI

SEQ ID NO: 471491 - protein, 499 aa, unidentified
MNVSNQRKEKKEKTKETGGRQVEQENSSQQRLELGKCCGLDIHKKSCTAAIVSDDKQPIVLSDLENSGPGMKYLYQRLVEEGCSTVVMESTGSYWMGAYDYLELRGINTVLISPWSLKSVVGKKNDESDASVMANMYRVGFFEPSYVPPRHIRELRSLTRRLEKITCMMTAVKNSVLSQVDAFSTGVTTTYVDPFGLGGTKIIKALAKTIKQGESIDVDKVINQLREEGLSKERLESVERMLRLSFDPTSGGWLIEQGLGTLRALGEQEELLVNRIAKHIEQHQDLSRYTRTLMTMKGIRLVTAATIVAEMGDPARFPSSRSVASYFGLTPSVEQSGPRTVRGKITKRGSPHMRRVLGQVAFVVASSGDPSLKRWHAQICKRRGKQVAKTALSRRILVIAWAMLRDSTHYHDQDPDRDPETPDGKNSSGIALYREKLRELEKRSQSSQRTISMWKAIQLLATDQKLRSELGLARIIPPTPALVPALVPALVPAPAKPVR

SEQ ID NO: 471492 - protein, 374 aa, unidentified
MSRSIIYLGLDVHKDSITIAVLPEGAPAPSRVERLPNDLAKLRRFCERLAAQGEVRACYEASGAGYVIHRAMRDWGYPCDVIAPSLIPIKPGQQRKHDKYDAAQLARLYRAGELTTIRIPSEAEERVRDLVRCRETLQREVLASRHYILKFLMRRGFVYREGTNWSTAHYAWLRRLAAASSPLVAEDQEVFGEYLGLLEYKLSRRDALDHRIGELALTPALAPAVNRLQCFRGVQRHVAMVLTTEIGDWRRFASPRQLMAYLGLVPKEHSTGDRERRGSLTKAGNSHCRHVLVQAAWAYRFQPKVGVALAARQRGQSPVVIAHAWKAQHRLHTLYRRLAFRTKPQIAVVAAARELVGFLWAVMQDQDVTKSVPA

SEQ ID NO: 471493 - protein, 387 aa, unidentified
MKKNTTAKKNAKSATGKTQEKHIRQLAAKQRLTVGLDLGDRSTRYCILNESGEVVSEGIVPTTKAGLESMFGKMAASRVALEVGTHSPWVSRQLESYGHEVIVANAHKVKLITQSVRKSDRIDARQLARLARVDPQLLSPIRHRGEQAQLDLALIRARAEMMEARTQLINSARGLVKPMGERLAKCDADQAGLQLAEGMKEELRRVVEPLLKMVEAISQQIGQYDEQIAKMAEGYPEEKLLRQVYGVGRLIALTYVLTLDDAKRFAHSRDVGPYLGLTRKQRDSGDSEPELGISKAGDGLLRSLLVQGAHCILRKGAPDSDLREWGLGKAKGGKRAKKRAVVAVARKLAVLLHHLWVTGEVYDPQYNRKAVEAAAAAQTKRAAKSAA

SEQ ID NO: 471494 - protein, 347 aa, unidentified
MDQIIIGVDTHKSNHVGVAISRQGARLGTITIPTTRQGYRDLEAWASELGTIKAFGIEGTGSYGAGLSRDLLAKGHTVLDVMRPNRQLRYLHGKSDSLDAESAARSVLNGQATTLAKTQAGASEMIRHLKIARDSAVKSKSQAMITLKTLIINAPAELRDTLDLIKGPITLIRHIAALRPGKITSPVASAKAATRAIARRWLVLHEEIQAHGNELERIVSEKAPGLMRSHGISTMTAAEMLILVGDNPERIKSEAALAKLCGVCPIPASSGKTNRMRLNRGGNRQANAALYIIAITRMRDHEATKNYVIKRTAQGKSKREITRCLKRYIVREIYRELCVPNGAKATP

SEQ ID NO: 471495 - protein, 350 aa, unidentified
MPCKTVAIAHTIGIDTGKNTLHMIGLDKKGTIVVREKISRTRIAARLVNVPQCLIGIEAGMASHHVARELLALGHEVKQVPPAYAKPFRQGHKNDFRDAHAIAEAVQRPSTRCVPVKTADQLDLQTLHRVRSRLIGNRTAVINQLRGFLLEHGIPVRQGLRFLRQQLPQILAMRTDVLSPRMIRIIEELIGDWEHLDERIERVTDEIETLARADGNCRRLMTVPGIGPIIASAMVAAIGNGAAFAKGRDFAAWLGLVPKQMSTGDRTILGRITKRGNRYLRMLFIPGARAILFRPAGWAKHSFGPWLAAAARRLHRNVLATAFANKLARIALTVLVEGRSYAARVEPRAA

SEQ ID NO: 471496 - protein, 312 aa, unidentified
MAILSFCGIDVSKDRLDVVVLPEGRFCSVSNDAAGWAELVARLHPLTVSAIGLEPSGGYERGIIRALLAAGLSVRRINPNKLRQFARARGVLAKNDRLDARLIAEYVAIMPTRVVQRDDAVERLAEIVTMRRQLCDEHVAVENQAAHLEDAMLRRLSKRRLTRLEADIRLLDKRLAEMVATNAAFARLYDLLTSMPGVGAVLAFTLIALLPELGKLSRKQIAALVGLAPYDFDSGKLRGHRSIYGGRMPVRNVLYMAALSASRYNPALKAFSNRLAGADKKSKVIIVAVMRKMITTLNAMLRDNAAWQLKSA

SEQ ID NO: 471497 - protein, 350 aa, unidentified
MIVLGADTHKSSHTIAAVDTSTGQVLGDKTVAVGARGFAALVLWARGLDGERVWALEDCRHVSGALERFLICRGERVVRVSTRLMAGTRRSSRERGKSDRIDAVSVARASLAAGIETLPTAALAGPELDLRLLVDHRERLVRTRVALNNTLQWNLHDLWPELTLPGGALFSKKWTTKIARRLARAEQTMRVRIARDELRRMRELTQAIKALQAEITVLVTEIAPQLVAEPGCGPLTAAKLVGEIAGAERFTSDAKLARAAGIAPIPASSGRTDRHRLDRGGNRQINAAIHRMAVTRARCDPETQDYIARKKTEGKTQRDAIRCLKRHLARRIWHLLQPPPPTETSLNLLT

SEQ ID NO: 471498 - protein, 319 aa, unidentified
METPQVIFKQVVSRGCGLDVHKKVVVATIDGEGLKKETREFDTVTSSLKELRDWILENRITHVVMESTGVFWKPVYNVLEPAGITVWIVNAAHVKYVPGHKTDKKDSAWLCKLLLAGLLKPSFIPAKEQRELRDLTRYRTRLVQSNASNKNRIIRVLEDANIKLSSVLSSTSGAVGTKLIDKICEGQEITMHDIDEVYHKKLEASKEEIYEACQGFITGHHVYMLQIIQQEIAGTLQTIESLNQRIKEVLSPYENALELLRQVPGISSKSVEDLVAEIGLDMGVFPTEKHLASWAGMSPGNNESAGKKKADEQPEGTNK

SEQ ID NO: 471499 - protein, 342 aa, unidentified
MQTINDNTDVQTKAVQQSEYKPEQKPEHIFIGIDVSKLTLDVDAYPNPTPRSFANDDVGRAELVRWLHQLQPTLIVVEATGGLQTPMVATLVADGLQVAVVNPRQTRDFARALGILAKTDRVDARMLARFAQAIRPEARPQPAPETVALAGVLARRQQLVEMLTAENNRLLMAHPLVAKTIKQHITWLQKRLAASDADLDNMIRKSPVWQHKAALLESVPGVGRVTATAMLAQLPELGMLSNKQIAGLVGVCPYSRDSGAMRGRRTIWGGRASLRAVLYMAALVGSRYNPVLKAFYQKLVKAGKPKKVALVACMRKLLTILNAIVKHDRSWKFDEVVATKPA

SEQ ID NO: 471500 - protein, 342 aa, unidentified
MTITTIGIDLAKNVFQIHGVDHSGNPVLKKQLRRNQVLTYFIKLSTCTIGMEACGGAHYWARKLTAMGHTVKLMAPQFVKPYVKANKTDAADAEAICEAVTRPTMRFVAIKNAEQQAMLSLHRARQGFVKARTAQANQIRGLLGEYGITIPQGIKYVMKDMLTLLDAPEHELPAAFTDLLKRLHAHLMVLEEQVSDLETQINIWHSNNEYSQRLCKIPGIGPLTATALVASIADANCFRNGRELAAWLGLVPRQHSSGGRPMLLGISKRGDTYLRTLLIHGARSVVRVAKNKSSPTDKWTNEMLNRRHQNVASVARANKNARIVWALLAHGRDYNAEYKIAA

SEQ ID NO: 471501 - protein, 348 aa, unidentified
MKVTRIGLDLAKQVFQVHGVDEKGRKVLSRQLKRGQVEGFFRGLEGCLVGMEACAGAHHWARVLGGLGHEVRLMAPQHVKPYVKGSKNDANDAEGICEAVGRPNMRFVAMKTVEQQRLQSLHRVRRTLVRNRTAAVNEIRGLLGEYGIVVRVGVAKLRGRLPELLEEADNGLPMSFRPVLAGLKEDLEYLDRRIGEMDAAMVRAAQEDERARALMKLRGVGPVTATALVAGLGDGKQFRRGRQASAWVGIVPGQHSSGGKERLLGISKRGDEYLRTLLIHGARAVVNSCKGKTDRLSRWVQEVCARRNKNVAAVALANKTMRMAWALLSRGEQYDPDYELNRRAAQAA

SEQ ID NO: 471502 - protein, 427 aa, unidentified
MEEVTDEPLYRDRVCGIDIGKAGMAATIRVPSDANPARRAQETRSFGTTKREVLALADWLRSWQVPAVVMEATGDYWKPVFYRLEAEGFECVLADAKQVKHLPGRPKRDPSDSRWLAACFERGAITSCFVATPEFRIIREHTRYRRDLTAERTREKQRAEKLLESAAIKLSSVVTDLHGVTGRDIMDHLIAGERNPKVLAQLARARARRKISELEAALEGAEFFTPQLAALLARMLARIDQLNASIGELTAVVETLLEPYEEQLQQAESMPGWGRRSAQDAVAETGVDMTRFRTGGHLASWAGRTPLDNQSGARNGRSKSKKGNRYLGGLLGETAVAAGKTQTREGARYRRLSRRRGKAKALVAVGNTQLKVYHALLSSPGARYEDLGADYYDNRASTRRQVRALQKRASELGYTLVPDLTGCPEIA

SEQ ID NO: 471503 - protein, 340 aa, unidentified
MEKASMIGLDIAKNVFEVHGRNAAGEVVLRRSLKRGQVEKLFAKLAPAVIGLEACGSAHHWARVLGKLGHEVRLMPPAYVKPYVKRNKSDAIDAAACWEAVGRPDMRFVPVKTVDQQAALSLHRSRDLLVRQRTQLGNALRALLSEFGIVAGKGRAGLARLVDELRAGTLELPADAVAAAMALADQRAALEAAADALERRITAQAKADEKARMLKTAPGVGPLSAHATLATMPDPSLFKSGRDFAAWLGLTPRLNGTGGKTRTGRITKQGNQPLRRLLVLGATAWLRQVRARPEKASPWLRGMMVRRPSKVVAVAQAARTARILWAMLTHNQPYRAPAIG

SEQ ID NO: 471504 - protein, 409 aa, unidentified
MRLFAGLDVSSFDIKVCILNGEGEKVDSFSVNNDLPGATTLKERLLKHIANQKVEIFKIGLESTSVYSFHPSMFLHYDEDLQRFGAKVFLMNPKQIANFKKSYSDMDKTDEIDAFVIADYLRFGRNQMSIVKESQYVALQQLTRSRYQLVRMLTKEKQHFLQYLSYKCNTFSQEVDSSIFGNAMMELFLEKFSLEELADMPLEELVEFLQVKGKNRFGDPTCIASTIQKAVRSSYRLDKVIEDSIDVLLGTSIAVIRTYQQQIKEIEKSIKRIMAGLTQTLESIPGIGPVFAAGIIAEIGQIERFDDETKVAKYAGLYWRTHQSGRFTAENTSLSRNGNHYLRYYLVEAANSVRRHVSDYQEYYVKKYNEVPKHQHKRALVLTARKLVRLVDALLRSHQLFTPERCVKV

SEQ ID NO: 471505 - protein, 310 aa, unidentified
MDAQFVGIDVSKDRLDVHVLPRSETFAVARNGEGLAALNERLAGLGVVTVALEASGGFETVVAASLAGAGLPVVVVNPAQVRAFAQALGKRAKSDPIDAAVLARFVEATRPAIRPLPDEQTQALADLVTRRRQIIQMIVAEHQREKRATIKRVKRSIQRLVLALEKELAELDKSIDDMVRGSPAWRRNEDLLRTVPGVGPIIARTLLAEMPELGTLDRREIAALAGLAPWTRQSGKWKGKSFIGGGRSSVRTVLFTGAMAAARFNPPLRAFHQKLVDAGKPKIVATIAVARKLLTILNAIIRDQKPWKPA

SEQ ID NO: 471506 - protein, 323 aa, unidentified
MNSMNYIGLDIHKKRISCCMRQADGMIIQESTIAATRDTLDDWMRQLPQPWMAGMEATLFTGWNDHLVSGSAMVKVAHPAMLQAIAAGKTKNHRVDARKMAGFIRCDYYPECHLAPREIRDRRRVLRYRNLLVRQAVQMKNKVSGLMMEAGVPYNQQKVHQKKYFAELLQEQKKEMPPSMPELLRLSRSTVEVLTGMQRQLIRALESDALLAARVERLASIPGVGRVVALTWALEMGDISRFASVKKAVSYCGLCGAEKNSGGRTERTPISKQRNKDLQTILVEAAKLRHDGTRNWRWFTSAPNRKEIATGPHWQWRANWWLT

SEQ ID NO: 471507 - protein, 407 aa, unidentified
MNAVGIDVSKGKSMVAALRPMGEVALLPKEYSHSDVGLDQMACAIIALGEDTRVVMEATGRYHEPVAAALHEYGIYVTVLNPLFIQRSGGGSIRKVKTDKADAMKIAKYGLDNWVDLREYTPMEAVRQQLKLCSRQYNLYMKTIVALQNNLISLTDKTFPGVNELFSSPERADGHQKWVDFVLSFWHCECVCQISEKAFTERYRKWCKRKNYNFSEEKSLDLYADSCGHITTLPKNGNTKLLITTAAQQLLAAKTTLVAMRAEMLRLAKLLPEYEAVLAMYGVGEITAAQLMAEIGDVRRYPRRSSLVAFAGVDPAVNQSGKREAQSNQTTKRGSPHLRKTLYQIVCTHLKKSPADEPVYQFIDKKRSEGKPYFVYMTAGANKFLRIYYARVKECLAALDGVDTIKN

SEQ ID NO: 471508 - protein, 414 aa, unidentified
MLKIVYRVCCGMDVHKSFVVACIASTNEQGVTAYKSKRFSTFTGDLRRCAAWLSENNCKDVCMESTGKYWIPIYNILERTCNIVLAHPKYVKTIRGKKTDKRDAKWIADIFKHDLVAGSFIPPADIRQLRDLFRYRWKLTNFATGEKNRAQNCLTVSNFKLDDVFSDVFGKAASAITARILENPSEKITDVSSFCTKRLKATDEEILAAVDGEMCEEQAEKLCIIRSHMDNLELCKLNLDSLILSTVEKYLPQLELVMTAPGIQSFAAIGIISEIGVDMSVFPTSKHLCSWAGLTPQNNESAGKKKTTRISRAGAYIKPLLVQCALCAVRAKQFPEVRNRYLALKKRRGHKKAIIAVARMLLTAIYNMLKKNEPYNSELYRKGDRPPAHREVSVEEAVFILQRQGYLVTAPPTP

SEQ ID NO: 471509 - protein, 345 aa, unidentified
MNRPQYYVGVDVAAETLATSLLTEPGQGILSLPEIANTLDGFHVFEQWLIDHQATPENTIICLEATGVYGEALCYYLCSKQYQVAVEPPLKVKRAFHQGTHKTDAVDADHIAEYAHRFFDELHLWTPPAPVLEQVKVLLSVRDHFIVQKTANSNALRALERKQHPTPIATAMYRQTIEDLTENIKSLDKEIKRLLDDNQSYRKLIAILTSVTGIGMVFAANLLVLTQGFTRPVSHKNIASYAGVCPLQHTSGTSVYRKPRSRHFGPGTFRKLLYLASLSISTHNPQFRQYYLRKVAEGKPKRLVLNNIGNKLLKVVCALVKEQSMFIPNYRSVNPHFLKIGLTLT

SEQ ID NO: 471510 - protein, 360 aa, unidentified
MGNGTFVGLDVHARSVVAGLIDEDTGELRVTRAPHRTEELARWLGDLAGPVRVAYEAGPTGFGLARACEAAGIACLVAAPSLIARSPAGRGKKSDVTDAENLARLLRRGELTAVRVPDPVDEAARDLVRAREDARADLMRARHRLSKLLLRHGLVFEEGRAWTTRHQAWLRRQRLEHSGARAAFEDYYGAVLAAGLRREGLDARIEELAAQPRFSPVVGRLSCLRGVGTLTAFALAVEIGDFHRLTGRTIGAYLGLVPSESQSGTRHSRGPITKAGNSHARRLLVEAAWHHRRPVRASAVIERRRADQRPEVRARAERAGVRLHHRWHQLERRRGLRSTVVATAVARELAGWCWSLAVMD

SEQ ID NO: 471511 - protein, 482 aa, unidentified
MATRKMSTFERLQHGKLNRKQRQELKRRLNSEDPGLQVIHPDAAGIDIGNESHFVAIPPDRDTTPVREFGSWTADLHQMASWLKEHGITTVALQSTGVYWIPVVEVLEQAGLQVYLVNARGTKNLPGRKTDVQECEWIRKLHTYGLLRNSFRPPEEIRSVRTIWRQRDRWVQEAGRAVQHMQKALTTMNVQLANAISDISGATGQAIVRAIVAGKRDPWELAELRDRRIAASKEEIAHSLQGHWREDVIFELRQAVESYDFFQKQMAACDQELVKYMAAIESRETTPKQDLPKDATPLSSAKPKRRSKTRRKNQPAFDLATELERTMGVDLTRIDSIDVMTAQMIFSEIGPDFSPFPDENHFASWLILTPKRDISGGKVIRHIPATGRNRVANALRMAAQSLSRSNSYLGARYRRLRARLDGPVAVKAMARYLACLVYRMVTKGQAYVDRGAAHYETKRQERERVALERRAANLGLKLVPAA

SEQ ID NO: 471512 - protein, 370 aa, unidentified
MLYNIQNIRQEKRRREIYHFIALITNAMNLLKQVLGIDVSQKELVVSLGRMNADLSIDLYAKRVFANKESGFTALIKWVNKLTREETAVHYVMEATGVYHQKFAYFLDDNGYELSIILPNKISSYMRTLDNKTITDSTCADAIAQFGLERKLDRWKKPNIIYKRIQQLTRERNQVVEERVAAKCQLHAENAEAQPNTNSIKRLKARIRFLSQQEKEIKQDIEKYIKEDDSVESTIQNLTTIPGIGRLTAATVLAETNGFELIRNKKQLTSYAGLDVREKQSGTSVKGKPRISKKGNRNLRKAMYLPSLTAVKYIHDYKELYARLVSKSGIKMKGLVAVQRKLLELTYVLFKNNTIFQNDYKTVKERSLES

SEQ ID NO: 471513 - protein, 434 aa, unidentified
MSDSSSDPVADVFRQLTHYGGLDWAKDHHDIAVVDPAGTLVLELSFAHTAEGWAELGRKLAAFPRLGVAIETCQGPAVEQLLEMGLTVYPLNPKAAERYRDRKKPSGGKSDSLDAWSFGDALRTDGHGWRPLRPQDPLTAELRLLCRDEIHLIAQRTALVNQLQAALHEYYPAALEAFDDWTAPFAWAFVVQFPTPAQLAAAGKRKWEKFLHVHKLYRPPTAAGRLDCFARAMQFVNPSSAVTNAKSLLAVTVAKQLLALQQQLDEYRRRIEQLFRDHPDHDLFGSLPGAGPKLAARLLGEIGADRARFDDPQGLQCFAGTAPVSEQSGKKRLTFIRWACDKYLRATVHLWADLSRQYCAWAQAYYQTKKDQGMSHAAALRCLGQRWLKILWKMWQDHACYDEALHTRNQVRHGSWVIALLSQAPDPQAAGALN

SEQ ID NO: 471514 - protein, 389 aa, unidentified
MFYVGIDVASEKHDCCILNEKKKIIRSFSFLNSPVGFQSLLSALSGIQPDEIKIGLEATGIYSENLSVFLRRKGFNVTTINPLLLKKHQCATTLRKTKTDKADAKGIALFIAEEGFQPDLPVSYHIQELKSLTRARFSFVQDRSALKNKVKRLVVLLFPELLEQFSDIFGASATALLKQYPSAEKLAACHTDALAALLRKSSRGRFGRAKAAYLKQLAKCSIGNHSPARVMELKMLLARIDLLSEQIKDYDKQIKIIMDELDSPVPTIPGIGYTLGATIIAEVGNISRFSSPAKLLAFAGLEPSIYQSGKFVPASGRMVKRGSPFLRWALLQAAGYVPNYSSTFALYREKKLSEGKSAAVARSHVAKKLVRTIHSLMTHSTAFSDQLTA

SEQ ID NO: 471515 - protein, 349 aa, unidentified
MRLYSRTHDVSCGIDLHARTMYLCVLDRAGQTLLHRNLPTRPEALLDALAPFRSADLVVGCECLFAWYWLADLCEREGIPFALGHALGMRSIHGLKTKSDKLDSWKIAQLLRGGNFPCAYVYPRRFRATRDLLRRRLHFVRFRSELLTHLKMSEAQSNLEPLKQRLDHAPNRVGFAERFPDGSSRSSIAADCRLLDSIDDLVGDLERELVACAKGDDLAAFYRLRSVPGIGEILAMTIFYEIPDFDRFDTVQQFASYARLVAPRGESAGKLGGASGRKQGNVHLKWAFSEAAVLLLRNNPRAQKLHSRLVARFGKAKALSVLAHKLGRAVFHMQKRQQPFDAERFYREA

SEQ ID NO: 471516 - protein, 351 aa, unidentified
MMIIGVDYHPSFQQIAFCDQDTGEYGERQLNHSSGEAERFYRDLHSRGVQVRVGMEATGYSRWFERLLAELGFELWIGDPAEIKTRRVKKQKTDRKDAQLLLRLLRENTFPQVWVPSPENRDLRQLLWHRHRLVQMRTRMMNQLQALAMNEGVRRKGKLWSAQGRVELEKLCLSPWTSRRRRELLELLDRIDPVIKELTTAAEREARKRPEVVRLMTHPGVGPLTALAYVLIIGTPERFQRGKQVGTYVGLIPSEDSSAGKQRLGHISKQGNSLLRFLLVEAAQAAARSNTHWRRRYVRLAMRRHRSIAKVALGRRLGVRLYWMWRNGHDYSPSLEFGSYVGQPGTVHGVK

SEQ ID NO: 471517 - protein, 387 aa, unidentified
MPQPNDQSRSLAALDQDSTLIAVIEISQSSWLVAGMVPGINRQPLKKLAADEVALLQLLYRWREEASKAGRTIDRVAVAYEAGRDGFWLARWLRGRGIEAHVIHPTSVAVSREHRRAKTDRLDTELLKRAFLGWLRGEQRHCSMAMIPTPEEEDAKRPNRERENLVSDRTRIVNRMKSSLARLGIRGFKPTLRKAPERLARLLTPEGALLPPNTLAELQRDVARLRFIMDQIREIEAARLVRLEHNPEQGSHAMVRLLAQVIGIGIETADMLVHEVFVRNLRDRKAVARYGGLTGSPDESGAKRREKGLARAGNARVRRGMIQLAWRFLMFQKESALAQWYRARTADARGATRKTMIVALARKLLVALWQLVTTGEVPEGVVMRRAA

SEQ ID NO: 471518 - protein, 388 aa, unidentified
MQVKADRPETPSAIRSDFGAIFISLELSRSIWLITSLSPGGGEKMSKHSVPAGDICALMARFSELKQKTLARTGKSFPIVVIQEAGLDGFWIHRMLQNEGIESHVVDPASIATSRRRRRAKTDRIDGEALLRTLLAYKRGEPRVCAMVKAPTPEEEDRRRLCRERKVLIAERVEHVNRIKGLLFSQGVSGYEPLRRDRRQRLAELKTGDGRALPEHLKAQIGRELARLELLLEQIKAVETARDALFAAAKASASAPVAMLLDIKGIGPEFAAVLWMEAFFRSFANRKQIAAYAGLAPTPWQSGSVDREQGVSKSGNPRLRTTLIQIAWLWLRHQPQSALAQWFEERVRRNGGRFKKTAIVALARKLLVALWKYVTAGVVIEGVVMKTA

SEQ ID NO: 471519 - protein, 390 aa, unidentified
MRFAGIDIASETHTVAVVDDGGGAVVRPTSFGEDEGGYQKLLGLLGEPRDCFVAMEATGHYWQNLFAVLAAAGYEVGLLNPLRTRRFAQEDLERTKTDAIDALGIARFAQQKRPAATKLPDSATLALRELVRLRDRLVQEMGDKVRYLHRAVDLGFPEFTRYVKTLDSELATAILHEYPTARAFPVVPRPLSRLVYMGRRKVGRELARQLTEAAQCSVGQHHDEVYRVQVRFTCEDIDLLRRRIRELDGRIETTLRDHEVGTLLTTIDGIGPQTAARLVAEIGDFERFADGSKLAAYVGAVPGLKHSGKHRPRGSMTSIGNAKLRKALWMPVLTAVRRNPWLKAHYQRLTAAGKPPKVALVAAMRKLLHAIHSVAVNRKPFVPRLPEAGS

SEQ ID NO: 471520 - protein, 404 aa, unidentified
MTHTIEENEQRRAVIGIDVSKDKFDACCIDGNGKELFRVSAPMDSTGFDGLAQKIRTHGLIQGNVVAGMESTGCYHLNLFSFLTGMNFQCLIINPLLISNFMKLDLRKTKTDKKDAAVIAQFLRLHRNAVHQLNTSEEIADLRDLARQRESLCRQISALKNDLKRLLSITFPELEKETNVFSHSVLTVLTLFASAAAVQRASVSQIAKCLSKGALGRKTSITAKQIKHAAKKSVGTTSMAKEFVVSQKASMLLYMGERMQELSDTMNELCASLLQQEIEIMTSVKGIGETTASEFLGEIGGDISKFESAKKVIAFAGLDPSVHQSGKHVGQSKISKRGSRYLRRVIWQMSVKVIRYNETFREYFMKRRQEGLVYRKAVLATAHKLVRVIFSMLMHKAHFCSPPL

SEQ ID NO: 471521 - protein, 365 aa, unidentified
MFYTGIDLHKDNCFMTTVDAKGEIVKQERLRNDPAIILAYCDSLPGPHKTVVECTAGWYWLNDLLEAHGIELILAHAKYLKAISYAKVKTDKVDSETLAKLLRLDSIPEAHKIRRDIRDLRDVMRARLRLVQKRTSCRVSIHNLGRKLNCDDQFVIDKRTIPANLPAAYQLHLRNLYEQIDLLDTQILGLEHFLQPVLIPNDDIQRLVWIPGIGKTTAFTIYLEADGIERFISDKHFVSYCRLVPGAKNSNMSLRHKSGCKDGNKYLKIAFTDMAVHAIQYYPEYRRLYQKIRRRANEPIARTVVAKELARIVYHVLKNKSEYRGLKGQPISHQKANSYPRLKRRSLATPGKPVRLTDESSASAA

SEQ ID NO: 471522 - protein, 407 aa, unidentified
MELPAIFQCVVGLDVHQAKISACAMIEQPDGTLTVEHREFGAFKRDRRALAEWVRTLGPDLVVMESTGIYWKSPYAALEQVGIAAWVVNARHVKNVPGRKTDVADAQWLATLARAGLLRASFVPPADIRHLRLIARQRQKLSGMLASEKNRLHKLLADAGIRLNVLVSDIHGQAGRAMVKALIDGQPIPEILDLAGRLRASREELFEALQPEQLSDAHRFVLSEIMAHIEELEARMGRFEQTLLAGLAAWEPQLVLLQTLPGVDRIGAAMLLVEIGTDMASFASAEKLASWVGICPGNNESAGKRKSGKIRKGNAWVRRLLCEFAQAASRSRCGLKEKFKALSIRKGHKKAIVALAHKMLRIIFAMLKNHTPYQDQAVDYEALLVQRNAPRWIKMLLKHGFISTAST

SEQ ID NO: 471523 - protein, 431 aa, unidentified
MRLPIGFVETGKKERIFIYEKRKTAFIGIDMHKDIHVAVVIDCWTNILGEITFENRPSKFDKFMQDVKKIYKDLTPCFGLEDTRGFGRNFASYLLGHKFTVKHVNPAYTDSMRSSAPMSKKNDSFDAFCVAKVLRDMVDTLPDEEHNDLHWTIRQLVKRRNSLVKGIVIAKNQLNSNLTNVYPSYKKYFCDVDNKTALLFWEKYPHPQYLKGVKPETLLEELRTIHKGMKQEQAEMILSLSEQNSPKEKEFQTERDLIIKSLVREIRFKKQENEDIDNELKRLVDLTGYKLQTMPGINLITAANIISEIGNIERFPNSDKLAQFCGVCPVNFSSAGKGKDQRSRQGNRVLNAIFHFLAIQLVQISPSGKPRHPVFREYFERKVKEGKTKPQALVCVSRRAVRIIYGMMKSKTEYKPFEKVQEVAGAKENQG

SEQ ID NO: 471524 - protein, 327 aa, unidentified
MQLCMYPQLNPCFIAAANRQQFENRPSGFRKLLVWVHQHGGPTGLLFCLEHTGIYALPLCCFFSQRKLDYSLQSALHVKRSMGIQRAKNDKADAMMLARFAYLYRDEIKPSQLPSKTLLKIQHLLAYRQRLVKSKVALEVAAKELASFVDKEFSTSIIRDSQKHIAQLIASMRLVDKQLQVVIAEDQEVHRTYQLATSVTGIGLQTAAYLLVHTHGFKNFDNWRQLACFAGTAPFEYTSGSSVRGRSKLSKIGHMKLKALLSNGANAAIQSPNEFADYYNRKILEGKPKLVALNGVRNKLLSRVFAAVQRGTPYVKNQVDYLQAVSC

SEQ ID NO: 471525 - protein, 424 aa, unidentified
MKSTQNEKILQIKNETLVIGIDIGKDTHYARAFDSRGIELAKLLRFSNSAEGYNALRTWMQSTMQQKGKTDAIVGFEPTGHYWFSLGDYLRNQGYKLGIVNPYHVKCARELDDNRQTKTDLKDPKTIAMLVKDGRYRDVYIPSNCYQELREAVLERERLVEQMTALSNQVIRWLDIRFPEFTKVFKSWKGKTAFATLKQFPTPVKVAQAGPEGLIALWQQHVKRNYALKAQQLFQAAKTSIGRVSGSNAAEVVLQNLLVQYELAASQLEQIEALLSDLVLTVPHSDTLLDVKGIGKLSTAVIISEIGEIQRFSSPRQIVSLAGLSLIENSSGRHKGQTTISKRGRKRLREALFRVMIPLLANNAEFRAMHQRNITRDQNPLTKMQSVIALCGKLIRVIYALLSKGCRYDASKLVHDMNRSMMAA

SEQ ID NO: 471526 - protein, 392 aa, unidentified
MIYVGIDVAKDKHDCFITNSDGEVLFKPFTISNNRNGFETLFQRIQSVSDDSNKIKVGLEATGHYSYNLLGFLLDKGLTTFVINPLHTNLYRKSLSLRKTKTDKVDSRTIATMMMSDMNLKSYSDTSYHNEELKSLTRYRFDKVKERAKLKSSVSRLVCILFPELEKLVPTLHMASIYALLSEFPSAEAVANAHLTRLSNLLSESSKGRYGKDTAVMFRDAARSSIGSHMPAKSLELKHTIKLIQELTAEIDEIEAAIKRIMDEEIQSPILTIPGISYRMGAMILAEIGDFSRFDSADKILAYAGMSPSTYQSGQLDNCYSHMEKRGSRYLRYALYNATKYVCHWDKSFGAYLEKKRSEGKHYNVALSHATKKLVRLIFAMEKSGKAYLPTT

SEQ ID NO: 471527 - protein, 355 aa, unidentified
MPSKTDTAVAHTIGIDTGKNTLHMIGLDEKGAIVLREKVSRIRIAARFVNVPPCLIGIEAGMASHHIARELTALGHEVKQVPPAYSKPFRQGHKNDFRDAHAVAEAVERPSTLCVPIKTDGQLDLQALHRVRSRLVGNRTAVINQIRGFLLEHGIPVRQGHRFLRQQLPQILATRADVLSPRMIRIIGDLVEDWRYLDERIETVTDEIEALARADEGCQQLITVPGVGPIISSAMVAAIGNGAAFCKGRDFAAWLGLVPKQMSTGDRTILGRITKRGNRYLRTLFIQGARAVLLHPTSWARHSFGPWLTTAARRMHRNVLTVALANKLARIAWTVLAQGRRYEARVEPRIEPAAA

SEQ ID NO: 471528 - protein, 365 aa, unidentified
MNFIGADLHKKSITLCVMDERLKILARKTVPCGQPDQIVESFRQFRPFKVVVEATASYLWFVELLEPLAEEIVLANPKKLRVIAESTKKTDRLDAQVLAEFLARDMIPRAYMPTPRQRQHRALVRHRQYLRGRMTSVRCKIHHVLADYNADRKDLFSARCGKGYFKQVALSDADSFVIKQLWSEWEDHQARLLAMTKKIKAFIAKAPAREKEARAILKSAPGVGFVTAEVVLSEIGDVSRFGNAKKICAYAGLVPAVRQTGGKRSKDLHITKQGSGLLRWALVESAWRLVKTSPKWSALFSRLRKRCGSKRAIVAVARKLLCVLYAMLKTSTPYKIIAAATPAEPPEPTRKRLVRVSTAAQAVTP

SEQ ID NO: 471529 - protein, 413 aa, unidentified
MHDPTVETAPTGPVFAGVDWASTDHAVCVLDAAGAVLWRHTVSHSRAGLTRLTTRLSELRVGRVGIERPDGPVVEALLAAGLRVAVVPPRQMRNLRSRYTRAGKDDRFDAYVLADAMRTDGHRFTDLTRDSAPTVGLRALVRARSDLVEVRVGLVNQLRATLELAFPGAVGLFCDLHSPIARAFLRRFPTAAEAAALDEEAMAAWLAAQGYCGRTPAAVFIDRLRTAPVGLTGVEADARRQVTVALLAGIDAIEDQVAELGRRIKETLALHPDAAIFTSLPRAGQIRAAALLAEIGDARGRYPDAQTLAAAGGVCPFTDESGKHRTVGFRFKTDTKLRRALTDFADDSRHANSWAADLYTRARTRGMRHPQAVRVLARAWTAVIWRCWQDHQPYDPARHGALTRLQQDTAAAA

SEQ ID NO: 471530 - protein, 408 aa, unidentified
MQMISVGIDVSKGKSTVCVMKPGGEVLEPPFEMLHTMEGILSLVRLIGSYTEEVRVVLEDTGHYHWPVVTLLVEKGIFVCTVNALRMKKYCAQSIRKAKTDRIDSVRIASYGLTYWSELLPVKPTEDTYRELKLLARQYYQTVSMLVKAKVNLSNLLDQVMPGIDNLMSDSASNHKLTDFVARYWHYGHILEMSEKRFTTDYCKWAKKQGYRAYERLASEILAVAQNGIPVLPNSPVTKVVVTEAVRVIHQIEMTRDTIIAQMQALCKSLPEYSVVREMPCIGDTLAPRIIAEIGDVRRFHNKHSLIAYAGIDAPPYQSGTFNAAERHISKRGNSYLRKTGFEIMQSLIQHKPEGDAVYDFIQKKRSEGKCGKEAMIAGLNKFLRVYYGRVSEVYDAIHSELIFGSSI

SEQ ID NO: 471531 - protein, 427 aa, unidentified
MAYRIAGVDVHKKRLAVVVSDVEVEGEYEFERRKVGTSPDQLRALAVWLAEREVEEVVMESTAQYWRPVWEALERHWQPLRQQRAAAAPTSGRLHLAQAQSNRGARGRKKDFPDAERLVKRLVAQELTLSFVPDVEQRLWRTVMRRKSQVTRNRVRLQNRLESLLEEAHIKLSSFVSDLLGPSALRMLQALAEGETDPQALAALGSCRLHATPEQLCDALGACTALHPVYRRLIKLTLEELRVIDEHLAQLDHEMAQLLSAHQPAVQRLAAVPGLGVDSAQQIIAEVGPTAATFPSPKHLASWVGTCPGEEESDEVNYSHRSPNGNRQMRRVLNQAANAAVKTKGSIFELVYRRLVPRLGHAQAIGAIAHRLCRLIWRILHQGLTYEERGPAVTLLRAQRRTAKMIRDLRRLGYRVERSPAPSGSPA

SEQ ID NO: 471532 - protein, 393 aa, unidentified
MICVGIDVAKDKHDCFILSSEGEVLADVFTIQNNAEGFDMLLQTIRRCARPEDKIKVGLEATGHYSYNILGFLLDKGLDTYVINPLHTNLYRKSLSLRKTKTDRVDARTIAAMLMSDVDLKSYTDTAYHNEELKSLTRYRFDKVRERAKLKQSVSRLVTILFPELEKLVPTLHMTSVYALLSEFPGAKQIAGAHLTHLKTVLSDASKGRYGRDMATTLRDAARCSVGSVMPAKSLELQHTIRMIRELDAEIEDIETAIQSMMAEIQSPITTIPGIGVRMGAMILAEIGDFSRFDSPDKILAYAGMSPSTYQSGQISLAGAYSHMEKRGSRYLRYALYNATKYVCLWDPTFSAYLAKKRAEGKHYNVALSHAAKKLVRLIYALEKSKRPYSTAA

SEQ ID NO: 471533 - protein, 350 aa, unidentified
MLIIGCDYHPAFQQIAFVDTDTGELQERRLQHREEAEKFYRDLAAQEMKVRVGMEASGHARWFERLLGELQIELWIGDAAEIRTKRVRKQKTDRQDAQLILKLMLKDDFPQIWVASWENRDLRQLLWHRHRMVQARTRIMNQLQAVALNEGLGCKKRLWREAGREQLEAFRLAPWASRRRQDLLELLDRLNPTIADLTQMIEREVEKCPEAQRLRTHPGVGPLTALAFVLIIGRADRFQCGKQIASYLGLVPLEESSGNRRRLGHITKQGNSLLRFLMVEAAQVTVRSIPEWRSKYFHLAMRRGRKIAKVAMARKLAVRLYWMWRQGWDYEQLKKFGPHAGQPENRDGVQ

SEQ ID NO: 471534 - protein, 411 aa, unidentified
MATEITFPQVVERGCGADVHRDTVVVTVMGTDITVETRSFTTYTNDLRSLRDWLLSLKITHMAIESTGIYWKPVYNILEQDFEVILVNARHVKNVPGHKTDKKDSKWLAKLLLSGLLKPSFIPPKDIRDMRDLTRYRKKLVQNAAADRNRFEKILQDANFKLSNVISDIFGKSGTQLINALINGVSDFDQLVSLCHGRIRKKKDILLESLQGNLTANHKFMLNAIQSNLDNTLLKIEMVDQQLLELTKPYGIELELLKTMPGLNQISATMLLSEIGVDMSRFPTVNHLASWVGICPGNNESAGKSRSSRTNQGNQYIKPILVECAWAASHIKNSYLKKKYESLIGRRGKKRALIAVGHKMLNAAYYIIKDKVPYQDLGYDYLDSRKQQRQIQSYIDKLRDLGVEIEISNIQ

SEQ ID NO: 471535 - protein, 407 aa, unidentified
MEVICPRCAGLDVHKQTVVACVRIARDGAPLQEVRSFDTTTSGLLALADWLESFGVEHVAMEATGVYWKPVWHVLEGHFELVLANAAHVKNVPGRKTDVNDAMWLADLLAHGLIRASFVPPVAVQELRTLTRTRKQFVRERAAHVQRIEKVLEDAKLKLSVVLSDILGKGGRAVLQALVDGHSEPEYLASCITTRVKASRTELLEALRGRVSAHHRFMLKVHLSHIDALDKAVASIETEVGAGMKSFRQAAKLLSTMPGLSEVSANVVVAEIGIDMSRFATPGHLLSWSCMCPRNDESAGKRRSTRLRRGGKWLKTTLVQAAWAAIKVKGSYLQAQFHRLRARRGTKKAIVAVAASMLTAAWHMLRDGTEWNELGATHFDRADAAKTANRLIRRLQQIGYVVQATPA

SEQ ID NO: 471536 - protein, 370 aa, unidentified
MKDTIKYVGLDVSKEKIAVAIAEEGREEPRYFGMLPHTPEAIRKLVKKLGDPDTLRVCYEAGPTGYPLYRQLLTMGVHCEVIAPSLIPQRPGERIKTDRRDAIRLAQLYRAGELTSIYVPTPEDEALRDLVRAREDAKEDELRARHRLSKFLLRNTIQPPSKMTKWTKKYHAWLDSLKFESTALRIVFQEYHHQLKELEQRILRLEKEIEHQATEGAHAPIIQALQALRGVALITATSLAAEIGSFKRFPTAKKFMAYVGLIPSEYSSGERRYQGRITKTGNRHVRRLLIESAWSYRYQPAIKGQLKKRLDDYLQPSNPYPGKRKIDCTKGIIDYYQEGKREEKQSLQWLENWQALFGQLRKSQLNHPRV

SEQ ID NO: 471537 - protein, 369 aa, unidentified
MGDRITYIGLDVHKDGIVVAVAEGGRRGEVREYGRIGNTPAALQRLASKLGREGVELRFCYEAGPCGYGIQRQLSAHGHECIVVAPSLIPKRPGDRVKTDRRDAASLAKLHRAGELTAVWVPDRRHEAMRDLVRARLDAVRALRRARQQLSGFLLRQGCHYGRPAWTKLHRRWLAGLRFEQAVHHIVLEDYIAAVEAAEAGRDRLTAQIEAMLPDWTLAPVVAALQTMRGMALVNAATLVAELGDLSRFANPRQLMAYLGLVPSEHSSGASVKHGGLTKAGNSAARRLLIEAAWTYRFPARVSRELRLRQEEQPRPICEIAWKAQLRLCVRYRKLARSGKPANVVTAAIARELAGFVWAIARRLPPAAG

SEQ ID NO: 471538 - protein, 399 aa, unidentified
MLPKNQKHGSIERVAVPEAKRSVAPGTATSGARSSVIESVETVTERDRRRLHGISPNSRQSGRRDAAPCTSSHLQERDLTMDPVAASLCVGIDVSKDKLDIHIDTLNQNFTVTNDGAGIRELRERLLKLTIQRIAIEHTGGYQRRVAAELLDAGLPVSLVMPKRVRDYAKALNLRAKNDRIDATLLAQFARIMNPAISEKTPENRLLLDELVGRRRQLVEYLATEKARHQQAYDSTIRRGLRRHMDTLKADIKDIEEAIAELIKNDDDWRKKVELLTSVPGIGTTTAATLLAELPELGNANRAQIAALVGVAPYDNDSGTYSGKRSVYGGRDSVRRMLYMATLTATRSNPAIRKLKQRLQKEGKVFKVMMIACLRKLLITLNAILKSGKPWEDKLAKTC

SEQ ID NO: 471539 - protein, 370 aa, unidentified
MLDTTTFIGLDVHARSIKAVSLDVMTGEVRAATFGYDAGAVAEWVRSVDPKARCVYESGVTGFDLQKRLSGLGVDCVVGAVSKMIKPSADRRRKNDRNDAEFLARMLSVGNVVEVWVPDDECEAARDLTRALEDARDDLSRSKQRLSKFLLRHGLVFDERTPTGRRKGNWTRAHWSWIESIRFAERADNDVLAYYVDAVRRAAEEKARLEGLVEAEARKPRWRKRVDSLRCLKGVDTASAADLVFEAGEFSRFRNARSFAAWVGLTPSEHSSGESDRRGAITKAGNKHLRKTLVEAAWHYLTCSGRPKDLAKGQAPDRGARRHAAKGVRRLVERREALLARGVHGNKANVATARELACWVWAVGLMAEEA

SEQ ID NO: 471540 - protein, 419 aa, unidentified
MSFKILKFNCCGLDVHKTWIYACIGITDSNNRTEYKQARFSSFTKGLNELCDWLAKYNCTDVCMESTGKYWIPVFNILEQHNLWVTLSHPKYTKPMKGNKTDRKDAKWICDLYMCGMVKPSFIPPADIRELRDLVRYRYKLTCMIAGEKNRAQNCLTVSNLKLDDVFSDVFGKSSRSITEQILQHSGEKFDVAPFVYGHCKTPIEEIQAAVDGAISKEQAVKLRQCLDHIDELNKHISEVEQEILCLSDKYEAALNLIRTVPGFNKNPMTAIQMLSEIGCDMSVFPTDKHLVSWAGCCPRNDKSDRKIKSTRISRAGSYFKPVLVQVANALIKSKKHPEFTNRYKRIKARRGHKKAIIAICRMILTAIWHILSDLKPYTPEGFLESRPVKEDKILSTSQALNLLRQRGYVIKDEPLAVS

SEQ ID NO: 471541 - protein, 322 aa, unidentified
MTSSKLATRIIGVDVSKDKLDVWDPEGKITKVLRNSTSSIVKHIINKIKEVSEAFVVCEATGGYERTLVKALNKAGIRVCVANPFQVRQFGKGLGLLEKTDPIDAKLLCRFGEGVELWPTAPKTTEQDHHEALVRRREQLLKLISQEENRLAQAWDKSVAGMVREVINKLKKQQKQIDRLIAAFLKKEAETNETVDVLQSVPGVGPVTTSTLICDLPELGKLNRGAIAKLVGVAPFANQTGKRDRRRTIFGGRSHVRRVLYMAALVGTRQNSVIKAFYKRLLAAGKEKKVALVACMRKLLTILNAMVRNNEQWRIEKVVTDA

SEQ ID NO: 471542 - protein, 358 aa, unidentified
MQRNKKTFKGQNIYIGIDVHKKNWQVAVITESGYTERLSTAADAKALFKFLKSHYPDGNYRAVYESGFSGFATHYALSELGVSCVVAHAADIPSSQYELTMKSDRIDAEKLARALRAGLVRGIYVRPKDNLDDRGVLRIRKTIQIQVGGYKTRIKHLLHSNGVELPERFSRSGTHWSRAFIAWLREDVRLLSDTRRSLDLLLLQVETLRANLLEATRGVRALSMTDRYREDCALLMGIPGIGLTVAMTILTEVCDIGRFGNERQFASYLGLVPTSHSSGERVSHGEMTFRGNKHIGPLLVEASWVLIVRDRELGRMYTEYRWRMAGQKAIIKIARKLSNIIFAVLKTRKAYEPYRRDA

SEQ ID NO: 471543 - protein, 372 aa, unidentified
MNYNTVYVGMDVHKESFTLCSCKYEDEKASHYQRTPASYKNVLRYLAFLRTIYGEDTRFVCGYEAGCLGYSLYHQLENFNVECVILAPTTMLEQRSKRRIKTDKRDAEIIAKSLAQHNYSPVHIPTKMDNQTKEFIRMRDDHKAELKKIKQQILAFCLRQGYQYDGSGNWTAKHVKWLRSLKTEGLYKEILDEYLLTYTILTDKLNRLDQRIEELASEEEYKEPVSKLTCFLGIKIHTALSVIVEVGDFQRFASARKFAGYLGLVPGQHSSGDDRNGLGITKAGNTHVRRLLVESAQSYTRGKIGYKSRVLRSRQAGNSPQIINYADRANERLRRRYYQMVLKDGKKYNIAKIAVARELACFIWGMMTDNIY

SEQ ID NO: 471544 - protein, 370 aa, unidentified
MKMSIGVDLHKTQFTVCCLSEDRKIQESGIYPTKDRGYGAFIKKMFHWIEGGYEITIAVESTGNTRYFCNQVMDAGIVVKIVNTLKFKIVNESVKKTDKHDARTLAEFLEKDMLPEAILCSQESEDIRRLLKSRSVLVKALVSLKNQVHGLLLGYGIESRRGQLQSKKERQRILDGLADHKSNGNAAWAVQPLLGTIDQIASQVKELEKVLSDLVREDKDVELLRTIPGVGLITAATIRAYTDDINRYENAKKYAAHAGLVPWVQNSNTTVRHGHITKRGPSELRTAFVQMVMGMLRLRNKTAGYWLMGKYNVMKEHKGTGKSIIATARKMNTIVYAILKTRKPFDPSRMLPDPKYLEMSKAARRYALAV

SEQ ID NO: 471545 - protein, 375 aa, unidentified
MSNVRFVGLDVHAETLVVAVAESTGEVRTLGTMPNRPEAVRRLVRKLGPPEQLRVCYEAGPTGYVLYWQLIGLGVHCDVVAPSLVPTKAGDRVKTDRRDAEKLARAYRAGDLTPVWVPDAEHEALRDLVRAREAAKKDQLRARHRLGKFLLRHGRRRPAHLKMAWSACHVDWIRTVRFDSAALQIVLTDYLHEVDRVAVRIMHLNEAILEAIQTAPPQMRAVMRALQALRGVKAVTAATIVAEVGQLSRFTKARQLMGYSGLVPSEYTTGPRRRLGAITKTGNAHLRRVVIEAAWAYRFGPAVRTPLRDRQAGLDPAIIDIAWHAQKRLHERYRTLAAKGKNNNQVITAVGRELLGFIWDIGRTIERQVPIAATA

SEQ ID NO: 471546 - protein, 322 aa, unidentified
MKTIGIDVSMDEIDLAICEKGKSSYYGKMKNNRQGFDKIVKLVEKNKIDLVVMEATGVYHFQIADYLYDKKVKVSVVNPLIVKRFCQMKLSRAKTDKKDSTLIALYGYQEKPRHYQPRSKEEEELKSLYGLRKDLLQTLNQTKNRIHALEKKTHEQVFCIASLEKVEEILKQELREIENKIKEILENDFKEENDLLQEVPGVGLIGKAGIIGILGGFKYFENHKQVSAYIGINPSYRQSGKSLNCTERISKKGNGDLRTIFYMMALSAKKSNKACKIFYERLVEKGKSKKQAIIAVANKLIKMLMSILKNKKRYDENFVSSK

SEQ ID NO: 471547 - protein, 411 aa, unidentified
MRIVGLDVSRSAAEIAYLEDGTLHAGGRTGLRRDELERFAVKLRSTDHVVLEATGNTTTIVNVLRPHVARVAIANPLQVRLIAEARVKTDKIDAAALAQLYASGFLPEAWMPDERTLALRRQIARRSQLVRQRTRLKNEIHAVLIAHLIERCPVTDLFGKKGRAWLGVQPLPLDERLGVEQRLRELDRLGEDLREVEQALAQATIDDARLRVMLTITGLNTTLAIGLLSAIGDIARIPNPEKLVSYFGLNPSVYQSCPAPARHGHITKRGRSYARAMLVEAAWGATQAPGPLRAFFLRVRDRRGQQIAAVATARKLAVIVWYVLTGGEPIAWDRPALTAHKLRALELQAGMPAQHGSRKGSAAAYSLKSVRQQERAVPEQSERTYQRLFNRWKQSRPKSDSGVIRWPEART

SEQ ID NO: 471548 - protein, 412 aa, unidentified
MKDLLEISCGLDVHKEKIVACILTGPLGKTTRSEIREFSTLIPDMIALRNWIVSKNCHHVAMESTGIYWMPIYEILEDAFSGDITLLVVNARHMKNVPGKKTDMRDSEWISTLLRAGLLNGSFIPEKRIREFRDLNRYRKSVIRDITSQKNRIEKFLQSSGFRLSSFISDIFGASGRNIILHLIEHGQIDKTALDSCLKTKTRNRIDEILMSVNGTLSEHQKAFLRILMTHYDSLKKHLAEIETSLEEDMAPFALQVEQLNSIYGISTTASCAIIAEIGIDMKPFKTAEHICSWAGLCPGNNESAGKRKSTSVTKGNPYIKSMLCEIAWVIAGKRNTYLSAWYWRIKQKKGAKKAIVALARKLLVIIYTMLKQGTLFDESCFETRRKHCEQKQLSRYIRELEKHGYHVEAQS

SEQ ID NO: 471549 - protein, 411 aa, unidentified
MDVLIERCAGLDVHRDTVVATVRRPGPGGTRRSETRTFTTMTGQLDMLADWLTEQKVTLVGMESTGIYWKPVYYVLEDRFPVWVINAEHLRNVPGRKTDVADSVWIAQLIEHGLVSPSFVPPRNVRLLRDVTRHGRRLTEERTRTIQRLEKVLQDAGIKLTSVASTILGKTGRAILAALLAGEEDPTVLAELAKGRLRPKIPALREALTHRFRLEHHGPLIAQMLAHIDFLECSIAETNQRVEVLLRPVADMVELVMTIPGVGRRVAEVLIAEVGLDMSVFPTAGHLASWAGICPGNNSSGGKHRPGRTRHGSMWLRIALTEAAQVAARGKGTYLAAHHAQIRGRRGTQKAVGATRHDILIAYYHIVANKVAYHDLGPDWNERRRSTEQQTRRLVRQLERLGVNVTIESTQ

SEQ ID NO: 471550 - protein, 412 aa, unidentified
MKDLLEISCGLDIHKEKIVACILTGPLGKPTHSEIREFTTLIPDMLALRDWIISENCHHIAMESTGIYWIPIYEILEDAFSGDITLLVVNARHMKNVPGKKTDIRDSEWISTLLRAGLLNASFIPEKRIREFRDLNRYRKSIIRDITSQKNRVEKFLQSSGFRLSSFISDIFGTSGRNIILHLMEHGQIDKMSLDSYLKTKTRKRIDEILMSVNGTLSEHQKSFLKILMCHYDSMKEHLIEIETHLQEDMLPFALQIEQLNTIYGISTTASCAIIAEIGTDMKPFKTAEHICSWAGLCPGNNESAGKRKSTSITKGNPYIKSMLCEIAWVIAGKRNTYLSAWYWRIKQKKGARKAIVALARKLLVIIYTMLKQGTNFDENCFEVRRKNCEQKQLSRYIRELEKHGYTVEAQV

SEQ ID NO: 471551 - protein, 354 aa, unidentified
MYYVGVDLHKEQSWFYIMDDKGTKVTSKSIVNKSDALKGFFSTIPTPFTLAVEATYNWYFFVDIAEQYAYQVFLANSYELKAFAKRHKKTDMIDARLIADVLRKGFLPTVFIPDKATRALRELLHYRMNLVRDRCRAIFRLKNILDKLGADSTGDFTTIKAVCGIPVNSFLQVHQRIISEYIDQIVLLSRRIHQTKTYLKAYLVNDVDIARLIEIEGIDYFSAALIKTEIGDIKRFASFNRLCSFAGLAPKVEQSGSKPAFHGALASNRRKNLQWILLETVFYFIKGSPKRVARYEELKIRKGSNTAKVIMARQMLNIIYHVLKEQRPYYKDGGNNRVRKNQIQSVAAAALIGV

SEQ ID NO: 471552 - protein, 385 aa, unidentified
MAQSEDMSNPPTALAQNDTLICVVEMGLKSWLVAGLVPGIERQPLKKLEADESALHRLVLRWKAEAEKAGRPISRITLAFEAGRDGFWLARWLGSRGIEAWVIHPTSIAVSRDHRRPKTDRLDTQMLMRAFLGWLRGEPGHCRMAAIPTLEQEDAKRPTREHETLVGERTRIINRSKSALIRLGIRGFKPGLRKASERLASLRTPEGVPIPPNTLAEMHRDMARLAVIQSQIAEIAVARLERLEHATDAPHAMIRLLARVIGVGVETAEMLVTEVLSRNLRDRRAVARYAGLTGAPYESGSKRHEKGLAKTGNARVRHGMIQFAWRFLLFQKESALARWYRARTENAKGSRKRMIVALARKLLIVLWRFVTTGEPPEGVALRVAA

SEQ ID NO: 471553 - protein, 330 aa, unidentified
MDHFAGLDVSVKETSVCIVDDTGKIVREVKVASEPEALLKVLRSPSHQFKRVGLEAGPLSQWLYSALAEAGLSVICVETRHMRAVLKAQINKTDRNDARGMAQMMRVGLYRPVHVKTLRSQKLRMLLTHRKLLQSKAIAVDNDLRGTLRNFGLKVGMVGATRFEARVKELIENFSDLAVLVEPLLVVRRVLREQLGILHRRLLTVVRDDDVCRRLMTVPGVGPVVALTYRATIDVPARFRKSKAVGAVFGLTSAKYQSGEIDRSGAISRCGDEMMRTMLYEAAQSMLFHSIRWSWLKAWAMKIARHRGMKKAVVALARPARARLRSRAPW

SEQ ID NO: 471554 - protein, 347 aa, unidentified
MRYVGIDVGKVKCRAAIMDQGGFIVDEFTFANNHEGIEDLASKLNMDDRAVMESTGSVWTNLYDVLDGKHIPVVLANPLKTKAIASAKIKSDKIDARILAHLLRSDLIAESYVPPKEMRELRALIRHRASIVKVRTMVKNRIHALMDRYGFEHEYSDLFGKGGMQWLKTIEVKPLDRLMLDNHLQHIENLNGQIKRVDEEICGKASQDEDVRLLLSMTGVDIYTALLIRSEIGDIHRFPDYKKLVAWAGLAPSLHQSGSVEYHGSITKQGSRMLRWIMVEAARVAVNHDDRLRLFYERVKHRRGDQKAIIAVANKMLKIVWFMLTRREPYESANQKRYERKLNSLVN

SEQ ID NO: 471555 - protein, 416 aa, unidentified
MTDPQKSSPFERYLAMDAHKHYVVVGGLNAQLEIVLPARRMDMERYSQWAKENLTRQDCLVIEASTNTWDLYDITAGVAGKVLVAHPLAVKLIANARVKTDKQDVFRLARLLAGGLIPEVWVPPQPVRELRTLIAHRRRLIQMRTMTRNRLHSLAHRYNLILPEGGPFADKNQDWWKGLSLSPVEKLRLQQNLALLEFLEPEVKAVDAELARLSNSDPWKEAFPYLVQLPGFGLIVVMTILSAIGDIQRFQTSKQLVGYSGLGASLHQSGETNYSGHITKQGRKELRYALVEAAWVAVTSSPYWREQYQKLSHRMSANKAIVAIARRLLVAAWHVLTERAADRRANPDMVASKLMIWSWKLNDVQRGGLTSRQFVRYGLMRLKIGQEIDCIKRQENRPIASVEEVLGRLPELNLNI

SEQ ID NO: 471556 - protein, 343 aa, unidentified
MQSISTIGLDIAKSVFQVHGVDAAGQVVLRRQLRRRHILAFFQKLPPCMVGIEACASSHHWSRELQALGHTVRLMPPAYVKPYVKRQKNDSTDAEAICEAVTRPNMRFVPTKTVEQQSCLMVHRARHLFIRQQTAVINSIRAYLAEFGIVAPVGRRGVEQLLEVVADTDDRRLPEVARACLAALGSQLRALKAQIVEFDRRIINWHRANATSKRLDAIPGVGPALATALVASVADPKAFRSGRDFSAWIGLVPKQNSSGGKDKLGSISKQGDRYLRSLFTTGALAVIRYAKIHGTGHRPWLTALLARRPTKVAAIALANKLARMAWAMMARNEPYKEPTALAA

SEQ ID NO: 471557 - protein, 376 aa, unidentified
MPQDITYIGLDVHQDTITGAVLPGFDRDLAETKTMPADIARVVKWLRRLERKYGRELLVCYEASGAGYVLYRELKKRQISCAIAAPSLIPRKPGDKRKTDPIDAKDIAYQLRNDSLTMVVVPDREDEALRALVRWREALVGDQTRARHRTRTHLVRNGVMYREGSNWTKTHREWLGRVRLDLEDEQFVHEKHLEQLDALASQVEEVEERIHERAFSEAYVDRVARIQCLKGIALTGATTMVSEVGDFTRFPTARHFMSFMGLTPGVWESGSTQKSGRAITKAGNAHCRRILIEATHSIVRHRPTAGKALRERWKGQPAWVVRHARKAMKRIHSRYWCLLHRGKRKQKATVAVARELAAFVWAVMQAEDRSRGGKAA

SEQ ID NO: 471558 - protein, 352 aa, unidentified
MTSATLPHHWCVGIDLHKDTLTVCVYCPCCGEISFRKFYCRCRAQIVAFFSELPRPHSVAIEAVGFYRWLWDLLEPIVEKLVLADATAARALAGRRLKTDREDAQNLAELLASGRLPLAYAPPMEVQILKDQTRHRNQLSRLHARVLHQVKSFMNANNRPGPARLQSDGLIRYLKAFEGKLPERHAAILWKCVDQLTLIERQMAQAEIELRRLLDGERFRATSALLQTFPGVGLIVAATVLAEVGDFHRFTYRKAIACYAGLHPRVFASGGKQREGHIAKTGPRDLRWVLQQAAWVAIRCEPGIKKMWLKMSRSAGKKAAAVGIARKLLSWMWAAVLKGQSYQPRATLPVNT

SEQ ID NO: 471559 - protein, 362 aa, unidentified
MTTVAHDAGQWVIGGVDTHKDFHVAAVVDVVGRVLGVETFPASRHGYRRLLSWMQSHGEVIGVGVEGCGSWGAGLARHLAERAVKVVEVNRPNRQKRRLRGKSDPVDAEAAARAVLCGEATVTPKTGTGPVEALRQLRVARAGAVKARISAANQLHSLCDTAPETIRAQLRRLPLRQKVEICERWRPGSAYTPVNAAKRAMLSVARRWRALDLEVRELDAHLKAILDGIAGPLLAKHGVGYETAGQLLVTAGDNPERMRSERSYAALCGSSPVEASSGRTERHRLNRGGDRQANAALWTIVLTRMSNHPPTRAYVARRTTEGLSKKEIIRCLKRYVAREVFPLVRAINDLEPSHNQTSQQAA

SEQ ID NO: 471560 - protein, 391 aa, unidentified
MDESGKVLAKNRIPEGIGGVTAFHSLVAHHASDPQEVVVCIETDRGLWVQSLLAAGYQVYAVNPFAAAHYRQRHVVSGAKSDPGDAEILANLVRTDRHHHRQVAGDSETAQAVRALARAHQRLIWDRQAQVNRLRSILKDFYPAALNAFGTDLAHPDAIGVLGRAPTPGAGARLSVSALSATLRRAGRQRNIEDRAKQIQAALRAPQVRAPLRVENAYGAQVAATIGIIAEMTRQAAALEAQLTEDFGSHPDAEIVRSLPGLGTVLGARVLGEFGDDPNRYTDGKARRNYAGTSPITRASGKKRVVLARFVRNRHLADATYRWAFAALQGSPGARAFYDEHRAKGDTHNQALRVLSNRLVGILDGCLRTRSVYNETRAWSHRQTSSDAVAA

SEQ ID NO: 471561 - protein, 366 aa, unidentified
MKSLVCAPLEMQGSSAAVPQPQPGQDVYVAVDLSRSKWVYGVRWGGAHQRTLSSPAGLPHLQALLAEYGQCTLHVVYEACGFGYEIAWWLEEHDIDGMVIAPSRLERVPGRRVKTDRLDVRAMGRKREQGQLKGIYVPRRAEHERRQLSRTYAQALKECKRARVRVRSLLQEQGRIGPAPRAGWVVYQQWLAAQKLPAPVQLCVRELLQMRQAALASARHLKAAILELAAAPEYAPVVAALEQQPGVGTFTAIRLVLELGAVTRFATVGAIVNYVGFTPSQYSSGELDQRGHICKAGPGYLRAWLLQCAWAAIRGKNADLELKYCFERLVGRVGRKRAIVAVARRLAVRLRARWLEVLAAAVPVAA

SEQ ID NO: 471562 - protein, 338 aa, unidentified
MLHVGLDLHKRFSTVATMDDSGNVQLEDKLYHDDRARMRKFFGDMAGKAVVTVEATRNWYWLYELLEDQGVTVKLADARKVRLIAESQLKNDKVDPRSLAQLERTGFLPEAYIPPREIRDNREYLRYRLTLVRLRTGLKNKVHALLDKLGICHQFADLFGPAGRHFLSQLELRPVYQEELNNYLALVDDLERRIVAATKEIKLQLKPDPRAKLLMTLPAVGHLTAYLLLNEIGDVKRFPTPGKLCAYGGIVPIVRQSADHRWQGHITRTGNRYIRWALTEVACLAPSKDYALGNFYRRVAYRRGPLKARVAVARKLLVAVWHVLTYEEPYKPTPFPTV

SEQ ID NO: 471563 - protein, 429 aa, unidentified
MKIIYPRVCGIDVHKKFIVAVICISESVEPIYLKKRFSTFHNDLIRFRDWLIQNDCQNVCMESTGKYYIPVYNVLESHISNIVVANPKWVRAVKGEKDDDKDAKWIADLFKLGIVKSSFIPQKDFRILRELTRYEYKLVNMRSSEKNRYQNALTSGNCKLDMVFTDVFGKSASNIIDLILSDNPYTDEDILSKVHKNCKASPDMILNSINGTDLTSVQKSRIELVNDHIKQLSSNIQRLDKLIDLMIEPYEDYISFLCQIPGVSRNSAIIILSEIGVDMNQFTSTRRLTSWAGLTPSSNQSAGKKKSVRISRAGVYLKPCLVEVAHAAVKDKNHPYYANKFNKISKRRGKKRAYIAIARKILVAAYHMLLTGEIWNPADLSEVETPVKQRIKYVKNNLKSDIKQLLDIGLTVEELTLMIQQNANIIATQ

SEQ ID NO: 471564 - protein, 378 aa, unidentified
MNRIIKIGMDVHTTNYTLCIFEPSFEHDATVHCITQVKPEVKNIIHVIETFKKKHENEELNIVCGYEAGCLGYSLYHELKEKGIECVILAPTTMKTEKGGRKLKNDYRDAKMIAECLAYGGYSAVHVPTELDNSVKEFIRMRDDIKENLKSIKQQIIAFLTRNGKQFEGKSFWTRKHIDWINTVSFSEPLLQDTLKEYMIEYNHLCDRVETLDRQIEEISLKEEYVEKVQQLQCLIGIKTHTALSLIVETSDFNRFKKGNMYSAYLGLIPGDDSSGGHEDKLGITKAGNNHLRRLLVEAAQGYTRGRVGFKSKDLKSRQEKCSSEVVAYADRANERLRRKYYRMTLRGKKFNVAKTAIARELACFVWGIMTDHIDLCS

SEQ ID NO: 471565 - protein, 343 aa, unidentified
MGDVITIGLDIAKSVFQVHGVDADGAVVIRKRVSRAKVLEFFAAVPRCLVGIEACPSAHYWSRKLEVLGHTVKLMPPSYVKAYLKRSKNDANDAAAICEAVTRPSMRFVSTKSEQQQSGLMLHHSRRLLVRQRTMLSNAIRGHMAELGIISAKGRNGTGELLEVIANAKDNCIPAAARFSLEVLARQYIAIATEIGVLEKRIHAWHRSCEESRRLEEIPGVGPIVATALIAEVGDWKAFASGRSLAAWIGLVPKQHSTGGKERLGGISKQGNRYLRWLLVAGAMAVIRYARRHGTKRLWLTRIMERRPIKVAAVALANKIARMAWAIIVRGERFREPRLLLAA

SEQ ID NO: 471566 - protein, 443 aa, unidentified
MEETREEQADGAVARVAAIDIAKASGVVCMRLPHEDREGRRVQQVWTVASTTNAVLELGDRLLCQGVQRVVMEATGNYWKPFFYLLEARGLECWLVNAREVKNVPGRPKTDKLDAVWLAKLAERGMVRASFVPPKPVRQLRDLTRTRTAFTQDRTRHKHRVEKALEDAQIKLSSVVSDLFGVSGRAMLDALVAGERNPRALAELARGSLVNKRELLVEALTGQFEEHHSRLLRILLETVDHFTRQISELDRHITMLLNELAGPAAAAEHDDAPTTAVGRPGPELVERLDAVPGVGATTAHIILAEIGLDMNRFPSPEHLVSWAKLCPRTIQSGTKNTTGPAGRGNPWLKGALGEAANAAARTDSFLGSRYRRIVKRRGHAKALVAVARSILVIAWHLINDPDARYQDLGADWHQRHLNSARRTRDLVRQLQALGHQVTLAPTA

SEQ ID NO: 471567 - protein, 375 aa, unidentified
MKDSQKFIGLDVSKDIISVGIAEEGRGEPRFHGNIQNTPESIRKLFKKLGDPEKLLVCYEAGSCGYCIYRQLLSMDIECIVVAPTLIPKRAGDRVKTDRRDALRLAQLLRAGELTAVWVPDETHEALRDLIRARFDTREDLQRVRQRLVHFLLRHEIRPPQGVKNWTVKYRTWLNTLTFEKTSLRIVFQEYLHSIYEVEERMKRIEAQIHEEAIESEHAPVIQALQTLRGIAEITAVTLVAEVGQFSRFSNPRQLMSYAGLVPKEYSSGSNRWQGSITKVGNSHIRRALVEVSWSYRHRPSLKGELKKRQIGQPLEAQRIAWKAQHRLNLKYSRITARGKAGKFAVVAVARELLGFIWAIGCSIEGTQLSQSKIA

SEQ ID NO: 471568 - protein, 319 aa, unidentified
MNSVVIGTGPHKLSVTIEVLDERERVLHQGRYGTDRDGYRQMLAAARQFEQRSWAVEGCNGIGRHVAQRLVADGEIVVDVPAKLAARARLFDTGNGRKTDPADAHSVAVVALRTQNLTQVRVDDELVALRLLADRRDELGRTRTQTVNRLHRLLLELLPGGAKRFLTAAQAQALLDSVTPTDVAGRVRHQLATELLGEIVVLDKKMKDSDKTLRKAVNATGTGLVGLFGIGPAGAARILGDVGDVARFATRSRFASWNGTAPLDASSGEQKRHRLSRAGNRRINRALHIMAIVQIRHNTPGRAYFRRRGQDPDGGDQGA

SEQ ID NO: 471569 - protein, 434 aa, unidentified
MSNSSDKTSPTATSVSANTAPALFVGIDWSDKKHDVCWMAADGRCGQCVIEQSPQQIEELLAKLTKLAGGGVIAVALEKSRGPLQYALMGREGVRLYPLDPKQVARYRDSFRSSGAKSDSGDAGLLARLLFERHRELPPLRLDDEPTRRLAHLSQTRRLLVDDSTRLKLQLQALLKTYFPLALTFGDVDSGLVLELLRRWPDPRELRRVHPKTLAGFFHEHRVRNEERLQELIDRIRQTPLMTTDRPVIESLVFRVTVLASQLRPLLDQIQKIETAIDEAMAAHADAPLFQSLPGAGRALAPRLLAALGSDRDRYADADEVSVITGIAPVTKQSGHTKIVMRRRACSRFLKQTFHEFADQARKWCPWSKAYYAWQRSKNVKHHAALRKLASRWIRILFRVWRSRTPYDPTRYLQRLQQLNHPLLDFLETETAFA

SEQ ID NO: 471570 - protein, 316 aa, unidentified
MTNPIKLKMIGVDVAKLKLDISMPDNQAVVIDNNEAGFKQLLKTIPPIQTVCFVMEATGGYEKGLANFLLSQGAAVSIVNAKRVRDYAKAIGQHAKNDRIDAKVIRDYAEMAQPKHRKQRSKIANQLEALMKRRDQLVKQRTMEKQHLEAANDPYATRSIKKFIKSFDQEIERIEAEIKKLIAADGALQKRIEKLIQVDGIGSVTASTLVSQLPELGQLSNKQISALVGVAPFCRDSGAMKGRRIVWGGRALIRSTLYMATLSAVRFNPPIKAFYQRLITNGKLKKVALVACMRKLLVILNAMTKNDSEWNPNFAN

SEQ ID NO: 471571 - protein, 396 aa, unidentified
MEVYSKFVGMDVHKETIAVTVAEAFGGEVRYLGEIRNTPEAVGKLIRQLRKGDVKILCCYEAGPCGYVLHRQLLGLGIVNLVVAPSLIPKKAGDRIKTDRRDSQTLARLLRAGELTAVWVPEEAQEALRDLTRGREDLKHLERQAKQRLQAFLLRHGRVYGREKKWCRMHFHWLENVKFDQPVQQIVFQDYLDTLQMLTRRVEALEKQLEAAGTASGFGPVIEGLMALRGISRIAATTTLAEIGDLHRFPTAPQLMAYLGLVPSEHSSGPTRSRGSITKTGNGHVRRVLVEAAWTYHHPARKTTHLQRKAERAPEKVQEIAWKAQVRLCARYRQLESKGKLKVKVCTAVARELVGFIWAIGQAFPAPGSPAPTGASNSQCIGSRTGNGGRTLGAPM

SEQ ID NO: 471572 - protein, 348 aa, unidentified
MAHFVGLDVSVKETSVCVVDDAGKVILEQKVLTEPDAIIALLTSLGATYGRIGIEAGPLSQWLVNALTAADLPVICVETRHMKALLTAQQINKTDRNDARGIAQMMRVGLFKPVHVKTLVAQEQRMLLTSRKLLQRKLLDVESDLRGTLRNFGLKVGVVSGGRYETRVRELVAGFPRLAAIVEPLLSVRRVMRQQFAVLHKMLLDMVRGDPVCRRLMTAPGVGAVVALTYRATVDQPQRFVHSRAVGAHVGLTPKRYQSGEIDYDGGVSKCGDALLRTMLYEAAHVLLTRGAKWSWLKAWGVRVAQRRGMRRAIVAVARRLAVVLHRMWVDGSEFRWSKDSTPVPAVA

SEQ ID NO: 471573 - protein, 339 aa, unidentified
MKQIYAALDVSDKSTHVCVVDGAGAIVWRGICATDPDALASVLKKRCPAVVRVVLETGPLSAFLYHGLVERGLPAICVCARHAKGVLSTRVNKSDPHDAEGLAQLARTGWFKAVRIKQEATHIDRAHLKIREQLVTSRQAMANQLRGLLKLFGLRLGKVSTPGKRRERLEALFAQKPELRTVMQPLIDSIEALEAQIKRSTKLLAASAEGDPVASRLMSVPGVGPFIALTYKSSIEDPERFARGDDVGAYAGLVPRRNQSGERDYKGRISKAGDAMLRSALYEAANNLLARVKRPCAIQTWGKKLAETKGPKRARIAVARKLAVLLHRLWLSETEFRWT

SEQ ID NO: 471574 - protein, 343 aa, unidentified
MDEYDGKQFVGIDLHRRHSVIVRQTSTGERLSAVRIVNDPDSLALQLEEAGEHPDVVLEATYGWYWAVDALQAAGATVHLAHPLGVKGFRYRRVKNDVRDAGDLADLLRMNRLPEAWIAPPPTRELRELVRYRAKLVALRSGLKAQAHAVLAKAGVLIAVSDLFGVEGRQRLARVPLGAAYAQRMSSLLELIDVLDTHERRFAEQIAAKLYDDRGYGAIQQLPGVGPVLGAVFVAEIGDVHRFADPSHLCSWAGLTPQHRESDTVVHRGHITKQGSKLVRWAAVEAIQRQPAGTKISVDRKRIEARRGKNIAKVAAARKLLTLVYYGLRDGHIRALTRQRAAA

SEQ ID NO: 471575 - protein, 378 aa, unidentified
MVRLFREEWPAADCNPRQAAGDRIEPILSSCWLPRSVIVVSTFIGPGWLPEQLGSFYKAGSTKMAQTNITTAGIDTSKLKLDIAVHGRTERWQVANNLSGWRALAANLAKAGVTRVGIEATGGYERGVVEHLRAADFTVLLLQPVQVKAFGRVHLRRAKNDVLDAGLIAACAAVLDEPEIPPDPRLADLAGHLTFLEQIEEDIARFKTRLEHFDEPSLRRTINDDIARLKGRRATQIRNIAKQLRAHHDLAVRLDLVLSVPGIGERTALALIIRMPELGRISREEAAALAGLAPFDDDSGQHKGQRHIAGGRGRLRRSLFAAALPAAFHWNKALVALYARLKARGKAHNSALIACARKLLIYANTVVQRGTPWTEKVA

SEQ ID NO: 471576 - protein, 459 aa, unidentified
MNRKRSKPKIDRKMPMVHPNAAAIDVGATMHMAAVRPDRTPEPVRSFGTFTTDLHRLVEWFKECGVETVVMESTSVYWIPIFELLDAHGFTVFLVNARDAKHVPGRKTDVSDAQWLQRLHSYGLLRASFRPKGQISELRAYMRQRERLLEYAASHIQHMQKALIEMNLQLHHVVADITGATGLRIIRTILAGERDPKVLALLRDYRCHSSAETIEKALTGSYRAEHLFALEQALALYDAYREKASACDARIEAVLKELSIGRGRRSGTELPSPRRSRTDQANALAFDVRAALFALLGKDITKIDGLGPYLSLKLIAECGDDLSAWPSPKHFTSWLCLAPSNKISGGKVLSSRTRRSGSRAAALLRLAAVTVGRTDTALGAFYRRLSARIGKAKAVTATARKIAVLFYNAVRYGMEYVDPGASFYETRYRTRVVDNLHRRAKAFGFVLMPLEAPPSVVVS

SEQ ID NO: 471577 - protein, 319 aa, unidentified
MTAAPVFVGIDVAKATLDVACRPSGEQWSVPNDEAGVAALLERLRPQSPALVVCEATGGFERAAIALLAAAGLPVVVANPRQIRDFARATGQLAKTDQIDAAILALFAERVRPAPRALPSDAAQLLDALLTRRRQLLEMLVAEKNRLGFAPRPLHQGIQQHIRWLERQLDDVTKALADQIERSPVWRAKDDLLQSVPGVGPIVSVVLLAELPELGTLSHKQIATLAGVAPLARDSGTRRGKRMVWGGRAGVRTALYLAALCGRRWNPRLKVFYERLLAAGKPKKVALIACARNLLTILNAMLRDATRWSAPALAVQHSC

SEQ ID NO: 471578 - protein, 269 aa, unidentified
MQTITTIGLDIAKSVFQVHGVDAGGQVVIRRQLKRRSILAFFQKLPPCLVGIEACASSHHWSRELQALGHTVRLMPPAYVKPYVKRQKNDMADAEAICEAVTRANMRFVPTKTPEQQSCLMLHRTRHLFIRQQTAVINSIRAHLAEFGIVAPVGRKGVTELLHVVADPSDKRVPEVARACLAALGTQLLSLKQQILEFDRMILAWHRSNETSKRLHYIPGVGPMLATALVASVADPRTFRSGRNFSAWIGLVPKQHSSGGKDRLGSISK

SEQ ID NO: 471579 - protein, 342 aa, unidentified
MEQYAGIDVSLESVSVCVVDGGGRIMREAKLACEPEALITWFGKLEVGMARIGLEAGPMSQWLYARMREAGLSVELLETRHVRHAFKAMPVKTDRTDARGIAQLMRLGWFRSVHCKSLPAQELRAILTARKLVQTKRHDLEMSLRGILRGFGLKVGQTTPRSFEARVRELVDGHPTLTVVADAMLARAVLVEQLGKLQKRLVSLARQDMRARLLMSMPGVGVLVALTYAAAIDEPARFRSSKAVGAHFGLTPRKYQSGETDVTGRISKIGDAGVRTALYEAANVILTRPVKGSSLKSWAMRVAKRAGMRKAKVALARKLAVVLHRMLANGSAFVTSKAAAKA

SEQ ID NO: 471580 - protein, 417 aa, unidentified
MSKSNIMEPVVQVPSKSLHLGIDLGWRNNVVVVIDESGEDVDGFRFSQDRAGYQWFLQRVKRLQHRAGAGSLEVAMEPTNYFWKLMARELEQRGIHYHLVNAYTVRKHREGDQLDRSKDDRRDARQIAELSRTAHYTQTRLQRGGYEDLRQYAALYDQLRQSMRRERQLLWVGVGQVFPEIFQAFQDLGGDTCQALLRTCAPAVSIRQLTLEAFLVQVRSGYRGKRLLVSKLRRTYELAATSIGVTEGSEAIQLAIRAHLSCLETQQRQMNRATETMRACLSSLPEAPFLKSLLGDVSAALVLAEIGDPKHYRSAAQWVKLAGIQPAPNTSGQKQSGRTPMSHQGRPRLRTVLYFACLRMIQLDPHFIQLYAHLRNRPKNPLTKMQALGVLMNKLLHILWALVQNHTFYDPSFSSVT

SEQ ID NO: 471581 - protein, 356 aa, unidentified
MKYVGIDVHKKYCQAAVLDDEGELLDQIRFLNKKEDIKEFALKLTTFRDDVKAVVESTGNLWIQIHDILEKFGFEVFLSNPGKTRLIAEAKNKTDKIDAKILARLLRADMLFTCYVPGEEIRNRREFLRARQTFVKHRTQVKNRIHSILDKHGLRFPGTPYSKKSIVWLKEQDLGFMDNAVVKGQLALLETLDEQTQILEDKIAAMGMEDPQVKLLMTMPGIGYFTASMLVAEIGDINRFGNEKKLSSWAGLAPRIHQSGGTTRIGRVGRGNKRVSGLLVQCAHNARQHDPRFKRFYDRYSKRRGKGKALVAVAHEMIRIVYFMLRDNEPYRGMNVEMTTRKLKSMKYRASVGLRT

SEQ ID NO: 471582 - protein, 347 aa, unidentified
MRFYTNQHKYYCGINPHTRKMYICILDEKGEIREHRNMKTDRDAFLKAIAPFREDIVVAVECIFTWYWVADLCHNEGIPFVLGHALYMKAIHGGKAKNDKIDSQKIAVLLRGGMMPMAYVYPVKMRATRDLMRRRNHLMRKRSELYAHIQNTNSQYNLPDSFGPISRHQNRNGIAGQFEHPSVQKSIAVDIEMIRTYDGILSQLEKSIIKLANNHDPVSYALLQTIHGVGKIIALIILYEIENIRRFASVQDFVSYSRLVKCAKESNGKKCGSGGSKIGNAHLKWAFSEAAIFFLKGNDPAKKYLDRLTRKHGKSKALSILAHKLGRAVYFMLKNKEAFDQNKLLNL

SEQ ID NO: 471583 - protein, 343 aa, unidentified
MQTVTTIGLDIAKSVFQVHGVDAEGNVLIRRKLKRRSVLAFFQKLSPCLVGIEACATSHHWSRQLKRLGHTVRLMPPAYVKPYVKRQKNDAADAEAICEAVTRANMRFVETKTPEQQSCLMLHRTRQLFIRQQTSVINAIRAHMAEFGIVAPVGRKGVEQLLAIVTDASDRCVPEVARACLIALAAQLRMLKAQILEFDRRIMAWHRSNETSRRLDAVPGIGPALATALVASVADPKAFRSGRNFSAWIGLVPKQHSSGGKDRLGNITKQGDRYLRSLFTAGALAVIRYAKINGTQHRPWLTALLARRPTKVAAIALANKIARMAWAMMAKGERYKEPVALAA

SEQ ID NO: 471584 - protein, 458 aa, unidentified
MRKKGKRTKGIEEAHPFAGMSKVNANAAGVDIGAIEIVACVAGDESTQIVKAFGNYTVDLQSIGKWLHEHQIKTVAMESTGVYWIPLFEELERQGFECLLISSRSLRRVPGRKSDIEDAQWIQTLHNYGLLESSFRPQADLVALRTMLRHRSQLLEHRAPHIQHMQKALLQMNVQLSQALSDVTGETGRAIIRAIVSGERNPQLLAAFRDPNCKKSEGEIGKALTGTWRAEHLFVLKQSLELYDFYTQQIEVCDAEIDRMYALTRPDWEAGELPPIPQKKRNSHSKNAPENAREIRQHLKRINGVDLSLVDGFGVSLAQTVTMEVGTDVGDKFPTEKNFCSWLGLAPKHEISGGTVLKNKTLKTKNRAGQAFRMAAHSVKKADCVFGALYRRLRSRQGPAQATVSTAHAIARVVYRMLKYQVEYETLSVNEYEKKYEEQQVKYMKKKAAKLGFQLVPA

SEQ ID NO: 471585 - protein, 426 aa, unidentified
MRFIGLDVHKDFCEVAVVEGDACWSGPRVRSTPEDLEVFAQSLGPKDQVVLEATGGALAIARILEPHVGRVLMANPMAVRAIATAKAKTDRLDARTLAKLLAAGFVPGVWISDERTRLLRRLVSRHAHLVRQRTRAKNEVHAVLQRTLKGRPPVSDLFGKRGRAWLGAQDLPADERQTVEASLRHIDFLDGELRLVDRTMAIQVLSWPEVRWIMTIPGMGAVAAAGVMAAMGDVRRFPTSRHLVGYLGLDARVRQSGSGPARHGRISKQGSAEARHLLVEAAWAAMRTPGPLRAFGERIRARRGANIATVAVARKLAVLCWHVLTREEDYAFGRPSLVREKIRRLELAAGAPNRNGYRNPVRVFATPAQRRLEREVGDQAEKAYRRFVKDFRSSGKKGAGATTGARISAARKGQAARQEQAPDPAL

SEQ ID NO: 471586 - protein, 509 aa, unidentified
MVPIHIQILNVFAPHESPIPFGIPLRMKIRLDSVRRPVRVTDRLWFRACEPDHESDRGASLFRIMLPPFGESTRGNLTTHTGAWLGTADTNTSTSNLEKSMQVMHARCAGLDVHKKTVVPCVMISLPDGNVEKHIATFGTMTPDILAMSDWLKGHGVTHVAMESTGVYWRPIYQLLEGQFTLLVANAQHIHRMPGRKTDINDAEWLGDLLRHGLIAPSFVPAQPQRELRELTRHRSNVTARRAQCINEVHRTLEGTNIKLSSVATDITGVSATDMLQHLLAGQTDPDFLAELARGVLRRKIPQLRKALQGVVHPHQQLILSQLLADIEACDEQVQALNTEIASRLVKEQEVIERLDEIPGVNRKVAEVIVAELGTDMKRFGTARRAASWSGMCPANRQSGGRRYAARSRFGNKHLKSALTEAGRAAGRSKDTYLGAQYRRLTTRRGGKRAALAVGHSILTISYHLMDRGTRFEELGADYFDRRNPERVKDRLVARLEKLGYQVSLAPVA

SEQ ID NO: 471587 - protein, 351 aa, unidentified
MNNATARKRTQITIGLDLGDRRHTYYVLDGAGKMAREGSLGNTREQLATMARSYPDATVVMEAGTHSPWVSRFLQELGLRVIVANPRKTRAIYQNERKSDRHDAMMLARLARMDPTLLHPVEHGSQEAQQDMLQLKLRDSLVRARVALINALRFTLKSLGYPVSNPSSERFPKLVLSEIPESIGEMIAHNVAAIAELTQRIKALDVSISRLAAERYPETIYLQQVSGVGPITSLYFVLKVGTPGRFQRTRDIGAFLGLCPRRDQSGETDKELRISKCGDQYLRGLLVNAAQYILGPFGTDSALREHGLRLAQEGTARAKKRAVVAVARKLAVLLLTLWKSREPYESFPTMA

SEQ ID NO: 471588 - protein, 355 aa, unidentified
MNSEKYIGLDVHQATISVAVLDSAGKLVMESILETKAATILEFFAGLRGTLSVTFEEGTWAAWLYDLLKPHVAKLVVCNPRKNALLKDGNKSDRIDAHKLAELLYLNKLSSVYHGETGVRMLRELARSYLTIVKDLTRVMCRLKAVYRSWAIPCAGRDVYYTRHRAEWLGKIKEAGVRRRAERLYQQLDMLQYLRQQARRELLAESRKHAITVKLRQIPSLGPIRSALAVALIQTPHRFRTKRQLWAYSGLALETRTSAEYCYVKGGLRRSKKQISIRGLNKDHNHDLKGLFKGAATRASVLPGPFQDFYQRSLAKGIKPTMARLTLARKIAAITLTLWKKGENFDADKLKSQAA

SEQ ID NO: 471589 - protein, 341 aa, unidentified
MENTDQNQPYSWILGIDVSKESIDACLVRQADGQLFESKFHNNLSGFRHLKAWCKQMQCECDHHTLCCMEHTGLYTRLLVHYLISREVAVWLESSLQIKRSQGLIRGKSDKIDAQRIARYAHLYQSKAQIMQINVLTLEKLKDLQANRRRLMKALQTIRTSAEELKQFDASNAKVIDKVNREAIRGLEKSLDKVDEQILTFIRNDESLKQKYDLMLSVKGVGKVLAALLLVYTHGFNRLADSRKLACYSGVAPFVYESGTSIRGKTGVSKFANGELKRTLHMAAISSVQHNPELHAYYKRKVEEGKNKMSVINAVRNKLLHRIVAVVKRGTPYELQLKKSL

SEQ ID NO: 471590 - protein, 386 aa, unidentified
MGLERTSVGLDVHARSVSAAAIDGTTGELIRQRLVPDQRVVIDWVRGLPGPAAVTYEAGPTGFGLARALAGAGIRCEVAAPSKIVRPSGDRVKTDARDAVLLARLLRLDEIVAVRVPTVAQEAARDLVRAREDTRGDLMRVRHRISKLLLRHGHVYYGGTAGTGRHEQWLTQIRFDGPERAGTRAAYDADREALTLAVLRRRRLDEQIDQLAADSEFTAITRRLCCLRGISTLTGFALAVEIGDWDRFTGASIGAYLGLVPGEHSSGGSRHQQGITKTGNAHVRRLLVEAAWHHRPIYRIGATMRARWAQAPAAAQARGHAGNQRLHARWTQLSTRKKTHTVTCVAIARELAGWCWSLATLPDTATPDTATPDTATPDTATPDTAT

SEQ ID NO: 471591 - protein, 344 aa, unidentified
MVTIGIDTHKATLAASAVDQTGREVAARTFPNDGPGHAGLVRWAEAQGPERRFGIEGSGSYGAVLARLLVSAGEVVVEVPAILTERERRHLRRAGKSDPGDALAIARVALREPGLGPVPMPGIAEDLKLLVDAWDQRLAERTRIANRLHAQLVVLAPGYKRTIPHLGAARHLAAVADLLDGQGGVRAELARAELTRLRELDAECVALEGRIRALVRLSGSSLPTIQGVASITAAKILGETGDPRRLRSSPAFAAMSGTAPIPASSGQTSRHRLNRGGNRQLNRALHTIALTQVRTDPRAMAYMTRRRAEGKSWLEALRCLKRHLADVVLRTMLADAQAGPVLRA

SEQ ID NO: 471592 - protein, 411 aa, unidentified
MSYAWYVGIDWGTALHQVTVLDPERRVVNEQKVAHRGEALAELVTALATQCAGDPSRVAVAIEVPRGTVVETLVEHGFHVFAINPKQLDRFRDRFTVAGAKDDRRDAFVLATSLATDPAAFRRVHLDDPLVIRLRELSRLEEELQHEFTRLTNRLRDQLHRIYPQVLALSPAVDEPWIWALLDLAPTPAAAAQVTRPAVSDLLRRHRIRRVTAEGVLATLQTPPLWVAPGTLEAVSEHIESLLPRVRLVHDQRARTLRRLEQVLESMAADQPGQPGEQRDVTILRSLPGVGRQVAATLLAEAAPLLAQRDYHALRTQGGIAPVTRQSGKRAYVDMRYGCNQRLRLALYHWGRVSVQVDDHSRQHYDRLRQRGHSHGRALRGVVDRLLAVLMAMLTHQTPYDPTRRHAASPA

SEQ ID NO: 471593 - protein, 349 aa, unidentified
MTEQRRSYVGECVYVGVDVHKETYTVTCVCHKQIVKTATVQADPAGLAASLPRWFPGATLYSVYEAGFSAFVLHRVLTKAGISNIVVNPASIAVAANDKVKTDRRDSKKLAIDLADGRLRGIYVPTEAEELARLLPRTRAQIVEHRATIARQIKAKLHQFGLIAPSSRRMISHRYLREMATWSLPPELSVSLTLLAEQWRFATRQLIEMRRLLREQAQAQQEIEQVYRSVPGIGEVAARTLATELGDMTRFANERALFSYTGLTPSEYSSGASVRRGHMSRQGSSRVRHLLVEIAWRALPRDAVLQEIFDRIATTRGKKRAIVAIARRLAGRMRACFRQGTTYAVGTYA

SEQ ID NO: 471594 - protein, 341 aa, unidentified
MKRYFVGLDVSKAETAVCLRDDRGGIVTSFKKPTDPDVLARALSAEIEHIVCVVLETGRMANWLYDELSQRGLPMVCIDARRAHAVLSQMHNKTDENDAAMLSELARTGFYKKIEVKSRLAQERRALLRAREVAIKMRMNTENTIRGLLASFGIRLPKHLQTYEQRVRKVLENQIVLAGVIEPLLKLRTEALRQAAILTKEMTRHSRNDEACRRLMTIPGVGAVSAVTFVATIDTPERFKRSRTVGAYIGLTSRRYQSGDIDFGGRISKRGDRMLRTVLYEAANSLLCRVKSGPGQPLKDWAMALKTRTSHKKAVVALARKLSVIMHAIWKDGTEFEAKEA

SEQ ID NO: 471595 - protein, 384 aa, unidentified
MRFFTQLHRFYCGVDLHTKAMHVCIQDQDGNVLVDRNIATDARTFLDLIAPYRDGLVVSVECTFSWYWLADLCQAHQIPFVLGHALYMRLIHGAKGKNDRIDADKITRLLRGGNFPLAYAYPKGMRETRDLLRRRMYLVRQRASLLVHVKIVNSQYNLPSLPRTLLGEGKRDDLAERFADASVRQNIAVDLRLIDYLSGLIHQMEEYLIRTVKVEDPETYLRLQSIPGVGRILGLVLLYEIHDWRRFDDVGQFLSYARLVRCAHESAGKRVGSGNPKIGNAHLKWAIAEAACLFLACSERGRKWKQRHIQKHGRGKAMSVLAAKLGRTVYHMLRKREVFEEDRFWNENRRADKPATRARTTVAASASTGSSSLLPAKGGRRARN

SEQ ID NO: 471596 - protein, 463 aa, unidentified
MTPEGPCLEGTSMPQSILAVGVDPAKRLHRAVAVLFPDEVVLDVELPNAFDAVANLDLRLCELANQHGADLVYGLEDHRRYGRLFCQVLTERGRDVRVVNPLWTNRQRAFYGQDKDDAIDGRSIAAVVLRRHHQLPLASDFGEVAQAIREAERSLQDLGKVRTQLGNRLHLQLSDTYTAAYEEYFGKLKSPLALRFFRRFPLPQDLVGHNVEMLASLLLDLAGGKVGPHKGGNRLIAMRSKAQAILETSGAMRASPRTLALELKAELIRQLCDELLANHDRIIRLERMLREQLLPATKQTITTIIGISTILAATIIGETGSITRFRSPAAFAVYNGTAPARNSTGGRDRHKARRDCNHRLKRAFYLAARAAVLHDPIAKAYHQSCKSRGLSYVEALKRVARRMSDVVYALLKSGKAYDRSIIEHAIERRREQAAPAARSHAKQSLVHSGPRKSNSPLSQRQVM

SEQ ID NO: 471597 - protein, 374 aa, unidentified
MDSSRDSRGIDVPESPYAPEGSGEEESEMHSTTIAVDLAKSVFEVAVSEQPGKVAERHRLSRGQFSRFLAERAPATVVMEACGTAHFWGREADARGHRVVLLPPHAVRPYVLRNKTDGTDTKGLLEAVRNEEIRPVPVKSVDQHVLAALHRMRSAWMATRTARLNTVRGLLRELGFPIPVGARQVVPQVWALVSDADSGVPDALRPVLVEAAREIGELETRIRQVERSLETMSRGSEVLGRLRTIPGVGLLTATALVAFVGDVQRFPSGRHFASYLGLTPRESSSGLRRRLGAISKRGDPYLRMLLIHGARSVLLHAKKATGERDRLRTWALDRERVRGHNKAAVALANKLARIVWAVWRRERDFGASIAKGTQ

SEQ ID NO: 471598 - protein, 312 aa, unidentified
MSDPVYVGLDVSKHHLDLAFEPVGDARRLPHTEEGVTALVAQLHAIPPALIVLEATGGYETHVATALALAGLPVAVVNPRQVRDFARALGRLAKTDAIDAQVLALFAARVRPEPRPLPDQAHQALAALVTRRRQLVEMLTAEKLRVPLAQGRIRHDLQAHIQWLEQRIHDTDHDLRAALKASPLWRVTDRLLQSVPGIGPTTAAVLIAELPELGRLTRQQLAALVGVAPLNHDSGHHRGLRRIWGGRADVRRALYMATLVATRYNPVIRAFYRHLLAAGKPKRVALVAGMRKLLTILNAMIKSQQPWAPAHP

SEQ ID NO: 471599 - protein, 344 aa, unidentified
MQIKSVGIDLGKTTFHVVVLGEAGKVLVRKKFNQRQLLTYTANLPTSLIGLEACSGAHFLGRALRKQGHDVRLIAAQFVKPFVKSNKNDFVDAEAIAEAVERKNMRFVPIKTDDQLDLQAIHRVRDRLISRRTAVINQLRAFLLERGLTFARTPAKLRNALPDILENPEVDLTTQMRHLIGLLWTEWKTVEDQIEGLSHELERISAGDAGCTRLRQIPGIGPIVATAIVAAIGNGAAFRKGRDFAAWLGVVPRQYSTGGKTRLLGISKRGNVYLRKILIHGARAAVLRMKRDRAPIGAWLDALDARAPKNVVAVAMANKLARIAWAVLSSGEDYKPASNLVKAS

SEQ ID NO: 471600 - protein, 338 aa, unidentified
MKLYGGMDLHSTNVVTQLIDEHDRVVYRNKQDCDLVDILRGLEPFQDSIEGLAVESTYNWYWLVDGLMEAGYRVHLVNTAAVQQYEGLKYTDDDTDAFWLAHLLRLGVLPTGTICPKESRAVRDLLRKRSQLVRQRTAHIVSIENLYARNTGTRLNSNAVKRLTQEQVQQHFADPNVALAVESNRVILMALSEQIEVLENAILAQAELDPRYRYLLSISGIGQVLALTIMLETGAIERFRQVGNFASYCRCVGSEKLSNGKKKGRGNTKNGNKYLAWAFIEAANFAIRYNDRAKRFYQRKAAKCNRVVALKAVAHKLARASYFVMRDHVPFDDTKCFV

SEQ ID NO: 471601 - protein, 345 aa, unidentified
MVTLGADSHKATHTLVAIDETGLNLGHGTFAADTDGHINALTWASQWTERRWAIEDCRHVSRRLERDLLGAGEIVLRVPPKLMAGARRSARTRGKSDPIDALAIARAALREPGLPAAPLDAPSRELRLLVDHREDLVGERTRIQNRLRWHIHELNPGAAAVRDISRKKGLDLLEAQLAGRPGLVADLAREQLASIRALTDRINQLEREIIARTAELAPSLLTLPGCASLTAAKLLGQVGGASRFRSRAAFAMHNGTAPIPVWSGRADRFRLNRGGNRQVNTALHRIALTQARLDGAGKDYLAKRVSLGNTKREAIRALRRRISDEVYRRMCLDENAISGVHREAA

SEQ ID NO: 471602 - protein, 349 aa, unidentified
MRFYNGRHRHWCGIDLHARTMYVCILDAEGQVLVHRNLRSSPEEFLALVEPYRDGLVVAVECIFTWYWLADLCAREGIAFVLGHALFMKAIHGGKAKNDRIDALKIATLLRGGMLPQAYAYPAGMRATRDLLRRRLHLVRKRGQLLAHIQMTSHQYNLDPLGKRIAYPANRVGVAVHFPDPAVRKSIAVDLALLERYDELLTDLELDLVRRAKQHDPQAFQRLRSIPGVGKVLALTILYEIHDVRRFDRVQEFASYARLVRCAKESGGKKLGTSGAKMGNVHLKWAFSEAAVLFVRHSAEGKKLLARLEKRFGKGKALSILAHKLGRAAYFMLARGTAFDAKRFASTMT

SEQ ID NO: 471603 - protein, 394 aa, unidentified
MKLVGIDVGKNSHHFCVMDKETGEFNVTPSSFSNNKEGFDFLINSLKTYSKKSILIGMEDTGHYHVALLKFLLSNGYTVALINPKTTDLTRKMEGGITKNDKLDTITICDVLDTPERKKQYRITKVDRFDLYEQRQLTRHHHNLKEELNVYCNRLQKSIDLVFPEFNTLFSSKYSIVYMNLLKTFGSAEAIASTDIRTIRKCFEIKGRGNRISLTPEKLKECAKNSIGISSEVETIQIRHLVSQITLIKEQIAEIDKKIEEFSITNNSPILSIPGISHFSGTSILAELGDIGNYSKPSQIIKFAGVAPYHYESSQYNAQHTGITKKGSKYLRKTLYQIILTVINNNPVFKKYYLLKISQGKGHRCAQGHCIRKLLRIIYHLLETGQSFDPALLR

SEQ ID NO: 471604 - protein, 341 aa, unidentified
MKVSTLGIDLAKNVFQLHGVDHEGHTILRKKLTRAKFVQFVIQLEPCLIGMEACSSSHYFARLFTRYGHEVKLIPPQYVKPYVKTNKTDAADAEAICEAVTRPNMRFVQIKTEEPQAVLALHTERGILIRERIACANSLRATLAEFGITIAAGQSHLTRELPAILEDGENGLSPFVRTSIYRQSKHIRELEEQVKQVEEALASWYRTQEACQRMAKIPGVGMLTATYVVAAVGNARQFSTAKQFASWLGLTPKEHSSGGKQQLGGISKRGDGYFRYLLVHGARALTARVNRNGAVEENSWLQGLLERKHYNVAVVAMAAKTARIMWSMLSHNTEYQPRQLA

SEQ ID NO: 471605 - protein, 433 aa, unidentified
MEPEFAAFVAIDWADQKHAWALEVNTSSDRESGNIDHTPESVEIWAAELGLRFAGRPIAVALEQSRGPLVFMLTKYEHLVIFPIHPSTLANYRKSFRPSGAKDDPNDAGLLLDILVRHRDKLRRLDPDTPETRTLQFMVEERRKLVHEKTRCSNRITAHLKLYFPQAIGWFDEIGSHIVADFLERWPNSERLQKARPATIERFFIEHNSRNAERIAERLEQIRKIVPATKDTAVLRSCSAAVIAWAGLLRQLLNAIKAYDEQIDALARQHQDYALLKSFPGAGPALTPRLIAALGSQRDRYQTAHEIQCYSGIAPVVASSGKQRWVHWRWSCPKFLRQTFHEWALHSVAYSEWARRYYDEQRAKGKRRNTVIRALAFKWIRILFRCWKDHKPYNEQAYQQALALRRQKQTASQLVEVKWKNVAGFMKITAPGA

SEQ ID NO: 471606 - protein, 429 aa, unidentified
MQNESTPGARGPVFCGVDTHADSHWLCVLDWRGRKVLSRRFPADAAGYEALAGAIAAAGEPGCIAMEGTSSYGAGLTRHLASLGVPVREALSPARMQRRRPGQGKCDESDAERAARAAMSGSRLGTPKSQDGWVDGVRCMLAARSGAVKARTSAINTARSLLTTAPEGLRSRFRGMGGPRLMEELPSVRAEGALGAALGALADLWAAARDAALDMERAIEASLEENCPALLAMYGCGPVSAAKLAVAAGDNPGRLRSEASFAAICGACPIPASSGKTVRHRLNRGGDRQANSALHEIARQRVMRDPETAEYAERARARGKSDREVMRCLKRYVAREAYRALMRPHEVRRPEDASGLVAARRAARVSQVRAASILGTSEKYISMLERGQRELKPIRRAYEAWVEAGLPLDWDRQAFEAERKMDSKKHLAK

SEQ ID NO: 471607 - protein, 326 aa, unidentified
MPHDSSSSDPSLPTVVGIDVAKATLDCYLDPSGQRLTLANDDNGIAQLLTHLRGLAVQLVLIEATGRLHRQVAAELLQAEIPVALVNPQRSREYARSTGRLEKTDRVDAKVLAEFARGVKHQLLQKRSEKQVELDDLIARRRALVQMRVAEKNRLAEQQPKLAKAQSKQLLRLIDQQIQDLDRAVAKLIDGDDDWKRKSDIITSIPGVSTGTANQILADLPELGEMNRQRIAKLAGVAPLANDSGPRRGQRTIQGGRQSVRNALYMAAFNAMRYCERFKRFAKRLTDAGKPFKVVVTAAMRKLLITLNQMVKTDRVYQPLLLGSFS

SEQ ID NO: 471608 - protein, 344 aa, unidentified
MKSYVGLDVSQKTTMICVVDEEGNCLWEGACDSHPLEMAQVLKAHAPNLQQVGLETGPLAVWHWHGLKDLGLPIVCLHARHAHAAIQMQVNKTDRNDARALAQIVRTGWYRPVAVKSMETHRIRLMLTARARVVSMRVTLYAQIRGLVKTFGHVMPPGRGSQFEQLVRDVMEADPVLAGTLGPLLELWCDLSRQLRKYDRDLVRTARRLEVCRRLMTAPGVGTLTALAFVTAIENPHRFRRSQDVGAYLGLTPRRYASGEVDRSGHISKCGDRMTRSLLFEAANVLITRSHTDSALHAWARSLRQRIGAKKAKVALARRLAVTLHRMWVDGTQFDGQRGLPAAA

SEQ ID NO: 471609 - protein, 328 aa, unidentified
MNNEKLCCGIDVSQNTLDVAYQNNLGEIFHIKVGNNNKGFETILEHTGTFYHFVMEATGVYYVRLAFFLHGKNCTISVVNALKIKRYIQMQLEKNKTDKKDAQWICRYAIDQRPALWEMPDSTYFESKQMYNTIRQYSEEIKRFNNQLHSLRILPVQNKETIKSLEKMKLQFEKEIKILEVKLEVLLMKWKPEQVKNISSIKAIGRRATAMLIIYTQGFRYTENHRQLISFAGLSPKEYGSGTSIKGRPKISRKGGKPIRDVLYMCAMNAIKTNTACKALYRRLRENRKSGKLALMAVCNKLLKQVFAVVKNNTLYQPNYCSARPISN

SEQ ID NO: 471610 - protein, 349 aa, unidentified
MLHVGLDLSRRRVDVCLISDQGELVYHFAAPADRDGLYGFARRVAVYDEPVRGVVESMNGAGFVRDELVLRGWEVLVADAQKVEGLAPLACETDRIDSRVLAELSFRDLVPAIWLPTPELRKERERSRWRLHLVKHRSILKNRVRLTLIAFGHQVPMADLFGIAGRQLLRELDIPEPWRGHVDASVVLIDDLELRISEIESELRRTGADHRYLPLLMTAPGIGWITGFTIAAEIGDIGRFSSPVKLTGYTGLCPRVKQSGDSDQRGPVSKHGPRYLRWGLMEAAIAASSHPLYKERYQRTKRRLGRQRGAKVAQIELARKLTEAVWYMLTRDQSFKPFAPAGAVFRLTA

SEQ ID NO: 471611 - protein, 412 aa, unidentified
MLKIVYPICCGMDVHKSFVVACIATTNDHGVTNYKSKRFSTFTGDLRRCADWLSENNCKDVCMESTGKYWIPIYNILEHTCNIVLAHPKYVKAIRGKKTDKRDAKWIADIFKHDLVSGSFIPPADIRQLRDLVRYHWKLTNFNVGEKNRAQNCLTVSNIKLDDVFSDVFGKAASAITTRLLESNEPFDVKPYLTKNIKKPIEQIQAAVDGEMCAEQAEKLRIIRSHMDSLELCKLNLESLILSTAEKYIPQLNLVMTAPGIQSFAAIGIISEIGVDMSVFPTSKHLCSWAGLTPQNNESAGKKKTTRISRAGAYIKPLLVQCALCAIRTKQFPEVRNRYLALKKRRGHKKAIIAIARMLLTAIYNILKWNEVYNSELYRKADRPPAHREVSVEEAVFIPQRQGYLVTAPAVT

SEQ ID NO: 471612 - protein, 397 aa, unidentified
MYIVGIDIAKRKHEAAVIDGEGTVIIKPFSFTNNCSGYNRLLAMLAKAKLPLDEVSFAMEATGHYWLSLFTRLQKEGFRVQVINPVQTNSIRNFYIRQAKTDPRDALLIAEVIRFGHFSESTLHPENIYELRELCRGRHAIVSMQADVKRKVVALLDQVFPEYETAFTNLFGDTSMAILQTCPTPKELSEIPLEELCHLIEVSSRKRFRMAKAQELQALARNSFGFAMAGDVFSTMIRLYVKHLDFLKQQVREMDRKIAEIMETLDTPITTITGIGPTLGAYILSEIGDINRFSSAAKLAAYAGIDPTMRQSGEYNGVRNRMSKRGSPYLRHAIWLATSSAVLHDPALKFYFQKKRDEGKPYMASVGHACRKMVSIIYAVMRGNKAYTPYIPNEISA

SEQ ID NO: 471613 - protein, 342 aa, unidentified
MKFYCGIDLSARDCHVCVIDEQLKVMVQQKLRNELPKICRLLGPYKANLKIVVESTFNWYWLIDGLQAAGFEVVLAHTLGLYLITGAKVKTDRRDAYALAKLLLVGVVPAAYIYPVETRPVRDLLRRRLHLVQVRAGEYGSLRRLLLRQGILSSKQQEIKTATETELEQWFAHPLVRLHASQELQRIELYSQQIAELEKTILLLAKTEQSYDLLLKLPGVGQTIALTILYEVGELTRFANVKVFSSYCRVVPGIAQSGNVSRRGRASKQGNHYLKAAFSQAAVHAVRCYPKVRRYYERQLKRHQGRGRQMICYNIIAHKLAQAAFHVLKEQTEYREELLFGR

SEQ ID NO: 471614 - protein, 324 aa, unidentified
MNKNKQFCGIDISKDVFDVVDHNDNHHQYPNDQSGFKDFRKILTKQTHCVMEVTGSYYQGLATWLHSKSIDVSVVNPLSVKRFIQMRLKTSKTDKADARMIRLYSEVENPDLWQPPSEYIIEANELHRLIALLLRQRTALKNKLHGLKAKGITKSQVVTSVRRQIRSLDQEVSTLELKLEEVVKAHQADLITRLCSIPGIGKRTAIYLIVLTQGFEKFENSRQLISYFGLDPTIHESGSSVRGKSRISKTGNNNIRNLLFMCSFTACQHNKSCSEIYQRITAKGKSKKLALIAVANKLLKQSLAIAKSGLYYDENFRSVNLNNV

SEQ ID NO: 471615 - protein, 319 aa, unidentified
MNKEQTYVGVDISKENLDLAIIDSNQQWRFGNSPAGIKLAIKTIQAVKPALVIFEATGGLEVPFWAALSETGIDAASINPRQIRDFARAKGRLAKTDRIDAQVIAQYGRAMQPRSQPFPETEGLKEVMARRHQLVEMISAEKSRLKTARKADVKEDIQEHITWMEARLSKVEKELRKAIRASPAWREKDELLQSTPGVGPTLSATLLTQLPELGTLNRHQVAALAGVAPLNRDSGMMRGKRTVWGGRGRVRGALYMGTLVATRYNPLVKAFYQRLCAGGKPKKVALVACMRKLLAILNSIIKHHTPWRYRTPVLIGPCH

SEQ ID NO: 471616 - protein, 476 aa, unidentified
MRNTASALPDRELLPILAHETLYLGVDIGKRAHVAGFIASTLLTRYQRFEHCPALTFDNSREGFRALIDRIKTYVPLTQVYAVVEVTGHYHRALLQYLQELDIPVYIIHVQKRQEGLLKTDKRDALGLANLLYNQLEKGIQVGDSLQAVRKLIPPTPAAAGLRGMVQHRYELIAESTRRKNKLTAICDELFPELTHLLRNPNLPTALALRSRFPTPAALAKASFEDLREARGRTCSVSDAKLVDLQRLAKESIGTKDPARLRSLVVEQQQLIEELALIGQHIAQLETEMVKIVESSREGKILLSIPGIGPLAAATLIALIGTIANFERAAQLKSYVGWVPKVAQSGSTLDWTRLSPRGVRQMKQTMYLVVWRAIQWDAEWKQMYERLISSKCRYDERTRRLIGREKVIGRLAGQMTSVIYALLKQDLELLAHLAPGAEPPEPTLYDPEIHRQHRMGQYQPRGTAGKPPQLLQLPSA

SEQ ID NO: 471617 - protein, 343 aa, unidentified
MNACLYVGLDVHKKSISWCAKRQDGKVFGEGSVKATRQCLTEWVSTFNEPWIGALEATIFSGWIYDFLKPHAEELKVAHPLMLKAIAASKKKNDRIDASKIADCLRADLLPECYMAPSEIREMRRELRFRNLLVGQAVKMKNKISGVLMEVGADYSKQKLHGKKYFNELLGSLDSAVAPESVKRMLRVSRGHLDLFTTGQKSLIRSLQADARLHERVKRLQTIPGVGEVLALTWALEVGEPGRFAALANAQSYCGLTSAQSESGGVSKRMPISKQRNKHLQKMLIEAAKIAPQWNSQLRALHERELKKGNRNRATLAVARKLVAYLLSVDKSGKDFEVREMTD

SEQ ID NO: 471618 - protein, 455 aa, unidentified
MNRETKLVSPEHLPVLNLNAAGLDIGSEEIWAAVPADRAPQPVRKFGTFTPDLHALADWLQACGIETVVMESTGVYWIPAFEILEARGFQVQGVNARHVKNVSGRKTDEKDCQWLQRLHTYGLLSGSFRPDGEMCAVRAYLRHRAALLEHRAAHIQHMQKALLQMNVQLTQVLSDITGETGLAIIRKIVAGHRDPVALAQLRDPRCQHSTDEIAKALTGNYRPEHVFALKQALALYDFYTTQVCECDRELEQQFSVLKPRHDNPALPPLDESDKRDSHSKNAPTYDARTLLYRVVGVDLCAITGLNEITVQQALTETGTDMSKWRTDKHFCAWLRIAPANDISGGRVLRSRTLKTHNRATQAFRLAAQAASRSTHSAYGVYYRRMRARLGPEKAMTALAHKIARTYYHMLKHRVPFREVSAEEYEKKARDRELIHLRKKAARLGMALVELPVAAA

SEQ ID NO: 471619 - protein, 348 aa, unidentified
MGEVSTIGLDIAKNLFQIHGVDADGTVVIRKRIGRARVLEFFADLPPCRVGMEACATAHQWARELRRLGHDARLMPPTYVKAYVKRGKNDAADAAAICEAVTRPSMRFVPIKDVEQQSVLMLHRVRDLLIRQRTQLINALRAHLAELGLVAAKGREGLHQLVAVVTECGNEQLPSNARFACQAIVTQLHAVQIEISGLDKRITQTHRANADSKRLDTIPGFGVILSTAVAATMADPKAFRTGRDFAAWIGLVPRQNSTGGKERLGSISKQGDRYLRRLLVVGATSVINCARARPHKYPWVIELLGRRPTKVVAVALANKMARIAWAVLAKGQPYRAPTRSSNATVLAA

SEQ ID NO: 471620 - protein, 371 aa, unidentified
MKRLPDPARKINAWVLSLDLHKRITVWVLLDRRGRFVDEGQIPSRPRDLLELFKTRIGRKKAHVAMEAGGNVHWAFDTSLEYFQDPTRVHVAHPKHVRAIANSTQKNDRNDAWWLAYLTYEQRLPEVYIPQERHRELRLATRERTAFVQERTRTIKRIHAILRQKGHALPQGALQSGAENPRVQDALSKLDGVVRTAVEQLLEHLVILSRRIGTWDAEIKRLTGDWEDVCLLEKSMPGVGRTLAAVIVAESGPIQRFVSAKAYGRYSGLVPSERSSAGQTRFGSISREGNAQLRWALTQAVSACRRTKHGLGVAVRQWVEVRIQRLGSTKKAIVAAARKLAEAIWRLFELGEVFDLERIFGRVPLEARVRA

SEQ ID NO: 471621 - protein, 347 aa, unidentified
MRFYTRQHRYYCGVDLHARSMYVCVLDQEGNVLVSRNIAAAPEAFVELIAPCREDCAVAAECMFTWYWLADLCAREGLMFVLGHALYMRAIHGGKAKNDRIDAHKIAGLLRGGMLPQAYVYPQAMRATRDLMRRRNYLMRRRAELLSHITNTNHQYNLPALGVRPARPAERSGLLEHFAEPQVRRSIAADLSLIEHYDRELPALERYLESNAQAHDPVALAIVRTIHGMGQVLGLSILYEIQDIGRFERVQQFLSYGRLVKPTKESGGKILGHSGRKIGNAHLKWAFSEAAVCFLRANKRAQALRTRLMAKHGKAKSLAIIAAKLARAVYFMLKRGEPFDAGRFFAH

SEQ ID NO: 471622 - protein, 315 aa, unidentified
MAMSVSASRPIVGVDVAKNELVIYQAEPDLLETLPNDKPAIRKWLKGLPGPVDVAIESTNVYHLEFADLAHEAGCTIYMVGGYELSHYRKGVKVRAKTDALDARLLARYLKNEHEELRPWTPPSPLYQRLLSLFRRRAALVQARVGLVQSWANEPLLKTAFAEQVASMQRLEVLVEKMINDQLKEAGLLAQLRRCMKVEGIGFLTGARLIAAFQRGDFRSADAFIAFLGMDLRVSQSGQKDGRRSLTKRGDPEVRRLLHNAAMSASRTAAWKGFYEEQRAKGFSTTQALVILARKLARIVFALLKGQSEYEPKAG

SEQ ID NO: 471623 - protein, 339 aa, unidentified
MRLYAGIDLHSNNSVMVILDEQDRIVYERRLPNELPFILAQLAPYKESVEAIAVESTFNWYWLVDGLMEAGYAVKLVNTAAVKTYDGLKYTADEHDARHLAHLLRLGLLPTGHIYPKEERAVRDLLRKRAQLVRVRTAQILSIQNLVSRNSGHGISTDDIRELDEEMIGQVCGGDGVRVLAIQSNLAVLRVLDEQIKKLERVVLAKAKLKPAFKQLLSVDGIGNILGMTIMYEVGAMERFAKVGQFASYARCVGSSRWSNGKKKGEGNRKNGNKYLAWAFVEAAHYGVRYNERIRRFYQRKKAKTNGIVAVKATAHKLARACYHVLKNQTPFMEERAFA

SEQ ID NO: 471624 - protein, 414 aa, unidentified
MDIVHTHCAGLDVHKKTVAASIIVPDEKNGLQKETRTFGTMTCDLLALSDWLMGYGVTHVAMESTGEYWKPVFNILENNFEVLLVNAQHIKAVPGHKTDVKDSEWIADLLRHGLLKASFIPPLGQRELRELTRYRSTFVRERATLVNRVQKVLESANIKLASVATDVMGVSGRAMLEAIVQGHSSPAEMAELAQKRMRQKRDLLAKALEGRVKPHHRFVLTELLCQIDSLDETIERFNKQIEEYCHPFEEAVVLLDTIPGVGREVAEIIVSEIGIDMSRFPSADALASWAGVAPGNNESAGKRRSGKTTKGNQALSVALNQAAHGASHTKDTYLSAQYRRLAARRGKKRAIMALMHSILVIAYHLIQRSEPYRDLGGDYFDKRRPEATAKHLVKRLEQLGYSVSLQQPAICPVA

SEQ ID NO: 471625 - protein, 317 aa, unidentified
MSKGTTICAGIDTGKRKLDVALEASRERLEVDNNVAGHCALTDWLRRHRVKRVGIEASGGYECPVVVELRRKGFVVVVFQPAQVRAYAKFHLRRAKNDKIDAGLIAMCTASVKTIHAPPDPRLAPFAEHLTMLDQISDDGARCKNRLESCRDPHSRQFWNEEIARLKKLHKTELKSLVSAIRQHRDLAERLDLIHSVDGIGLPTAVAILARMPEIGRISREQAAALAGVAPYDDDSGQLIGVRHIEGGRKRLRGALYCAALPASQRWNPQLIALYRRLRAAGKEHKRALIACARKLLIFANTVVARGTVWTARPNPA

SEQ ID NO: 471626 - protein, 416 aa, unidentified
MRVHRNCCGLDVHKETIAACLISESEDGTSSRQKRIFGTMTQQLRELAQWLAEAKVTAVAMEATGIYWVPVWNVLEPHGFELLLINPEHYKAVRGKKTDLKDGERIAELLQDGRLAGSYVPPVAIRVLRDLTRYRTKLVQYQSSIANRIQRLLEQCNVKLASVASDVLGVSGQAMLRALAAGETNPQRMADLAKKQLRKKIPALQVALEGCLLPHHRFLLADMLEELDHIGSKIARLEQAIEEQMRPYQKAVDAWMTVPGVKQRLAWNLVAEVGPTVDAFPSDADLVSWAGICPGNNETAGKRKSGTTRNGNRWARKALCEAAWAASKTKATYLQAQFRGLAAIRGSKRAIIAVASTILTIGYHMLREGTTYRELGGDYFDKRNLLRTTRRLVKRLEALGHRVILEPTQSPFQPSD

SEQ ID NO: 471627 - protein, 310 aa, unidentified
MDIIAVGIDVSKDRLDVAVHPGGEAFVVERNGAGLEQLTARLKQLAPTIVALEATGGFETIAAAAVGGAGLPIVVVNPAQVRAFAKALGQRAKTDPIDASVIAHFAAATRPEPRPLPDEATRFLSDLVTRRRQIVDMIGAERQREKRATSQHLRKSITRLIKALEKELVSVDTDIDDAVRSSPAWREAEDLLASVPGVGPIIARTLMAELPELGRLNRKQIAALAGLAPYTRQSGQWRGKSFIGGGRQAVRTVLFMGAMTARRHNPVLKAFFERLVANGKPKLVALIAVARKLLTILNVMIRTKTQWQPA

SEQ ID NO: 471628 - protein, 409 aa, unidentified
MSYFAGLDWGEVEHAVCVIDSGGQRVAGFTVPHTAAGLAELCARLVRIAAAVDLPIAIERPSGVVVDTLVEAGHTVFPVHPNALKACRPRYRAAGGKSDPGDAWILADVLRTDGHRLRPLRPISDPVRALRALVRTRDDLVAERVALANQLRALLESFWAGGARIFAEVDSAIALAFLERYPTPHSARALGPKRLATFLADQGYSGRRSAVELLERLRTAPSGLAGPAEQQAKGQLVRALVAVLHPLVQQIKKLTAAVEGTVPQLPEGQVVMSFPRAGKVNAAQILAELGDEPRRFPSEDQLAAEAGVAPVTYASGKSRGVGFRRACNKRLRRALTCFADNSRKASPWARDLYARARARGCDHPHAVRILARAWTRVLWRCWTDGETYQPTRHRAANRLLPQSLSTIGG

SEQ ID NO: 471629 - protein, 339 aa, unidentified
MKYTPVGVDIAKHLIQVHFINEHTGEVVDKQLRSQDFLMFFSNREPCLIGMEACGGSQHWARELTKLGHKVRLLQARFVKAFVMGNKNDVMDARAIWMAVQQPGKEIAVKTEEQQSILVLHHSRRQLVKFRTAQINALHGTFLEFGETIHKGRAAMDRELPAALERMRVKLPPYLISLLESQYNRLSELDSLIDDIEKQLISVARQSETCKRLMEIPGVGPLIATAAAATMGEASAFKSGREFAAYVGLVPKQTGSGGKVRLLGISKRGDTYLRTLFIHGARAATLLTKEPGPWITELKKRRPASVAIVAMANKLARTVWAIAAHDRMYDKNHVSIRPY

SEQ ID NO: 471630 - protein, 319 aa, unidentified
MAQNDLVVVGIDVAKDKVDACIRSLALRRTYPCTAKGRRELISWLRRHKAGKAVMEASGGYERGWAKTLRAASIEVRVVDPKRVRSFARSAGRLAKNDTIDAEMIAWFAETFDQAPSQAYDAAREKLAEMVNARQGLLDLQTTLQSRDEHSDVQEVHQMHARLLKKIIGEVVRLEAAIAALIKATKDFAELAEIIESVPGLGEITSAGLIAAMPELGQVSNRIAAALLGVAPYDDDSGKRRGERQIKGGRRRVRNLFYMACLGAATRHNPVLKAFYRRLIAKGKEPKVALVACMRKLIVILNTMIARRQKWDAGLYATG

SEQ ID NO: 471631 - protein, 474 aa, unidentified
MARTRKNPASPVPGGAGSEVTDEPVQVISRAAAIDVAKASGMVCMRLPHESRAGRRVQKVWEVTATFASVVELMDHLRCQGVERLVLESTSDYWRIWHYLAEAAGLEVWLVNARDVKHLPGRSKTDRLDSVWLCKLNERGMLRRSFVPPEPIRDLRALTRLRANLTHDRVRHQNRIEKILEDALLKISVVVSDLMGVSGRRFLQALIDGERSPAALAELGDYRLHAGKAELKEALTGRFRDIHAVEIRMLLELIDGLSAKITELDERIEAHLENVPGLGGACMSCGQRGPDGPCTGCGEPVLGVLERLDEITGIGRQAAQVIIAELGTDMTQFPTPGHAASWAKLTPRAIQSGGTSKTGRTGKGDPYLRGVTGAAVMTAAKTDTFLGASYRRKARRRGKKKAIVAGSRTIIEAAWRIIAGPGFRYIELGPDYHDHHDARRKTRDKIRQLEKLNPGMTVTLTPLAESGSGQAPAA

SEQ ID NO: 471632 - protein, 341 aa, unidentified
MKVNTISIDLAKNVFQLMGFTAKNKSAFNKRLNRVQLKHFMQMQPPCRVVMEACYSSHYWGRLFESMGHTVDLIPAQHVTPFVRGNKNDSNDTLAIFEASARPFIRFVPIKTQAQQETLILHRLRERLLSARTAASNQLRGLLADFGIVFPQGKAAFIEKIQALSVDGSLSVKIKWLVNDVYKEYKTLALRIKDIEKQLKTDIEASPLGKILLSIPGIGYLNASAFIASIGSGQAFSSAREFAVWLGITPKQFASGNKSVMGGISKRGDQYLRKLLIHGARAIITRAGKKQDALSLWITQLSARKSFNCTAVATAHKLARIMWTLLQKQCHYTPQTVKDVA

SEQ ID NO: 471633 - protein, 401 aa, unidentified
MNAVGIDISKGKSMVSIMRPFGEVVASPFEVSHTGSELDELAKSLKSLHGETKVIMECTGSYYYPVAYALHEAGLFVSTVHAKLIHDFGNNTIRKVKTDKADSIKIASYGLSHWMELPEYIPEEDVRRMLKAFSRQYTKYGKLKTMLKNNFIALTDETFPGVNELFSSPPRKSDGHEKWLDFAAHFWHCECICTVSPQDFALRYQKWCKRKGYYFSQEKADDVYISACGHLIGMPKNDMTKMLVKQAVSQINAISESIAVMAREMQRLAKMLPEYPVVSEFYGVGDILAPQLIAEIGDVYRYRNKGSLVCYAGLEAPPYQSGKFDSANRHISKRGSPHLRKALFQVMDAYIKHSPIDEPVYQFLDRKRSEGKHYYSYMTAGSAKFLRIYYARVKAYLDTLD

SEQ ID NO: 471634 - protein, 339 aa, unidentified
MDEISIVGLDLAKSVFQVHAVDADGAVVVRRSLRRSRMIDWFAKLPRCLVGMEACATAHYWARELTSLGHEVRLIPPAYAKAYVRRNKNDAADAAAICEAVSRPQMRFVTAKTEAQQAQAGLHRVRDLLVRQRTMLLNQLRGLMAEFGMVAPRGAWRVAALRTIVADPADRRLPDALREALAANVAVLTAIEGQIEDLDRRLLAEGRADATWRHLVTAPGYGPILASAFVALVVDPGAFRSGADFAASLGLVPRQDGTGGKIKLGPISKRGNGYLRRLLVNGAMAVLRTKRATDDPWLARLLATKPRKVVAVALANKMARIGWAIMMRQQDFRPRAAQA

SEQ ID NO: 471635 - protein, 409 aa, unidentified
MRIIGLDIHRAFAEAVAWEDGKLRRLGRVDMRRDLLDAFAAKLSPSDIVVIEATGNASSAAAVVAPHVKKVVIANPKQVRIIAYAKIKTDTIDAGVLAQLYASGFLPEVWIPDEPTQALRRQVTRRNQIVRQRSRLKNIIQSILHSHLIPSCPHADLCGAKGRTWLSEQVVPEDERLAIDRHLREFDRLGDDLEVIERDLARSTLEDEGVKRLMTIPGVDMTVALAMKAAIGDVSRFVEPQPLVSYLGLNPSVRQSGPGPAYHGRITKQGRGHARGMLVEAAWAAARAPGPLRAFFLRVRARRGQHVAAVATARKLAVVIWHLLMKGESYAWARPSLHAKKLRDVELKAGSKAVRGQKGAAHAYNIKSHREKERRWVEQAETAYARFVSGWNPRGPKRVRTGAANEKRL

SEQ ID NO: 471636 - protein, 404 aa, unidentified
MHYLGIDVSKVSHECVILDANGEAIGKPFTVQSSKDDFAKLVKKLSELNIPKSDLAAGLEATGNLWENIYGYLKEQGFKVVLLNPYQTSKFHQVSLKKAKTDAIDAVVIAGLLRSGCASGSYIPDDNIQSLRDIIRLKDGYLKDIKDYKRKAYSLLGLVFPEFLSLIKDPFNIVSTQILLTYQTASDFKKAKPKDLLKIARGHQGNTYDEAWAEKVIRAAQDSIYSGKASKARSLVLKSLVTNIKYLKEQIEMLENEIQELLKPQDTQSNSDVDNLLTIPGVGPKTVAVFLAEAGDIKRFSRCKDFIGFAGLYPEIEQSGSSLNRARLTVKGSRILRHALYMASVASLIHNPYLKSVYRDKVSQGKSAKQAIIVVARKLACIMYSMLKNNTVYDPLRVAIPVAV

SEQ ID NO: 471637 - protein, 344 aa, unidentified
MNNINRIAVDLAKNVFQVCALNAHNTVLFNKKLSRKKFLEFMAQLPSSNVYIEACYSSHYWGRTLTNMGHTVKLVPAQHVTPFVRGNKSDHNDALAIAEAANRPGIRFVPIKTIEQQEIIAMHRLRQRWVKSRTQISNQARGLLSDFGIIFPKGFKGFREAMVKLQDDESLSSVFRQVMADLYREFQQISERIDTLENQLRRYIEQNKACDIVKSVPGIGLINASAIVASIDQGQAFKNPRDFGVWLGLVPKQYGSGTTFKSLGISKRGDRYLRTQLIHAARAAKKWAKQRDDQLSLWIKQLEARVGTHKANVAIAHKLARIIWVLLKRQEYFVPQYLQQKSST

SEQ ID NO: 471638 - protein, 457 aa, unidentified
MYRELHSLRQVLQQELKDTLPPLPGVEPEQLLDTYLNQLTGYVGVDVADRTVTLLAINANQDELAHLLEVPNAPSGFARIGEWLERLRVDHHLRLLVVACEATGVFYWGLWDALAQRPNVARVLYNPRTTEHMGEVLSKRVRDDLIDALLLAEQVRLGSTPEVVLTEDADLLSARLCSRAARDEAQSINRKKNQLRSLLRGYNPVLSRVFPGGKLHHPAVYALLQQQIFPEEFVAAGVEALTLILTTHSRSAFGTEQAQQLVDQCRGLLSRPMRRAVVHQRVNDLIAEIQLAHQHQTALLKAGYALIHDRSEAKLLKASTGAGVSNTLALVSEVSDVQRFPDGEHVASFLGLTTSKHISGTSIYQSKHITKQGSPNARYAAVNIALHLSLRVPKYQTMYKNIKARKPPRKGHFVALVAIARDFVTNVLYDMWREQRPFFIKVEDYRLYRKDHPRPKA

SEQ ID NO: 471639 - protein, 418 aa, unidentified
MLKIVFPICCGIDVHKKFVVATVGTTNKSGVTDYQTRQFSTFTQSLLQLLDWLKAHSCVHVCMESTGKYWHPVFNILEDYCDVVVANPKYVKGIRGKKTDKKDSIWLCDLHKHGLVPSSFIPPLPIRQIRDLMRYRFKLINVKSSEKNRIQNSLTVSNIMISSVVSDTFGVSSMRIINHILDNPDDMDFEVSSMLHGRMQDKAETITKSINGNLTKPQADKMRVCLHHLENIEKHITDIERVVLGLAQPYLPQIEIILSLPSIKDVFTAIAIIGKIGSDMAVFNSSKHLCSWAGVTPQNNESAGKKKSVRISRAGVYIKPLLVQCANAAIKSKKCPYFKNRYDQIKKRRGHKKAIIAIAHTLLKCIYHMLDKGETFNFELYKIDSKPKQTYASQITEEMAIRYLQTLGYQIPDMPNTT

SEQ ID NO: 471640 - protein, 344 aa, unidentified
MQMYYIGLDVHKKTISYCIKDAGGQILREGNVGATRNELDAWMKTLPRPWTVAMEATIFTGWIYDHLLPHAEEVKVAHPLMLRAIAAAKKKNDRIDAGKIADCLRCDFLPECHMAETGIRDRRRTLRYRHLLVRQMVQMKNRISGLLLETGVSHNKQKLHKVGYFRELLSANQEVSEGIRPLLQLSRETIVRLQKTEHALTSSLQRDPLLAERVKNLRTVPGVGPITALTWALEIGDVSRFPSVKQAISYCGLCGDEKSSADKVMRTPLSKQRNKHIQRALVEAAKLGPRLSHELAQVYEKEKLKGNANRATLAVARKMVAYLLAVDRGKRAFVSPEEHGTAAA

SEQ ID NO: 471641 - protein, 413 aa, unidentified
MESYKIAGIDVHKNMLAVVVTDASIEGELPFQRRKFGTLGSDLKELAAWLAARQVREVVMESTAQYWKPVWRQLERQCQLHLAQAHSNRARKGRKDDFRDAERLARRHLSGELILSFVPDPEQRLWRTLTRSKHQLTRDRVRLNNQLEALLEDARIKLATCVTDLLGVSSRRIMEQLAQGETDPVRLAALADPRLNAPAEELSDALSAASEMSALHRQILRLFLERLDLIERQMAVLDRNMAAALQLHHNAVERLATVPGLGADSAHQIIAEIGPKAATFHSPQELASWVGVCPGREESAEVSHSDQSPRGNRMMRRVLNQAANSARKTKGSIFQALYQRWLPRLGHNKTIWAIAHRLCRVVWIILHRGEQYIEFGNSRDPKSAQKRTARLVSKLRSLGYQVTPPIAKPEVAG

SEQ ID NO: 471642 - protein, 412 aa, unidentified
MQDILNCAMGLDIHRDTIVACLSRGYSDMNPETETRTFSTLIPDMQRLREWVVETDCRHVAMESTGIYWQPIYEMLEPCFDGEISILVVNARHMKNVPGRKTDMRDAEWIATLLRAGLLRGSFIPDKAFRELRHLTRYRKSIVHDITAQKNRIDKFLQSSGFRFAAFLSDTFGASGRNIIRHLIEHGSITREGLDKCLKTQTRNRIDEILVALNGSLSKHQRDFLRMIFGYLEQIQAHKQTVEDEIAAEIVRHSEALTLLCSIPGIDVTAAASIIAEIGTDMSAFPDAQHICSWAGLSPGNNESAGKRKSAHINKGNPYLKSMLCEVAWVVAGKRSTYLAGWYWRIKQRKGAKRATVALARKLLVVIYIMLKDRVPYDENSYELRRQQSERKHANRMIHELYRLGYQVIPIE

SEQ ID NO: 471643 - protein, 394 aa, unidentified
MLYCGIDVAKHKHAVAVLDEHGLPKKPVFMIENTHAGMEHLLSELKALGAEVHIGLEATGHYWLSLYDVLTRNGYSVTVINPLQIAAYRKSGLRKVKNDRKDAGWIADFLRISNLPASSRDIPIILQLRELTRFRFWVSEQIGDCKRKLLTILDRVFPEYESVFSNVFVASSRALLQETVSAQEFADFDLQELTELLSKTSRKHFGIEKATHLQEQARQSIGVSFLADAAHVEMRCLLAQIDLLEEQQAEVEKATAELMETIPQYITSIPGIGLPSGAAILAEIGDVHRFKSEEKLVAFAGIDASVHESGEFKGTQMHMSKRGSPYLRLALWQAASMSILHNDELKAYYHKKRAEGKVHRVAIGAVCRKLLVRIYVILKENRPYVVRDSIPANP

SEQ ID NO: 471644 - protein, 388 aa, unidentified
MLLDHPCDGAAAIRTHFGAIFVSLELSRSTWLVTSLSPGKGEKMSKHSVTAGDIAGLLQLFAELKRRAQARTGQNYPIVTIQEAGLDGFWLHRALQQEGIESHVVDPASIATPRRRRRAKTDRLDGETLLRTLLAYKRGEPRVCAMVVAPSPEEEDRRRLCRERRTLIAERITHVNRIKGLLFAQGISDYAPLRRDRRVRLEALRTGDGRGLPSHVKAQISRELDRLELLLDQIKAVEAEQEALLAEARKPAGKNAPPDPVTMLLALKGMGANFAAVLWSEAFYRQFSNRRQLAAYAGLAPTPWRSGGIEREQGVSKAGNPRLRTTMIQLAWLWLRHQDQSALARWFKAHSQRGRKSAIVALARKLLVALWKYVTGGIVIEGAKMKSA

SEQ ID NO: 471645 - protein, 404 aa, unidentified
MADGPTRFFGLDIHKEYFVAVAVNRDLETVFGPQRVSNYQLEEWAGRVLTPQDAVVLEMTTNTYLFYDTLLPHAHSIIAVHPPNVPEVTNARVKTDKKAAETLAQLLAAGMLKGKGVWIPPYEVRDLRALIACRDKMVRLSTIAKNRLHSLEHRKHLILPENPFSPEQRTWWENLELSRTEKLLVHSDLDTLEFAKKQVEQVEECLKQKSAQDERVPLLIQLPGIAMLTAMTILAAIGDITRFPTSKKLVGYAGLGTRVHDSGMTHSSGRITKAGRKDLRRAMVNAANHAVENHPHWKAELERLEPHLGRSKAIVAIARKLLVAVWHVLTEQEADRFADPQSVACSFLDHAYQVRVRNLPKRQSAPAFTREQLDRLGLGKDLQKIHRGAKVFQLPPSELLIEKE

SEQ ID NO: 471646 - protein, 356 aa, unidentified
MDLHKNTSSFSVKDKEGKVIDECKLPTEPSAIKGYLKRFPDSSLAVEPVSQWYFYGDLIQGLGIDVHLANPLKVKAIASARVKTDKIDAGVLCDLLRSNLLPEAYFASADARYWKEMVRYRSSLIRLRTQIKNKIHSILFRNGLRHPFTNLFGVGGRKWLESLDLAEHFAFNLKQYLGLIDAFSQLIKEADERIEKVVGDNQPAKLLTSIPGISYISALTIMAEIGTIERFASAKKLQGYAGLVPSTYASGDRVVHGRLTKQGSRWLRWTMIEIAQRQLLCKRKPGFGWYYQRIKQRRGSGAAAAATARKLLAVVWRMLKDNRPFEIVPPAPRSKTSLLRGKSGAKDAHRKNIVSH

SEQ ID NO: 471647 - protein, 390 aa, unidentified
MERPMQKLNDLSRSLIALEPAGTLIAVIEMSLSSWLVAGIVPGVERQPLKKLAVDESALLKLLHRWREEAEKAGRRIERIVVAFEAGRDGFWLARWLKAHSIEAHVIHAASVAVSREHRRAKTDRLDTELLKRAFLGWLRGERDHCKVVAIPTLKDEDAKRPNRERESLVGEQSRIVNRMKAALIRLGIRGFNPKLKRAAGRLDSLRTPEGEPIPPNTLAELRRDMERRRLVSNQIRQIEEARLERFEQTPNDGPHAMVRLLARVVGVGIETADMLVHEVLSRNMRDRRAIARYAGLTGSPDESGRKRREKGLARSGNGRVRRGMVQLAWRFLTYQKESALAQWFRARTENALGARKPMIVALARKLLIALWRLVWEGVVPDGVVLRPAQ

SEQ ID NO: 471648 - protein, 427 aa, unidentified
MAYRVAAVDVHKKMLAVVVADVVVEGEYRFERRKFGATPDQLHVLAQWLVQQEVEEVVMESTAQYWKPVWGALERYWKPAREKREGATKMSGALHLCQAKSNRGPRGRKNDFADGERMVKRLVAQELVLSFVPDAEQRLWRTVTRRKHQLTRDKIRFQNQLEALLEQAHIKLSSFVSDLLGLSARRMLKAIAEGETDPAALAALADCQLRATPEQLRDALGACAQLNGVYRRLLKMALEELKLMEEQMEQLDQEASNLLQHHQDAVQRVAEVPGFGVDSAVQMMAEVGAAAATFESAEELSSWVGVCPGSEESAGKSKSTRSPKGNSTMRRLLNQAAQSAVKVQGGIFDITFRKLLPRMGYKQAIWAIAHRLCRLLWMILHKGIRYEERGPAVSAKSQRARSARMIKALKKLGYRIEGGPLPAGAQA

SEQ ID NO: 471649 - protein, 316 aa, unidentified
MYLGIDVSKLTIDCCLIADGQNHQKKFQNNERGFEQLTKWLQSHKVSDNLHCVCEATGTYYEELAEYLYSRYTITVENPRKIKGYAIAELQRSKTDTQDAKLIAQYCQDRKHKLKAWQPPAKEQKQLQEIARYLDYLKQQRATEKAKQHEAPDYIKSHIQTTISNLTAQIQTVKKQLLQFYKDNPSYNNLRKRLKTITGIGEQATAVLLSTYKRHEFKNAKQFTAYLGLDPRKYQSGTSVNGKSRISKIGNSEIRKSLYMPAVVAYRCNAFPEFVGRLKKKGKHIKLILIAIMRKLAVIAFTLMKNGQEFQAERYK

SEQ ID NO: 471650 - protein, 307 aa, unidentified
MSRSVGIDVSKSKLDICFHGKYEVINNDEQSLQAFFKDIPSESQIILEATGKYHRQAHRTLSELGYSVMVINPYQSRYFARAMNVLCKTDKMDARILQLFGEKMPFKESRVATISEQALQELSRHLDDLKKIKKDLESRRRESEGLIADSLDALINGVCAELKKSEEALQDIIEQDEELKRKAKLLESIPGVGSSTAIMLLSYLKELGSVSKREISALAGLAPVNNESGTLSGKRSIRRGRHDVRSNLYMPIVGAATRHNPRLKEMYERMVGRGKPPKVALTACMRKLVVWANAILETGQPWQENAN

SEQ ID NO: 471651 - protein, 316 aa, unidentified
MVGIDVASAHVDVAAIGAALPAALSHIGNDADGHSALADGLARLKPELVLMEATGGYEAALACALQAAGLRVAVVNPRMARDFARAMQRLAKTDRIDAATLAEFAGVLARRPDCERFIRPLREPEQQDLAALVTRRRQLVSMQLSERQRLRLARPVARPSIEALLEAIARQLDDVEAEMARHVEQHYAQMTKLLQSVAGIGRVAAATLIAELPELGRLNRRQICALVGVAPYAKDSGASRGRRRIGGGRFEVRRALYMATLAATRYNAPIRAFYQRLVAAGKLKKVALIACMRKLITHLNAITRDHLNAQTRSHIA

SEQ ID NO: 471652 - protein, 314 aa, unidentified
MNEIVRTNIGIDASKAQLDIYVRGQGVFFSVTNDAKGIRAAIRRIKSYDPERVIIEATGRIELAFVVAGHKAGLPLVVSNPFYIRRFAGAVGQLAKSDQLDAMIIAHYGEAVQPRLTELKPEKTRLISDLLTRRSQLLGMSTQEKNRISIMPKTLQVSLRRILRQLKAEVERIEQRLDRLIDELPEWQEKRDVLMSVNGVGKVLAYTLLSDLPELGTLNRKEIAALVGVAPMNRDSGNYKGKRHIRGGRAKVRRVLFMAIMSAVQSNPKLKKKYQELKAAGKPPKVALVACMRKLLTILNVMVRNGEKWNPEYA

SEQ ID NO: 471653 - protein, 376 aa, unidentified
MREKLRFLGLDVHAETIAVAVAEPDGEVRSLGTIANREDSIRKFIRKLGSPEQLRACYEAGPTGFVLYWQLTQLGVKCAVVAPSLVPKKPGDRVKTDRRDALKLARSHRSSDLTAVWVPDEDSEALRDLVRQREAAKQDQLRARHRLTKFLLRTGRRPPLGLKAWTERYMAWLEQIRYTQPAQQATLVDCLNEVEHMSARVKRLEEAILEVVKLAPQSMQEVIRGLQALRGVAHISAVTIAAELGNISSRFESARKLMGYCGVFPSENSSGKRKRQGGIAKTGNAHLRRIVVESAWCYRHLPRVGAKLRKRQQGVPAEITEIAWKAQNRLHKRYMKLTMAGKDQRKIMTAVGRELLGFIWAIGIKAEAACEQQLAA

SEQ ID NO: 471654 - protein, 341 aa, unidentified
MAIVAGFDVHRRQITLDALDTDTGEVERGRIPATPEAVRDWAGTHAGRELHVAVEACTGWLFVHEALLATGAVTHLAEPVETSARRGPKRRAKTDRADARWLRELLAEGRLPEAWIPPPHVREWRTRTRLRKRLVDERTEWLQRIQATLFHHGIANVPARLLAADGRAFLAALKLPPAARQRIDVGLALIATIEIQLEPLERELRHLARRQPGCRALMRQFGIGELTAATILCELGDATRLSRSRKAVRCAGLDVGVHRSDRRSRPGKLTRQGSPELRWALFEAAQSACRPQSPDHADYLALKARGLSHVRASITIARKLARRSFHTLTELGPRALEPVAD

SEQ ID NO: 471655 - protein, 359 aa, unidentified
MKGISMPDQQRAVIGGIDCHTDFHAAVALDPLGRVLGTEAFPATSAGYRLTHRWLASFGPVAAVGVESTGSYGAALTRALVEQGCRVIEINQPHAHLRARRGKNDAIDAEAAARKVLSGEATAAAKDTSGIVESIRQLSVARSSAVKARSAALCQLGDLLVTAPATLREQLDTRRSLEGKAAVCARLRPDTDRLADPAQAAKAALRSLGHRIAQLGAEADELGRRLDRLVATAAPTTTSRLGCGTHHTAALLVAAGQNIDRLGSEASFAHLCAAAPIPASSGRTSRHRLNYAGNRSANRALHMIVIVRLRYCERTRSYLNRRVAEGKTKKEAIRCLKRFVARELYRTLRADLATLKTRT

SEQ ID NO: 471656 - protein, 325 aa, unidentified
MQALLEICCGLDVHKDSVVACIIKNNLLNSTKNEDNVDVEIKTFSTMLSDLEKLKDWIIKNNCRHVAMESTGVYWYPVYETLETAFDGDITILVTNARHMRNVPGKKTDINDAQWIASLLRAGLLSGSFIPDSDVRELRQLTRYRRNIVQDISQQKNRIEKTLQQAGFKLSTFLSDIFGVSGRNLINVLIKKGRLSQIDIDNETKRVSTAKKEEMKFALNGRLSRHQRDFLKLEIDHLDSLLAHQEQVEKSIALKSESFNEAIERLDTIPGIAISSATSIIAEIGTDMSNFKTAEHFCSWAGLSPGNNESAGKKKVLASHSETHT

SEQ ID NO: 471657 - protein, 358 aa, unidentified
MNRNTGMNAGQIIGTMTGLQVFGLDIAKHVFQMHTVNMGTGEIINVQVKRAKVAEHFANLAPCLVAIEACGGAHHWARELGKLGHTVRLLHAKIVRPFVSGNKTDATDARAIWLAAQQPGVKFVGTKTAAQQATLTLHRQRELLMKMRIMQTNALRSLLYEFGATFAKGKRALFKEIEATLEGLAHTLPQVVRDSLHEQVARIKAIEVDMQAIEARLQLQLKQDPQMQRIAQIPGVGLLTATAAIATMGEASAFKSGREFCAWLGLVPKQTGSGGKVKLLGISKRGDAYLRCLLIHGARSVIAHAKEPGPWLQDIKARRPSNVVFVAQAAKMARTIWAITAKAQDYDKGFKSIRPQAA

SEQ ID NO: 471658 - protein, 423 aa, unidentified
MFKIIKFNCCGLDVHKTWIYACIGITDANFRTEYFEARFSSFPKDLRRLAAWLQEHKCEEVCMESAGKYWIPVFNVLEETCKVTLAHPKYTKPQKGNKTDRKDARWICDLFMCGMIKPSFIPPPAIRHLRDLIRYRIKLTNMLTSEKNRAQNCLTVSNLKLDDVFTDVFGKSARSITEYILSHPGEQFDVAPFVDKRCKTPVDQIQAAVDGAISPEQAVKLRECLNHIDELIVHRDRIEAKILQLVEPFSVQLGLIRTVPGMNKDSMSAILILSEIGSDMSVFPTAKNLVSWAGCCPRNDKSAKHVKSTRIAQSGCYLKPLLVQVANALLHSNKHPEFTERYRRIKSHRGHKKAMIAICKMLLTAIWNILSTGEVYNPSGYLIQTPRPTNETKVLTQKQALELLRLRGFVIKDDPVEPEPLPA

SEQ ID NO: 471659 - protein, 354 aa, unidentified
MPTVAGVDCHKDSHAIVVVDELGKVLRSFSIDASSEGYHQAIAVGKELRVAAWGLEGTGVYGRSFAHALILASFEVFEVPGIVTKRHRKHASRKGKSDELDARAIAEAVLRESDRLPRFREFAEQEALRLRYDRRNRLVRERTTLINRLRSAALRLAIEAVPSDLTSSAGLERLREAVQPLSGSGLVEDALIEEALFEIATLARLNAEIRKLEQLMSPFVKGLAPELLELRGVSIVTAAGLIGHAGDIGNLRNAAAFAMRSATAPIPWSSGRNQTVRINSGGDRQLNRLLHVIALTQVRSADHPGRRYYDRKMTEGKTPRSAIRALKRQLATVVFYRLRLCQERLESQLSSIAA

SEQ ID NO: 471660 - protein, 341 aa, unidentified
MHYVGIDLHKKTLVVAVENDRGPVGRPRRFQCKDEAAIVKAFRGLRPFQAVIEASSSYRWLYELLEPLGEVILAHPLRLKAIVAARAKTDKLDAALLAQLLRARLVPEAYVPPQPYQVLREVTRTWARLGRQASLAKNQMHAVLRGRNLHPPYRQVFGVKGRQWLARQDLGIGGNLMRDELLRRLDHFERERLVLDDHLAMLAEEFPQIEALLDLYGIGPYSALLIVAELGEVDRFHDARQVGAYAGLTPQVHQSGEHAWHGQITRQGSRWLRWILVQAAIKIVRKDRALANLYRRVRRRSGKKRARVAVARKLAGICWVRLRAWHRDHANDAVAEPVLTT

SEQ ID NO: 471661 - protein, 337 aa, unidentified
MRNVGLDVHQKYTYYTEVDDGGVVLRQGKVVNEALPALFADDQPRRVVLEAGRNWYHFFDSLEGLVEEVQLAHPLRTRAIAAAKVKTDKIDSATLAHLLRADLIPRAYTAPASVREEREVLRCRASLVSLRTRVKNKVHAVLAKRGMICPWSDLFGKSGRRWLSEAALPPVYQQTVDSNLRVLDSLNTEIGLVTEEVKRRVELSAEAKLLTTIPGIGTYSALLLLAEIGDIHRFPDRQHLVSYAGLAPIVRSSGGKTRYGPISKQGSPWLRWILVQAAHVAPRHDSDLRERYKTTAYRRGGKVATVALARHLLKVVYQVLKSRRPYEAASRSSSSCQ

SEQ ID NO: 471662 - protein, 412 aa, unidentified
MTVTNQFAAHVGLDWADKKHDVCVQFKNGERVFDVIEHTAEALDAWLTELHQKVKGRIAIALELKKGPVVYALQKYPFITVFPVHALSLARYRQAFSPSGAKDDPQDAELALELMLRYPQKIKAIEPDNADIRLLQQLVEQRRQLVEDKRRFVNRLINTLKQYYPQPLEWFSHRGSLLLCELIIRWPSLQQLKRARRDTIRNFLNAKGGRAMALTEQRVASIDNAIPLTTDPSVIEANALMATALATQIKVVSEIIKTYDERIETLFDTLPDAGLFKALPGMGPCMGPRMLAALGDNRDRFNNAEEIQNYAGIAPVTERSGQKSWVHWRWQCAKFVRQTFVEWAAKTVNLSYWARLYYQGLREKGKSHQSAIRALAFKWIRIIYRCWKTRTQYDEARYLLALEARHSPLLKP

SEQ ID NO: 471663 - protein, 310 aa, unidentified
MSEERFVGIDVAKAYLDVCVLPEGESWRAANDEAGIAALTERLVALAPQSVLLEATGGLQQDVVAALVDAGLAVQVLNPRQVRDFARATGRLAKTDKIDAAVLALFGQAVRPAPRMLPDRESQALKALVKRRREIQEMLTAEKIRRHTATSRVLLSIDAHIEWLKRLLKDVDDDLDKTIRSSPVWREKDDLLRSVPGIGKVVSLVLVSGLPELGRAARRQLSALVGVAPFNRDSGLMQGRRTIWGGRADVRVALYQAALVATQHNALIKAFYQRLLQAGKPKKVALVACMRKLLGILNAMLRSGERWQPA

SEQ ID NO: 471664 - protein, 422 aa, unidentified
MHQHNFRIFVGIDLGRWLHVVRALDASGEFLGEIGFAHSGKGLSELVDWLLNLAEQDVGRIAVAIEKPHGAVVETLIEQGIAVFAINPKQVDRFRDRYALSGAKDDRRDAFVLADTLRTDGQRFQRLRLPPPEIIALRELLRSRDQLIKHHVALSSQIRDLLVECWPHFLTIAPRNRALDSFFCELLELFFHLDRGASLEPQSIQTLFKKNRIRRVKLEQTLDILHEPPLRVAPGTVAATSTHIRLLVQQSLLVLRQRRESDQFLETWFKKNQRASERNAPTDAAILASLPGVGAFVLATLLSHAHDAIRLRNLQALRSLGGVAPVTKQSGKRRQVLMRRARSQPLNYALHHWAHMAVLRDPHSKLHYDRMRAKGHRHARALRGVMDRILTVAVAMLRDGTLYDVERRTKCDNTDAQKEDSS

SEQ ID NO: 471665 - protein, 426 aa, unidentified
MSERDYSKQVARRQRIGETTLVVGVDIGSAFNAVGFMNKEGKVLGSYPKMPNSREGFEEFVKITEGLKAKHGLSDVIIGLEPTGHYWRKFAYFAKAKGCEVRFVRTTALKHHRELDESSSAKSDQRDALTITNITREGKYIDTVIEDGRMRHLRILVKVREKIQKRNGSAKNSLHAALDDYFPELKEIFWSMHSRGLWALLQRCPFPEDVLALKISALKQMIGRASRRRVEASRKAVAVYQAAKESIGLKQIGSADRYRLKMCLEEVMRTGLMIKDIEQEIKRMLKDIPDAQYLLSIPGIGPISAAVFLGELGNPSYFQSSRQIVKYAGYDPQESDSGYRVSRRFISKKGRWLLRKHLFLMSMRAVVLSRYFQEYYQRKLQTKNRFGQLPRKKEILCAVAIKLIKVIFALLRDKRNFEDTVTCSVQ

SEQ ID NO: 471666 - protein, 426 aa, unidentified
MNERGGSRQHKKRCWAGLDWGGSGHAVSVVDDRRRVLASFAVGASLEDLESLSQRLRACGEVAGVAVEATRHPVVGHLLSAGFTVYAVNPKQSKNWRGCASVSASKSDARDGLVLAVELAGRHESLRPLRREDPAVAELAGLCEKVRDLVDERTALVQRLKATLGQYYPGALCFFSDWTSPVAWRFVKRFPRPKTLAQARKQTLCAFLKSNRVGLRPVWLERIEARGDAARWPLPADSEALEAVALATVAQLLALQPHIDKMDRLIAEQSKKVPQTTLMKSLPGAGKRLAPALAAMAALTTTGKKQNLEALRCVSGVAPVEDKSGKRQRVRARRRCNRHWRDVLYLFAHCSINCCDWARAFYDMHREQGDNHAGALRKLADKWLKIIHRMVEANEPYNDLRHVQSLRNHASWFHRAPCGKPGGKLH

SEQ ID NO: 471667 - protein, 317 aa, unidentified
MSKHNIVCAGIDTGKRKLDAALNGGKETLQVDNAAEGHALLLAWLRKHRVKRVGIEASGGYEQDVVTALRKCRIAVIVFQPAQVRAYARFHLKRAKNDRIDAALIAACAAATSKVHAAPDPRLAPFARHLTFVEQLEEDIVCIKNRCETCRDPRQLAFWKSEITRLKKLVRSELQMLARDIRQHPDLAQRLDLIASVDTVGLPTALNILVRMPEIGQLSREQAAALAGLAPYDDDSGEQAAPRHIEGGRQRLRKALYSAAFAGAFHWNPQLQAIYRRLIRNGKPHKVALVACARKLLIYVNTVVARGTPWLAQAAAH

SEQ ID NO: 471668 - protein, 352 aa, unidentified
MTVTNLARSITGGVDTHLDVHVAAALDERGTLLGVESFATTESGYKKLLGWLSDFGTVELVGVEGTGSYGAGLTRHLQGENVRVVEVDRPNRQRRRLKGKSDPQDAITAARAALSGEAAGEAKTRDGNVESMRVLRVARASARKARTQALNQMRNLVSTAPDPIRAELRGLSVFNLLERASSYRPGAKRDIVSLTKFTLRMLARRALTLEEEISEIDAILKPLVKETAPELVATLGIGTDAASALLVAAGDNPERMRNEAAFAHLCGASPLDASSGKNQRHRLNRSGDRQANSALWHIVLTRMVYDPRTTEYINRRRTEGLTKKEAVRCLKRYVAREVFSLLPHDTLGLDSP

SEQ ID NO: 471669 - protein, 425 aa, unidentified
MILLFEDVYYGRCAGIDVHKDFVVVCLRVGRKTELRKFSTVTRELREMVAWLKENGVQMVAMESSGSYWKPVYNILEQEEVPAMVCNAYHIKNVPGRKTDVNDATWIAKCLSQGLLNPSFVPDRYQRELRELTRFRKSQIKERASNINRLQKFLEGANIKIGSWLSDVEGKSAQQLLELVIGKPDFTMEDVSMCMHKNMKSTPEEIFQSLEGCMTDVQRKLFGHIIKIIRVQTAQIEETDALIQGSLNESYKAAVEALDVIPGIGKISAEVIVAEIGPDVSRFKNQNALSKWAGVCPGNNESAGKRKSGKTPPGNKTLKTTLVQCAQSAKKNKNSFFHAQYNRLVSHRGKNRATMAVAHSMLIAIYFVLCGNAFVDLGADYYTQFNRDKKINSHVKQLSKLGVEIPKEFLQQVKLMPPDPKGRSA

SEQ ID NO: 471670 - protein, 316 aa, unidentified
MSSTVVFVGIDVSQAQFDVALRPSGEPWQVPHDDAGIASVVTRLHALSPTLVVLEATGGLELPLTGALAAAGLPVVVVNPRQVRDFAKATGKLAKTDALDAQILAHFAEALRPVPRPLPDAETQALDALLMRRRQIIEMLTAERNRLSRAHPRIRAEVQEHIHWLEQRLHQSDDALRQAIQASPVWREKDDLLQSTPGVGPVLATTLVAALPELGTLNRKQIAALVGVAPLNRDSGTLRGKRTVWGGRTVVRTALYMGTLVATRFNPVIRTFYQRLRQAGKVPKVALTACMRKLLTILNAMLKHRTPWRVEQAQHA

SEQ ID NO: 471671 - protein, 349 aa, unidentified
MYIIGVDYHPSFQQIAFLDQETGECGDRRLNHSDGEAEKFYRELKAKGVSVRVGLEATGYSRWFERLLVEQGIEVWIGNAAEIKAKRVRKQKTDREDARLLLKLLEENRFPRIWVPSPENHDLRQLLWHRHRLVQMRTRIMNQLQALAMNEGKRWKHRLWSAEGRALLEKFPLAPWASRRRQDLLELLDRLNPTIDELTSAVEQEARKWPEALRLMTHPGVGPLTALAFVLIIGTPGRFHRGKQIGSYIGLIPSEESSGGRQRLGHISKQGNALLRFLLVEAAQAAARCNQDWRQKYWHLAMRRGKSIAKVALGRQMAVRLYWMWRNGWDYAQSKSSVRTWDSSVPDMA

SEQ ID NO: 471672 - protein, 349 aa, unidentified
MTVYVAVDFHAREQTISYCDLADGEIHRARLRHQHDDVRGFYLQFTGEVIVALEASGYSAWFEQMVAELGHTLWLGNPAEIRRKAPRRQKNDRRDADLMLDLLLKGDFPRVHTFSEESRTVMRQLRYRHKLVKVRTIAKNSLHVIGINAGLPLQRRLLTEKGIAQLQALPLSPILSQQRDEWLELIAAMNRRIATVEEALQQRAQEDAAVALLRTHPGIGLLTALALRYTLEPVSRFGTTRRVTAYVGLDCIEDQSSERRRMGSISKAGSKLLRFLLNEAGQTAARRDPELKQFYKRLVHRRDRPKAKVAVARKLLVRSFIMLRDQIDYAEFVRRGGAARVARETRSPK

SEQ ID NO: 471673 - protein, 425 aa, unidentified
MRFFGIDVHLEFCEVAVAEGGKVSQAGRIASTPEAIREFSRGLGGEDQVVLDASGSVMAIARILRESNVGRVIVSNAAQTRAISHARVKSDRFDAAMLAKLLSAGMLSEVWVPDEATLALRRRVARRSALVRARTRIKNEVHAVVMRCLLGRPPVSDLFGRKGRIWLAEQTLPEEEAETVAGCLRQIDFLDGEIALLDQKIAEQALAWPGLCRLLTIPGVDIGTAAAVIAAVGDISRFPSAGQLVAYLGLDPKVRQSGSEPARYGHISKRGNAQARSMLVEAAWIAIRSPGPLKAFGERVRARRGAQVAAVAVARKLVVLCWHLLTKDQDYAFARPSLTRQKTRRLELTAGASRRPRRHDGATVSPTAAQRAAERELQTQAELAYRRLVDDWRSTAAPKGGAGATPGRASQKPVKGKAARQATSP

SEQ ID NO: 471674 - protein, 457 aa, unidentified
MRTRGKRTSGIEEARPFTGMSQVNMNAAGVDVGAEEIVVCVGCDANTQIVKAFGTYSVDLQAIGKWLKEHNIKTVAMESTGVYWIPLFEELERQGFECLLISSRSLRRVPGRKSDIVDAQWIQTLHSDGLLESSFRPEAELVMLRTLLRHRTQLLEHRAPHILHMQKALLQMNVQLSQALSDITGDTGQAIIRAIVAGEREPQKLAALRDRNCKKSEEEIGKALTGTWRTEHLFILKQALELYDFYTQQVETCDEEIERVYTLTRPNWEVGELAAVPAKKRQSHKKNAPQNTEAIRQHLKRISGVDISLVDGFGVPLAQTVLMEIGTDMDKFPDEKHFCSWLGLAPKHEISGAKVLKNKTLKTKNRAGQAFRMAAQAVKRADCPFGALYRRLKARLGPAQATVATAHAIARVIYRMLKYKMEYEPLSVNDYEKKYKEQQIKYMAKKAAKLGFQLVPA

SEQ ID NO: 471675 - protein, 365 aa, unidentified
MRMIVIGADTHKDTHTAVAVADGTGQLVDELTAPARKAGFAQHLDWARGLDSERVWAIEDCRHVSGGLERFLLASGERVVRVPPKLMGKSRKGSRERGKSDPIDAANVARAALQEGVENLPGAYLDERSMEIKLLLDHRENLVRTRTDDQRRLRWHLHQLFPELEIPAGALDRMVWLERIAGKLSRAPQGARVRVARELLRSIRSQVRRAGELEREIATLVKAKAPGLLALPGCGSLSAAKILAETAGAERFASDAKLARLAGVAPIPASSGRRDRHRLDRGGNRQLNCALHRIAVTQGRVHPPARAYLARKQAEGKSRMEALRCLKRHLARRVWQLLPQSEIDMPMPTVDSQRDALTPQIAVAA

SEQ ID NO: 471676 - protein, 316 aa, unidentified
MTQISRTAGIDTSKAKLDVAVHGSVEHWQVDNTPAGWRRLAAELTGAEVMRAGIEASGGYECGVVGYLRAKGFTVLVLQPIQVKAYARLHLRRAKNDKLDAALIAACAAMTDRPRIEPDQRLAKLAQHLTFVEQIEEDIARFKIRLEHVGERRHRRMVVTDIARLKARRLVELARIAAALRAHDDLARRLDLVLSVPGIGERTAIALIVRMPELGRVSREQAAALAGLAPFDDDSGKHSGERHIAGGRRRLRRSLFAAALPAAFRWNKALIELYSRLTQRGKAHNQALIACARKLLIYANTVVQRGTPWTERPVDA

SEQ ID NO: 471677 - protein, 391 aa, unidentified
MEVVAESVAGIDVHQKQITVSILVGLANAKPKKFSKRFETITCRLKDCGEWLKQRHVEQVLMESTGQYWRPVWQILEPFGFKMILCNPRIVKNIPGKKTDQKDSEWLSELARYGLVSASFVPPKSIQALRESTRLRKKITQSMTATKNEVHNLLQRSNIKLTTYISDIFNGTGLKLLKLLIDGEVITLQAITKCRHTRIKASVEQLFAAMDGILPRNDRRLLGLNMELLADFRRVLAELDAQIDEQIMEFNDLYLRLQDIPGISQRIAQIIIAEVGSDVSPFPDAHHLASWAGLCPGNYESAGIKHGAHILHGNVYLKSAMVSAALAAKQSKETGLKDYFWRLHGRMTAQKALVALAHKLLRIIYVMIDEGTTYVDYKKDQRKAITLIPQT

SEQ ID NO: 471678 - protein, 411 aa, unidentified
MRLFVGDDWAEEHHDVEMMDAAGKVLAKRRLPEGVAGITQLHDLVGRHLGDDADGAEVAVGIETDRGPWVAALVAAGYRVFPVNPLLASRYRDRHGVSGAKSDAGDAHMLADMVRTDSHQLRPAAGDSPEAEAVKVTARMHKTMIWERTRAVQRLRHQLREYFPAALEAFEDLGAADTLELLGNAPDPERARKLTRAQVSAALKSARRRGIEGKADAVLAALRGEHLGQPAALAAAYAGTVRSLIALIITLNEQVKALEAQVREHFGRHPDAEVYLSQPGLGHILGARVLGELGDDPHRYASAKSRKNFAGTSPVTRASGKKKVVAARYVHNDRLVDALNAQAFAALTASPGARAFYDQQRTKGIEHQDALRRLANRLVGILHGCLKTGSPYDEATAWGHRENLGQTSAAA

SEQ ID NO: 471679 - protein, 400 aa, unidentified
MECVFGIDVSKENANVAVLVDNVVIKQFKIGLDRLGFSLLSDELNSFNAPLIIYEATAMYSRRLRAFLQRDGWKYTELNPLAAKKVMEEFRHTKTDALDAVGLARAMIKNHFRPTYQESPVYTELHDLERTYQQFNKDIVTNKNRLHRALQLTFPEIEHFMSSTDGVLYWHIVQRFPHPAIVLSHEENELTEIILTETSKKIGLKRAMKLANRLLALAQNSAPAKEPQSHAVRAVIALAKEVERINQLKAQIIVEMTTLGENLSEVPLLVSIPGIGIKTALCLIAELGDVRRFHSANAINAYIGIDLIRYESGQYEAKMHIRKRGNPYARKILYRAILNIISVSQYQPTLISANYKRKKQSAQSHGTKKIAIAAMSQFNRLMHQLILNNELYDSTTFMPE

SEQ ID NO: 471680 - protein, 390 aa, unidentified
MTTAATEGTTSSTNGGILHLAFELGRKKWKLGFTIGLGQKARKKNVKGGDTAAVLHETAAAKRRFGLPAEARVVSCYEAGPEGFWLHRWLLSIGVENVVVDSASIEVDRRKRRAKSDGLDVEALLKLLCRHTMGEPKVWGVVRVPPPQIEDLRQLHRELATLTEERTRIRNRMRGLLAVHGASIRRWSTVREEVASLRLWDGSALGDGLRQRLEREIERLEIVQRQLRSIKHEMEAELQAAAEPGSALAMMQRLVSLRGIGTQGARIMVVELFAWRGFRNRREVGGCTGLTPTPYQSGNSSHEQGIDKAGNVWLRRVAIQLAWSWVRWQPHSELTRWFNEKFARAGRRQRRVGIVAVARKLTIALWRYAFGAPLPDAVTGQVEEYVLKVA

SEQ ID NO: 471681 - protein, 430 aa, unidentified
MKSNTQNAKIEAITEKTLVLGIDVGSETHYARAFDYRGIEYSKKPFKFSNTEAGFVTFKEWILDLKERHEKDKVVPGMEPTGHYWFNLGKFLQDNEMKPVLVNPHHVKKSKELDDNNPTKNDRKDPKVIAGLVREGRYMIPYLPEGVYADLRTASNIRFQLQAELTRIQNRISRWFNIYFPEYKTVYGKPDAKSGMLILKAAPLPEDILTLGIDGVNQIWRDAKLRAVGKARAKTLIEAAEHSVGSKEGAVSARMEIRMLLEDYESRNIRLQEVMALIEGLVKQIPMAEKLLEIKGVGIRTVSGFLAEVGDISRFNNPKELQKLAGLALVENSSGKHKGETTISRRGRKRLRYLLFEVAMSLVAKNPEFRELHNYYTTRRLNPLKKMQSLMAIAAKLIRVFYAMLTKGVDYDPKKMVSDIKRPAVYIQAA

SEQ ID NO: 471682 - protein, 338 aa, unidentified
MTIYAGLDVSDKQTHICVVDADGAVIRRDCVVSDPEALSKWLKRHCAGLTRVVLETGPLSTFLYHGMVERAVPVICICARHAKRALSARINKSDVNDAESLAQLARTGWFKAVHMKAGATHIDRAALKIRAQLMTSRNAMTNQLRGMLKLFGLRMGNVTTPNKRRERLAALFTQRPDLNPVFKPLIDCIDALDAQLASSFRLLDARAAADPVCTRLMSVPGVGPITALAFKASIEDPGRFAKGADAGAYAGLAPRRSQSGERDYNGRISKAGDPLLRHALYEAANSLLVRVKRNSALQTWGKKIAETKGPKRARIAVARKLAILLHRIWQSETEFCWN

SEQ ID NO: 471683 - protein, 345 aa, unidentified
MKKGITIGMDLGDKKHQVCILDKTGKIIAEEEVTGTRAAVTQFFKQYREAVVAMETGTHSRWVSQIAEAEGLNVLVGNARKLRMIWQSRQKSDTRDAVMLARIARMDPALLYPIRHRGEQVQMDLEIIRARDLLVRERTRMVTHVRSVVKSMGERLSPSSAASFGHKAKIPEALNETMKPMLEMIRELTKKIRGYDLMIKEAATEKYPATERLSQVGGVGPLTALAYVLTLEEPQRFAKSRMVGAYLGLVPRLDQSGQTDKQLRITKHGDGYLRRLLVGSAHYILGPFGPDCDLRTFGLKLMQRGGKNAKKRAVVALARKLAVLLHALWRSGQQYEPKRKQPLAA

SEQ ID NO: 471684 - protein, 309 aa, unidentified
MDAVYVGIDVSKDRLDVHVRPTGESLAVARDGEGLAVLIARLQPLAPQLIAVEATGGFEIVVAAAIGGAGLPLVVVNPAQVRHYAQAVGQRAKTDAIDAEIIARFVEATHPSPRPLPDAATRLLADLVTRRRQIIVMMVAERQRATRLPKNLKKSCERVVRVLERELGELDRQLDTAVRGSPAWREREDLLASVPGIGPITARTLIAELPELGQLDRRKIASLAGLAPFARQSGKWRGKSFISGGRASVRTALFIATLSAARHNPVIRAFRQRLIAAGKPKMVAAIACMRKLLTILNAIARDQKPWQTA

SEQ ID NO: 471685 - protein, 354 aa, unidentified
MKYYTSTTEFNCGIDLHARQMYVCVMDRTGKKLVHTNIKNNDFPYFLKLIQPYRHSLTVCCECMFGWYWLADACQAAGLTFVLAHALYLKLIHGGKNKNDRVDSEKLAHLLRSNLIPPAYVYPAALRPLRALWRQRLCYVWRRAELLARIQSHQLAHNRPVIKQSRPNRDRWEQQLLEQEPDPVRQLALQNDLAMVRHYDAQITALEQRVQKLTQTAAAREYALVQTVPGIGESLGATIVYEIGDVERFPTVKDFLSYCRLVKGTVASAGKIKGLRGAKLGNPYLRWAFGEAAVIAKRDHAVIGPLAQRWEARMNGNKFKANTVVAIKLARAVYFMLKNKTVFDPDRLVAALTN

SEQ ID NO: 471686 - protein, 344 aa, unidentified
MTLITTVGLDTAKQVFQLHGVDNEGNAILRRQLRRSEVLRFFSKVPSCVVGLEACGGAHYWAREIKALGHEVRLIPPAYVKPYVKRGKNDAADAEAICEAVGRPSMRFVPLKTVGQQASAMLLKARDLLVRQRTQTINALRGHLTGLGITISRGVGKVDVLAAIVRDEDDARLPPLARIALLPLTHQIEAYTSEIVKLEKHMVRETRQDSTLSRLTSIPGVGPITASSIAAFVPDPQAFKSGRHFAAWIGLTPKSNSTGGKTRLGRISKMGNPVLRSLLVVGASAVIQHARRGAKVSAWLSELLRRRPYKVAAIALANKMARIVWALLVRGGQFHSTANETMAA

SEQ ID NO: 471687 - protein, 350 aa, unidentified
MLIIGVDFHSRFQQIAMVDMETGELVERRLDHRDGEAQKFYAGLQKSVRVGMEATGYAQWFERMLAKLGHELWIGDAAEIRAAMVRKQKTDARDALHILDLLLANRFPRIWIPSPGERDLRQLLPHRHKMVCLRTSVRNQLHALAMGQGVYRKRKLWAAGGRRELEALALDPWASRRRQELLEILDRLDPSLAELERAVAREAEQRPAARSLMEQPGVGPVTALMWVLTIGPVERFRRSKQVVSYLGLNPRESSSGGRQRLGAISKQGNSMARFLLVEAAQTAARYDKELRRDYQRLKFRRGTAVAKVAIARKLAVRLYWKLRKLSSPAPPARMQSSPEHPVVGASLSRN

SEQ ID NO: 471688 - protein, 344 aa, unidentified
MEHFAGLDVSVKETSVCIVDDTGRIVREAKVASEPEALLAVLNNPSYRFRRIGLEAGPLSQWLYSALGEANLPVICVETRHMRAVLKAQINKTDRNDARGIAQMMRAGLYRPVHVKTLRSQKLRMLLTHRKLLQSKAIAIENDLRGTLRNFGLKVGVVGAVKFETRIKQLVENLPDLALLVEPLLVVRRVLREQIAVLHRRLLHIVRDDEVCRRLMTIPGVGPVVALTFRATIDVPARFRNSRAVGAVLGLTPCRHQSGESDRTGAISKCGDEMMRVMLYEAAQILLVRSTRWSWLKVWAMQIARRCGLKKAIVALARRLAVIMHRIWVDGTEFRWARQAAAAA

SEQ ID NO: 471689 - protein, 467 aa, unidentified
MKHNQQRARSGRKSRGSISLLERIQPDAAGIDCGQNSHFVAVPTDRDPQPVREFRTFTADLHRLADWLAQCEVKTVALESTGVYWIPLYEILEQRGFEVLLVNARDVHNVRGRKSDVKDCEWLRELHSVGLLRASFRPAATIVPLRSLMRQRQTLVEEAATRIQRMQKALTEMNLKLHTVLTDLTGQTGLKIVRSILNGQRDPEQLAAHRDHHCHASHQEIVAALTGNYRAEHLFALRQNFAAYEFHLQQIAECDTAIEELLAKLAEQQPPPSGPLSTPRRKRGSKHAPTFDIRTSLHRLTGGADLSQIHSIGPHAALQIVAEIGTDMRRWPTEKHFTSWLTLAPNNKVSGGRLLTSRTPPSANRAAVILRRCAMSLGRTSTALGAFYRRLAARTGKAKAITATARKLAVLVYRVLSGDLIYNDPGAAAYHQLNRARELKSLRKRAKLLGYQLVNHSTGEVLLQPVS

SEQ ID NO: 471690 - protein, 341 aa, unidentified
MVEVVTVGLDIAKSVFQVHGVDAGGEVALRRQLRRARVLPFFAKLPACLIGIEACATAHYWARELGALGHQVKLIPPSYVKPYVKRQKNDAADAEAICEAVTRPTMRFVEVKSPEQQSVMVLHRVRLTLMRQRIQLSNTIRGHMAEFGLVAPIGREGLQKLIRLVEERDPRVPDEARVCLEFLVAQLQLVNLQILETDRRIRTSARSTEVGRRLMSIPGVGPLLASALVATVADPKAFKFGRNLAAWIGLVPKQNSSGGKDRLGGITKQGDRYLRQLLVVGALAVVRYVERHGTRRPWLVQLQTKRPTKVATVALANKIARIAWAIMTSGESYREPEPAAA

SEQ ID NO: 471691 - protein, 347 aa, unidentified
MRFYRGTHTYYCGVDLHARTMYLRLSDQQGQILVDENLRCEPAAFLGAVGPYKHDLAVTAECIFCWYWLADLCRDHGITFVLAHALYLKAIHGGKAKSDPVDADKLLVLLRGGAIPKAYVYPPEMRATRDLLRRRLFFTRKRAELFTHIQNTFHQYNLLKPAGDIHKASYRAQLAACFSDPVVRATIEADLEVCTVYDSLIKNLENRIEPLAGVHGPTAFLLLKTIPGVGKILALTILYEIHTIHRFPRVQDFSSYCRLVKPQHTSAGKRVGSGGAKIGSAHLKWAFSEAAVCFLHRNPRGQAFIKRLRHRYGPGKALSILAGRLARATYFMLKQQRAFDMERFFAT

SEQ ID NO: 471692 - protein, 429 aa, unidentified
MKNSAANKLKQVPVGYVVIGIDPHKKKHAAVIMTQDFTSHSKFKFSNSKEGFEMALERIRMEMVRTGSRGAIFAIETGGHYWRNLAYFLDERGIPFRFINQFTLKRRREGKDLNRRKNDYRDSEVAAQLLCTGEFTETQLRQGVYAELHAAHNAYRRLVKERTRITNLIKGLLDGLFPEFTQVFRDPCGQTAVSVLSICPIPHIIAAMTEDEFVNIIRTGHRGLLMRKKLRALHYAAQTSIGVKADAQSVSYELSFLVEKLSLIKWHIRSIDETLVRLVNETEEGKYLLSIIGLNYISVAGILAELGSFRSYKSAKQLIKMAGSNPTESESAGKRSGHTPMSKKGRPVLRYCAWTAVIPMLRFNPDFRAWAKKLRERPVHANPLSGREIVGAALNRLLRLAFVLVKNQTFYEVPEIESIPELELLPVGS

SEQ ID NO: 471693 - protein, 308 aa, unidentified
MERFAGIDVAKDTLEIFIRPDAIRKTFPNDEEGRMDLARLLITMKPSLVVLEASGGYEIPVVEVLALRTLNVVVVNPRQIRDFAKATGKLAKTDAVDAGTIARFGEAIRPEIRPLKDAEAQRLQALIARRRQLVQMLTEEKNRLHIAPSWTKADIEAHIEWLAGCINKVGKDISTTIKKTPLWREKENLLRTFKGIGPINACTLLARLPELGYLDRKKIAALAGLAPFNRDSGTYRGRRTIFGGRADVRAALYMATLSAVSHNPVIRAFYEHLIHAGKVPKVALTACMHKILVILNAMVRTNTPWCAR

SEQ ID NO: 471694 - protein, 318 aa, unidentified
MLIHYIDIAKRNFVIAVSSLSKTKTETNNPKGIAHTIEYLKKHKVALVVTESTGGLEIPAAKAIRRAGIAVIIANPRQTHQFAQSQPLTKTDAKDAKMPAFFTQMMTQKEDWQTMPYQPPTEAEEVLEALVNRRNQSADMRTAEKNRLHQVHETQVESVKQLIARFDRLIDESDKQIDDHTRTHFDGKAQVAEQIKGIGSITTATLMAMLPELGRLSHKRIASLAGIAPHPRESGETKFKSRCFGGRSTVRKALYMATVAATRFEPLIRDFHQRPLSEGKPYKVAVTACMRKLLTISNARMRDYFAENDTAENGIRTA

SEQ ID NO: 471695 - protein, 461 aa, unidentified
MKLMRIGVDLAKNVFQIHGVDCHEQPVWRQRLARDRWLQTVLEKIEPGCEVGMESCGGAHHWARQLQARGYQVRLIAPQFVKPYVKSNKNDANDAEAICEAMSRPSMRFVAIKTIEQQDIQATHRIRAGLIEQRTAKANQIRGLVAEYGLIAPKELLMLRRAIPCWLEEVDNGLTVRFRHLLDGLWSDLRTLDGRVHELDGEISKIAASEPTAMRLQQLRGVGPMIATALVAAIGDASQFANGRQLAASLGLTPRQHSSGGKDRLLGISKRGDTYLRTLMIHGARSALRTAASAVLSWARATARLALRWSYSASGIFLDLTSAAPRSTCSSAMSTCALLRATSASALWTAISNGRLSMVNRRSPTLTSWPSRKCSFSMKPETRARTSTEATASKRPENSSHWVTRLATGGETVTGMAGGPPWAKAADEVTRKARPAAASRRRCKGKRELPRERFAARHMWS

SEQ ID NO: 471696 - protein, 332 aa, unidentified
MLTESGYKERHPQQASAKTLFDFLKKHFPDGEYHAVYESGFSGFSTYYALKEYGIDCVVTHAADVPTTQYEEVMKTDKVDAAKLARSLRAGDICPIYIREKENIDDRSVIRIRKTIQKQLSGYKARVKHLLHCNGVEIPDRFVRPGTHWSRAFIKWLKEDVVLLSSSRLSLDLLVKQVETIRQTLLDATKSIRRLAQTDRYRNNYELLMSIPGIGVSVAMCILTEIYDVKRFRNENQFASYLGLIPTCHSSGENTASGEKTFRGNKHLGPMIIEAAWIAIYRDYGLGMAYARYKQSMKPQEAIVKIARKMSNIIFSVLKNSRKYEPYRWDKE

SEQ ID NO: 471697 - protein, 417 aa, unidentified
MEVLYPKCAGLDVHKKTVVACVRIQQGVAVDQEVRTFETTTSGLLALSAWLSEKGCTLAAMEATGVYWKPVWHILADGELELLLANAAHVKNVPGRKTDVNDATWLSELAAHGLIRGSFVPDRPTQELRSLLRTRKQLVRERSSHIQRLQKTLEDGNIKLDSVISDILGVSGRAMIEAMIAGQTDPAILASLADRRIRATSQELREALRGRLTAHHRFLLQLHLEQIDALDRAITRIDEEVKTDLDSFREATQIVRTIPGFDDLSAQSVLAEIGIDMSRYPSDAHLLSWACMCPRNDESAGKRRSTRMRKGSRWLKATLFSCAWAAARTKGSYFQAQFHRIKARRGAKKAIGAVAASLLRTIYHMLKDGTLYQDLGADHFDRRHKTASTRRLVQRLQNLGFAVQLTPAPHDPPLVSL

SEQ ID NO: 471698 - protein, 409 aa, unidentified
MEAFCGIDWAEDHHDIAVVDSGGALLARLRVGDDAAGLARLLELLAQHGDSAADPIPVAIETPRGLLVACLRAGRPVYPVNPMAVARYRDRHSSAGRKSGHGDAVVLAGILRTDRHAHRPLPADSELAQAVAVLARAQQDAVWDRITAHNKLRSHLREYYPGFLAAFAACAGGIMRPEARAILAAAPTPADGARLTLAQLRALLRKAGRSQRIEAEAARLRSALRQQQMRQLPLVEQAMGRQALALLRQLDAACQSADDLEAAATESFSRHPDAGIITSFPGVGALTGARLLAEIGDDRSRFKDARGLKAYAGAAPVTRASGKKRSVTRRHVMNNRLAAAGYIWAFSALTASPGARAHYDRRRGAGDRHAAAQRNLYARLLGCLHHCLTTGQHYNEATAFPARTTTTAA

SEQ ID NO: 471699 - protein, 390 aa, unidentified
MEARTVNNLPSAAAHDGAVRCLVAIELSKKTWVVAVNTPLSDKISLYKLRPNDWKELLELIERIQKRVAQELKKPVEVISCYEAGYDGFWLHRLLEAQGVRNHVIDPASLQVDRRARRAKTDGIDVKKLLRSLMAYLRGEPKVWNVVRVPTVIEEDDRRLHRERSRLINERIQHVNRIKGLLAIHGIYDYEPMHPERMPRLERLRTTACHRLPPHLNAEILRELQRLELVLGMIQTIEAERDAIASAKSKSRHTSAKKIQHLVKLKSIGPEFATVLVGEVFYRTFDNRKQIGSYVGLTPSPFQSGSTFRDQGISRAGNAKARTTMIELAWLWLRHQPDSFLSVWFRERVGERKGRIKRIAIVAMARKLLIALWRYLETGLVPEGAALKSK

SEQ ID NO: 471700 - protein, 441 aa, unidentified
MEKVISFEQVNEAAAGIDIGSEKIFVSPDGLLVENFGTYTSEYYRCINYLQEQGIKRVAMEATGIYWISLYNLLESAGIKVSLVNPKETKQKKGKKTDVRDCRWIQKLFSAGLLKESFIPEGKLLEIRYLVRERLDIIEMGSTYVNKMQRCLELMNIKLTQVISQVHGTSGMRMLKAIIKGERNPDVLLLLCDERIKKQKGVEVIKALEGNYNDTWLFMLEQNISLWERHQEQITQIDKRIEVLLEDLTTGKSVEEGVVGKIKPVRHHRPQINNLHETLVKFFGVNVTSISGVNSYTCLRLIGETGADMSRFETKKHFTSWCGLSAGHHQSGKRSKWVKQAPCNKAGQIFKEAAQSLENSKYIAIGSFIRRLKARRGASVAYKAGARKIAEAYYNILTKGTAYVEQGLQQYEQQIKQREIATLKKLAKKHQVQIIEKQEAA

SEQ ID NO: 471701 - protein, 416 aa, unidentified
MTVDLVHPRCAGIDISKRDAKVCVRVASAGRAKATSTVTTWGSVTNQVLALREHLVAEQVTLVVMEATSDYWKPFYYLLEDGPFEVMLVNARHVRNLPGRKSDVSDAAWLAQLGAHGLVRGSFVPPEPIRQLRDLTRTRTAIVRERAREIQRLEKLLEDAGIKLSAVATDITGVSGRAMLEALIEGQRDPVVLADLAKRRLRSKIPELTEALTGRFGEHHGFLARLHLDLIDNHTHAISELTARIEVVIEPFRGVRDLIVTIPGISTNVADVIIAETGADMTRFPTAGHLASWAGTCPGSNESAGRIKSTHTRPGNPYLKGALGVAAMSASRSKNTYLAAKFRRIASRRGPIKAVVALEHAMLVAVWNMLDTGTYYGDPGEDFFTRLNPDRAKSRALEQLRKMGYAVTLSPLAASA

SEQ ID NO: 471702 - protein, 346 aa, unidentified
MVLIGSDFHPSWQQVCWLNLETGETEEKKLVHDPGETEKYYRQFPVPSRIGIESTGNCQWFVDLLTNLGHEVWIGDAAKIRASDERKQKHDKRDAALILKLLVEGRFPRIWTPSSEVKDQRQLLIHRHKLVRVRAQVKNELQHLALNQGVQRKRKLWSEAGQKLLREIPLKPWAGRRREDLLKLMSMLDAQIESLDMAAKKAAEENENARLLMTQPGVGPITSLAFALTMGDVSRFPRGKHVASYLGLIPGEYSSGGHQRFGPITKQGNRFLRMLLVEAAQVAVRCDPEFRREYLHRCHTKPKGVAKVAAARKLAIRLYWMLRTKKQYPEIVHIESSSRVALTGAS

SEQ ID NO: 471703 - protein, 318 aa, unidentified
MDKEFIGIDVSKGTLDLAAFNTRKDWHFPNNEAGINQLIKALNELAPALVVMESTGGYETPVAYALSKAGIPCAVVNPREVRDFARATKKLAKTDAIDAEVLAHFAAAIKPEPRPISNEAAEELEAMLARRRQVVEMLTAEKNRMHMARKVVKDEIKGHIIYLEKRLAEIESNLGGKIRESPVQKMKDQLLRSTPGVGPTLSITLLVDLPELGSLNSKQIAALVGVAPLNRDSGTFRGKRHVWGGRGQVRAALYMATLVATRYNPVIKQFYTRLCEAGKAKKVALVACMRKLLTILNAMLKHRVPWHFSQPALVSNSH

SEQ ID NO: 471704 - protein, 460 aa, unidentified
MNRVRKARPAAKTAKPVAEVDALTLINPNAAGIDIGMDEMWVSVRADRDAEPVRRFGMNTPDLITAADWLKACGVETVAMESTGVYWIPPYEMLEARGFKVYLVNARHAKNLPGRKKDETDCQWLRRLHAFGLLNNSFRPAGEMRAVRAYMRHRADLIEHRAAHIQHMQKALQQMNVRLSPTVKDITGVTGMAIIRTILAGERDPVKLARLRQPGCAKPEAEFVKALTGNYRDEHVFALKQAVALYDAYTQQILECDQELERKFSALKPVHDDDLPPLDTSDKRNTHSKNAPAYDGRSLLYQLLGIDLVAVDGLNEVTVQIIISEIGTDMSPWQDDKHFCSWLSLAPHNDISGGKLLRSRTLKTHNRAGQAFRMAAQAVGKTDTAYGAFFRRMRARHGPKKAIVATAHKIARAVYFMLRDHKPFHSTSAEEYHQREREREIARLTKKATKLGFTLAPATA

SEQ ID NO: 471705 - protein, 416 aa, unidentified
MPHILFVGIDVSSKNNVVCCLPEGDSARSLSRFTVSNDEPGVLALQERILALMQKHNLTHIRFGLEATGCYSSHLARYLENVLNFAPYEQNVYVFNPSLIKVFKKTHYLDAPKNDRVDAWFIAAKLRSGHLPRAFTWSESLAALQRLSRTRFHIVQTLTRETNFLLTNLFLKFSSYNSGPLRKKTSATSLAVMEQFFDVEQIVAMSVEQLTAFVAECGKNRFDNPEGVAEALQKAARSSYRLPKAMSDAVNLAMASNIRVIRSLQEQAKSLEKAIEEHLATIPQTLTSVPGIGPIFAAGLLSEIGDIQRFPNQMALAKYAGLAWTESQSGDFKGVESRLIKSGNRYLKYYFTQAAKSVQVHDTVFAQYFSQKKAEPAKYAEKRALALTARKLVRLVDYLLRTNRLYEPREVIRQDA

SEQ ID NO: 471706 - protein, 430 aa, unidentified
MKSNTQNAKIEAITEKTLVLGIDVGSEMHYARAFDYRGIEYSKKPFKFSNTEAGFVTFKEWILDLKERHEKDKVVPGMEPTGHYWFNLGKFLQDNEMKPVLVNPHHVKKSKELDDNNPTKNDRKDPKVIAGLVREGRYMIPYLPDGVYADLRTASNIRFQLQAELTRIQNRISRWFNIYFPEYKTVYGKPDAKSGMLILKAAPLPEDILTLGIDGVNQIWRDEKLRAVGKARAKTLIEAAEHSVGSKEGAVSARMEIRMLLEDYESRNTRLQEVMVLIEELVRKIPMAEKLLEIKGVGIRTVSGFLAEVGDISRFNNPKELQKLAGLALVENSSGKHKGETTISRRGRKRLRYLLFEVAMSLVSKNQEFRELHNYYTTRRLNPLKKMQSLMAIAAKLIRVFYAMLTKGVDYDPKKMISDIKRPTVYLQAA

SEQ ID NO: 471707 - protein, 367 aa, unidentified
MAKYLIVGGDVHENHVTIKWAVDQGDSHTDSFGMTSSGQRKLISTLKKEATKAGADRIEFAYEACFMGFGLYDNLTEASIGCHILAPTKMKRSSGQSREKWDERDAQEILEIMKGHLLAGNSLPEVWIPDHKTRQDRLVIRHRLELSDKRTSLKSQINMVLKKAQVKRPKEIKQKWTKAHMNWLEGICDPEAEVLQYGSILALESKLRELRMLEEEIRIQDNNIEVLAQDDRYKEAVEELCKLRGVRVLTAMVFLTEVGDMSRFQNRKQIAAYFGIVPSIHETGEDCDRKGHITKQGSSRVRKVLCQASWTRTSVDPAYKRIAAKNPKKKKKAVVALMRRLGIRMWHIARDVQQRTGCYSRPAPALN

SEQ ID NO: 471708 - protein, 327 aa, unidentified
MYVCILSQDGEVVLHRNMQASPDALLKAIAPYRDHIVIAVECIFTWYWLADLCAQEGLPFVLGHALSMKAIHGGKAKNDKIDSQKIAVLLRGGMLPQAYVYPAAMRATRDLLRRRLHLTRKRAELLAHIQNANSQYNLPEIGKKLAYKANRDGVAERFPDPAVQKSVDVDLALIDYYDRLLNDVELTIVQTAKQHNAQTLYRLQSVPGIGKILSLVLLYEIHEITRFPRVQDFVSYCRLVKCAKESAGKRYGTAGAKIGNAYLKWAFSEAAVLFLRNNPAGQKYLARLEHKHGKGKALTILAHKLARAVYYMLKRDTVFDMQKFLNG

SEQ ID NO: 471709 - protein, 341 aa, unidentified
MQITTIGLDIAKNVFQVHGIDAEEKVVVRKQLRRGQVIRFFEELSPCLVGLEACATSHHWARELTKLGHEVRLMPAKDVKAYIKRNKNDAADAEAICEAVRRPTMRFVPVKSAEQQAQLMQHRARDLLMRQRTQLVNSIRSHLAELGIIAPQGREGIKELLAIIADDTNANMPNDARASLIVLAAQLQALETTIGALEKRITVQHRANKESKRLQTIPGIGVIGASAIAATVTNPKIFRSGRDFAAWIGLVPRQRSTGGKAKLGPISKQGDRYLRRILVVGAVSTLRRAKLNPERYPWVTRLLARRPFKVVAVALANKMARLAWALLMTGQTCRSARFAAA

SEQ ID NO: 471710 - protein, 343 aa, unidentified
MQTVTTIGLDIAKSVFQVHGVDAAGQVVIRRQLKRRQVLAFFQRLPACLVGLEACASSHHWARELQLVGHTVRLMPPAYVKPYVKRHKNDATDAEAICEAVARANMRFVTIKTPEQQGCLILHRTRHLLIRQQTSVINAIRAHLAEFGIVAAVGRNGVEQLLGVVADANDKRLPEVARACLATLGVQLRVLKAQILEFDRMINAWHRSNETSRRLDKAPGIGPVLATALVATVADPKTFRSGRNFSAWIGLVPQQHSSGGKDRLGHISKQGDRYLRNLFVAGALAVIRYAKIHGTQHRPWLAALLARRPTKVAAIALANKIARMAWAMMVKGEHYKEPVALAR

SEQ ID NO: 471711 - protein, 338 aa, unidentified
MTTGLAAGTYELFVGIDIAATTAEVSTQRPGAKAGRSFKIDQTPEGFHRLVHTLQATDNEPSHVLVVMEATGSYWISLATRLVHEGFRVSVINPSQAHHFAKALLKRAKTDAIDAQTLAQLAMVLQPEPWMPPPQIYYELQQRLAQRDDLLNLRQQVRNQLHALEQHPEVITPVRTRMESLLSIFQSQIDEVELEITAVLNQDTAWAAAAARLQSIKGVGWVTAAWTLVTTLNFTTCDTVEALTAYAGLAPMPRQSGSSVWHRPSIGHSGNGRLRTAFYMATLTAARFNPPIKTFYSRLLEAGKPEKVARCAAARKLLHIAWAVVKKDQPFDPHYAQG

SEQ ID NO: 471712 - protein, 344 aa, unidentified
MDTIGLDLHKRESQLCVLTEAGEIVERRIVTSRERFTAVLGGRPAARILVEASTESEWVARHLESLGHEVVVADPNFAPMYATRRRGVKTDRRDARTLAEACRLGAYRPVHRASAPQRHVRAQLAVRDALIRTRTRYVSVVKALARRDGLRLPPGTPAHTEAKLAALPLPAPLAEEVAPLRAVLDPLNREITTADERLAAVAAADPVVARLRTAPGIGPVTAVAFVATLDVVTRFASAHHVAAYLGLTPREYSSGEQQHRGRISKTGSPRMRALLVEAAWRVLRSPDPAAAPLRAWAERIALRRGKSVAAVALARRLAGILYALWRDNAVYRTPAPHPDAAAEA

SEQ ID NO: 471713 - protein, 343 aa, unidentified
MQTVTTIGLDIAKSVFQVHGIDAEGKVVLRRQLKRRYVLAFFQKVSPCLVGIEACASAHHWSRELQALGHTVRLMPPAYVKPYVKRHKNDATDAEAICEAVRRPNMRFVATKTPEQQSCLTLHRTRHLFIRQQTSVINVIRAHLAEFGIVAPVGRNGVEQLLEVAADASDKRLPDIARACVAALGAQLRMLRAQILQFDRMIMAWHRSSEASRRLDNIPGVGPVLATALVASVADPKMFRSGRNFSAWIGLVPKQNSSGGKDRLGNISKRGDRYLRSLFTTGALAVIRYAKIHGTKHRPWLTALLARRPAKVAAIALANKIARMAWAIMARGERYREPAALAA

SEQ ID NO: 471714 - protein, 341 aa, unidentified
MDKLDFSGIEVSAEELVVALQRKGDRKALKTFPNTLPGHQAIIRHLSAAGRTVRVCLESTGLYALDLALALHRAGIQVMVANPRAVRHFAEALMKRSKNDRLDAGVLREFAARMPFQAWQPPATAALQLHALARRLQALTEMQTAEKSRLAAIQATATTPAALRRDLDRSLRSLRRSIARLSGEAVKIIDQDKELKLRFDLLLSVRGSIAATSAIQILAELAVVSPDLDVRQWGAYTGLDPRECSSGSSVHKKIRISKAGNAHLRRALYRPALVAIRHQPHLRAFYPHLRAQGKLKRVALVGVMRKLLHAIYGMFKHQKPFDGSKVYSLPSPKISTEEVAA

SEQ ID NO: 471715 - protein, 319 aa, unidentified
MTDKPVGVYVGVDVSKTQLDVAIGADGEYWKANNDEAGICGTIQRLQPLQPALIVVESTGGLEIALISELYAAGLPFCLVHPGRVRDFARSIGLLAKTDKLDAHLLARFGEAVKPPLTQLPGEAEQTLNALMLRRRQVLDMLVDEKNHLASTRLSLRPDVEEHIAWLKEKLADLDRQIHDQMQHIQPFVEKGAVLRSAKGVGPVLCAKLLSGLPELGQMNRKKIAALVGVAPFNDDSGRRRGKRRIKGGREDVRKVLYMATLAATRSNPLIRPFYQQLLKEGKLHKVALVACMRKFLTILNAMIRDMKYFDPALGLARS

SEQ ID NO: 471716 - protein, 421 aa, unidentified
MSNVTEFGKKVKDQEKKLMENVSWVVGIDIGKEKLSCALMDIKKALICRFDVEGSRAGYNELLNRVKKETKGSGKIIFALEPTGHYWMVLGQFFEDHNQSYVLIHPLVAARSREVHRLNKGKTDSLDARLIGELACDRSITRTQIPEDYWATIRFFAREYMDREKEIAREKNRIVSYLETTLPGFVEIFPKPLCMSGRACLRFLANFREASKGDMEHFEMQIRKHFPGKRLMTSRVRRLYDMLQRGDVLGLRAGRQAMFFRIIHSLNRLEMYEGQEEAAKQAMLDMYKKSEYKEYLDSIWGTAPSVNALILGFMGDPALYDSPASLVKLAGCDPVPNESGKFKGRASISHRGRSLLRKAGDRVSFLLEKRNSVFRAFFNHLMSRQKNKFTKRQARVACINKYFRIVWVLCHYRVPFNPALA

SEQ ID NO: 471717 - protein, 359 aa, unidentified
MSERTSVGLDVHARTTVAAVIDERTGELTRRRMGAGVDEIVGWVTGLPGPVAATYEAGPTGFGLARALTAAGVRCVIAAPSKLQRPVGDRVKTDARDAVHLARLLRLGEIVEVTVPSVHAEAARDLVRAREDARGDLMSARHRVSKLLLRQGIQYSEGKAWTVAHLAWLRRQKFELAGLQAAFDAAYDAMIATTDRRDRLDTAIANMAADSEFTPVVNRLCCLRGVSTLTGFALAVEIGDWTRLDGHRIGAYVGLTPSESSSGASRALGGITKTGNGHARRLLIEAAWHHRPAYRPSSPIMRARWDRATAEARARGHVGNQRLHDRWVRFQTRGKRTVVANAAIARELAGWCWSLAIMT

SEQ ID NO: 471718 - protein, 340 aa, unidentified
MVHVGVDLHKRLSQIAVLTADGELTQHRLPNDPARLEPFFAQLPTPSPVAIEASGTWWWLVDLLERLGHQPVLSHPKETKAIASARLKNDKVDAQRLALLLRGDLLPTVWIPPAALREARELIRHRVGLIWLRTQVRNRLLAMLARRNLQPTHAKRWLTVRGQRELQTLPLTAAPTTIREDCLALLSVLDAQIRRLDTELCQQWGSDPRVQRLLTIPGIGPYLAILLVLELGDVQRFPSAKHLASYVGLTPRIRASADRIRSGHISKEGNRLLRWALVLAATQAARRPGPLRAWFRAVQQRKGKKIARVALARRLAEIVYHVWKEELDYFVVLRRGVVRG

SEQ ID NO: 471719 - protein, 428 aa, unidentified
MNEDELSRLKEFRQLKKQVQGSESHLIVGIDVAKDRHHAFLGTATGRTLVKKLIFENSASGFSELLARVEAVRAQSGLSGVVFGLEPTSNYHKPLGRYLISKGCHVVLVGGKAVKNNRELLDERWDKHDTKDAANIADLVSRGKCFYYDMPSGQIEELRELHSLRARLKKEEHSLNLRIRNNLLAKHFPELDSFYTASERETLAIVRWCLNPRQIAAMPFEEFFKRVAPNARGIGQKLRLQKIHRLAHESIGCPVDSAVQLQAGLLVEKMKQVREQIAQVEQGIQQRCVQFPSYGHLLSIPGFGPYVASKVLATIADPWRFDSAKQVIRSAGYDLCADRSGKSSDQAVPVISKKGNSQLRYALYQAALIASSRHRFFMAYFARMLQGRERERGIRTKMRVKLAAKLLVIAWTLMKRGESFNPEYLKVQ

SEQ ID NO: 471720 - protein, 332 aa, unidentified
MDNFYFIGVDVSKKKLDFCVLFEGKVLREEQVSNHQQAVARLIGELKNDLEMDNEQFLIFAEHTGQYTFPLVCACKSVECKLWLENPSQIKYSSGMQRGKNDKVDAKRIAIYASRFGDKVKYYDRPTEEIERLKQLERERALYVTDLAKYKGQMYDQKDFMPAALYRKKTKRMKGLIQELQAAIDAITAEMEKIIGSTEVLARQMELLMSIDGVGKVVALNVIIETEAFSRFDNPRKFCCHAGVAPFSYTSGSSQHSKNKVSHRANKNIKKLLHMAAVSVTHRKEGELKAYYMRKVEEGKNKMSVINALRAKIVARMFAVIKRNEFYTPIYS

SEQ ID NO: 471721 - protein, 326 aa, unidentified
MNAPELVFVGIDVSKDTLELALDDHSPTRRMSNDVTGIAPLGEELTALGARVGAIVIEATGGYERQVAVALCISGLPVMVINPRQARDFAKAMGHLSKTDAIDARVLSHLAATLHASERRERLLMKVPEPQQEALQALMVRRLQLVGMRVAESNRLAVSHRAQHKSIKAVLRVLDRQIEVIDRNIDSHLDEHFAGKLALLQGLKGVGRGTQASLMAGLPELGRLSRAQISKLVGVAPLNCDSGRHRGKRVTWGGRAPVRAALYMAALTAVRHDPTLMAFYQRLLANGKPVKVALVACMHKLLTIINAILKSGQPWSANHQTLQKTA

SEQ ID NO: 471722 - protein, 330 aa, unidentified
MKNYVDVIGIDVSKLTIDAHIHNKSVHRVFSNAPKGYRALLSWAKKHLAEQSYFFCFENTGHYSSNLSVYLSETNMDYVEESPLAIKRSAGIVRGKTDRLDAGMIARYAWLHKEELVLSSPKEQNIQELGRLLSFREQLVRDRTGKMSSLKEMQSLLSSPSTDCCCKIITKTIHYLTKQIEALEDRIKVLLKKDASLKKNFDLLNTLKGVGLILSCQLLFHTNNFTRFDSWRQFSSYCGVAPFAHSSGTSIRRKNRIHHIGDRKMKTLLTLASVSAIQCDKELKHYYKKKVAEGKPKMVALNNVRNKIISRAFAVVKRGTPYVPMQQFAA

SEQ ID NO: 471723 - protein, 320 aa, unidentified
MASRESLFIGIDVSKQTLDVAFGADPHAPRETIPYTDEGVQLLVTRLQRLQPTLIVLEATGGLERMVFAQLLQAGVPTARVQPRRVRALAHAEGRQAKTDRLDARLLARFAERVRPPHHQATDEQRASLRDLLVRREQVIQMRTAEINRLTAAAPNLRPGIQQHIDWLDQEIRALEQERDNEAERTDEVRRKRELRESVPGIGAITALNLLLRLPELGTINRKEAAAFVGVAPYANQSGAQHKPRHISGGRRDVRSVLYMATLAATRRRLVRRAFDQRLCQAGKPRKVAIVAAMRKLLTILGAILRQQKPWDPAVHTSAP

SEQ ID NO: 471724 - protein, 340 aa, unidentified
MSEITTIGLDLAKHVFQVHGIDAQGTTVLRKRLRRGQVLAFFSRIPRCVVGLEACATGHYWARELGALGHEVRLMPAQYVKAYIKRNKHDAADAEAICEAVGRPTMRFVPVKTADQQATQLLHRGREQLVRQRTMLVNALRAHLAEFGMVAAQGLRNVGELIAIIRDDGDRRLPAVARQVLQVLANQFEQIEAAVAALERQLLAWHKTNPVSQRLASIPGIGPIIATAIASTVADPNVFRSGREFAAWLGLVPRQNSTGGKIRLGGITKRGNRYLRRLLINGASANLLRSRATKADPWVIGLRRRRPPLVVAVALANKTARIAWAVMLREREYQPRAVAA

SEQ ID NO: 471725 - protein, 510 aa, unidentified
MPYRISGIDVHKKMLAVVVSDVEIESEYQFERRKFGSNPAELRALATWLLEQEAEEVVMESTAQYWRPVWEALERYWKPIREKREGAGRRAGTLHLAQAQSNRGRRGRKRDFPDAERLVKRLVSRELVLSFVPDPEQRLWRTVGRRKYQLTRDRVRLQNQLEALLEEAHIKLSSLVSDLLGASARRMLKALAEGETNPAALAALADRQLRATPEQLCDALGACTDLKPVYRRLLNMILEQLQFLEKQIDHLDQEMASLLSQHQDAVQRLAEVPGLGVDSAQQIIAEVGPTAATFPSGKHLSSWVGACPGDDESAGVNYSHRSPQGNRHMRRLLNQSANAAVKAKGSIFEIVYRRTVPRLGHPQTIGAIAHRQCRLIWLILHQGVRYEERGPAVNQKSKQARTARMIRQLRKLGYQIEPQNLPQHKGSDFRPCVLASATVLPSGSWRSPFLDCARFRFYEFSVVLEVMPPQKNRPASLLARNFWAMREGRPFVVSSLSGSQFAQKGAPLNE

SEQ ID NO: 471726 - protein, 350 aa, unidentified
MKKVVKQVVGIDVAQDELVCCFGKVYEDFTLDLVTRYIFQNKPTGFKKLIEWLEPIVNKEVQLRFVLEATGVYHQSFAYFLHDQSYAVSIILPNKISNFKRTLDVKTITDKTMADAIAQFGLERNLDNWQPPKGIYRTMQQLTRERSQLIDEKVVIKNQLHAENAEAKPNKKSIERCNKRLALIEKQVKEIVQEINDLIKTDEEVKKIMLLVCSITGIGILTAATVLGETNGFELIRNKRQLTSYAGLDVKEKQSGTSVKGKPSISKKGNKHLRKAMHLPALSAIKHDERFKAIYTRIVSKHGIKMKAAVAVQRKLLEMIYTIYKTKVTYDKAYFKKHNEIIEAVECEIV

SEQ ID NO: 471727 - protein, 396 aa, unidentified
MQITPAAGLTACKGGHFMYRILKIGMDVHTTNYTLCALESKFGEEDTVLANITVGPDHKNVLDFVRRIKEKMDPKGKDKIDVECGYEAGCLGYSLYQLLSACKLKCTILTPTTMHSEKGPRIKTDRRDAKLIAQCLSNGGYHAVHIPTAEDNVVKEYVRMRDDHKLALKKVKQQTNALCIRFGFLYDGTKWTGIHLKWLRTLELPELIRETLNEYLATYDELTAKIARFDQRIQEIAGQEQYREKVRKLECFLGIKTHTALSLIVETGDFIRFRKGNVYAAYLGLAPGEHSSAESGGRLGITKAGNSHLRRLLIEASGGICKGQIGKKSKDLIARQAGNSAEVIVYADKANIRLRSKYYRLIRHGKKRNVAVTAVARELACFVWGMMTDNIHGNAA

SEQ ID NO: 471728 - protein, 356 aa, unidentified
MGKDITSVGGLTIGLDLGDKHTVGCVLTRSGEVEETFSVATTMSALGRTMAGFESSRVVLEVGTHSPWVSRLVEQAGHEVIIANPRRVRLIAENDSKTDEVDAELLARLGRVDPGLLKPIVHRGERAQHDRILLLARDGLVRSRTQLVNQVRGFAKSLGHRMPSSSTEAFPRRVREQFSKDLFPGQSVLLEMIARLTQEILRLDREAEELCKDRYPETGVLRQVKGVGALTALGFVLTLEDPSRFAKSRTVGAYLGLRPRSRDSGEQQPQLRITKAGDELLRRYLVGAAHYILGPFGPDTELRRFGQKLAERGGKAAKKRAVVAVARKLSVLLHRLWVTGEEYQAIGYGQPTQEAS

SEQ ID NO: 471729 - protein, 413 aa, unidentified
MSSTLIVGIDISSELNAASFIDEAGNRLVKKSLFFPNDLDGAQQLVDFTISLAQQFNISSIKFGMEATSHYAWHLHTFLASSPELAPFNPLFYVINPSIIKSFKGAYIHLPKTDSVDATVIAECVRFGQVKPTPLPDLRYAALQRLTRMRYHIVRSLVREKNRALSLISFKFSTYPSECPFSNIFGKASLAIIENFTPDDIASMPLDDLIDFIVKNGNNRLSDPTQIAKTLKAAANRAYRLHPDLAEANDLALSMTLENIRFLESQLKKLDGEISRQLKAFNQTLTTIPGIGDVLAAGIIAEIGDIKTFNNEAALAKYAGLIWNKYQSGNFNAQDTSLVKCGDQYLRYYLVEAANCVRVHTVRFKEYYNKKYREVPKHQHKRALVLTARRLIPLIFAMLSKGQIYQERGVVSI

SEQ ID NO: 471730 - protein, 368 aa, unidentified
MIKYKLEAAPTAISKTQNSQKELKANRILIGVDVHLKSYEAARKIDNDSVGVVQRLGSKEEFLLYAQKQLEQAEEVVVVYEAGPLGYTLYWDLKARGIECLVCAPQSQEQKRKRRKNNAIDARTLSGNLFNYLNGNKHALQLVRVPTKAQEQARIGSRQHDALVEERKRIAAMGNSLLLSQDYGSWRNWWRPKAFERLSQLVAPWVLKQLKRWVKILGELDQQIQQAKVELTQQYQGPRPKGMGAPSLAQLNAEVLDWNLYCSGRKIGCLGGMVPSEWSTGQGQRLGAITKVGLPAIRRIITEMVWRMILFQPQYKAVQKWREVLEGSNPGLKKKAVVAIGRRLIVDIWRLQTGRISAQELGLIMIEG

SEQ ID NO: 471731 - protein, 395 aa, unidentified
MEPALTKRKTETVNDFSRCLEPLDMDATLIAVIEMSQSSWLVAGIVPGVERQPLKKLAIDEQGLLNLLSRWRAEAEKEAHRITRIAVAYEAGHDGFWLARWLAAQGVETHVIHASSVAVTREHRRAKTDRLDTELLKRGFLGWLRGERGHCKMVAVPTLAEEDAKRPSRERETLVGEATRIITRVKAAFVRLGIRGFNPKLKAAAARLETLRTPEGEPIPPNTLAALKRDLERHQIVKKQICEIEQTRLERLEKSPAKGPHAMVLLLARVIGIGVETADMLVQEVLSRNMRDRRAVARYAGLTGSPDESGAKRREKGLARSGNARVRRGMIQLAWRFLLFQKDSALAQWYRQRTADAPSTRKTFVVALARKLLIALWQLVRDGVVPEGVRLRPAA

SEQ ID NO: 471732 - protein, 344 aa, unidentified
MKYYAGLDVSMEESSVCVIDESGAVVAEAKVASEPVAIAGFLAPWSGSLAKVGQEAGGLSPWLHAGLVGLDLPALCIETRRMKAYAKASPVKTDRRDAKLIALALRAGLYRAVHVKSVAAHKLRLALTARQAVLRQARQLQGKIRGDLKVFGIKLGRVGSGGFAGRVKVCLAEHGDLWALVVPLLELRAALLAQVRVYDGLLRRLARSDELCRRLMTAPGVGVQTALAFRCGIDRPERFRRSGSVPAALGLTPKIDQSGERERCGAITKAGDKLLRSLLFEAANALLTRTRSWCALKRWGVGLAKRRGMNRARVAVARKLAIILHRMWCDGSAFRWSERQTKAA

SEQ ID NO: 471733 - protein, 406 aa, unidentified
MNYSQRIVYGGVDTHLDVHVAAVVDHAGTLLGTSSFPTSPLGLRRLERWLARHGEVAKVGVEGTGTYGLGLTRVLQAAGHTVLEVNRPNRQLRRSRGKSDTVDAEAAARAVLAGHATAIPKSHDGIAECLRVLRVADRSAKEQMTRIGGQLAQLMICAPEQIRVDLHGLSELKKARKAAAYRPGDDLTQVTAATKMALRTLARQWLALRDDRAELRAQIQQLATRANPALLQLPGIGPDTAAALLITAGDNPQRLRSSAAFADLCGVSPIQASSGKQHRHRLNRGGQRQANAALHRIVLVRTAHHDPRTMDYIARRTAEGKSKRDITRCLKRYIAREVYHALLHPDNGIDASTLRNRRTALNIPMRIVAEHFQRPINAIARLERGTVHDPDLTTRYHAWLDTQTAA

SEQ ID NO: 471734 - protein, 405 aa, unidentified
MNAVGIDVSKGKGTVTIRKPGDVVLMSPCDIPHTQSAINDLIKQIKSLEGETKVCMEHTGRYYEPVATWLSDAGIFVSAVNPILIRDFGDDSLRTPKTDKADSKKIARYTLDRWAKLKQYGIMDKTRNQLKTMNRQFGFYMAQKTAMKNNLIALIDQTYPGANDFFDSPARNDGSQKWVDFIHTYWHVDCVRSKSLNAFTEHYQNWCKRKNYNFSAEKAAKIYQISSDLIAVFPKNDITKMLIWQAVALLNTASKTVESLRSKMNGLASTLPEYPVVMDMNGVGATLGPQLIAEIGDVSRFTHREALTAFAGVDPGKNDSGKHIQNSVRTSKKGSPYLRKTLFQIMDSLIKRSPVDDPVYAFMDKKRSEGKPYYVYMTAGANKFLRIYYGRVREYLSNLSNNETI

SEQ ID NO: 471735 - protein, 345 aa, unidentified
MGNYCGIDLGSKRTTVCVMDKRRQVLRLVEVKTTTEGLKEALSGYRRLTCIVEAAPLAEWTATAVEELGHQITIVCPRKAKVALESQGARKKTDKRDARALAELCRSEWYEAVHRKSEEARNMRSYMTARKQLVVASNAIASSIRGILRAHGIKLPERGDGESFADRVTAVMKPLAKSVQAAIQELLQAWELLHSQQQRMYRQLHDQLKSDPVAERLMTIPSIGPATAAAFIATIDDPNRFSDGAKVASYLGLVPSVYQSGETEFRGRITKSGDKLLRWLLVEAAHIMLTRSKTENPLRTWGIELQQKKGVGKARVAVARRLCVLMWTLWKDGGEFYAEPIAAAA

SEQ ID NO: 471736 - protein, 405 aa, unidentified
MEIIIERGCGLDVHKETVVACIMGTGIKKEVRTYTAMTNDLLRLKGWLQEAGVTHVAMESTGVYWKPVFNILEDNFEVILVNARHEKNVPGRKTDVQDSEWLCRLLRSGLLKGSFIPPRGIRELRDLTRYKRKLIQTIVAEKQRVEKVLEDANIKLSSIASDTFGASGKKIIDELMKGKLEAEEMAELSKGRLRQKREDLKEALVGEVREHHKFMIRASLKHIRAMEKILLGIERKIQEKIEGDYKEEDELLQTIPGVKENASTIIAEIGVDMDIFPNEMHLSSWAGMSPGNNESAGKKKPGSTTYGNKCLKAILTEFAWVASRMKDTYLRSKYHSLVGRRGKKRTLVALGHKILIMCYHILKYRCVYKELGGNYLDERRKERITKSYIKRLNHLGYEVILREAA

SEQ ID NO: 471737 - protein, 317 aa, unidentified
MNSENNQNEINIGVDTGKTQLDIYIRPLDIFFSVSNDEKGIKKAITEIRKYKPTRIIIEATGRLEHAFIMACSKANLPFVVANPAHIKKFAGAIGRLAKTDKLDAQLIAHFGEAIKPVLSTLKPENMQLMSDLLSRRRQLMTMQTMEKNRLQIMPKEISSFIKPMLTAIKNQLEKIDNKLIKLIKDCEEYKAKNDIIQSMPGVGKVVAFNLLSDMPELGYITNKQASALIGTAPINRESGIYVGKRMIRGGRPKIRTVMYMAMMSAMQCNLVFKATYQRLVAAGKPKKVAIIACVRKMIVILNSMVRDGVMWDSKMS

SEQ ID NO: 471738 - protein, 434 aa, unidentified
MEEVTDEPLYRDRVCGIDIGKAQMAATIRVPSDSNPARRASETRSFGTTRREVLALADWLRCWQVPAVVMEATSDYRKGPFCRLEAGGFECVLADARQVKNLPGRPKRDPSDSRWLAACFERGAVRPCFVATPEFRIIRLHTRCRRDLTEERTREKQRTEKLLESAGIKLSSVISRLHLVTGRDIMDHLIAGERNPKVLAQLARTAARRKIAELEEALEGAEFFTAEHAALLAMMLARIDRLTAGIDELTTVIERLLAPYEEQLQQAESMPGWQRRAAQDALAETGVDMTRFPTGAHLASWAGRTPVDHQSGTRKGRAKAKKGNRYLAGITGETAVAAGRTQTRDGVRHRRLARRRGTAKACVATGNTQLKASQLLAGPGTRYQDLGPDYYERQASIRRQIAHHVGKLGALGFEVTLCRVPGPEPSDSASTPAA

SEQ ID NO: 471739 - protein, 369 aa, unidentified
MNNYTTVVGLDVHKESVVAAVLPYGHKDVVEQVSIDNNPKAIEKLVNRVTRLGPAEFVHEAGPCGYQIQRQIAGLGHRCAVIAPSLTPVRPGDRVKTDKRDAVNLARFYRSGDLTEIHIPTCEEEAARDLPRAREDVLKDRLRARHRLSKFLLRQGRVFQGTKSWGTAYKAWLRTQKFEWPALQQTFEANMRAHDEAEARLELLEQQTYELAQQPAYQMAVNCLRTLKGIDTLGALTLVVEAQDFRRFSKASEFMSFTGLVGSENSSGEKVQRGSITKAGNAHIRRVLVEAAWSQRYPNVKSLQLAERRKGCPPEVLKIAKKAQARLHRKFLRMTSRNKLHQVTVVAVARELAGFVWSIGQHIPAAMTA

SEQ ID NO: 471740 - protein, 326 aa, unidentified
MNTSELIFVGIDVSKDTLEVALDDQSKTQCIANTDADIAALVKKLAPRSEQIGVIVLEATGGFERPVAVSLCLAGLAVMVVNPRQARDFAKSMGHLSKTDALDAQVLSHFARTLHQSAQRERLLMKLPDAHQDALAALFIRRSQLVGMRVAEGNRLAMSHRSQHKSIREVLKMLDRQIAMMDKTMGGLLKEHFAEKLALLKNFKGVGRCTQASLMAALPELGQLTHAQVGKLVGVAPLNADSGRHKGKRITWGGRATVRTALYMAALSAIRFNPVIKAFYERLLARGKLKKVAMVACMHKMLTIMNAIIKSGIPWNPDHQNVPKNA

SEQ ID NO: 471741 - protein, 417 aa, unidentified
MTQYAAYLGIDWADKKHDLCLVDATSGQKTKQVLAHTPQAIAEYFSNLRCRYPGQQIAVGLEQSRGPLLFALLQYDFLVLYPLNPTTLAKYREAFTPSRAKDDPTDADYASELLMKHSERLKAWHPDDDQTRTLRYLVEHRRRLIGDRTRLSNRLTSLLKCYFPQVLGWFPELTTVLVCDFLLRWPAWERLQGVKRITLLNFFRAHHSVRADTLERRLAAIKASVPLTTDRAIIDSSVLMITALAAQMKTTIGAIKQFDEAITKLCVVHPDFPLFQSLPGAGEVYASRLLAMMGTQRDRWTTADELACLAGIAPVMERSGQSVWIRWRYFCPKFMRQSFHEYAGESVKHSFWARAYYEQQIAKGKSRQAAVRALAYKWIRIIWKCWQTRTPYSEVKYLEALRKKGSPLLSFAATKAA

SEQ ID NO: 471742 - protein, 339 aa, unidentified
MTVKTVGLDLAKDVFQVHGISENGRVIFNKAIKRAKLLSFFETLPPCTVGMEACGSSHHWGRQLRKLGHDVKLMPAGYVKPYVKRGKNDAVDAEAICEAVRRPTMRFVEIKTEDQQAILSIHRTRDLAVRQRTQLANMIRSLLREFGHILPIGIEAVTAFAKRHSDGDHPDMPEIANGMLGIQCYQFIGLNERISGYSKMIEQHAMLNADARRLMRMPGIGPVTASAIVATIGDAKQFRTGRDLAAWLGLTPLNKSSGGKERLGKITKQGDRYIRKLLVVGMTSRAVMAKRSPEKVDLWTAKIIAAKPFRLATVAMANKAARAVWAMLTKKQEYRQPAF

SEQ ID NO: 471743 - protein, 347 aa, unidentified
MRKIVKQVAAIDVDQKLLVTTLGRMYDDWSPELYAQKTFANTQKGFEAFLVWVKNNTVNEVSVRFVMEATGVYHEGLAYYLDDQGEEVTIVLPNKISNYMRTLETKTITDKTASEAIARFGLERKLELWKRPKDIFKKLRQLSRERDQLITERTMVKNQLHAEQAEAEPNKSSITRIKARIKMLVKQEQEIKAELSALVSSNDEIKKIVVLLCSLTGVGILTATSVLGETNGFELIRNRRQLASYAGFDVKEKQSGTSVKGKPKISKKGNKYLRKAMHLPALSAIRHDERFKAVFRRIVSRHGIKMKAAVAVQRKLLEMMFTLYKTNTPYNKEYLINKEMPTAALSA

SEQ ID NO: 471744 - protein, 321 aa, unidentified
MVYIGIDISKNNFVVAYPSTNGYSTKTFPNSTAGVRTFIATLSVAEHHCVMEATGNYCFLLLYLLHQSSIAVSLVNPKQIKHFARMMMAVTKTDEKDACMIAMYGEKMNPPIYKMPSQSIILLKQKKTVIRQLRKQLVASKNLRGSLIVLPYRDKACVRTLDKTIDFRTKQIEQLEAELADIASSEFDKQLKALTSIKGIGITLATALILTTGGFTYFDNAKQLSRFIGICPTYQQSGTSVNIKGHINRNGDEHLRSLLYVASWIALRYNASCRECYLRLKANGKPSKVALIAVANKLVRQAFAIATTDSTYIDGFISTKK

SEQ ID NO: 471745 - protein, 412 aa, unidentified
MEGETVIAGVDTHKDVHVLCLLDGLGRKIWSGSFGADPEGYDRLAEAIGDPGSCMVVGVEGTASYGAGLTRRLVELGYNVVEVLRPKRDKVRPGEGKSDPLDAERAARKAASGRGCSVPKSQDGWVEAVRQLYVARRLAVATSTSCVACAKSMLTTAPSALRERFRGRERPKDLMPLLARGRKAGDALEESVLASLRSVAAVWKEARSQVESLDERIRALLEANAPALLGVEGCGTTTAAALVVAAGDNPGRLKGEAAFSMMCGASPIPASSGKTDRHRLNRGGNRQANWALYEIAIKRMAYDERTRRYVARRTSEGKSRREAVRCLKRYIAREVYHVLMDPNPDGAAPEGPELAKMRKAMRVTQKKAAAELGLSAATLGHLERGKRRSTKLERRYYELLCELERTLPQTAS

SEQ ID NO: 471746 - protein, 391 aa, unidentified
MIYVGIDVAKDKHDCFITNSYGEVLFKSFTIPNNRDGFETLFQKVQSVSDDLTKVKVGLEATGHYSYNLLGFLLDKGLTTFVINPLHTNLYRKSLSLRQTKTDKADARTIASMLMSDMNLKSYSDTSYHNEELKSLTRYRFDKVQERAKLKTSISRLVCILFPELEKLVPTLHMASVYALLSEFSSAHAIASVHLTRLTNLLSESSHGRYGKDTAVIFREAARNSIGSDMPAKSLELKHTIKLIQELTSEIDEIEAEIKSIMDEINSPILTIPGISYNMGAMIIAEIGDFSRFDSADKILAYAGMSPSTYQSGQLDNCYSHMEKRGSRYLRYALYNATKYVCHWDESFGTYLAKKRAEGKHYNVAISHAAKKLVRTIYAMEKSKQSYNLVA

SEQ ID NO: 471747 - protein, 340 aa, unidentified
MNATTYGLDIAKKVFQLYWVDGQSGEIVNRRFGREEVIGFLARRPAGRVALEACGSAHWWARKIQALGHEVVLLHAKFIRPFVQTNKTDAADARAIWTAVHQPGMRTVAAKTQDQQAMLSVHRMRALLVKFRTMQINQLRGLLYEFGVTFRAGRLAGLAEIRTRMAELEEVLPGALQSSLEDQLKRIDVLQNDIDELEKRIGAWNKQEAACRAIAEVPGIGRLTATALVATMGQARAFKSGREFAAFLGLVPRQSGTGGKVRLGSISKRGDPYVRTLLIHGARSVMANAKAPGAWQTKIAARRPANVAAVALANKMARTAWAILAHGRVYQQDYVSVGPA

SEQ ID NO: 471748 - protein, 351 aa, unidentified
MKYYTSSTEYNCGIDLHARQMYACVMDRQGKKLVHTNIKGNDFGYFLKRVEPYRQDLTVVCECIFNWYWLADACFEADIEFVLAHALYLRHIHGGKNKNDRIDSEKLAHLLRANLIPPSYIYPSERRPVRALLRQRMSYVWERATLKTKLSMAQTAEGLVPARKCGHNRDVWEERILAQYTNPLHKFAAICDMNMIRAYDVQIEKLEDEIVRRAKKCLGRDFHLLLSVPGIGRVLAMTILFEIDTIGRFPTVKDFLSYCRLVKGSVASAGKVKGLTGGKMGNAYLRWAFGEAAVIAKRNHPLLTPYAEKLTSRHGKFKGNAILANKIARAVYFMLQKGTAFDAERLIATSL

SEQ ID NO: 471749 - protein, 391 aa, unidentified
MPTVADQAEAPIAIQTHLACIFASLELSRSIWLITSLSPGSREKMSKHSVRAGDVAALLARFAELKRKASGRTGKSFPIVVIQEAGLDGFWLHRVLQSEGIESHVVDPASIATSRRRRRAKTDRIDGEALLRALLAHKRGEPRVCAMVRVPTPEEEDRRRLCRERKVLIAERVEHVNRIKGLLFSQGVFGYEPLRRDRRQRLDELATGDGRPLPTHLKAHISRELDRLELLLDQLKTAEAERNTLLAEQPAATEVPAPVGRMLLDFKGIGAEFAAVVWLEAFFGHFDNRRQLASYAGLAPTPWQSGSVDREQGVSKAGNPRLRNTLIQLAWLWLRHQPQSALALWFKERVNRNGGRIKKTIIVALARKLLVALWKYVTAGVVIEGAVMKSH

SEQ ID NO: 471750 - protein, 355 aa, unidentified
MNDAKYIGMDVHQATISVAVLDCAGKLVMEAILETKAETILQFIHGLRGSLHVTLEEGTCAAWLHDLLKPHVTQVLVCDPRKNALIKAGNKSDRIDARKLADLLYLNKLNPVYHGETGIRALKEVARSYLALTRDTTRVMNRLKALYRSWAIPCAGQKVYAQRYRSEWLAKITEAGVHRRAEIYYQQLDALRSLREQVRRDLLAEGRKHRAMKLLRQIPSIGPIRAVLLIALMQTPHRFRTKRQLWAYCGLALKTSTSGEYRIVEGQLKRSKKFLAIRGLNANHNHDLKNIFKGAATRAAAVPGPFHDFYAALVAKGMKPAMARLTLARKIAAITLIVWKKGVNFDAEHLKQQAA

SEQ ID NO: 471751 - protein, 350 aa, unidentified
MLIIGVDYHPGFQQIAYVDTETGELQERRLGHREEAEKFYRDLAGQGMKVRVGMEASGHARWFERLLCELRFELWIGDAAEIRTKRVRKQKTDRQDAQLILKLMLEDRFPQIWVPSWENRDVRQLLWHRHRMVQARTRIMNQLQAVARNEGLRSKKRLWREAGREQLLAFRLAPWASRRRQDLLELLDRLNPTIGELTKAVEEEAEKCPEAQRLMTHPGVGPLTALAFVLIIGEAERFGCGKQIASYLGLVPEEDSSGERRRLGHISKQGNSLLRFLLVEAAQVTVRSNQEWRSKFFHLAMRRGRKIAKVAMARRLAVRLYWMWRKEWNYEQLTKFGSHAGQPGHPHGVQ

SEQ ID NO: 471752 - protein, 355 aa, unidentified
MTSTKYIGMDVHKKSISIAVMNSVGKVVMECVVETKASTIVQFIDGLRGDLQVTFEEGTWAAWLYDLLKPHATKVVVCNPRNAALLKDGSKSDRIDAHKLAELLYLNRIKSVYHGEHGLRTLKELARSYLTITKDLTRVMNRLKALYRSWAIPCTGSEVYAPRYRAEWLGKISEAGVRRRAEHYYQQLDVLRILRQEVRRDLLVEAKKHKAWKLLRLIPGIGPIRAALLIALMQTPHRFRTKRQLWKYSGLGLETHDSAQYDVAEGRLQRSKKPATVRGLNKDHNHDLKDIFKGAATRVSGSHGPLRDFYENLLAKGRKPTMACLTLARKIAAITLIVWKKEVRFDANYLKPQAA

SEQ ID NO: 471753 - protein, 378 aa, unidentified
MIMSKKYVGLDVSKNKIVVAIAPENRDEAVRYWGSINHTKEAVVKLVKQLTKEGNVILDVCYEAGPTGYELHRWLVELSVLCTVVAPQALDGNKKIKTDKRDAIRLAQLWRAKELTPVYVPNQDDEALRDLTRAREDAVEDLNRHKQRLIKFLLRHQIKPFKELTLWSTAHEEWLDTLRFTRVAEDVVFQEYRNSIREATRRIKRYEQEMERQAESSNLAPLIQALQGLRGVALVTATTIAAELGNIAGRFPNPGQLMSYMGLVPSESSSGVGRWQGGITKVGNAHIRRVVVEAAWSYRYSPAVRRRLRDRLEGLGPEIESISWEAQRRLHKKYKTMSAKGKHKGTVVAAVARELAGFIWAIGMEIYKREIKEKKKSA

SEQ ID NO: 471754 - protein, 374 aa, unidentified
METIINVGADVHKDTNSVCMFDFKEGSFFAEAAIEPGVENMIRYIEKARKEYGLGRDCRFLIGYEAGPTGYGLCRGLQKKGYDCVIMAPTTIKKSSSDKRKKTDRRDAKMLAMALATDTYRRVYVLDDEDEGTREFTRARNSMLRELKKAKQMLLSFLLRIGRSYPDSGNYWTRKHREWLDSLKFEDRKLNYACQSYLQQVKDLEAKLALMDEEMEDIADEDRYKDKVDRLVCFKGIDTQTALALVVEIGDFERFATAEQFASYIGLVPSEDSSGQKKRIGSITKEGNSRVRLVLTEAAKSIKRSSPFGKSKRILARQMGQSPDIVAYADRGSKRIRQKMARMDQHGKNKNVSTTAGARELACFVWGMMTGNIA

SEQ ID NO: 471755 - protein, 401 aa, unidentified
MSEELLARCCGLDVHSRTVVACRIVPEGQEVRTFGTTTRELLALGDWLEEGGCTQVAMESTGSYWKPVYNLFEGRFSLVVVNSRYLKILPGRKSDVRDAEWIAWLLQRGMLKGSAIPSRAERELRELSRYRTSLVRERASEVNRIQKVLEGANLKLGQVATNVVGASGRDILRALVSGSDDPRLLAGLARGRMKAKADALVEALTGAVGAHQRFLLARQIRHIDELDALVREVEEELELRLRPFGEVIERLTSIPGVGVRTAHTLLAEVGTDLRHFPTARHLVSWAGLCPGQEESAGKNRSNRTRQGSPWLRSALVQSAHSCARSKTALGERYRRLAGTRGKRKAAVATAHQILVIAFSVIKDGAVYDDARAPSTPQVDLAAIYVRKLTKLGYRVTIQPAA

SEQ ID NO: 471756 - protein, 312 aa, unidentified
MSTIPSAKPAVHIGIDVAKTSLQVDLQGATARFANTPQGHRELAMRLPPHASIVMEATGSYHLALLAFLHAKAIPVAVINPARAKAFAKARGTLAKTDPLDAAMLSAFGHALNPPLSSPREPDRVKLKELLALRDQLQAQATMLENRLEHGQCAAVCKMVASLLKHNTATLAKLDKQIASLLAESETLAPAACVMRGCKGVGPVTTAVLLSELPELGRANRHQVAALAGLAPFANDSGNASGRRSVRAGRARLKRALYLASLSAVRHHPKLKAAYKELRTKGKPAKVALIAIARRLLVILNAMLKEHFQQHA

SEQ ID NO: 471757 - protein, 408 aa, unidentified
MDVVYSHVCGLDVHKKNVVACIITPDHKEIRTFSTMTEDLLALIDWIKSHGCTHVAMESTGSYWKPIYNLLEMERIETLVVNARHIKNVPGRKTDVKDAEWIAGLLRHGLLKGSYIPSRPQRELRELIRYRRSLMDERAREIQRIQKVLEGANIKLSSVASDIMGKSGRLMIEAIIAGETDAAVLSELAQRRLKAKKADLQKALHGLIGPHQRLMLKTQLRHIDELDKLIEQIDAEVKKRMDPFEEDLERLDTIPGVGRRSAEHILAEIGADMDQFPSAAHLCSWAGLAPGNNESAGKRKSGKTTKGNQKLRTALIESARAAARCKDTYLSSLYHRIAARRGANRAAVAVAHRILTICYHLLKNKQIYIELGPHYYEERKRTHVVRQAIRKLEILGYKVVVEEMDQTA

SEQ ID NO: 471758 - protein, 402 aa, unidentified
MPMLSIGIDVSKGKSTVCGMKPEGEIVYAPFEVQHTREGMLELVSLLRSSGEEVRAVLESTGSYHCPVVAALLENGIFVSVVNSLRMKRFCSQSIRKVKTDRIDAMQIALYGLAYWQELQPARLPEDTYRELQRLARQYYQMTSMLIKAKVDFNALCDQVLPGMQELMSDHAGRHKLSDFVLRYHHTTHILEMGETRFRKDYCKWAEKKGYRNCERMAALIFATAQNGIPVLPNAPSTQIVITEAIRVLHTVEASRDAILTQMQALAKTLPEYSLVREMPCIGDTLAPRLIAEIGDVRRFHSKRALIAYAGIDAPPYQSGKFCANNRHISKRGNRYLRKTGYEVMQSYVMHKPANDPIFTFIEKKRGEGKSGKLAMVAGLNKFLRVYYGKVTELYRSLSAIE

SEQ ID NO: 471759 - protein, 452 aa, unidentified
MPRSIVRYVGLDVHKRIVEACIVDPAGKVVQRKRFPLRRETLDLFAAKTLKPGDHVALEATTNCWAVADRLRPRVARVLVSNPMATKAIAQAKVKTDKVDAHVLAQLLRCNFLPEVWQPDEATRQLRELTRRAAALTSERTKMKNRIHSVLATRLIETPESLFTERGLHWLTGVELDLQARMLIDADLRQLERLQGEMDSLEEELLRRAYDLDAARLLMTLPGVGAATALAILAAWGDPTRFPDADHAAAYLGLVPSTKQSADHCYHGPITKQGNCHARWMLIQAAHHLERHPGPLGHFFHRLKRRKNHNVAVTACARKLAVIAWRMVTIGEPYRYAIPRSTEAKLAKLRVKVTGERRKSGSPKGTKPKAKLPGGSRTIRSLPQVCRSEGLPSPRPLSPGERRTIRQTGSEPLVKQIAATQVVPRRTVAKAATKSTDHPAKGSSTRKRKIPS

SEQ ID NO: 471760 - protein, 410 aa, unidentified
MDLTPMHKRVLALDVHQAKITACAVVEHDDGRVQVTKRDFGAFKRDRRALAQWALQIAPEVVVMESTGVYWKSPFAALEAVGIIAWVVNARHVKAVPGRKTDMADAQWLATLARAGLLRASFIPPQLMRQLRLVARQRQKLVGMCSAEKNRLHKVLVDAGIRLNVLVSDIHGSSARAMIKALIVGQPMHEVLDHKGRLRASRDELFEALCTEQFSAAHRFVADEIMQHIESLERRIASFDRYLLEGLRPWRAQLTLLQTIPGIDEQGAAMLLVEIGADMSVFGSAERLASWVGICPGNNESAGKRKCGRIRKGNAWVRRLLCEFAQAAARTRCALKAKFDALTIRKGRKKSIIALAHKMLRTIYAMLTHGTHYRDKEVDYEALNVERNAPRWMKMLLKHGFITNPAAAAA

SEQ ID NO: 471761 - protein, 419 aa, unidentified
MSNSTGYAFFVGIDWADSKHDVAVYSTAKGTNKVFIIEHSTEAIDAFISELLAEAKGAPIAIILEQSKGSLMHALMLRDNVDLYPINPKQFASYRESFRTTKGKSDKNDALLLARLLYERHKQLRVWKPEDENTRLIARLCSRRRVWVEQRTTQGQRLLDLVKSYFPVLLKLAKSKLYDSPLLLEILRKWPDPRRLKRANPELLAKVIASHGVKNQSKLEKIIACLKKAPIHSKDKSLLTVSAIEARYLSKQLTANQELIAQLDQEIKAALAKHPDKELFTSLRGAGNALAPRLLAAFGTDRKRFKNAEEVACYVGVAPVTKQSGKSCSVVRRRACNKYLLQTFHEFASAAAKWCTWSNAYYKMHREKGMKRHAILRKLAYRWIRILFRVWSTRTAFDPERYIRSLLVKCPEIKPYLSA

SEQ ID NO: 471762 - protein, 332 aa, unidentified
MSIIGCDLHTRYQVIARLDTETGEVTTRRLEHEGGEAKAFYAGLGKPALIGIEATGYTQWFERLVADLGHELWVGDPAEIRARAVRRQKTDTRDAEHLLDLLINKRFPRVWIPTPEERDYRQLLKHRDKLVKMQTSVRNQLHFLAMSQGVCWKRRLWSTRGRRELEALQLGRWASVRRQELLALLDGLAPRIEEMDQAVKAEALRRAEAVRLMEQQGVGPVTALAFVLTVGPVERFPSSRKLVSYLGLNPREDSSGGHQRLGHISKQGNEMLRWLLVEAGHTAARLDPELGRVYQRLKFRRGGRVAKVAIARRLAVRLYWRLRNGHAGSHVQ

SEQ ID NO: 471763 - protein, 394 aa, unidentified
MFYLGIDIGKNTHVASMIGDDGKPVFRAFSFSNTTDGGESLLAKLPDVAASDIVIGLEATGHYWLAVYSFLHDKGYKLHVINPIQTDGWRKGVEIRRRKTDVIDSVLIAELVRYGNFIEAQLPEEAILSLKNLTRFRSYLVDSIGDLKRKVICVLDQVFPEYQSVFSNVFGKTSKEILLQFSSPSDLEDVSANTLAELLAELSRKKLGIKAAEKLSSSASNSFGITFCRDSFTFQLRMLIEQIKYIESQVKDTEAEIAAYMSELNSPIMTIPGIGKTTGAVILGEIGGIERFDAPAKLVAFAGIDATVLQSGEFEGTRNRMSKRGSPYLRRALYQAALVACTGRNPDPVLREFYLKKMSEGKHHSTSIGAVARKLCYIIFAVLKENRPFEVRLT

SEQ ID NO: 471764 - protein, 313 aa, unidentified
MDATALIVGIDVSKNQLDVHVRGSGESFVVPRDADGLAALIERLRPLGPRAIGLEATGGFETFVAAGLSSAGLPVVVVNPAQVRAFANALGKRAKTDPIDAFVIARFIEATAPEIRPLRDEETRLLADLVARRRQIVAMIVAERQREKHAPARVKKSILRLLKALQRELDSLDGDIDESVKGSPIWREKEDLLVSVPGVGPTIARTLLAELPELGALDRRKIAALVGLAPWTRQSGQWRGKSFIGGGRASVRATLFLGAMVAARHNPDLKAFRDKLVAAGKPRLLALIAVARKLLVILNAIIRDSKPWRAQKA

SEQ ID NO: 471765 - protein, 403 aa, unidentified
MNMNAVGIDVSKGKSMVAIIRPYGEIVSSPFEIKHTSGNIRSLIEQIRSIEGESRIVMEHTGRYYEPLARELSLAGLFVTAVNPKLIKDFGDNSLRKVKSDKADSVKIARYTLDNWTELKQYSLMDEIRNQLKTMNRQFGFYMKHKTAMKNNLIGILDQTYPGVNTYFDSPAREDGSQKWVDFATTYWHVDCVRKMSLNAFVDHYQKWCKRRKYNFSKDKAEEIYGAARELVPVLPKDDLTRLIVKQAIEQLNTASKTVEELRTLMNETAAKLPEYPVVMGMKGVGPSLGPQLMAEIGDVTRFTHKGAITAFAGVDPGVNESGSHEQKSVPTSKRGSSSLRKTLFQVMDCLIKTKPQNDPVYAFIDKKRAQGKPYYVYMTAGANKFLRIYYGRVKEYLTALPE

SEQ ID NO: 471766 - protein, 359 aa, unidentified
MREQRNKISFRGQKIYVGIDVHLKSWSVTVLSETSVLKKFSQHPSPEALYGFLTRSYPGAEYHSVYEAGFCGFWIHERLTALGIDNIVVNPADVPTKSSEKLRKTDTVDSGKLARSLRANELKGIYTPDSVSLEMRSLIRLKNSITKDTTRQKNRLKSQLRYLGIEIPQEFLTPFSNWSKRFFAWLKEIETLTPSDRQALDIQLRHLEELRRQKLEMTRALRTLAKTDRFREPLRLIMSVPGFGQATGMAFLSEICDITRFRNAEQLAAYIGMIPMCHSSGEKDGTGDITIRKHAVMRCNLIEAAWVAVRQDPAMNLFYTEQCKRMPKSKAIVKVARKLVNRLFFVLKHQTEYVNSIVS

SEQ ID NO: 471767 - protein, 334 aa, unidentified
MNYTTFIGIDISKKSFDLALIKGNPTEKMITAKFNNSHEGIVSLEQFIRKQDLVKPEILFCIEHTGLYCRVLSSYLVENQYAVWLEMPVQILKSLGVQRGKNDQLDAKRIAMYANTFKDKARLWQPPREEVQKIHDLLTLRDRLVESRKSILTPIEELEATGLSEVASSLRKHCRKSVESLEKEIEQIEKELDDIIDKDTNLKNKYKLVKSVPGIGKITALALLYYTNEFSLFRSAKKLACYCGVAPFPRESGTSVRGKSRVSNFANKAIKKLLHMASMAAISSDRELKAYYQRKVAEGKNKMLVLNAIRNKILHRLWAVIKRNSPFQDQYQIA

SEQ ID NO: 471768 - protein, 344 aa, unidentified
MRIASIGIDLGKTTFHLVALGERNKVLVRKKFSRGQLLAYTANLPSSLIDLEACAGSHFLGTTLREQGHQVRLIPAQFVKPYRKSNKNDFLDAEAIAEAVTKENMRFVPIKSQDQLDLQAMHRVRDRLVQRRTALINEIRGFLLERGIIFAAHPIHLRNNLPGVIEDAEQNLSPRLRWLLDRLWQEWKQIESDVQAISQEIERISDEDVRCRQLRQIPGFGPLVSTATVAAIGNGAAFRRGRDFAAWVGVVPRQYSTGGKARLYGISRRGNIYLRRMLIHGARAVLFRIKHDTGGFGQWVHRLAQRAPRNKVIVAIANKLARIAWAVLSSGKDYRHQPLRPAAA

SEQ ID NO: 471769 - protein, 455 aa, unidentified
MPRSTLPRLLSTVGPHAGGIDVEEDAMEIMHERVAGLDVHKATIVGCVRVQVGREVRRECRTFATTTDGLVALLAWLTASRCTHVAMEATGVYWMPVWKILSDGDFTLIVANAAHIKNVPGRKTDLNDAMWIADLMACGLINASFVPEEDLQELRSLMRSRKQLTREQTRHVQRIQKTLTEANIRLDSVICDIMGASGRRIIEAMIAGVRDPHQLAALASKRIKATAQQLHDALHGRLTDHHRFLLKLHLGQWDGLDAAIRGIDVEVDARITRMDQQLKAGAGQGAKAVPFRELIRLLCTIPGVGVLAAIVILAEIGRDMSRFPTAGHLVAWAGMCPGQNESAGRRKAARLRKGDPWLKTTLVQCAWAAKRKKDSYYKAQFFRIQSRRGPQKAICAVAASILTAIYHILKDGTEHRDLGIDYFNRRSPAAQTQRLVAQLTKLGFEVQLQPIAQAA

SEQ ID NO: 471770 - protein, 337 aa, unidentified
MGRYIGVDLHRNCFTVCTLVEGGRSYLREWKLKDLGGFVSKLGSGDAIAVEVTGNTRLFYDAVVGKVGRVVVVNPSEFKVISDSVKKTDSNDARRLALFLSKGLLPEVRMKDKAHGQLASITQSRDKLVKLRTALKNKVNNIVSAHGINLKKEELSSEKGLQRVLAMMFDPLVDLEIEVLVNQVRSLNKSISELEQVIKAEGSKLKGHKNMKSIKGIGDLGAGILLSVIGDVNDFANEGKLASYFGIVPRVRNSNGVERSGRITKRGSKLGRTTLVQCSLIAKRYSPYLNKYYERIKARRGGGKAIIALARKFLGIIYKTLKNNLIWADFPNGVLAG

SEQ ID NO: 471771 - protein, 306 aa, unidentified
MIIASDFIGIDVGKYTLEIFAGREFSIANTEAALADWLAGLSRPELVLFEATGRYDGKLRRALEQAGIAFCRVNPAQARAFARATGQLAKTDKVDAQMLARMAQALRPHPQAAADERRRLLGELARRRDQLVDMRRGELTRQQEMAEPEILTDICAHIELLTSRIAVFDSRIAALIAATDELAQAQRLLRSIPGIGLVTATTLLAFLPEAGHRSPKTIAALAGLAPFNNDSGLFRGKRSIRGGRPRVRVALYMAALTACRSTGLLGQFFRTLTAAGKPKKLALIAIARKILVIANAVLRDQTPFKT

SEQ ID NO: 471772 - protein, 356 aa, unidentified
MKQNNKLDFTGQPIFIGLDVHKKSWEVSIYTRHGEYKNFSQPPRAATLVHYLRHHFPGALYYAAYEAGYCGFWIHDQLVQEAIGCIVVNPADVPTRNKERKRKRDPVDCRKLARGLRNDELEGIYVPPRAQLEDRSLIRTRLSMGRKQSRCKNQIKSMLLFYGVQIPEQREMGHWSRRFLRWIEGIRLERASGDMALQIHLEELYHLRQILAKLNRAILALSRTEQYHSWVNLLRTVPGISTLTAMILLLELGEITRFPSLDHLCTYVGLIPDIQSSGEKEHVGGITQRGHSYLRWLLVEASWVAIRKDPAMMETFNDYCKRMRKSKAIIRIARKLLNRVRYVLKNKAEYVPCVIE

SEQ ID NO: 471773 - protein, 416 aa, unidentified
MEIEHTHCGGLDVHKKTVVAAIIVPDGQGGLRKEVRTFATMTADLLALSDWLLRFGVTHVAMESTGEYWKPIHNILEENFEVLLVNARHIKQVPGRKTDVMDAEWIADLLRHGLLRGSFIPPVGQRELRELTRHRANFVRERATLVNRIQKTLESANIKLASVASDVMGVSGRAMLDAIITGTANAAEMAGLAKGRLREKREQLDKALQGRVKPHHRFVLSEYLCQVDNLDETIARFDAEIEKYCRPFEEAVELLDTIPGVARRTAEVVVSEIGSDMSRFPTANHLAAWAGVAPGNNESAGKRFSGTTRHGNRALTVALVQAAHAAARSRNTYLSAQYHRLAGRRGKKRAIVAVAHSILVISYHIIQRKEPFRELGGDYFDQRRPEATAKRLLGRLQHLGYDISRIEQPCISPVAA

SEQ ID NO: 471774 - protein, 388 aa, unidentified
MNRILKIGMDVHSKNYTLCAMEPTIGSEDRIFGEIQVAPDYKEVLYFIESLKMKLGLNDEYSIECGYEAGCLGYTLYHQLTNAGLKCVILAPTTMLTQQGQRIKTDKRDARLIAQCLCYGGYHPVYIPTGEDDAVKEYLRMRDDHKLAQKKLKQQINAFVLRHGHQYVGTKWTIKHITWLKKLELDPMYRETLNEYMASYEEQEAKIERYDKRIEEIAAEARYQENAKKLGCFLGIRTHTALSLIVETGDFKRFAKGNTYAAFLGLAPGEHSSSTNVNRLGISKAGNTHLRCLLIEAAKGICKGAIGHKSKALRSRQSGQAAGVIAYADKANTRLRSKYYKMIRHGKKKNVAVAAVARELACFVWGMMTGNISVASNTCTSALDVSQG

SEQ ID NO: 471775 - protein, 343 aa, unidentified
MNDIITIGIDIAKNVFQVHGIDECDEVVVRRQLRRRQVLPFFTKLSPCLIGMEACATSHHWARELTALGHEVKLMPPRYVKPYVKRNKNDAADAEAICEAVTRPTMRFVPIKTPEQQSVLMLHRSRQLFVRQRTTLINAIRAHLAEFGIVAGIGRNGVEALLKLIAAGKDERIPAAAGECLMALAAQLEMIKRQILEADRRVLAWHRASETSKRLEAIPGVGPLIASALVASIPDPTVFRSGRDLSAWIGLVPKQNSTGGKERLGHITKAGNRYLRQLLVVGALSVIRRAKQLGYTRYPWLVKLMERRSVKIAAVALANKIARIVWAMMARNEVYKPARLLPA

SEQ ID NO: 471776 - protein, 354 aa, unidentified
MIIIGADYHPSFQQIAFVDSETGELQEQRLEHPEAAEKFYRELAAQGMKVRVGMEASGHARWFERLLADLNFELWIGDAAEIARKRERKQKTDRQDAQHILRLLLKDDFPQIWVPSWENRDLRQLLWHRHRMVQARTRMMNQLQAVALNEGLRYKKRLWRDAGRKQLEAFRLAPWASRRRHDLLALLDRLNPMIAELSQAIEQEVEKCPEAQRLMTHPGVGPLTALAFVLIIERADRFQCGKQIASYLGLVPLEDSSGNWRRLGHITKQGNSLLRFLLVEAAQVTVRSLPEWRSKNVHLTMRRGRKIAKVAMARKLAVRLYWMMRKEWDYEQVKKFGSHAGQPGHRDGVKSNIE

SEQ ID NO: 471777 - protein, 366 aa, unidentified
MKYIGIDLHSNKFTCCFLYDQSNRKKLITYNLDSQGIKDFLTHVDRQTALMVEASTNTFSFVQRIKDHANQVIIANTHKLKLISLVKKKTDKIDAEKLAIVLKMQLKSNQHMFEPVHLPDRLIRRLRSLFTTYRLYRKHITGIKNRIHSLYKQELMPFTKEYIFGKKSRAFLRRVSINPQTDFQLDLLFTELETLETSFQKLTRYIMYLAKPYLSQIDILTSMKGISVITAIALIADISDLSRFTNSKKLASYLRSAPGIDSSNETVRHLSTNKMGRKLSVTLLSQSLNHFRDSNIKLQKWYQTKIEQGKKRGKIRMAICRRVFTEIYQMLKKKEYHYYRNRRNHLMKMQAYTKFLNNYSVSPKYA

SEQ ID NO: 471778 - protein, 296 aa, unidentified
MKFCGIDLHSNNSVVVVTDETDRVLVSRRCPNELTPILSLLEPHRDELVGVVVESTYNWYWLVDGLMAAGMDVKLANPVAMKRYDGLKHSDDKDDAVFLAHLLRLGILPTGYIHPPQERALRDLARKRIQLVRTRTQHILAVENIAARQFGHGFSCNEIKGFSAASVDRLGLPTDVALAMNANVAVIQALEAQIAGLEARLLQQDKLRPEYLLLKTMPGVGEVLATVIMLETGDIGRFAEVGHFASYARCVKSARYSNGKKKGEGNAKNGNAYLIWAFIEAANFARRFSDDALCPL

SEQ ID NO: 471779 - protein, 346 aa, unidentified
MTEDILLSVDYHDQTCVVRRFDGRTGEEAIESVPTGPDDLAGVVQRARARAGRRGRVVWVQESTTGWPRVKDLLGDSVEFVLANVVQMPRPPKGHRRKTDAIDTARLQREYRGGELPRAHQPPAWWRQVRRAVAWREDLVRRRTALRNWVNRYLAHETWENRSGLWSARGRRRLSAIAGRLPRLDGRVLSGKLAELDRLAAELSEAEAELAAVYRDCPDAKRLDAVPGIGVVAAVSIVARIGPVGRFASAERLIAFAGLAPGVRQSDRTRHDGRIGGGGTDKPLRHYLIEASVWARQLPRYRPTYERAARRRGPKVGRLVVARLLLRGIYKVLKDGVAFAPAAAAG

SEQ ID NO: 471780 - protein, 343 aa, unidentified
MKLHVLGIDLGKRVFHLVGLDSAGRVVIRKRCSRTQLLAFTANLQVQLIGMEACSGAHFLGRALREQAHEVRLMPAQYVKPYVQTNKSDYLDAEAIAEAVQRPRMRFVPIKTEEQLDLQALHRVRERWVMRRTAVVNQIRSLLLERGLTLPKGRSHLDEQLPRILENAELNLSDSFRVLLAQLKLELEQLAARIEEMDRVIQKTAKQNEACQRLTEIPGVGPVTATALIAAVGNASAFGKGRNLSAWMGIVPGEYTTGGKQKLLGISKRGNKYLRRLFVQGARSVLQQRHKQAPGLSSWLAQLLGRTHQNVVVVALANKLVRMAWAVLCKNERYRAPVFAGTT

SEQ ID NO: 471781 - protein, 392 aa, unidentified
MFIVGIDIAKRFHEASVIAQDGSLVRKALRFANSQAGYNKLMNMVRGLNEPVVFGMEATGHYWLTLFTHLRNDGFTVHVINPIQSDALRGMYIRKTKNDAIDSMIIADVIRFGRYCETSVQPGDLQAMRELCRQRFYIIDMASDLKRKVLALLDQVFPEYEKLFSDTFGASSMELLSQYTTPEEMLSVSTEKLAELLETASRGRLGLAKAEEIQEAAKNSFGIVLASGSFALIIRQYIEQIRSLESSIAVFDTEIARLLAGFDTQLTTITGIGSTLAAVILSEIGGDIKRFSSPAKLAAYAGVDPTVKQSGDFTGTRMKMSKRGSPYLRRAIWLASTVAAFKDPAIHALYERKRSEGKDHMTVIGHVCRKMVSIIFAVLRDNTPYSPAVISD

SEQ ID NO: 471782 - protein, 394 aa, unidentified
MKLVGIDVGKNSHHFCVMDKETGEFNVAPSSFSNNKEGFDLLINSLKPYSKKSILIGMEDTGHYHVALLKFLLSHGYTVALINPKTTDLTRKMEGGITKNDKLDTITICDVLDTPERKKQYHITKVDRFDLYEQRQLTRHHHNLKEELNVYCNRLQKSIDLVFPEFNTLFSSKYSIVYMNLLKTFGSAEAIASTDIRTIRKCFEIKGSGKRISLTPEKLKECAKNSIGISSEVETIQIKHLVSQITLIKEQIAEIDKKIEEFSIKNNSPILTIPGISHFSGTSILAELGDIGNYSKPSQIIKFAGVAPYHYESSQYNAQHTGITKKGSKYLRKTLYQIILTVINNNTVFKKYYLLKISQGKGHRCAQGHCIRKLLRIIYHLLETGQSFDPALLR

SEQ ID NO: 471783 - protein, 344 aa, unidentified
MYYVGCDLHKCSTYFYVVDAQGKCIVNKSIPNEVDLLHGFLRSLPKPFELAVEATYNWYFFIDIVAEHTDKYYLTNPLYLKAFARRNKKTDKIDAKLIANILRVGYLPAVYIVDKNIRIQREVLRQRMKVIQDRCRIIFRLKALLDKLGEDSGGDFATIKRLQAIETSHLPEEYQHIIDEYRKQMIELLQSEHRIERIVRKLVNADHEAGLLTTIAGVGEFSALLIKSEIADITRFKKFDSLCSYAGLAPRVYQSGNKCITGSLSKNRRKHLQWILLEISHFFIQRNERYKAKFEKLKEIKGYNKAKVVLARDLLKIIYRVLKTKKPYYEEDIRTMAPYAVCGV

SEQ ID NO: 471784 - protein, 518 aa, unidentified
MCSKVIQPGARRADLGSPQPPVNNFAATASEKSFSKPLRPEKVPAGRIAPRRSRSDVPKPARLQLRTPVGAAAVPPTSERTEPCEGPYTRMTPGRPTMPRKEPMKTYNELSHFGGLDWAKHHHDVCILDPQGQIVERLRFEHSGPGWEKFREQIGKYPALGIAIETSQGAVVEQLLGSGVTVYPVHPKAAKEYRKRQAPSGTKDDELDSWSLADALRMDGGQWRALSPQDPMIEELRLLCRDEEELIEQRTALVNQLQAALGEYYPAALEAFEDWTMPYTWEFIARFPTPQQLAGATVHRQRVFLHTHKLWRPGTADKRLEIFARADQFCGGEAVTRAKSRLALSLVKLLQALEQQLDSYRGAIEKLFAEHPDHDVFGSLPGVGQKLGPRLLGSMGADRGQYPDVQGLQCVAGSAPVSYQSGQMRRVKIRWHCDRFLRHTVHLWAGCSLKTCAWAAAYYKAKREAGHSHACALRCLAQRWLKILWKMWQTHTPYDPEFHARNQQRHGSWVLQLNPKKA

SEQ ID NO: 471785 - protein, 324 aa, unidentified
MDVFPLGIDISKSKFDVALLRDEGKLRHRVFPNTASGYEQLSAWLVKHNALSTHACMEATGTYGEALAVYLQEAGHRVSVVNPAIIKAFAATEMTRTKTDKRDASLIARYCLKHQPPAWTPPPPEISELQALVRRLEALLEMLQQERNRLSAGIESTSVKASVEQHITYLDEQIAHTQSLIRDHIDGHPTLKQQRDLLRSMPGIGETTAAKFLAEIVDINHYLSARQVAAFAGLVPKHRESGTSVKGRPRLSKVGTARLRKALYFPAIVATQHNRIMKALSERLREGGKCPMVIIGAAMRKLIHLAYGVLKSGKPFDPHYGKTA

SEQ ID NO: 471786 - protein, 343 aa, unidentified
MQIHSVGIDLGKTTFHLVALGAAGKVLVKKKFTQRQLLTFTANLQTSLIGLEACAGAHFLGRALQKQGHDVRLIPAQFVKPFVKSNKNDFVDAEAIAEAVERNNMRFVPIKTDDQLDLQAIHRVRDRLISRRTAVINQLRAFLLERGMVFAQTPAKLKAAMADVLENADANLTPQIRNLIDILWSEWKTVEQQIKELTEQLERISDADAGCTRIRQIPGIGPIVATAIVAAIGNGAAFRKGRDFAAWLGVVPRQYSTGGKAKLLGISKRGNIYLRKVLIHGARAAVLRIKRDRAAIGSWLDRLDARAPKNVVVVAMANKLARIAWAVLSSGQDYRPSPIVSAA

SEQ ID NO: 471787 - protein, 482 aa, unidentified
MKAKPPEKIQETTNRSTRGHWNEMNRKQRREMMRKIQSEDISLEVVHPDAAGIDIGNESHYVAVAPSRDKQPVRCFGCTTGELKAMADWLKQCGIRTVAMQSTGVYWIAVYDILEQAGLEVYLVNARETKNLPGRKSDVQESQWLMKLHTYGLLRNSFRPSQEIRTMRTYWRQRNDLVQSAGRHVQRMQKALTQMNIQLANVLSDVSGVTGQAIIKAILGGQRDPHKLAEFRNPRVRASEEEIARSLEGHWEEDLLFVLQQEQDGYEFCQKQMADCDRQLNHYLEQREDRSQGAPLPEEKRKGRRKKKSGNKPQFDLRTGLFRMSGTDLTRIDSIDVMTATTILSEAGWDMSKWETEDHFVSWLRLCPDNRISGNRVIGKGRLPTNNRVTIALKMAASALRLSDTYLGAQFRRFRTRLGAPVAIKAMAAKLARLVYRMLRYGMQYVDKGAATYQAQHRQLQIKQLKWKAATLGYQLIGVPAA

SEQ ID NO: 471788 - protein, 383 aa, unidentified
MSEATVPSKATVHCALELSKSSWLLAIQYPDRPQPSLYRIKGGDIDGLMSQLLIARDRCAKSIGELPSITLCYEIGYDAFWLARFLMARGVRCLVVDPASLKVDRRGRRAKTDRIDVGMLLRALIAWCRGEHHVWSLVRIPSVDEEDVRRSHRERDRLIHERTSHINRIKGLLFAQGIRDINIKTHYRKLKLEELMTGDGRPLPLRLRAEIAREIARLALVQEQIAAVNRERDEAPTPCKAPEKKRILLTQLKGIGPAIAAVMSREVYYRQFNNRRQVASFLGLATSPYDSGDMERSQGISRTGRGQVRAIMIQAAWLWTRHQPKSTLTRWFLDRTIGQGGRVKRIMIVAVARKLAIALWRYVEHGLVPQGAILEVPTPKSAR

SEQ ID NO: 471789 - protein, 320 aa, unidentified
MDVLGVDVSKRSIDVALLRSEKFKHKKFSNDVSGFGELSRWLVRHDVVHLHACMESTSRYGEALALHLHDAGFEVSIVNPARIKGFAQSELIRTKTDKSDASLIARFCLAMKPGLWIPDAKEIRLLQDLVRRYDALIEMRQQELNRMEASSAELQPDLEAHVAYLDKSIAETKKRIRAHIDDHPDLKHKKELLESIPGIGEATINVVLSEFANVSRFNSAKKLASFIGLAPKMRMSGTSVRGRSSMSKVGNSQIRKAFFMPAMVAMKYNPSLMQMRERLLAAGKPKMLIVGAAMRKLVHIIYGVLKNNRPFDPHYSGEIA

SEQ ID NO: 471790 - protein, 356 aa, unidentified
MTMLAEDYEYVIGGDPDRDTIDLAVLDTTIGATRAHIEASADGAGYERMLKWAGDHAPGRRVWALEGTGSFAAGLAEALAQAGEDVVEVGALKRARGAKNDRLDAVRAARTAMAREHQAGPRVRGLREAIRAMSATRHGVLVSRTKAINELKSLIVVAPEHQRAVLRGRALAKQLVLIESMTSTSTAAVDHRITIVTLQSITARIRFLSGQLKDIDPELALLIGSHPAGPALLAEPGVGPVVAAQMLISWSHSRRCRSEAAFASLAGVAPLEASSGQRSRHRLNRGGDRALNRALHTIAITRMRCDPESRAYEVRRTIHGKTHRDIRRCLKRSIARRLYRIMESSAAGESSTLTAA

SEQ ID NO: 471791 - protein, 523 aa, unidentified
MATRCKSRARRSRRYLTIVKPSGSLHPRVQKVGPEHFGIVAVDCAKARSKWMLADFYGRILIPPTVVEHNKQGFDSAIAEIRRAMESHSLGDMLVAIERTGIYHLPVKRAFSSKDFDTRIVHPLTTKQYRLPADPGNKTDDTDLFAIHRATTNGFGLIELPLDEIHGPLRLLARYRRSLVRRNASLRNQIIALLDVLLPGYTSLFDDVFDNQAALSIARSLKSASKVRSLGSEGLAQILKELKVRYQRRTLKKILDWANGIESTTEYFEMYHTILVHIDDERCARLQQIAKLEQEMASFLVRTAYVVLLSIPGLSIVTAAEFAGEMGPIVNYANDTAITGRAGIYPSRYQSDKVDRSDGPLVRRANRKLRGVIMMIADNLLSCNRFFQALKKPWVAAGMTEQAMSVRVAKRFCRIAYQMVAGGQVFRHPSCQKRDAILRKLSIFHTEHGSSMAQVMTDLQAATDHIPKSEHAPEAKSLYEELQPSNNRQQCGPRRLGEILPVVLAKLGVTAVELSLKGENDLT

SEQ ID NO: 471792 - protein, 355 aa, unidentified
MPQPNDLSRSLVALDHNSTIIAVVEMSQSSWLVGGMLPGIERQPRKKLEPSPERLLALLHRWRDEAVKAGRTITRIALAFEAGRDGFWLARWLAARGIEAHVIHASSVAVSREHRRAKTDRLDTELLKRGFLGWLRGERGHCSMARVPTLAEEDAKRPNRERDCLVGERTRIVNRIKSTLVRLGIRNFKPTLRKAAERLATVHTPEGTPLPPNTLAELQRDMARLGFVVSQIREIEEARQKRLEQQHETGAHDMVGQLARIVGVGVETADLLVHELLSRPMRDRRAVARYAGLTGSPDESGARRREQGLARAGNARVRRSMIQLAWRFLMFQKESALALCIAPAPPTAVVARARP

SEQ ID NO: 471793 - protein, 340 aa, unidentified
MSEITTIGLDLAKHVFQVHGIDAEGTTVLRKRLRRNQVLGFFSRLPRCVVGLEACATAQYWARELGALGHEVRLMPAQYVKAYVKRNKNDAADAEAICEAVQRPTMRFVPVKTAEQQAAQLLHRGREQLVRQRTMLVNALRAHLAEFGMVAAQGLRNVAQLIAIVRDAGDLRLPDVARQVLQVLAAQLEHIEAAIAALEKQLMAWHKANAVSQRLASIPGIGPIIATAVATTVADPNMFRSGREFAAWLGLVPRQNSTGGKTRLGGITKRGNRYLRRLLINGASANLLRSKATKADPWVIGLRRRRPPLVVAVALANKTARIAWAVMLRQTEYQPRAVAA

SEQ ID NO: 471794 - protein, 354 aa, unidentified
MSKDIILTVDYHDRACVIRRLDRGADREQVFTEIPTTAASLGQVVDQARRDLGRRGRVVWIQESTTGWARVRELLADRVEFNLANVLQMPLPPKARRRKTDKVDTARMQREYLAGTLPLAYQPPAAWRQLRRLVAYREGLVSRRTAVRNWIDRYLAHETWFDRTGLWSPRGQRRLRALLEGWPRTDRVILAEKLDELARLEGQLGVALKELVAAYRDCAEARRLDAILGIDVVSAVSIVARIGPVERFGNAEALIAFAGLAPGIQESDRTRRDGRIGGGGTDRHLRHYLIEATVWARKLPRYQNTYERMKKRRGSKVGRLVVARMLVRSIYKVLKDEVAFDPGVPPRTTPAAAR

SEQ ID NO: 471795 - protein, 438 aa, unidentified
MSNNVIFNFDELFISVGIDVGADFSWMSIVLPNQQFVGKPYKILHNSMNSLALAVSKIKEAEEMYSLESRIFLESTGIYHYPLFCYLRDKGFNCSVINPIITKNSTNINIRKVHNDRFDSKKAALVGLKPDLKVSLMPSDLALNCRNLCREYYDLMDSRNAYVNKLIGELRMVFPQYLGIFSKVTIDTSLILLETYTSPSAFINADKQEIIDLIRSTARFGLTYACNKYNAIIQAANDADEFGYILDSNIKRIRLYIGFIRKYDEEINSILESMHELVAANEDTDFVKQIRLIETFKGAGFLSAMSLMGEIGDFSAFSKPKQLFAYFGLDPAVKQSGKFEGTKIQMSKRGSAIARRVIHTLTLQSISASRTGESKNPVLLDYYLKKCESKPKLVAMGAVSHKVCNMIFAILRDSKPFEIITPQEHIKKYNAAKCDVAA

SEQ ID NO: 471796 - protein, 404 aa, unidentified
MKGPIVSIDVSKGKSDYQAFKDLNVKYTGSRSIKHNKEGFDEIVNLVREMEKKLETEVCVVYEATGVYHRVLKKVLEDNNIKQFIINPLLSAKTRKNDSLRSPKTDKLDPKSIAKTYYSHSLHNSHKQETIYHELRELSRYYEDILVHIRKDKVAFRAQLDVVFPGYDALYDDLYGPVALAVIEKYPHPEMLQKKKINTVSKVIQNKTCHRQAVSDTMADKAIEYSKTIYSGCDKDDIEVLILQRFIKKLNEDMAEAERTIGEMIKLAQELPDFNIIKSIPGIGDNLAARIIAELGDMTRFKKKNELVAFAGLDPRISESGQNDGDHMHITKKGNKRLRCLLYLAVTCSIRLKRDDNSIKDFYIKKKQQSNPMCSKAAKTACASKLVRIIYSMCKTGELYQYNK

SEQ ID NO: 471797 - protein, 361 aa, unidentified
MTHPEPDRQVIAGVDTHGRTHHAAVIDGLGRHLADHEFPATTAGYRRLHAFLTSYGELTAVGVEGTGAYGAELARHLADAGVTVIEVDRPDRRTRRTKGKSDPIDAYAAATAVASGRATGSPKTRTGTVEAIRMLRIARRSAVKARTQAINQIRGLLITAPASLREQVADLPKSQLVAHLARLRPGDDLANPLAAAKSALRRLARRHQLLDEEIAELDAQIAPLVRQAAPRLLDLFGAGPETAGQLLVSAGQNPERMRSEAAFAHLTGTAPLPASSGRTHRHRLNRGGDRAANNALHTIVLVRMRYDPRTRTYVQRRTREGLSKKDIIRCLKRFVAREVYHALIADSSTPTDHETTLAIAA

SEQ ID NO: 471798 - protein, 337 aa, unidentified
MKKFIGVDLHKQLIVVCAVNQARQVVARQRFHSRDAERIVAWFAEQGPFEVVVEATASYEWFVALIEPHAERVVLAHPAKLRVIAESTRKSDKLDARVLAEFLALDMIPPAYRPTPRQREHRRLVRYRHHLRGRITSLQNRIRNVLADYNADRQDLFTIAGREYARQVVLRRADRFVLDDLCLTLGHYYQRLCGLEQALKEFARGASAPEAQAGRLLNTIPGVGPTTIEIFLAELADVRRFGSQKKVTAYAGLAPGQRESGGRCKALGITHTGSGLLRWVLNQASWQLVRRDARGQRIFEALAKRRGKKKAITAVSRRLLCLMTAMVLNEQPYRRAA

SEQ ID NO: 471799 - protein, 393 aa, unidentified
MGTSRKLNSPWRASVFSEAMGWTPPHLSASMCQTEIEVSVNDEEESTMKINRVGVDLAKNVFQLHGADRRGKAVWKRRLSRGKWLAVLCDAVEPGTEIGMEACAGAHHWARQLIQRGYPVKVIPPQFVKPFIKSNKNDANDAAAICEAMDRPDMYPVKVKTVEQQDLQAMHRIRDEIKGHRIAKANQIRGLVTEYGLVAPQQLHALRKAIPDWLEDAENGLSFLFRQLLQGLWGDLYALDQRMTELDKQIAVIAQEDPTARRLQQLRGVGPLIATALVATIGDGKQYRKGRDMAAALGLTPRQHSSGGKDRLLGISKRGDAYLRCLLVHGARSAMRTAKDKDDRLSRWIINLQARRHANVVAVAMANKMARMAWVIMTRGVDYDPDLAAASVR

SEQ ID NO: 471800 - protein, 320 aa, unidentified
MEILGLDVGKRELHAVLLQDDRAASKSVPNSPTGIAQLQTSLKNRRVVSRVHVCLEATGGWSEDVAIALNEAGHTVSLVNPSRIRAFAQSEMVRTKTDRVDAASIARFCRMRVPEAWRPPAPVIRTLQGLVRRYQSLIEMRTEEQNRLGAPIVTAPVKASITAMLEHLECELEPVDREIAQLFDQHPPLRRQRDLLLSIPGIGETTAARILGEMPNIVEFRDVKAVSAFAGLCPQHYESGSIRRPSRLAKSGNADLRQALYWPAISAMRYNAILRAFADRLRERGKANMTIIAAVMRKLLTLAYGVLKSGRAFDPRYANS

SEQ ID NO: 471801 - protein, 335 aa, unidentified
MESELFMGCDISQDTFNYCLRSKTSILLQGQVVNSVKSIRSWLTELKRDHHFNLAQILFCMEHTGVYGLLLLRVLHEQSLIICLESAVNIKLSLGLQRGKSDKVDAQRIAEYALRYSDRLKQWSPRRKVIDQLQVLIRLRDRLIKARQEISRFNQDAKRFMSKEEYQLVIKGSQATLKAIEKDIDKADKTIEELIMNDENLRRLSRFIRSVDGIGKVTCSAILVRTNEFIDFKKAKKFACTAGIAPFEHTSGSSVRGKSRVSHCAHKELKTLIHMCAVGAISRKGELQDYYKRKVALGKTKMCVLNAIRNKLVHRVFAVVRDEVMYQKNYRYKLA

SEQ ID NO: 471802 - protein, 275 aa, unidentified
MKDTMYDHYIAIDWSIKNMAIARMPKKSNKITAIDIPSDIKDLQAYLTHLRGTKIVAIEETTTSQWLYSEIKEYVDRVFICDPNRNKLLNEGPKKDTIDATKLVQLLKAGLMKEVYHSTDKFVYLRRIVSGYEDLVKSGVRLKNQRYALLRACGKRGKEKIGSTLDSHGEQFVLECLDRQIEAYEKEKHCYENEFMRLARKYPEIKHQKSLPGIGVINAVKIVARVVTPYRFSDKGHYLSYTGLIKLDKISGGRSYGKKNPRFSRQLKSVYKSGF

SEQ ID NO: 471803 - protein, 325 aa, unidentified
MQGKEASEQETPKCTAGIDVSKDWLDVHVLPAAESLRVANTKEGIRRLKRWLLRHEVELVAVEATGKWHRQVCRSLAASPIAVAITDPYRVRMFAKAQGILAKTDRLDAKVLAMFARMMAPPCRTPAGQVFEDMQELVTARAAAVAEEVALKNQLSAATGNFLKRQLARRIKQLAGHVKALEKECLSLIKADEALARRFAILTSIPGFGDVVAMTLIAKLSELGSLTTKQVAALGGLAPVADDSGMRRGIRVIWGGRTTVRTVLYLAALSAAKHNADLKLFYQRLTAIGKEPKAVLIAVARKLLVLANLLIAKDRLWQPEAPKYA

SEQ ID NO: 471804 - protein, 402 aa, unidentified
MNCVGIDVSKGKSMIAVMRPFGEVVISPFEVQHTASELSELAKLLKSLDGETRVVMESTGNYHTPVAWLLHDAGLYVSVVNAMLVHDYGNNSLRRAKTDKKDAVKLANYGLDHWLTLPRYVPEEDTRLLLKNCYRQYQQYSKVQTMLKNNLISLLDAVFPEVNRLFNSSPRADGSEKWVDFVSTFWHCQCVSTLPLKSFSARYLKWCRKHGYYFSQEKAFEIHSKAKNCIGVMPRNETTKLLVQQAIAQLKATSAALAALKQEMQSLAASLPEYPVVMEMFGVGTTLGPQLMAEIGDVRRFHSKKALVAFAGIDAPPCQSGQMDIHSRSISKRGSAALRRTLFLVMGIYLQSAPLDEPVYQFMDKKRSEGKPYKVYMMASANKFLRIYYASVTAYLNTLARI

SEQ ID NO: 471805 - protein, 343 aa, unidentified
MKHYVGLDVSVKETSVCIVDETGKICREIKVVSHPEDLLRVLQDTAWHLERIGLEAGPLSQWLFEGLAQAGLPVVCIETRHAKAFLRAQINKSDRNDARGIAQMMRVNLFRPVHVKTLSSQKRRALLTARKLLQEKALAVENDIRGLLRNFGLKVGAVGTVRFEARIHELIESMPDLIEVIQPLLQARRELREHFATLHRKLLALVRTDEVCRRLMTVPGVGPVVSLAFVATIDTPARFRSSKAVGPALGLTPILHQSGESSRVGRISLCGDAMMRTLLFEAAQIILTRASRWSWLKAWAMKVAQRRGRGKAVIALARRLATILHRIWCDGTEFRWTREAQAM

SEQ ID NO: 471806 - protein, 353 aa, unidentified
MINVGVDLHKTQMTVCYLADDNQVSQKEYRTDQAGYEGFCADLNGLTVPRKKIRVGVETTGNVWFFVKKVESHVGEVRVVNTMKFKVIVSSTSKTDRRDARTIAEYLRKDMLPTVTLPDADSRMIAKYVKVRDRYVKLATRLKNQLHALFAEEGICLKTADLSSNIRLHELKTREINDEVRFLVEGLVEEVISLKTRIRELERKLNDMTREDTAVKLLRSIPGTGIVNASAVRGIIADVERFDDPKKMAAYAGLVPWVSNSNETVRHGHITKRGSIILRNAMVQMAMGIIRYWARGNGMNNEPLYNWYRHIKGRTSGGKSKIALARKMTHIVWSMLKNGHEFSSMVVLPSRAG

SEQ ID NO: 471807 - protein, 357 aa, unidentified
MLAELLDAIVGVDTHRDTHEVEIALPNGIPIATCQISNDTAGYAELLAWIIDHAPGPRLAVSIEGTRSYGVGLARAATAAGLLVVECEQPNRKARRGKGKSDPIDAHLAVLAALRLDADRLPIPRADGDREALRILLGARQELTAISTAQTNRLRALLRDGDDTDLALARGPLNDAALAAIARRREPRDASRPQSVRHAEIRRLALALRESGRTLRTNRAQLQVISNDLAPGLTDRRGLGPVTAAQAIVSFSHPGRCRSDAAFAALSGTSPLQASSGRTVRHRLNRGGDRALNSTIHTIAMVRMRSCSRTQAYVTRRTAEGKTPREIRRCLKRYIARELYRTLTATMTTTAGTPNAA

SEQ ID NO: 471808 - protein, 386 aa, unidentified
MLYVGVDISSESFDVCFYLPEKKKMKSMKYKQDREGFGEFLKKLNAYKEEKQVGMEATGSYHSNLYGFLRSKGIDVQLLDPYTLSKFMKAMSRSKTDKKDAKSIAVAMYRIFDLLSISQVPEEEMLAFRDLVRMRSTVVANCSDLQRKLKSKLKIHMPELLKTFRYLSSPVLLHLLSAYPSREEILANEEDAVKLLSSHRNWSEKKAREVIDSLKDSIGKADTFGTYSTITSTFIAEIKLLKDHVEALNEEIKRFLEKFPDNPLRTIPGIAEVTEAEIVSEVGDIDRFSSGKAFVSYIGLDPVIKQSGNMTRGLSISKKGNKHLRRTFYQLAKSLIANTEKYKNKYEKMKERGVKKKVALIATARAAAEMVYQLLKNNVPFDLSLS

SEQ ID NO: 471809 - protein, 411 aa, unidentified
MRRVIGLDVHRTFAEVVFWEDGRLRPAGRVDMTRSGLEGFGRTLAQTDEVVVEATGNAMAVVRVLSPYVARVIMANPLQVRAIAHARIKTDKIDAGVLAQLRAADFLPEVWLPDAETERRRRLVTRRNQVVRHRTRVKNEVHSILHAHLIPPCPHADLFGGLGRTWLGKQTLPEDEVAAIARHLRELDRLGEDLAVLDREIAQATADDPSVRRLLTITGVNLTVAAGLVAAIGDVKRFSEPDKLVSYFGLNPRVRQSGLGLAQHGRISKHGRAHARALLVEAAWAASKAPGPLRAFFLRIRAKRGHQVAAVAVARKLTVICWHLLTKETEYLWQRPALVAHKVRSMELQAGQPKRKGNQRGPSHAYHVKELRDREIEIARQAERAYEHAVRNWQPSRPGKGRTGAAKEERP

SEQ ID NO: 471810 - protein, 406 aa, unidentified
MDLVYSHVCGLDVHKKNVVACIITPEGKEIRTFSTMTDDLIALKEFIKAKGCSVVAMESTGSYWKPIYNLLELENIKILLVNAKHIKNVPGRKTDVKDAEWIASLLQHGFLQGSFVPDREQRELRELVRYRKSLIEEKSRELNRIQKVLEGANIKLSSVVSDINGASSRSILEAIINGEENPETLAQLSQGKLKNKMDELKRSLKGLINHHQKTLIEIQLRHIDYLDQEITKLDEEIKNRMHPFEQDLALLDTIPGVGRRTAEQIIAEIGTNMEQFPSAAHLCSWAGLCPGHNESAGKQKSARTRKGNQKLRSSLIEAARAASRAKDTYLSSQYHRIAARRGANRAAVAVAHSILVIVYHILKQKQPYIELGPTYYEEKKRNMIIRQSLKKLESLGLKVTVESVAS

SEQ ID NO: 471811 - protein, 336 aa, unidentified
MVQIYGIDLGMSSFDVSFLSESGSVRHLSGVKNTVHGISKFLLSLPSSAVLCAEHTGVYGDLLLRLCTLNRTCLCFVPGYQIKHSLGLQRGKSDPLDACRIREYAERFYDLLRPCFYPGEEMSELQELYRTRSLLVDSRKRLDTLNIGDNCKSSVSLAAGHARRAVLAELNTQISGLDHEIEALIQNSSEFSRNYQILTSIVGVGPVTSCELIIKTENFRKLDTAKKCAAYAGIAPYPKESGKMKCGHKISPMGDKQLKTLLFLCARSAKEHNKEIRLYFLKKHKVEKKHFFVAMNNIANKLLRLIYSLIQKQQTYDRDYIQRDPRCVVISDTHKC

SEQ ID NO: 471812 - protein, 369 aa, unidentified
MGAALLADGEYEVRVYGLKHQTEKRSMDHFAGLDVSVKDTSVCIVDGTGKIVREVKVASEPDALLAVLRNPAYRFKRIGLEAGPLSQWLFSALAEVDLPAICVETRHMRAVLKAQINKTDRNDARGIAQMMRVGLYRPVHVKTLRSQKLRMLLTHRKLLQSKAIAIENDLRATLRNFGLKVGMVGTVKFEVRIKELVENLPDLILLVEPLLVVRRVLREQLDLLHRRLLAVVRDDAICRRLMTVPGVGPVVALTYRATVDVPARFRKSKSVGAVFGLTCSRDQSGERDRPSAISLCGDEIMRAMLYEAAQAMLLRSTRWSWLKAWAVQIARRRGMKRAIVALARRLAVILHRIWVDGSEFRWTREAAAA

SEQ ID NO: 471813 - protein, 402 aa, unidentified
MNSVGIDISKGRSTVAVMRPFGEVVISPFEVRHTDSELSELARQLKSLDGETRVVMEATGNYHAPVAKLLHDAGLYVSVVNAKLVHGYGNNDLRRVKTDRKDAIKLANYGLDRWLTLPRYVPEEDTRLLLKNCYRQYRQYSKVQTVLKNNLISLLDTVFPNVNRLFSSPIREDGSEKWVDFVAEFWHCRCVSEKSQKAFTNKYQRWCRKHGYNFSEEKAHTIHAEASGHIGIMPKSETTKLLVEQAVAQLRATSAALTALKHEMQSLASMLPEYPVVMDMFGVGPTLGPQLIAEIGDVRRFYSKKALVAYAGLDAPPNDSGDVTGRHKSMSKIGASSLRRTLFLVMSVYLQNAPLDEPVYQFMDRKRAEGKPYRVYMMASANKFLRIYYATVKAYLELLERT

SEQ ID NO: 471814 - protein, 404 aa, unidentified
MSNGLEKVVQMGWDGHKTFSRVSGRDASGAVVWRERVEHRDLRALRQQLRRWPRGIPVVLEATFGWGWMTDELAAAGLDPHLAHSGKLAEWRRARRLAKSNRLDSDLLSELPSQRPNWWEVWLAPPAVREQRESMRHRAGMVQFQTALKNRVHAVLHRHGILHEHSDLFGVKGRRFLNQLLAEPNEVRVARGDRPLPDTARFALAGCLRQLDQARGEIAAATRGLRREVRGSPAAQRLRTIPGISWVLAHTIMAEIGRIERFATARHLASYSLMAPIAHDSGEELPDATPHGRHVGHVGRRTLKWAWIEAAHNAVRSGGRFKDLFDRRTNGGKRDRNRGYIAVGHELCRVAYVLIKKEIDFVDNPSPRPGSDRSRRQRIARSGTGQPDRPMADPAACGEVQTSS

SEQ ID NO: 471815 - protein, 384 aa, unidentified
MNKHSMIFIGLDTHKEFHEVACCEEQRGAAPVHYGRIPSSKVSVKKLLRQFESKYPGATLHVVYEAGPCGYWIYRLITSLGHCCYVVAPSLIPKKPGERIKTDRRDALKLVRSLKSEDLTPIYVPEPEDEAVRDLSRAREAAMKDLKEAKYQLKALLLRNNIRYEGTANWSKKHLRWLTELILPHPAQQIVLQEQLQTIEERIRRLERLDNELTHHVHQWRYYPVVKAVQAMRGVRLLVAVGVVAELGDLHRFDHPRKLMAYLGLVPSEQSSGGKRHLGAITKAGNGRARRLLIEGAHSYRYPANVSTELQLRQEGLPKDIVDIAWKAQLRLCKRYQRMSKKGKHYNLIITAIAREMAAYIWAIAKEVVLTPVNPKLRLSRVPA

SEQ ID NO: 471816 - protein, 354 aa, unidentified
MRFHTSTTQYHCGVDLHSRQMYVCVMDSQGNKLLHMNIKNNDFEFFLKKIEPWRHDMTVCCECLFCWYWFADACKEADLSFVLAHALYLKAIHGGKNKNDRIDSEKLAHLLRCNLIPPSYAYPAAKRPVRDLLRQRTSYVWQRVELLQRISTRQLAAGDVPVSKFSNNREKWLEALLEVTKDPQKRFAITQDVHLVMQYDATIKALEKELLKITKSKQPRDFALLRSIPGVGKTLALTILYEMESIDRFPSAQNFLSYCRLVKGTVASAGKIKGLRGAKLGNPYLRWAFGEAAVLGKRHHEALDAYSRHLEKKHGKFKGNSILASKLARAAYFMLKNGTSFDLEQLTGSSAKTT

SEQ ID NO: 471817 - protein, 368 aa, unidentified
MAEITRALIARVGVDIAKSVIHVHAVDAAGRRVVARSLRREQFLPWCEQLPKGCLVAMEACGGAHHWARRLVAMGLDARLIAAHFVAPYRLEGKGGKNDANDAAAICEAASRPRMRFVPIKTAAQQGLMALHRLREGYKEERTACINRIRGVLTEFGLVFGKSPKVLRAALPEVLEDGANELSGTARMVLQDAFEHWRHLDERMRWCDRQIGQHVRSCAAARRAARIPGIGEIGASALTAGVGEFAQFSSGAQFSAWLGIVPRQNSSGGKPSLGCITKRGDDYLRTLLIQGAKSVVMSAHKRNDPTSAWLQQLIARVGWQKACVAMANKNARILWAVMTREHEFDARHVSLKPQAKSPKPPQPVPAFA

SEQ ID NO: 471818 - protein, 397 aa, unidentified
MPKFDDLSRSLAALDQDSTLIAVIELSRSSWLVGGVVPGLAREPTKKLVPDAEGLLRLLHRWRDEAAAAGRPIARICVAYEAGRDGFWLARWLRARGIECDVIHPTSVSVSREHRRAKTDRLDLGLLKRSYLGWLRGEKRHCSMVAVPSREVEDAKRPLRERDRLVGEATRLVNRIKGLLTLHGIARFDLRMATARLRALRTAEGEPLPRNTLAELLRALERLQQIRAQIAEIEAVQREQLKEAPETGVHPTIRLLARVRGVGVMTAELLVREALSRPLRDRRAVARGACPRAGRRPDPGAGVTGAPDESGNKRSEKGLAKAGNARVRRALLQLAWRFLRHQPDSALVQWFRRRTQDGRGTTKKAMIVALARKLLIALWELATTGAVPQGVHLHAVS

SEQ ID NO: 471819 - protein, 371 aa, unidentified
MSRKHTVKEFNKSNKWLVIGVDLAKYDNTIVGITEDGEVQIIERISTEDLLELASEIQQTTFAMEPCNGANILSLNLQAKGHEVKMISGAAVKDWVKVHLAGQKTDRNDALALAHLSRDTMLKPIRTKTVPEMRMQSIYAARKQLVKCRTSILVSLKGMSQAWGILFSAQRRNLKKMRESLEDKVELLSQPVVDALIQMIDSVARLDKEIEALESVMKDQLSQDERAQRIQSTLGIGFVGTHRLLSTCGDPNRFKGPKSFAAYYGLVPNNKSTGHNHRVGKCSCHGDAEMRSCLYQAAAVLYMQNVKHMLPECALKQWIDKKVSQKMMWGKMIIALAAKLARILWALLKYDAYFNLSKAGLSRSMLSQQTN

SEQ ID NO: 471820 - protein, 360 aa, unidentified
MAQAKTFVGLDVHVSGTVAAIIDRDSGELQRRRLPGRAGDVAEFVAGLEGPVRATYEAGPTGFALARALQAAGVECLVCAPGLIPRGPSDRVKTDQRDAERLVRLLIAGELHRVEVPSIEAEGLRDLVRAREDLRGELMSARHRVAKLLLRHDIRFAGTERNWTQPHLRWLSTVRFEQPGSQAAFDDYRGAVEALMIRRVDLERQIAELLPVSPWAQNARRLMCLRGIDTLTAAGLCAEIGDFDRFKHPEQLMSYLGVVPSEHSSGTRRRQGSITKSGSQHARRLLVEAAWHYRQPPRVSEPLRRRQAGVDPAIVALSWKTQRRLHRVWSRMEERGKRRTIIAVAAARELAGFCWAINTA

SEQ ID NO: 471821 - protein, 322 aa, unidentified
MHAFHLGIDVAKAKLDCALRLPDGKIFHKVVENQRAAFVQLLTFLDKHHAQGVHVCMEATGIYWEAIAEFLAAREGFTVSVMNPAQIQAFAASHLTRTKTDKVDAKLIAAFCAERRPEPWQAPSAPERNLRALVLRLENLQAIRIQESNRFEVARECVKDDICEHLQWLDGKIEVLIKNIRQLLHDDDDLGPKQKLLISIPGIGEHTVAILLAYYAHPEHFHNARQAAAFAGIDPRQHESGSSVHGKPRLSKIGHAFLRESLYMPAMATLYKTAWGQRFRQRLAAAGKAPKLIIGAMMRKLIHVAFGVLKSGKPFDPARHGV

SEQ ID NO: 471822 - protein, 314 aa, unidentified
MEVILGVDVSSQKLDACLETPKHAKPMFKTVAYTPEGCKKLLTWASRHKVSRCAMEATGGYEFTIAQLIMKAGIKLYIANPNRIRYFAKGDGILAKTDKIDAFVIAEFARKSNLPAAYEASPVQIELKQLIGRRIELKKSLQVEKCRMNLASGAILQSHENLVAAISMEVEQIDSLIDALEIQNPDINQKTRILCQQKGVGKATARALIALVPELGHIDRRKIASLIGLAPIAKESGKMKGKRFISGGRYEARRCLYMPAWVATQYDPEIGAFYQRLIENGKPKKVAIVAVMRKLLVRLNALMRNHLLQSTKST

SEQ ID NO: 471823 - protein, 341 aa, unidentified
MKLYGGIDLHSNNSVIHIIDEQGVSQLKKKVTYDLVTTLPLLKPFQDELTGLVVESTYNWYWLVDGLMEAEFEVHLANTAAIQQYSGLKYGDDDSDANWLANMLRLAILPTGYIYPKEARMQRDLLRKRMQLVQQKTANMLSIQGMYDRHLNRRINSNKLKQLTLAQLDNDFGDPNVRLAIGGNLTVQHCLAQQIKVIEASLTKQLKLTPEFIRLTSIDGIGLILALTIMLETGDISRFDQVGNYASYCRCVSGARYSNGKKKSSTNTKNGNKYLAWAFIEAANFAIRYNDTVKRYYQKKLAKTKVVIARKTVAHKLARACFYVLRDQVDFDVNKAFGYSK

SEQ ID NO: 471824 - protein, 347 aa, unidentified
MRFYTTQHPFYCGIDLHARTMYVCILSQSGEVLVHRNMKTDPETFLHVVAPYRQGLVVAVECMFTWYWLADLCADEGIPFVLGHALYMKAIHGGKAKNDKIDAQKIAALLRGGMLPQAYVYPARMRATRDLLRRRMHLAHKRAELLAHVQNTNSQYNLPAIGKKIAYKANREGVAERFADPAVQKSIEVDLALITYYDELLRDVELTIVKTARHHDANTLHLLQTVPGIGKILSLVLLYEIHDVHRFPRVQDFVSYCRLVKCARESAGKRYGTSGTKIGNAHLKWAFSEAAVLFLRDHPAAQKYLARLEKKHEKGKALTILAQKLARAVYHMLTRQVAFDREMFFQR

SEQ ID NO: 471825 - protein, 335 aa, unidentified
MKKFDFYVGIDVSKLTLDVTILYECEHTTKTEYYRIENTKKSIELFVKKKLGNYTLDKMLFCFEDTGIYSLPLSYYLNDSKLSYWRVPAMEIKRGKGITRGKSDKVDSKDIAFYAYTHVHKFRPSIMPVKSIQQLRILFTEREKLLKSIGSFEKTSENKDFVSKEVFGVVASVNRTLMNQFERALKHIEEKMLEIIETEEKLNQQYKLITSIPGIGMKTAIYLIIATKGFDAFDDWRKLACYAGVAPFPYQSGTSIKGRNKVHPLADKKLKSLLNMCAICAIRYDKELRAYYERKIKEGKSKMLVINNVRCKLLSRVFAVINRKTPFINTFKFAS

SEQ ID NO: 471826 - protein, 342 aa, unidentified
MNQVYVGVDLGSSNFHQVAVNEAGVSKVNREFATSEANLIKAFADQRGEIHVHLEAGELAPWATSIIRPLVSRVVCSHPQSNAWIAKDADKSDRIDAFKLADLLRLNRFKEVHYPQQQSRRDFKTLVQHYDELTQQQARLKTKIKARLRMQGVIVRGEELFSSKGRKAVLAAVKSVAVRTAIKQLYAVLDQSIESQTEARLLMRRAAQAFPEIRILETAPGIGPIGACRFSAYIHTPQRFSSTRKLWKYCRLSVSHRSSNGKPLRRPRLDRNGCGRLKDVTRKAFEAALRTQYDNGFKRAYLRALETTHDRTHARLTVQRKIASTLRAMWLNQTPYRDELMR

SEQ ID NO: 471827 - protein, 346 aa, unidentified
MDLYIGLDVSLASTAICVVSEHGKVVKETTAASEPEDLVRSLRRLPDTVVGVGLEAGPLSQWLYRHLSQAGFDVVLMETRQVKGALQAMPIKTDRRDAEGIARLLQMGWFRLVHCKSMSAQEMRALLTSRKAIQQALIDLELSLRGVLRNFGLKMGRVAKGRFEERVRELIEGNPMLEAATNPVVAARRGLRTELAGLEKLLRDHARTDPVCRRLMTMPGVGAIVALTVKSSIDDPDRFRSAKDVGPWAGLTPTREQSGERDVVGQITRAGDTGLRTALYQAATVMLNRARPSWLTAWAWGVARRRGKKRATVALARRIGVVLLRMWRDDTDFRFSRAETKEAPAE

SEQ ID NO: 471828 - protein, 401 aa, unidentified
MRCRTRDRTSSVFLTVPDCMLIASFDRRKRRRDLEVPEGLDDRADLEARRLLRSGTRTVDRATPAYNRVLGPDPTNMMEVGMESKRVVGVDIGKRWVDVAREGTARVGRHRNEAVDIAVLVATFDASRDLVVFERCGGYERHFEAALGAAGIPWAVVHSAAVKAFRQVQGIKAKTDAIDARLLRDFGRDRLDAGKLRLGRTEDVVLDALVARHRQLKAALHAEQCRRETAAIAAAQASIERMIAHLQAELVTVGVELSLHESSDPQIVFKEAVMCQRKGVAQAPARALLAELPELGRVECKQITALGGLAPRIHQSGRTHPRRGLVPGRASVKAILFNPARSAMRWDPEIRTFCNRLRARGKPGKVIMVAVMRKLLVRLNAAVRDALNQPEVLSPATRMAV

SEQ ID NO: 471829 - protein, 339 aa, unidentified
MKYTPVGVDIAKHLIQVHFINEHTGEVVDKQLRSQDFLMFFSNREPCLIGMEACGGSQHWARELAKLGHKVRLLQARFVKAFVMGNKNDVMDARAIWMAVQQPGKEIAVKTEAQQSVLILHNSRRQLVKFRTAQINALHGTFLEFGETIHKGRAAMDRELPAALERMRVKLPPYLIALLEGQYNRLSELDSLIDDIEKQLISVARQSETCKRLMEIPGVGPLIATAAAATMGEASAFKSGREFAAYVGLVPKQTGSGGKVRLLGISKRGDTYIRTLFIHGARAAALLAKEPGPWITELKKRRPTSVAIVAMANKLARTVWAIAAHDRKYDKNHVSIRPY

SEQ ID NO: 471830 - protein, 441 aa, unidentified
MMAMRKRTDTVFPNAAGIDVGASSHWVAVPPDAAEESVREFGVMTDDLRALADWLLACKVEIVALESTGVYWIPLFEILEQRGLQVWLVDARQMKYVPGRKSDVQDCQWLQRLMSYGLLRAAWRPAGEVCELRAIARLRETLLAEQASWVQRMQKALVQMNIQLTEVLTDVMGMSGQAIIRDIVAGERNPEVLARHRHRRVKASTEEVIRALTGNWRQEHLFVLGQALSMYDDIARHLRECDAQMQVLLGQRAQCAINVGAVPRAGSKARAAFDVRQMLANWAGVDLTRINGLEVSSVMKILTEIGPDLSRFANVKHFCSWLGLCPGTKVSGGKVLSAGTKRSANRVRQALKMAAMTLSHSNSALGAFYRRLCSRMDKPKANTATAHKLARMVYFMLTRGEAFVDQGQQRYEELQRERSIAALKRRATALGFQINPIGAAA

SEQ ID NO: 471831 - protein, 372 aa, unidentified
MNYNTVYVGMDVHKESFTLCSCKYEDEKASHYQRTPASYKNVLRYLAFLRTIYGEDTRFVCGYEAGCLGYSLYHQLENFNVECVILAPTTMLEQRSKRRIKTDKRDAEIIAKSLAQHNYSPVHIPTKMDNQTKEFIRMRDDHKAELKKIKQQILSFCLRQGYQYDGSGNWTAKHVKWLRSLKTEGLYKEILDEYLLTYTILTDKLNRLDQRIEELASKEEYKESVSKLTCFLGIKTHTALSVIVEVGDFQRFVSARKFAGYLGLVPGQHSSGDDRNGLGITKAGNTHVRRLLVESAQSYTRGKIGYKSRVLRSRQAGNSPQIINYADRANERLRRRYYKMVLKDGKKYNIAKTAIARELACFIWGMMTDNIY

SEQ ID NO: 471832 - protein, 407 aa, unidentified
MRRVIGMDIHRTFAEVVFWEDGKLRPAGRVSMTRSGLEGFGRSLGKQDEVVIEATGNAMAVVRMLSPYVARVIVANPLQVKAIAHAHVKTDKIDAGVLASLRAADFLPEVWLPDPDTERLRRLVARRNQVVRHRTRIKNEVHAILHAHLILPCPHADLFGRLGRIWLAQQVMPDDECAAIERHLRELDRLSEDLGVLDTQIAQTGSADPAVKRLLTITGVNLIVAAGLVAAIGDVRRFTSPQKLVSYVGLNPRVRQSGLGLAQHGRISKRGRSHARAMLVEAAWAAAKAPGPLRAFFLRIRARRGHQIAAVAVARKLAVLCWHLLTKSADYQWARPALVANKLRAMELQAGQPARKGNTRGTAYAYNVKALRDAEIELARHAEQAYERFVSHWQRRGTAKQRTGAAK

SEQ ID NO: 471833 - protein, 357 aa, unidentified
MRCVPTDAAGITLGVDTHKDFHVAVALDALGRRLGTLSIPTTPSGYEKLAEWANGFGPLEAVGIEGTGSFGAGLTRFLRAEGTRVFEVDRPRRRDQYRSGKSDPIDAELAARAVLAGTATTQPKDADGEVEMIRTLRVTRRSAVKARAQAVNQLKNLLITAPEGLRSELRGLSTAKLVGKVSGFRPGANPSDVEAATKFALRSVARRHRRLSEEICELDEQLNRLVAEAAPELVALEGVGTDTAASLLIAAGDNPERLKSEAAFAHLCGVAPIPASSGKSVRHRLNRHGNRDANRALYVIALCRMSREERTRAYVAKRTTEGKTKKEIIRCLKRYIAREIYRILASVSLSKPPILAP

SEQ ID NO: 471834 - protein, 461 aa, unidentified
MNNKKSRGRQKGSARKKVDWKALEIVHPDAAGIDVGGSEHWVAISPDRDPEPVRRFGTFTADLNELARWLVEKGVRSVAMQSTGVYWMPVLEILEQHGLEVYLVNAQHTKNVPGRKSDVEECQWLLKLHAFGLLNNSYQPSDEIRIARTLWRQRGNLVAEAASAIQRIQKVLIEMNIQLSNVLSDLSGVSGMTIIGAILDGERDPWILASLAQPEVQATPLEVAKSLEGNWRDELLFVLSQQVELYRIYQSKIVDCDLQLRKHLETFGSKVDLQTQPIGPKPKGKKGSRNAPQFDLRTELYRITGIDWAQINGVDVLTAQTVIAEAGADLSAFPTEKQFTSWLGLCPTNEQSGGKILKRRTRKVVNRASGAFRTAATTLLRSQSYLGAQYRRLRTRLGAPKAITAMARKLACLFYRLIKHGQQYVDKGTEYYEARYREQQIRSLATRAQKLGLQLVIPETA

SEQ ID NO: 471835 - protein, 437 aa, unidentified
MITQTVVHPDAAGIDLASEVHYVAVPADRDPQPVRNFGPTTDQLIVLADWLQQCGIRTVAMEATGVFWIPLFELLEARGLEVCLVNAQHVRHVPGRKSDVQDCQWLQFLHSVGLLHASFRPALEVCAVRTLLRHRDSLVQVASAHLLRLQKALDQMNVLLHRAVTDITGTTGLAILDAIIAGERDPRKLAAHRDHRCKKSEAEIAAALKGDWKVEQLFTLRQSLAAWRFHHQLADECLQEVHRLAAKIESRTKATPPAPTKRGKQPDEAVRTLLFQKFGVDLTAVDGVNTHVGYTFLTEVGPNLDRFASPENFASWLGLCPNNKVSGNRQLSVSTRPVSNRLATALRMAAQSLHRVESVLGDLFRRMRAKLGPAGAITALAHKLARILYTMIKTRTAFDPTKLGNPTLIRQRKERSLRKQAALLGFSLQPAQAAAVS

SEQ ID NO: 471836 - protein, 406 aa, unidentified
MDKPSVETAVLKTDRGGNQLYFVGIDISKFKHDCAIIDELGDVTTPSWSFQNDCEGFSLLRELLDALDGEKKIGLEATGHYGQNLKLFLENNGFSFMEFNPLLINRFVRSKSLRKTKTDSIDALMIAQYLMTVEYKPYPPSFYTFEKLKSLTRFRDSLIRYRSKQLVELTNILDKVFPEFKPFFKGRFSVTALYILSHYASPEKISNMNSKSYEPLRRLSRGKFSMVDFVELKTLAKNTVGSTSDYLLQEMEITIDIYNQLQSKVEEIELQINDCVLGLAPPILTIPGIGVASAAVILSEFGDLSKFKNPSKLLSFAGMEPGYFQSGTSECAGNMVKHGSSHLRYAIMNCAQTVINNEPTFATYYAKKRAEGKEHRVALTHVAKKLLRVIYTLQTKELSYNPDFVR

SEQ ID NO: 471837 - protein, 410 aa, unidentified
MVKENFIYVGIDLHKETHTAVMIDCYNQKLGEITFPNRPADFPKLVTKVKKCNTDGKEVVYGLENAYGYGRALAVWLIDKGYLVKDVNTAISHRQAKHRGAMYRKSDSDDAEAIALATLNMLDKLPDACPNDAYWSLGQLVHRRDNIMKQRTRLVNQLHEQLCIAYPSYKQFFNDISRPTALYFWEHYPSRKYLKGKSVEDLRAELVPVSHNKCSTKTCEKILDAVASDKVKNNAYQDARDMVTLSIVSDLQHYDSQLAEVDKMLEQMYKMLGCTLTTIPGVNVITAVKILAEIGDIKRFSNANKLAQFAGIAPLHLSASGKGKDVATKQGNRRLQATIYFLAIQMVQVSSKGTPRNPVVRAYYEKRKAEGKTSQQALICISRRLISIIYGMLKHGTEYRMPVVESAGEK

SEQ ID NO: 471838 - protein, 344 aa, unidentified
MWIIGCDYHPSFQQIAFVNLADGEGGNLRLEHKSGEAERFYRSLAGQQVLVGMEATGGMRWFERLLTELGFGLWVGDPSRVRAAAARKPKTDKQDAELLLRLLLEKRFPRIWVPTVELRDRRQLVLHRHRLVQTRTRAKNQLQAMASNEGLYAQRRVWSQAGQKELMALSLSPWAAVRRQDWQELLGELNRRIAPLDRALQQQAEQQPEVRLLMTHPGVGPVTATAFVLTLGEPGRFRTSKQVAAYLGLVPLENSSGKNKQRLGHISKQGNSLMRGLLTEAAHAAAKKDPEWRRKYMRLAMKKNRSVAAVAVARCLAVRLWWMWKLGLDYGQMKESRSHAEPLA

SEQ ID NO: 471839 - protein, 340 aa, unidentified
MNKFKDKKWFIGIDISKDTFDAALIQEKIPVSFKESKFENSSKGFNSMLKWLNKNGVAAKDSLFCMEHTGTYGLALFSFLNEKNINFCVEPGLQIKRSSGMTRGKSDRVDARRIATYARSNKLRLKQFTLPSVKLLQIRQLLTYREQLVKTRTGFMNSLKSHQQYQQINHLDFVIKDIQNQIDQLSVHIEELENKIKEIIGSEKDLQKNFKLASSVKGIGFIIAAFMIVTTNNFQSFENGRKYACYAGIAPFEHSSGSSIRAKARVSHLANKRMKTLLSNGANSAKNSDPEIKNYYMRKIKEGKNHKSVINAISCKLVNRVFAVIKRQSPFVSIYQQNFA

SEQ ID NO: 471840 - protein, 355 aa, unidentified
MSSEKYIGLDVHQATISVAVMDSQGKFIMESILETKASTILEFLAGLRGSLFVTFEEGTWAAWLYDLVKPHVTEVLVCNPRKIPLLKQGNKSDKIDARKLAERLRLKDLKPVYHGETGVRMLRELARSYLTIVKDLSRVMNRLKALYRSWAIPCAGRDVYYTRHRSQWLEKIPEAGTRRRAEQLYQQLDLLQHLRQQARRELLAESRKHAITAKLRKIPSLGPIRSALAVALIQTPHRFRSKRQLWTYSGLGLETRDSGEYHYVRGQVRRRKKQATIRGLNKDYNHDLKGLFKGAATRASVQPGPLQEFYQRSLAKGIKPTMVRLTLARKIAAITLTLWKKGEDFDIGKLNSQAA

SEQ ID NO: 471841 - protein, 425 aa, unidentified
MSQQNVEIAAFVGLDWADQKHAATLQEANSDQRQRFTLDQTPEALQSWIQQLRNRFAGRAVAIAVEQKRGALIYALMHVDFLHLYPVNPQTLSQFRKAFYPSGAKDDPIDADLLLEILMAHRQHLRVWIPDDVLTRSIQLLTEDRRHLVDERTALTNQLTAALKMYFPQALDWFGDLHTARACAFLQRWPSLQQLKRATSSSVRKFYRAQGYRGEDKLEQLIASIPEAQPLTQDGAVLLAGSMKVQALVTQIPLLTESIDRYDQQIASLFEQHDDSTLFGSFPGAGPSLAPRLLAAFGSNRGRFEFAAEMQQLAGIAPVTEKSGTGIWIHWRLACSKFLRQTFHEFAGQSITQSDWARACYDELRKRGKSHHAALRALAFKWIRILFRCWKTRTPYDEARYCKSLQLRRSPVAGKLAATEKIVLT

SEQ ID NO: 471842 - protein, 339 aa, unidentified
MSIVMGLDQHRAQITADWLDTETGEVKRARVTPADRAGVRAFLERFRGQQPEVALEATTGWRFVVEELRRIGAEVHLAEPAETAGLRGPKKRAKGDRADARHLRELLMIKRLPESWIPPDHILDLRARVRLRHTLSEQRSEWQQRIQATLYHHGCPQRRQLMVGDGRQWLAAQPLPEAAREQVTVALALIDALETQIAPLDKELRAYARRQPGCRALMTHYGIGELTAVTILAELGDCTRFSSSRQAVRYAGLDITVHQSDQHRSPGHLSRQGPPALRWALFEAAQVARRGERSPDREYYLATKERIGGNRACLSVARKLLKRSYHTLRELGEEALAPA

SEQ ID NO: 471843 - protein, 411 aa, unidentified
MERVLERCCGLDVGQKTVAACVRIPAPDGGREQIIRTFGTMTADLLALRDWLLAHGVTQLAMESTGVYWKPIYYALEDEFTVLLVNARHVKNVPGRKTDVSDCAWIAQLLEHGLLRASFVPPAPIRELRDLTRYRKSQIQERAREVNRLHKVLEDAGLKLAVVASDVLGVSGRAMLEALLHGTTDAETLAELSRGRLRKKLPQLRQALNSRFGAHHRFLVGRIIAHLDYLDESIAECSQQVELLLRPFAPVVERLKTIPGVKQRTAEVIVAECGLDMRRFPTPAHLASWAGMCPGNNESAGKRKSGKTRQGSKWLRIALIEAAQAAARTDTALSARHRRIMRHRGYQRAVVAVGHEILVIAYCLIARATTYQELGSTYFDRRYTERTIRRCVRTLEQLGHQVTLQPMAAVA

SEQ ID NO: 471844 - protein, 352 aa, unidentified
MNKCHLNTELSSHEGTRCQFNGGTGAIELGIDVHQDFYVVVMQEGGANPKPPQRFWKQAFLHWVAKLARSGSEVHAVYEACGFGFTLQRQLSALSIRCYVVCPQKLDEQNRRVKTDGLDAKALVLKLDRFVEGNRSALALVRVPTQEEEQKRAIHRQREQLVKVRKQLEAQGRSLMVNHGFEPVKSWWKQRTFAALQLPAWMKELLLANTQPLLLALQEKIGALTVQLQSAADPKQPRGLGLMTSVIIDREIGDWNRFNNRRQIASYTGLCPGEYSSGNTRLQSCVTKHGNPRLRAALVELAWRLVRFQAKGAFATGAARKKAIVAVARQLAVDLWRVRTGRCKAQALGLFI

SEQ ID NO: 471845 - protein, 316 aa, unidentified
MEQSKTSTVYAGIDVGKLRLDAAILDRSDSIAVGNDAGGIARLGAWLLERGVTRVGLEATGGLERPLRLALEGHDIAVVVHQPAEVKLFGRISRQRLKTDAADARLIAAATAAIQRPAKRADPRLIELSERLTAYEQVADLLMSLRTFRQSLTLNEVDQMLGEQAAQLERLKAALARQLIGALKADAELRPRYLLLTSLPGIGPIVAASLAIRMPELGSMQRGQPASLIGVAPHARESGQCKGQRFISGGRDRPRRMLYLAALAARRHDPALRAFADRLKAAHKPPKLVIVAVMRKLIEAANLVIKRNQPWSRQPA

SEQ ID NO: 471846 - protein, 350 aa, unidentified
MTIVENHLLSVTGGIDTHSDFHVAAAVDPNGGLLGVETLDTTTGGYRRLVAWLAGFGDIDLIGVEGTGSYVAGIARHLTGKGIRVVEVDRPNRQARHRAGKTDAVDAIAASRAALSGTATGVPKTRTGPIEAIRVLTVARRSATSEWVAILNQMRHLTFTAPDELRQRFQDLSPITLVRTCAALKPRRSDADIVRFTTLSTLRELGRRALFLREQKKRLDADMKPLIDEVAPGLIAVFGVGYHVAATLLIAAGDNPHRIRSEAAWAHLCGVAPIPASSGKVQRHRLNRGGNRQANSALHKIMLTRMAYDDRTRAYMTKRTRDGKTLGETSRMLKRYIAREVYHHLPSTMT

SEQ ID NO: 471847 - protein, 451 aa, unidentified
MSGTKKARRKRDISPTHPNAAAVDIGATLHVAAVGPDQDPEPVRSFGTFTGDLHRLADWFQQCGVRAVAMESTGVYWIPAFEILDQRGFEVILVNARDAKHVPGRKTDISDAQWLQRLHEYGLLRASFRLKGEVAVLRGYLRQRERLLDYAGSHIQHMQKALTQMNLQLHHVVTDITGTTGMAIIRAIVAGERDPAVLAAHRDPRCHASTETIRQALVGNDREEHIFALTQALELYDVYQAKMALCDVRIEAVLKRLRKASSSPAGKPPPVRTPKKQANAMAFDVRAALHGLLGCDVTQIHGLGPYLALKLVGECGTNLSAWPNAKHFTSWLCLAPSNKISGGKVLSSRTRRSGSRAAALLRLAAVAVGRTETALGAFYRRLSARVGKAKAVTATARKIAVLFYNTLRYGMEYSDPGASHYEERYRRRVLTNLERRAKSLGYVLQEASAPV

SEQ ID NO: 471848 - protein, 419 aa, unidentified
MRNRKAKKVTVVNEKMLLVAVDIGKSVNHGYMRIPHGKEVKPFSFHNTGHGFNKCWRKICQFKREQGLEEVVVGFESTGSYAEPLCHFLRKRGVQLVQTNPMHTKRLKELSGNSPEKSDKKDPRVIADIIMLGHALSVIIPEGASAELRRLTQARERAIKDRTADGNRLHDRMFVLFPEFLEIMKGTSTKSALYLMLNHPTPEDIVHLGVECLAARLKKVSRGKLGKERACELFDAARKSIGIDEGKQSMLMEIEHLVCRIEGAEHFIKNLEKHMERYLEHIPYSHCILSIKGIGIITTAGIIGEAGDFRGYSTIKEVSKLAGFDLYEVSSGKHKGQRHISKRGRPLMRKQLYYAAVNTVGSNGIMHDYYHTMLDRGMPKTKALIAVARKLLKLIFALVRDTTKYVENFEHNRKSKSAA

SEQ ID NO: 471849 - protein, 385 aa, unidentified
MSRSKFDPRRSLVALDQHKCLIAVVELSLSTWLVGGIVPGIARDPLKKLTPPDPETLLRMLYRWRDEAIKAGCSITRIVVGYEAGRDGFWLARWLQAHGIEAYVMHPTSIAVSREHRRAKTDRLDVSLLKRSLLGWLRGEEKHCSMVAIPTVEEEDAKRPHREREQLVGKCTGTVNRIKALCIRHGIRGFKPKLRHAAQRVCTLRTPAGEALPPNTLAELQRELEHLRFIKQQIKQIEQARLQQLEQTPQQALNATRRDLLRVRSVGIETADLLTSEVFTREYRDQRAIARYVGLTGSPDESGSRRREKGLAKAGNARVRRGMIQLAWRFLIHQKDSSLVQWFEACIAAGKKRKTMIVALARKLLIALWRCVTLGEVPEGVILVD

SEQ ID NO: 471850 - protein, 350 aa, unidentified
MLALHPDLDVVIGVDTHKNTHTAAAVGATGAVLEHLTVPADPAGYRQLIGFGRRHDARLWAIEGTGSFGAGLTTELLTRGEKIVEVDRPQRPARRGGVKSDDIDAVRAARQALAGVGLSEPRRRGDREAIRVLLATRGQAVRFRTRAISALHALVTSAPDGLRERFRRLPLGELLQTCAGLRDSSRRSVEESATVLAMRSTARRALACEREAAELEAELDRLVRRLAPELLGQLGIGPVVAGQIITSWSHHGRIRSEAAFAKLGGAAPIEASSGTITRHCLNRSGDRQLNRALHTIVLVRMRQDSATKDYVQRRLAQGKTIRDIKRCLKRYIARQLFRQLAALTRPLDGT

SEQ ID NO: 471851 - protein, 405 aa, unidentified
MDLLYQRCGGLDVHPRSVSACARIVLDGRVTQEVRTFGTSTRELHEMADWLAGLGCTHVAMESTGVYWKPVWHVLEGRFELLLANAMHIRNIPGRKSDVKDAVWISDLLAHGLLRGSFVPPEKIQELRDLTRTRKQLVREITRHTQRIQKTLEDANVKLTEAISNILGTSGRAILHALIAGESDPGTLVDLTEGRLKAPREKLIDALRGRVTEHHRFMLKMHLEQVEHLERAVRELEVRADQGSFRAATELLTTIPGVSEVTARVIVAEIGDDMSRFPTAGNLISWAGLCPRLDESAGKRRSNRTRRGAPWLKTVLVQAARAAANKRESYPRAQYLRLKARRGPNKAVLAVAASMLTAAYHMLKYGVEYRDLGPNHFERDKQVQADRLIRRLRALGVEVVVKPAA

SEQ ID NO: 471852 - protein, 307 aa, unidentified
MSEKIYFGVDVCKESLAFCGAGIAGEVSNNAPGQRRLLARLPEGAHLIIEASGGYERELVRVAQQSAVCVSVVNPRQVRDFARGVGRLAKSDPIDAEMLARFGAAVNPPPDAVPTAAEVALQELVSARQQLVEERTVLLQQQIQHLSSIVRRLDRARLKLLQRQIAQLELAIGSILEEQSALKQKVERLQQVKGIGLITAVTCVALCPELGSLSKRQTAALVGVAPYDDDSGARKGCRHIAGGRPRLRRALYMAALSAIRSNPILRRFYQQLRQRNKPPKVALVATIRKLAILLNHLLRNPSFLPAT

SEQ ID NO: 471853 - protein, 513 aa, unidentified
MLAEEIGFVVGVDTHADHHAVVVVDAVTQRARRALTIAATRRGYRQALRLADRLAPGDRVWALEGSGSYGSGLARFLSERGERVLEVERPAREGPRSRFKSDPLDAEQAARQVLAGEAGALPRLSGDTQALRVLLSTREGAVNACTAALNELRALIITSPPELRERLQGLTETRLLNACVRLRPGADSERAALALALRSLAQRVRLLRTESQTLERELERRVQALAPQLLARPGIGPISAAAVLIAWSQPRRIRSEAAFARLAGAAPIPASSGKTIRYRLDRGGDRQLNRALHTIILSRRRTDNETKAYIARRLGEGKTQREATRCLKRYLARSLYEHSRRCPPLDSYRSIRALAGAHETADHARPETRRKRASVSPDQKKAAPPLEPLLSFEGEFVHLAPAASGPVGMCRLVWILRQGPFLTRPLSGGSAGRFTPPGEAPAEGRAHARGAEGAEVAAAQLPRAKRGGRPGAAAPQRSALFAGPIRATLRRPRPRPGAPPAGRSPSPGSLRPG

SEQ ID NO: 471854 - protein, 371 aa, unidentified
MKKHSNSRKKSEATTKRAKSRGPVQRDTKEVLAELVGKLKEKLDPKKAAAASAGDGHPRGELRPNLDRLTVGVDLGDQWSHYCILGLEGETLAEGQLRTTQEDFATFFQGLNAARVVVEVGTHSAWVQEVICGCGHEVLVANPRLMEGSKRRKRKNDRIDANKLARLGRVDPESLYPIQHRSREVRQDLVMLRARDALVAARTEIINTTRGLVKSMGTRLPKCSSRSFAQKGEETVPVEMREALLPLVRLAAALSADIKEYDKKIESLGREKYGHTTLLRQVKGVGPITALAYVLTLENPQRFAKSRDVGPYLGLVPKQEDSGESQPQLGISKAGDGMLRKLLVGSAQYILGHCCPNSRANCWPSGGCRHG

SEQ ID NO: 471855 - protein, 347 aa, unidentified
MSISMIGLDTAKSVFQVHAVDETGQLVMKRKLQRSELIAFFKKLDGCTVVMEACGAAHHWARMLIDLGHDVKLVAPEAVKPFVKKGKKNDAADAAAICTAASRPDTRFVPAKSLVQQGVLALHSVRSLLVKQQTMLANAIRGLVTEFGLTAPKGIGKLGELMILVDTDETIPENARRAVKELYDQCDRLADSIKAVEAQIVAHARRDEGARRLATIPGIGPITASLIVATVVDFSVFKSARHFAAWLGLVPRQHSTGGKTRLGRITKTGNREIRRLLVLGATSMVYRSTHWNSTVGAWTQGLLLRRPIRLVTVALANKIARIVWALMTRNEVYHAKGRVTTAAKAVA

SEQ ID NO: 471856 - protein, 356 aa, unidentified
MDKVIREGAVRVGVDLAKRVIQVHAVDATGHVLTSRALPRARFIDWCVRLPAGCVVAMEASSSAHHWARKLVALGLDARIISAQLVEPYRMEGASGKNDANDAAAICEAASRPKMRFIPVKSIEQQSMLCVHRLREGFKEDRTACINRIRGLLAEFGLVFPQSPRELQAVLSDVLEDAGNELGTLARLTLQRAQAQWRELDDHLAWCDERIDAHRRSNPEVQHAATLIGIGPVTASAAIATVGDFKQFKNGAQFGAWIGLTPRQRSSGGKNNLGGITKRGDTYLRTLLIQGAKSAVMTAHRRQDKISSWVLALRERSGWQKAVVALANKNARILWAVMTRGDVFDPNHLSVKPTAC

SEQ ID NO: 471857 - protein, 422 aa, unidentified
MVLKGVPMALKIVYQICCGIDVHKTFVVACIASTNKQGVTTYKRHRFSTFTQGLKELLQWLLDNHCKDVCMESTGKYWIPIYNVLEKDCNIVLAHPKYVKAIRGKKTDKKDAKWIADLFKHDLVAGSFMPPADIRQLRDLMRYRFKLTCFKSSEKNRLQNCLTVSNIQLGNVVSDTFGKSAQAILDKILEDPADTSFDLEPLVFKSLKKKLPELRDAIDGYITPEQAGKLKVIKAHYENLEARKAELEELILALATPYQQELAILQTAPGISSDFTAIGIISEIGTNMEAFPSAKHLCSWAGLTPTNNESAGKKKSVRVSKAGCYIKPLLVQCANSVVKSEKHPEIRNRYLRLRKRRGHKKAIIAIARMLLTALYNMLKNKEPYNAELYRKSDVLPVNREITIEQAILMAQFQGYKIKSAAE

SEQ ID NO: 471858 - protein, 351 aa, unidentified
MMIIGVDYHPSFQTIAFLIEETGEYGEQELNHSDGEAEKFYRELKQRGTSVRVGLEATGYSRWFERLLAELGFEVWIGDAAEIKTKRVRKKKTDREDARLMLKLLLENRFPRIWVPSPENRDLRQLLWHRHRLVQMRTRIMNQLQAVAMNEGYRWKKKLFSAQGRALLEKLSLAPWASRRRKELLELLDQLDPKIVELTAAVEHEARKRPEVVQLMTHPGVGPITGLAYVLVIGTPERFPSGKQIGSYVGLIPCENSSAGRQRLGHISKQGNTLLRFLLVEAAQAAARCNPDWRRRYLHLMMRREKRIAKVAMARKLAVRLYWMWRNGWDHSQLVEFGSNAGKLVISHGVK

SEQ ID NO: 471859 - protein, 354 aa, unidentified
MSQTPNTAIAVIGIDIGKNSFHVVGHDARGAIVLRQKWSRGQVEARLANIPPCLIGMEACVGAHHLSRKLASLGHDARLMPAKYVRPYSKGQKNDFNDAEAIAEAVQRPTMKFVATKTAEQLDLQALHRVRERLVSQRTGIINQIRAFMLERGIAVRQGIGFLRTELPTILATRTDALSPRMLRVIEELAGDWRRLDQRIDGLSGEIEALARQDQACSRLMTVPGIGPIISSAMVAAIGTGDVFSKGRDFGAWLGLVPKQISTGDRTILGKISRRGNRYLRVLFVQAAWVVLVRIKNWERYGLKSWIEAAKKRLHHNVLAIALANKLARIAWAVLAKGRAFELTRTDDAGVRPA

SEQ ID NO: 471860 - protein, 364 aa, unidentified
MKRKVYVGMDVHKETIQIAYLTSNSKEILKEQQIKHNEVQIKKFIKKLKTEWNEIHCCYEAGVTGYPLYRYLKSLGVNCILVAPGKIPRQNTDKIKTDKRDAIKLARLMRSGELESIHVPSEEDEAVRDYLRSRDSLRLDLGRNRQRLMKFLLRKDIKYSTTKYWTVSHYKWLNNLHFNNEILQETFNDYYSRVRVQEENLKAMDKKIQEIAESEPYREKVGILRCFRGVDYLTAMFLLCEVNDFKRFKTADSFMSFLGLVPGEYSSGSKRKQTGITKTGSPRLRRILTEAAWQHRFPGTGSKIITARRSGQPALVVALAEKASLRLHKKFRNLQLRGKTPQVMITAVSRELSGFLWAAMNLVA

SEQ ID NO: 471861 - protein, 351 aa, unidentified
MSAILSRRDVILVADYHDQNVVIRWFNEATGEERLLRCRVNPVAIHQVVQRAVREASDASGKVVWIMESTTGWARVRTLIGRDVRFLVANVLQMPQSPKAHRRKTDKIDTARILREYLCGTLPLSFQPTEPLRAIRRLVALRESLVARRTALRNWIDRTLAHETWRSRSGLWSARGMRRLKSLLRLLPDPDRAVFSLKLRELDHLAQLLDQVTQELLSVYNTWPAAQRLDEIPGIGPISAVSILARIGPIERFRRSEELIAFAGLAPGVRESDGARREGRIGGGGTDKHLRHYLIEATFWARRVPRYNPTYQRVLQKRGPKIARIVVARMLLRSIQAMLRGRVRFDRQRVA

SEQ ID NO: 471862 - protein, 423 aa, unidentified
MPYRITGIDVHKKKLAVVVADVEVDDEYQFERRWYGSNPEQLQLLSDWLVEQQVEEAVMESTAQYWKPVWEALERYWKPARQKREGAGRMSGTLHLAQALSNRGRRGRKKDFRDAERLVKRLVSQELVLSFVPDVAQRLWRTLTRTKYQRTRDKVRLQNQLEALLEEAHIKLSSLVSDLLGLSARRMLKALADGETDPVALAALADQRLHATPAQLRDALGACTELNPVYRRLLKMTLEDLHLIEQQVGQLDQEIASLLRQHQDAVERLAEVPGLGVDSAQQIIAEVGAKAATFASAKNLVSWVGACPGDEESAGRNYNPRSPKGNRHMRRILNQAANAAVKHKGSIFEIVYRRLVPRLGHNKTIGAIAHRLCQLIWIILHNGVRYEERGPAVSEKSRRARTSRMIRTLRTLGYRVEPLRNPV

SEQ ID NO: 471863 - protein, 324 aa, unidentified
MAKRITVCAGIDTGKRKLDVAIDGTSLQLQVENTAEGHKVLLEWLRRHKVKRIGIEASGGYEQAVVIELRRKRFVVVVFQPAQVRAYAKFHLQRAKNDKIDAALIAACTAAVKKIHPAPDPRLQPFAEHLTLIEQVGEDIKLYKNRLETCRDLRIQKLWREEIVRLAKRARVELKALVAAIREYRDLAQRLDLIYSVSGAGMPTAVEILVRMPEIGQLSREQAAALAGLAPYDDDSGEQVGARHINGGRKRLRRALYTAALPASFRWNPQLIALYQRLKAAGKEHKRCLIACARKLLIFVNTVVARGTPWQDQPPPAAAIAATG

SEQ ID NO: 471864 - protein, 449 aa, unidentified
MSRPQVIDDTEHERVHDKVAAIDVAKDSGVVCTRTPHPSRPGTRQSRIWTVKARMGTIRALGRQLNKDGIEKVTLESTSDYWRIWFFALEAAGLAVQLVNAAQARNLPGRPKTDKLDAQWLARLTEMGLLRASFVPPKAVRDLRDYTRMRARLVQERTRCWQRLEKLLEGALIKLSSVASKLTTISAQDMIKAMIAGQRDPKVLAGLARTGMKAKHDDLVAALDGMFDDHHGELAQLLLDQIAVLDGKITQLDTRIGQAVAALPAAWGINADGTTGPGAGTGPDAAVLPAVTRLAQIPGVSENLARAIIAETGLDMTRFPAAAHLVSWAGLCPSARQSGPRTRAGKKGQGNTWLRGSLGQAALGAARTTTFLGERYHRIARRRGKAKAQVAVARSILVIIWHLLADPAARFTDLGYGYYQDRTDKDRKLRNHVRQIEALGFTVTLIKDT

SEQ ID NO: 471865 - protein, 429 aa, unidentified
MKNYTARKLRQVPPGYLIMGIDPHKKIHVVVAMTQDTIIRTKFKFANSRQGYEQVIVSAKDQMVKTGSRGIIFAIETAGHYWRNLAYFLDEQGIPFRLINPFTLKRMREGKDINRRKSDFRDAEMAAELLRNGEFVETKLPKGVYAELRATYSAYRRLVKERSRAKNLLKGLLDGLFPEFNQVFKNICGMTSLDVLALCPAPKTITGMKLDEFVDAVRKGFKGRAPKVRKLHAIYSLAQVSAGIETGADSVSFELSLLVQRLRLLTEQIERTEDALVRLVKSIPDACYLLSIVGISYISVAGILAELGPLGAYQNAGQLIKMAGTNPTEWESAGKRGSHTPMSKKGRAGLRWCIWTAAMCLLRHNTDFRSWAKERRERPAHLHPLKAREVFGAVANRLLRLAYVLVKKQTFYQIPKPKVAPELELAAAI

SEQ ID NO: 471866 - protein, 340 aa, unidentified
MVHVGVDLDKHNSQIAVLTDDGEIVQQRLANEATLLEKFFAQLPRQTPVAIEASGTWWWLVDLLEQLGHRPVLSNPKQTKAIAAARLKNDRVDAERLALLLRGDLLPTVWIPPAALREARELVRHRIQLVWLRGVIRNRLQAMLARRNLQPTSGKSWLTQRGQRELQQLPLPEAPSRIREDCAALLPTLDAQIRRLDVDLVTRWGQDPRVQRLMTIPGIGPFIAIVLVLELGDIHRFATAKRVASYVGLTPRVRGSAGRVRAGHITKEGNRLLRWVLVLAATQAVRRPGPLRAWFHAVKKRRGKKVARVALARRLAEIVFHVWQQECDYFTVVRHGVVRG

SEQ ID NO: 471867 - protein, 340 aa, unidentified
MGVFVGIDVSLENSAVCAVDEHGKLLKETKVASDPGALNACIRSMPGVVEAIGIEAGPLSQWLHKSLTDLGLPVVLMETRQVKAALKAAPVKTDRRDAAGLARLLQMGWFRPVHCKSLSAQELRVLLGARRSVQDAAINIEMSIRGMLRNFGLRLGRIGKVSFEDRVRELTDGNKLIQLSIEPMLRARAALRSELVRLERMARDITREDPVCRLMMTMPGIGPVVALTVRSTIDDPGRFRRSKDVGPSIGLTPRRYQSGETDIIGGVTKAGDMDMRTALYQAATVVIHRSKKPNWLRAWAERVVRRRGVKRAAVALARRMGVILHRMWVDNTEFQAAKMA

SEQ ID NO: 471868 - protein, 317 aa, unidentified
MTQTSTLTAGIDTSKEKLDIAVHGQSGCWEVANDQPGWRKLAQLLTEAGVRRVGIEATGGYERGVVEHLRAASFIVLVLQPIQVKAFGRARLRRAKNDKLDAALIAAFAASLDEVRDAPDSRLAELTEQLTFLEQIEEDIKRFKTRLEHIDKPGLRRFVLDDIARLKARRLSQIRHIAKQIRAHHDLAVRLDLVLSIPGIGERTALALLVRMPELGRVSREEAAALAGLAPFDNDSGQYKGQRRIAGGRARLRRSLFAAALPAAFRWNKAVMALYARLTAAGKAHNAALIACARKLLIYANSVVQRGTPWAEKPIGV

SEQ ID NO: 471869 - protein, 407 aa, unidentified
MIFVGVDWAEAHHDVHVEDGEGARLGKARLPEGVEGIARFHDLVAPFADEPAEVVIGIETDRGLFVAALVAAGYDVYAVNPMSTSRYRDRHSASGAKSDAGDAKVLADMVRTDRHNHRPIAGDTEGVEALKVLARAHQRMVWSRGRQTNLLRSTLREFYPAALVAFEDLASPDALEVLRIAPTPTLGAGLSRSKIAAALRRGGRQRRIDERAAEIQGALRSEQLQAPAVVATAMGASVAANVAVITEMCAQIAQLAAELEANFEQHPDAEVVRSLPGLGTVLGARVLGEFGDEPNRYATAKSRKNYAGTSPITRASGTKRAVLARHVRNQRLADALYLWAFASISASPGARLYYDQRRAAGDTHHQALRALGNRFVGILHGCLTHHTAYDETIAWGHRAESNLRDAA

SEQ ID NO: 471870 - protein, 339 aa, unidentified
MEIKRIAVDTSKHFFTIVGVDDRGQVVMRRELKRHQVEPFFKKQPPVEVVLEACGGSHHWGRTFLALGHRVQLLPPQYVKPFVKRGKNDRHDAMAIAEASARPGIHPVPVKSAQQQAETMLLSVRELLVKQRTQLANAMRGHAGEFGVIVGKGLSNADALVERAGNDPAVPEPAKAMLAVLAAQFNALLLQIADLDRKLLAEHKANPVSRRLAEVPGVGPLGALTLALTIDPKQFHSGRHFAAWIGLTPKEASTGGKPRLGGISRQGNERLRQLLVLGATAVIRTAAKPGSRLASPWLVQLLARKPRKLAAVALANKMARTVWAMMRSGEAYRHKPAVG

SEQ ID NO: 471871 - protein, 452 aa, unidentified
MAKVAKRKQTSKGLRLEVVNPNAAGIDISPKEMQVCVPSDRDGECNRTFGVYTEDLHYIAEWLKACCIDTVAMESTGIYWLPVFRILKESGFEVILVNASDVKNFSGRKTDASDAEWLMMLHNYGLLKPCFQPENIARTMRNLVRHRDNLIRSASREVLHLQKAMEQMNLKLDNVFSDILGKSGQSVIKAILNGERNPKMLADLADPRCRTSKEEIEKSLQATWDEEHLFEMKQSDSLYQFYQQLIAECDAKINEIAMQYSATVDTPKTELLRSGKHNAKKNRIGFDVEKVAFELWGVNVMRIPGMSRGALLRLVGELGADFTTKFVDVKHFVSWANLVPNNKISGGALLSSKVPKKKNPVGMIFRQAANTLKAAKNPLGDYFRHMRAKGGHLQAMVATGKKLASIFYCMVQRKVEYNEKVYCNHRKQELQNKVAYLHKRLQRMESELANCG

SEQ ID NO: 471872 - protein, 332 aa, unidentified
MTNAIPMDVIIGVDTHKDVHAAAAISGAGVYLATITVPASSNGYGALEAWAKSMGAVQAFGIEGTGSYGAGLSRFLRERGHTVVEVNRPNRQLRYQQGKSDAVDAESAARAVLSGQAAGQPKSGTGTVEMIRHLKIARDTAVKARTQAMQTLKAIIVCSPDALREQLDQVSGKMTLLRRLAALRPGPLTSTLASAKASLRSIARRWLLLDAEIKQHDAHLQTLTAARAPELLEAHGMASGTAAEMLLLVGDNPERIHSEAAFAKLCGACPIPASSGKTIRHRLNRGDNRQANAALYRVVIIRMRGHQPTLDYVRRRAAEGKPKSEIIRCLKR

SEQ ID NO: 471873 - protein, 473 aa, unidentified
MTAVGGRPLWASMTLPPPASPEPLIDDRGTRRRAPVSDHSTVGSFASAWLLRHDANREATGLSLEDGPLFFLGIDWAATEHSVCVLDRTGRQVAAFTVAHTAAGFAKLAARLGKLGETDRMPVAIERPDGRLVDALLEAGYPVIPVKPNAIKTWREAEVLSGAKSDSGDAAVIADYLRVRFHRLRPAVPYSGPTKTLRAVTRTRGDLVDARVAAVNQLAALLDTYWPGAKAIFASLSSAIALTFLTRYPTAASAAALTEKRLAAFCAKQGYSGKKPAAVLLARPRSAPAGTTDPDLTDGARTAILAQVGVITALNTAIKDLDRSIAEKMATHPDGRIFGSFPRAGTINAAQILAEWGDARAAFEHPDAIAALAGVTPVTKASGKQRGVSFRWACNKRLRQAITTFADNSRHASPWAAEIYNRARAQGKDHPHAVRILARAWVRVMWRCWQNGTPYDPTLHGGANQTINTQVAA

SEQ ID NO: 471874 - protein, 390 aa, unidentified
MSKVSVFGDAMLFSGIDVSAATLAVAVQREDGQGLDRREFANTAAGHRQLIAWLGKRGGRVRVSLEATGIYSLDVALALAAADGIEVAVLNPKLASQFARTLGRSKTDRADAAALAEYSHRMRFVAWQRPPRRVLELRALSRHIATLSEEHTRLGNRLHAAKGSATTPRCVREDLKRSRAGIAGRIVKLRRQARAMAGGDPQLAGRFEQLLSIPGVGETSAIQLLSELAALDPAMTVRQWVAHSGLDPAHRVSGTSVHKPSRISRQGNRHLRRALYMPAMVAARFDPHMRAFYELLQARRKTKLQAIIAVARKLRARHCAGDSIDSIAFVSHGGPIRVILADALGMPSANIFRIAQRYGAINRIRYSGETPTVEMLNSSSTRRSGEVGEL

SEQ ID NO: 471875 - protein, 383 aa, unidentified
MNYKQNEKINQVKESTLVVGIDIGSTTQYARAFDWRGIELGKVFPFSNSREGFESFKAWMQHLQDKYKKLDAIVGIEPTGHYWFDLGAYLEDEGILLVMVNPYAVKQTKELDDNSQSKNDRKDPKVIAKLVTEGRYSAPYTPDGVYADLRIMVANRKRLIREMTQIKNRFARWFAIYFPEYTDVFGDYEAQSSMLLLKKVCTPEAIVELGAEKINQIWRDAKLRAVGMKRATTLCETAKRSIGLKKGSSAARYEMKLLLEDYEYKKAQLDAVMEEIEKLCRKIPESEQMLAIKGIGVITVAGFLAEVGDVRRIESPRQIQKLAGLSLRENSSGKHKGQTTISKRGRSKLRAVLFNAAIPLIAKNPEFKSYIFSFSFSTRCISR

SEQ ID NO: 471876 - protein, 458 aa, unidentified
MGKRKQQKGEKVTSHFEHLNPHAAGIDVGSRSHFVAVPEDADEKPVREFSCFTGDLYRLAKWLHACGVKTVAMESTGVYWIPVFEILEHEGFEVRLVHAHHVKNVPGRKTDVSDCQWLQRLHSYGLLEGAFRPPEQVCILRSYIRQRMTLARYAASHIQHMQKALSQMNLLLHNVVSDITGMTGMRIIKAILAGEREPLALAGLRDPRCKNSAATIARSLEGHYKSEHLFSLKQAVELYEFYQAKIADCDHQIEEQLALFDDRSAGGEIPPSRRGKSESNGPGFNVREDLYRMTGVDLTRIEGIDSYTALKVVSEVGTDMNRWRSSKQFASWMGLCPGNKVSGGKNLSGKTKRVANRAAIALRLAAYGLHKSKSALGAYYRRQRARLGAPKAITATAHKLARLIYSMLKHGTQYVDAGQDYYEKCYRTRVVENLQKRATELGFTLVKATFPSPKMCAT

SEQ ID NO: 471877 - protein, 369 aa, unidentified
MNNYTTVVGLDVHKESIVAAVLPYGHKDVVEQVSIANNPKAIEKLINRLTRQGPTEFVYEAGPCGYQIQRQIAGLGYRCAVIAPSLTPVRPGDRVKTDKRDAVNLARFYRSGDLTEIHIPTCEEEAARDLPRAREDVLKDRLRARHRLSKFLLRQGRVFQETKSWGTAYKAWLRTQKFEWPALQQTFEANMRAHEEAEARLELLEQQTYELAQQPAYQMAVNYLRTLKGIDTLGALTLVVEAQDFRRFSKASEFMSFTGLVGSENSSGEKVQRGSITKAGNAHIRRVLVEAAWSQRYPNVMSLQLAERRKGCPPEVLKIAKKAQARLHRKFLRMTSRNKLHQVTVVAVARELAGFVWSIGQHIPAAVAA

SEQ ID NO: 471878 - protein, 364 aa, unidentified
MKKITTKKTMTSKRLERQDEFSSYLGIDLGDKHSSVCVLDRWGKIAEELRGRTTVKEFEEFFRKLPRSRVAMEAGSQSRWVSELAEKYGHEVYVANPHKVQYISGGDDKNDPGDAYKLAELSYVRPSMLHAISHRKRQEQVHLEAIRARDLLVRSRADMINAVRGMSKAFAETLVKCSAESFTTKAAGKLPEDLRTATAPLLRVIDQLSEEITELDQWIEHVARQHYPAYGLLEKVNGVGTLTALTYMLTIGDAGRFQRSREVGAYLGMRPRQKDSGSSSPQLGITKTGDAYLRKLLVNCAHYILGKFGADSDLRRFGLRLAARGGKNAKKRAAVAVARKLSVLLHRLWVSGEAYEPLRNSQAA

SEQ ID NO: 471879 - protein, 407 aa, unidentified
MTRVSIGVDPHRLSATIEVVDDQETVLATGRFATDKAGYAAMRKHVVAWPDRIWAVEGCNGTGRPLAQRLLADGEHVVDVPAKLSARARLFDTGHNRKTDAHDAHAVAVVAVRTKTLRVLAADGELEAMRLLVERREELARQRTQTVNRLQRLLSELIPGVAKKDITALQAKGFLASVRPRDAAGKTRRRIAVEHLSDLVTLDKKIKASTKELKALVTARGSTLMELPGVGPVVAARILVDVGDVARFADRNRFASWTGTAPLDASSGEQIRHRLSRAGNRKVNHMLHIAAATQVRLDTAGRAYFRRKLTAGKTRPEAMRCLKRRLSDAVYRQLAADARAAAQAAAVEQVDAGPGGHCGASQESSAADLPPHIGTSDQPLPGPAKPTLQPRVVARKGRTKRPLGTAS

SEQ ID NO: 471880 - protein, 351 aa, unidentified
MVKTKLNRTQISNNDYLKELDTYDNYIAVDWSQVNMAIARMTKNSKQTKVIDVPCNIDDLKAYLKNLPGKKILTIEETSTSHWLYVELKEYTDRIVICDPYRNRLLSEGPKNDKIDADKLCKLLRNGLLKEVYHSSDNIYELRKLMSAYDDLVKAGVRLQNQKSAIYRSEGKSYKKEEEINNGTTSFILERINEGIEDYQLKKNEFEKFIKRVNKKEDLIKKQMTIPGIGDIGAIKVVSTVIDGRRFRNSGKYLSYCGLVKHKKMSGNRNYGNKNPRYSRKQKSVYKTAAIAAIGGNNPLNDYYEYLITTKGLAEDKARHQISRYIARISYSMLKNGEKYDPYRWRKHKTT

SEQ ID NO: 471881 - protein, 335 aa, unidentified
MKKFDYYIGIDVSKLTLDVTLLYECVNTTKTEYYKIENNEKSIAQFVKNELGKYDLKQLLFCFEDTGIYSMPLAYYLNNNELIYWQVPSVEIKRSKGIARGKDDKIDSKDIAFYAFTQMHKFRQGKVSSKSVQQLRLLFTEREKVLKALASFEKTAENKEFISKEVFNAVASVNKSVINQLKKNLKNIEAKMLSIIESDEKLNWQYKLVTSIPGIGMQTAIYLLVATKGFDAFENWRQLACYAGVAPFPHQSGTSIRGRNKVHPLADKKLKSLLNMCAISAVRYDRELRAYYERKLKDSKAKMLVINNVRAKLLARVFAVINRGTPFVNTCKFAA

SEQ ID NO: 471882 - protein, 343 aa, unidentified
MKRLYVGIVLGVKVCAWCAIDGKGLLISCGEFQTSEQMLIDSVKDLPGEVHVLVEECELSGWAYRALLPHAKTVTVCDPRRNAWVAKGQNKSDRVDAEKLAELLRMKSYSAVYNPEDEIMASLKKAVQQEIKISQALAKLKCVILSQFRREGVSYRGISAFTEKGRGTLLEAVSNDRNRSLILQNYRRVESLKEEKAVIRKMVRSFQADLSILSRLMQVPGVGPVSAARFVAFVQTPHRFSSKRKLWRYSKLGIVNRSSDGKSLGRQRLDWCASGVLKDVSRTVFMAALSCREENLFKRSYRRSLARTENPIHARLNTQRKILSVLMALWRDGADYNDDIDRA

SEQ ID NO: 471883 - protein, 371 aa, unidentified
MAESSKMLFVGLDVHKDTIAVAYAAEDRGAEVVSLGMIGTRQCDIDKLIRKLESKGATLMFAYEAGPCGYWLYRYLTRRGLSCHVVAPSLIPRKPGDRVKTDRRDAVTLARLLRSGDLSAIYVPTVDDEAIRDLSRGREDVVRDLKRSKVRLKAFLLRQDIRYEGRANWNAAHLRWLARVVCPTPAQQIVFQEYLHSVSEQTERLRRLEAELHTAVKTWRRYPVVEAVQALRGLDLTGAVTLIAEVGDLTRFDTPRKLMSYLGLTPSEYSSGERRHQGGITKAGNGHARRALVEGAWAYRYPAKVSRHLQLRLENLPTEVRAIAWKAQLRLCKRYRLLSARGKHVNQVVVAIAREMAAFAWAIARTVPVAS

SEQ ID NO: 471884 - protein, 350 aa, unidentified
MNIPVRIGMDTSKSVFQLHGVDENEVVVVRRQFRRAEMIRYFERLPPVLIAIESCGSSHHWGRLLQSFGHEVKLIPPQYVKAYVKRGKNDAADAEALCEAMSRPTMRFVPVKTAEQQAALMLVKLRDRLIRNRTQLVNAIRGYAAEFGIAGAKGIAHVTTLLARLQADVTLPALARELFAMQAGEYAQVQAKIAVVEAKLLAWHRADPCSQRLAGVPGIGPIGATMLTMKTPAPEAFRSGRQFAAWIGLTPKDHSTAGKARPGVITRAGDEGLRSVLVVGATALIRRVREGRCRDGDRFAAWVGKLLERKPPKLVAVALANKLARVAWKLMITGEAYAVKPPSTGAASAL

SEQ ID NO: 471885 - protein, 474 aa, unidentified
MLLSSMEEPPVKNKRRRGQPRLSVLERINPNAAGIDCGSSEHYVAVPPDRDPTPVQSFRTFTSDLLRLADWLTTCGITSVAMEATGVYWIPIYEILEARGFEVHLVNARHVKNVPGRKSDVSDCEWLRELNIVGLLRGSFRPSDAIVALRAYLRHRQTLLETAGIHIQRMQKALLQMNLQLPVVVSDITGVTGLRILRDVVAGQRDPHRLAEHRDHRCHASTADIVAALTGHYRPEHLFVLQQYLELFDTCQAQLAACDRAIEAHVQTLIAPLAMPPTALPGPRVTRTPRARDNAPRFDIRTSLHHLTGGVDLSQIDGIAPYTALRLLSEIGTDMSRWATEKHFTSWLTLAPHNKISGGRLLSSRTQPSANRAAAIFRMAAMSLGRTQTALGAFYRRLAARIGKPQAISATARKLAILVYRALKGELVYQDPGADAYDSQQRTQALRRLRQRAASLGFALVNRQTGKLLSAGIS

SEQ ID NO: 471886 - protein, 392 aa, unidentified
MLAFTADTDGFREFFDALHAAGATPANTVCALEPTGGYSSQPIFQALKHHGFEVLWVKNQAVHDLRETLYGRRSKTDAEDARLIARLLYLREAIGQEYAFQVAHTGSAPYRNLRLLVELRWKQVQAHRRASNQLMQVLDVLFPEMRQIFRKGTTRPTPLHLLRRFSTVQAIAAASEQDLRHVLVNEARSLRHQTAVSELRRLAQTSVGAREGRDVLELAQGWLIQQLHDLQDSLVDLEARIKAAVEEFPETSILRTFPSMSARRIATLLAGMGAPIDAFPNDRALRKQWGWYVEIEQSGARTRSRLGRGGYRGTRRELYLMAMQLIKEQTQDNPFRHYYRRLLRGNPTPKVPKVALGHVASKLITVMYVCMRRREPYDPAKLWRHMGVKTTA

SEQ ID NO: 471887 - protein, 323 aa, unidentified
MNKHNEIFGVDISKDVFDVYGSKSGHNQFKNAASGFMFFLKNLPKKSLVVMEATGYYHYSLAQFLFKQGVLVSVVNPLSVKRFIQMKLAKVKTDKSDAKAICEYGQINQVPLYSALSDVQSECLQLFRLLDSYLKKRTMTKNKLHGEDVLGIPSKHVYRSLKRNRKHLDTEIASIETKLLSLVKQDQQAQLTLLKSIPGLGVKTALFLIVITDGFTKFETAAQLCSYVGITPTIRQSGSSVRGRSSISKVGNKKLRNLLFLCSFSACKHNKSCREIYERIVNKGKSKKLALIAVSNKLLKQAFAIAKSGNPYDETFVSVLMAK

SEQ ID NO: 471888 - protein, 350 aa, unidentified
MMIIGCDFHTRYQTIAMLEEATGELTERRLDHQTGEAEAFYRNLQGPVRVGIEATGPIRWFERLLAELGHELWIGDAAKIRASEVRKQKTDERDARLILDLLLTKRFPKIWVPTPAERDLRQLLWHRHKLVGMRTMLGNQLHALALSEGLCRKKKLFTPKGRGELLQVGLAPWASRRRAELLQLLDQLASPIEELDRAVLEEASRRADAVLLMTHPGIGPITSLAFVLAIGPIARFARSKKIASYLGLNPSEASSGGRRRLGAISKQGNTMVRWLLIEAVHPAVRKDPALRQDYQRLKFRRGHAIAKVAIARKLAVRMYWMLRSGAEYAQLVRRPGSPKGPLMDASSSLA

SEQ ID NO: 471889 - protein, 341 aa, unidentified
MEEVSIIGLDLAKNSFQLHGASADGAVVFRKKLSRCQVLKFLAAHPRCIIAMEACASAHHWGRALGELGYDVRLIAPIYVKPFVKRQKNDAADAEAICEAAQRPTMRFVAVKSEDKQSSAMIFKARDLLVRQKTQTINALRGHLAEFGIVGPKGTAHLGRLMSHVEAPDTGLPKPVCAVCLMLIDLVQTLIEQIRALDAEIRARSRTDAVAKRLMTIPGVGPVIATALEALAPPAETFRRGRDFAAWMGLTPRQWSTGGKPRLGKISKMGQRDLRRLLIIGASAVVCWARKRGAPEGSWLARMLMRKPPMLVVVALANKMARIAWALMAHGGIYRTPARAA

SEQ ID NO: 471890 - protein, 455 aa, unidentified
MMEDALATRNRSFSRKGLELTHPNAAGIDIGSASHYVAVPPDRDDEPVREFASFTADLHRLADWLRECGVDTVAMESTGVYWIPLFELLDARGFTVLLVNARHVKNVSGRKSDVLDCQWLQQLMSYGLLRGAFRPDEQVCVLRALARQRATLLKTQARSVQHMQKALVQMNIQLANVIADVAGASGQAILRAIVAGERNPYVLAGLKNSRVRASDDEIARSLQGTWRAEHLFALRQALDAFDFCGKQLQQCDEEIEAQLHRLHITAVEPDRGKKRSKARNAPKFDLRTRLFQMCGVDLTRIDGIDVTTALVVVSEIGTDMSRFPTDKHFASWLGLCPGTKITGGKVMSGKTKRCANRAAQALRLAAAALRTSQSALGAYFRRLCARMDKPRAVTAAAHKLARLIYSMLTKGEEYTDQGQAYYEERYRQRVLHNLNRRAQQLGMTLVPTAPTAQAA

SEQ ID NO: 471891 - protein, 412 aa, unidentified
MDLMVERCAGVDIGKDEVVACVRTPAPSGKGRRKQTRTFSSFTSQLEAMADWFASEGVTEVVMEATGSYWKSPWYVLGERGFDLKLVNAHHVKILPGRKSDVADAEWLAELLEHGLLRSSFVPPAEIRQLRDLTRYRKRLVQEHTSECQRVQKTLEDAGIKLGSVASDVLGVSGRLMLQALAAGERDPEVLAELAKGLLRKKIPELREALRGRFTDHHALMVRLSLDHAKYLEAAIAELDAQVDRVMAPFVEARDHLDTITGVGKRAAECIIAEIGADMTRFPTAGHLASWAGMAPGNNITGGKRQSGKTTKGNVWLADILNQCAWCAARSRNTYLSAQYWRLARRIGKKKAAVAVGHSILVICWHLLSNNADYDDLGGDYFARRDNTERHQDRLVQQLQDLGYQVTLRKVA

SEQ ID NO: 471892 - protein, 450 aa, unidentified
MVGRYAGVDWASEKHDVLVQDAGGEAVLAATFSHDERGLKALCRTLVRLGVVLVAIERPDGLLIERLLDAGLRVIAIHPNQVAAARPRFRASGGKSDGFDAFVLCELARTDHHRFRVLVADSDDTKALRALSRAREDLVQTRVQLANQLRAELERFWPGAALIFAEIDSPIGLAFLVRYPSPLDADGLAEKRLAAFLTRHAYCGRKQPAQLLSKLRDAPQGRAGEAEIEARRAIVLALVAALQPIVAKISQLTREIAHRVRAHPDGHVFLSLFRDPKSVVCAAALLAEIGDCRARYRSAEALAADAGMSPVAVESGKRKVACFRHGCDHRLRTAVATLADATRHWHPWAADRYNAARARGQDHQRAIRTLGRAWIRVLWRCWQDNTAYDPARHHGLQQHIAVTIPNKSRPRLDLTATQRMAGAAITQRAARSTERQALDGKPTSATTPQG

SEQ ID NO: 471893 - protein, 404 aa, unidentified
MNAVGIDVSKGKSTVAVLRPYGEVVVSPFDVAHTGSDLRALADLIKKLPGETKVVMEATGNYFESIARYLHEQNIFVSVVNPVLISDFGGNTLRKPKTDKKDSVKIASYALTYWLDLKEYTPQEDLRKSLKLLNRQYQQSIKLKTMMNNNLISLLDLTFPGINKLFTSPSRESDGHEKWVDFVLEFSHCDMISKLTIKAFAKKYKKWSDKNSYHFTESSCEKIYAFAKDYVSSVSSDKAIVFSVVQAAKMLISATENCHAIQSEMNRVASKLPEYDTVMNMYGVGKAVGPQLMAEIGDPRRFHSRKAITAYFGYDSENNDSGQKTTRSNPMTKKGSGALRRTLFIIMQVLLQTKPQDNPVYDFLIKKKSEGKHYYSYINAAANKFLRIYYASVKEVLNVSEQMT

SEQ ID NO: 471894 - protein, 340 aa, unidentified
MKITTFGLDLAKNVFQLHWVEPQTGEVKRRALKRDQMIKFFAQRSASVVAMEACGSAHYWARKLIELGHEARLIAPQFVRPFVRSNKTDAADAQAIWEAAQRPERRFVAVKSVHQQAVLMLHRVREQRVKMRTMQINQLRGLLYEFGVILPAGRHKAMPQVTQALARLEDTLPAMALEVLREQCASIEALSAQIEEIERKLAAWRKEDEAAKRLMQMPGVGLLTATAAVAAVGDAKVFSSGREFAAFLGLVPRQSGTGGRVKLLGISKRGDGYLRRLLIHGARAVITHAKARDPWVEALLARRPLNAVVVALANKMARTIWALLAHGRHYEPRGQALGCA

SEQ ID NO: 471895 - protein, 349 aa, unidentified
MVADELDYVVGVDTHRDEHALAVVVAPAGAVVARRTVSTDGRGYGQALRFAQDYASGARVWAVEGAGHYGAGLARYLSQRGEEVLEAGRSPRSERRLRGKDDELDAVRAARAALTSEPLPLPRSGERREALRLLLVARRSAVDVRREALVQLRSVIVTAPDRLREPLRGLPVQRLLKRCGRLRRSTTATPDELAARLVLRTLARRIEAATSEADELEREILVHVRALAPGLLDEPGVGPIVAAQLIVAWSHRGRVRSEAAFARLAGVAPVPASSGQTTRHRLSRGGDRQLNRALHTVVLHRRQHDPQTRDYIARRLAEGKTRRDATRLLKRYLARHLYRLLQDQEPLMA

SEQ ID NO: 471896 - protein, 342 aa, unidentified
MDHYAGIDVSLECSSVCVVDANGKIWREARVASEPEALIAWFHSLGFGLERIGLEAGPLSQWLFAGMKAAELAVELLETRHVRKAFEAMPVKSDRNDARGIAQLMRLGWFRPVHCKSISAQETRATLTARKLVQSKLRDVENSLRGILRGFGLKVGKTTEREFAGRINQLVTDHPHLQRIVDALLAVREVLRTEFAAFQKQTRKMARSDSRTRLLMSTPAVGPIVALTYASAIDDPTRFKSSKQAGAHFGLTPKKHQSGETDYTGRISKIGDSSVRTALYEAAHIMLTKPVKGCSQLKSWAMRIAKRAGMSKAKVALARRLAVIMHRMLADGTPFNAAAAAA

SEQ ID NO: 471897 - protein, 330 aa, unidentified
MNYSYFVGLDIGKKTFDASLMSLEEKEIGHKQFSNTEEGIKELLSWVSSYNLSPRNLLFCAENMGSYVTELSLCSVELGFNLALACPLSIKSMGLQRGKNDRIDAKRIAAYAAVHHRKLGSYHLPDKELVQLRAWIIIRDNLVKQKVAVIKLQETLSSTAKLADMSSSEVFLKEHLDSLKEKIKQVELQMMEIIHTSISLSLNYKLLTSITGVGIINAIILLCVTDNFKRFSDPRKFACYCGVAPFEHTSGTSIRGKTTTSHLANKEVKVYLTRAAITAMSWDPGIKAYYKRKTAEGKHKASVINAIRAKIISRCFAVIRRQTPYVSIMA

SEQ ID NO: 471898 - protein, 357 aa, unidentified
MEYGAIDLHKKESQVRIITDGGEVIDRRIPTTRDRLTTLFWGRPHARILIEASTESEWVAQHLETLGHDVVVADPNYGLMYGHRSRRVKTDRRDVAALAEACRHGIYRPAHRRSARQWTVQWQLNLRRELVATRTRAISVVRAITRHAGYRIASGATDTFLERVAVLNLPPTLHETLAPVRKVMEVLDQELVQADAQFEALIEDDPIVKRLTTCPSIGAITAAAFVAALDDVGRFAGRRDAAQVTSYLGLVPREYSSGEQQQRGRVMRSAHPYVQALLVQAAWRLCRSSDPRVAALRNWAQAIARRRGQKIAIVALARRLARMLYAMWRDGTDYQPAKIRTHQRQLPVAAGTQPATV

SEQ ID NO: 471899 - protein, 384 aa, unidentified
MKKNINRLVEMKATAIEMKVGVANPPGKRISQPPEYHAVVGLDVGDRQTHYCVLDLDGELAVEGAVGTREASLRVQFEGKARMRIALEAGTHSPWISRLLVELGHDVIVANPRKVRLISRSDSKNDPADARTLARLAHVGPELLSPIQTRSEKTQVDLALVRARDVAVQSRTRLINAVRGIVKSTGRRLPKSSTLTFARKAKDACPETLQPALLPLLRVIGELTREIELYEKLVNQKAETEYPETKAIRTIHGVGPVTALAFVLILNNDPSRFQKSRDVGCYIGLRPRQRESGQRAPQLGITKAGDSMLRRFATQCAQYILGPFGKDSALRRWGLSLALRGGKNAKKRAVVAVARKLVILMHRIWITQEVYEPLRGVAVKSTAA

SEQ ID NO: 471900 - protein, 430 aa, unidentified
MSYRIVGIDVHKKILAVVVSDVEIDSEFHFERRWFGSNPEQLRSLAAWLLEQEVEEVVMESTAQYWKPVWEALERYWKPIREKREGARRRSGTLHLAQALSNRGRRGRKRDFPDAERLVKRLVSRELTLSFVPDPEQRLWRTVTRKKYQLTRDKVRLQNQLEALLEEAHIKLSSLVSDLLGASARRMLQALAEGETNPAALATLADQHLRATPEQLCDALGACTDLKPVYRRLLKMALEQLQFLEQQMGQLDQEMANLLSQHQDAVQRLAEVPGLGVDSAHQIIAEVGPSAATFPSEECLSSWVGVCPGQEESAGVNYSHRSPKGNRNMRRLLNQTANAAVKAKGSIFEIVYRRSVPRLGHNRAIGAIAHRMCRLIWLILYRKVRYEERGPAVSQKSKQARTSRMIRQLRRLGYRIEPPNTQHASSAQVQ

SEQ ID NO: 471901 - protein, 340 aa, unidentified
MTATLYCGIDLHSNNSVISIQDKSSQKVYEKRLPNDLRAILEVLEPYRQDLNGCVVESTYNWYWLVDGLMSAGHQVRLANPAAIEQYNGIKYTNDFTDARFLAHLYSLDILPTGYIYPRETRGVRDVLRRRLLLVDQRASQRTSLQSLLARHTGKRLSEGQLRKLDSESLQELLPIPGASLMAEAFLSVISSMTKVIEQLEDAVSAHCDKQKNYQLVTSIGGVGKILGATIVLETSDIQRFPNAGNYLSYARCVNAQKISNGKNKGSNNRKNGNRYLGLAYMQAAHMAAIWEPRVKRFYQKKQAKCHIMVAKKSVAGKLARAVYHMLNKQEPFDVERAFG

SEQ ID NO: 471902 - protein, 349 aa, unidentified
MKIIGCDFHPGYQQIAMLDEETGELSEKALSHEKIEEVRAFYSALQGPVRVGIEASGQSQWFERLLAELGHELWIGDAAKIRASCERKQKTDRRDALLLLQLLMEGRFPRIWVPTPAERDVRQLLLHRAKLVRMRTQVKNQLQALALNQGVQRKWKLWSVAGRKQLEGLALMPWASRRRAELLVLHDQLEASIDELDRAAVEQANIRPTVRRLMTHPGVGPITALAFVLTVGPAQRFRRGKQVASYFGLIPSEHSSGGRGQRLGHISKQGNTFLRGLLVEAAQSAVRHEPEMRREYQRLAQRKCRALAKVAMARKLAVRLYWMLRSEVDYAQLIQGSHAGQPESFRGRG

SEQ ID NO: 471903 - protein, 411 aa, unidentified
METIVRRCAGLDVHKESVVACARVIDDNGELQLSTQTFGTTVSDLLILNDWLASHGVTLVGMESTGVFWKPVYMLLETEFECWLLNAQHLRNVPGRKTDVGDAAWIAQLVAHGLVRPSFVPPKEIRELREVTRYRKALIEDRTREAQRLHKIIEGSGIKLANVATDILGVSGRAILNALIGGTHDPDILAELARGRLRKKLPALRKALSGWFSPAHRLHVGELLAHLEYIDESIERLSNDVATMIAPFAREINLLDTIPGVNLRSAEVMISEIGVDMGRFGSAGRLVSWAGMCPGNNESAGKHFSGKTRKGSKWLRIALIESAKAASRTKDSYFAAQYARIKGRHGHQKATVAVAHSILVVAYHLLERGEPYNELGGDYFIERQQKDAYQRRLVKQLERMGYEVALTKHAA

SEQ ID NO: 471904 - protein, 357 aa, unidentified
MKPMPVGVDIAKNVMQVHFIDKATGKIFNKSIKRDKFLEFFTNRSSYLIGMEACGGAHHWARQLIRLGHTVKLMPGEFVKAFNIRNKNDTADAQAIWHAVQQPGKAVAVKTEQQQAMLALHRIRSQLMKFRLMQTNALHGLLAEYGEVMRKGHASLVKNVPEILCRLSERLPVVLIDTLREQLKEVERTDSRITDIERRIRELSKNDPGVKAISEIPGVGLLTATAAVASMGSAEAFRSGREFAAWVGLVPRQTGTGGKIQLLGISKRGDKYLRKLLVNGAYSVIQNARESGPWITDLLKRRPINVASVALANKMESYGLCWRTAGPTRRKLLLTEYLHYEITVYKQNVNRLRKQCM

SEQ ID NO: 471905 - protein, 426 aa, unidentified
MKNRTNQRLEEISVGTLIVGVDVAKSVQWARFVDYRGVEAGKAVSFRNDRQGFEYIVTKIEALCKSEFEKVIIGMEPTGHYWKTLANYLVKAGYKVVGVNPYHTKKSKELDDNSPTKCDKKDAITIARLVKDGRYFDPYLPQDVYAELRVLSNTRVSILKRSSAVKNTITAVLDEYFPEIVKVFKNPLKGKASRQILKSCPFPAFILTLGADAVFAEIKKAVKKTVGMKKVQQLIEIAKESIGVEYGLESAKLRMNCLISELEMIENNLNEVEASMEKMLEETGYAEKVLSMKGVGIVTAASFIGEVGDPLRFDSDRQIAKYAGYNLTEDSSGKNKSGTCISKRGRKQLRSILYKMAFTMVGQNAEMKELYRYLLTRQNNPLKKKQALVVISKKIITVIYSLLKKQETYKPELVLGTVRKEMLLAA

SEQ ID NO: 471906 - protein, 404 aa, unidentified
MSAVRAVIWVGIDVGKSHHHACAVDAAGKVVFSRRVANGQAEIEALIARAGNAAADVWWAVDMTSGTAGLVLALLLAARAQVVYVPGRLVNRMAGAFAGEGKTDAKDAFTIAETARMRSDLTRITSPDQVVTDLQVLASRREDLMGDWVRGVNRLRGLLASIFPALEASFDYSTRSALILVTGFQTPQGIRDAGREGLTEHLMANGAWPRGISAMVDKALAAAAAQTVALPAETATAPLIARLAAQLLDLDREIKDLDKEVGERFETHPHAARITSVPGFGPILGAQLLADTGGDLTAAFGHPSRLAAYAGLAPVPQDSGRVRGNLHRPKRYHRGLRRVFYMAALSAIKPDGPSRTFYQRKRAEGKAHTQALIALARRLIDVVWALLRDGRKFHAAPPASARAA

SEQ ID NO: 471907 - protein, 333 aa, unidentified
MNMHLQGGVANGAQRPNAGVDVCKQHLDVCLGTEDQRVANDAGGWDELIAKFKGAGVDLVVLEATGGYERGLVCALQGTQIAVARVNPRQARDFAKSMGVLAKTDKVDARALRDFADVLARHKDRAKYITPMVDERRQALADLMTRRRQLVDMRVAEGNHLEHAAHKHSVRSIKNVLKTLDKQLEVIDREIDDHLDRHFGDQRTLLDTVKGVGPVTILTLTAALPELGQLGRRQIAKLVGVAPLADDSGQRKGKRHIWGGRADVRAVVYMAALVAIRHNPVIRVFHSRLIAAGKPKKVAIVACMRKLLTILNAMLRDRAAWDASKHALGAVSA

SEQ ID NO: 471908 - protein, 345 aa, unidentified
MGVDARTGELFEGRQIAARDEGHRDAVRWARELHPERVWAIEDCRHVSRRLEQALLAAGERVVRVPPKMMGQSRRAERQSGKSDEIDALAVARAVVKDGVERFPAAYLDERAMEIRLLSDHRDQLVGERTRLQNRLRWHLLALCPELEVRLPRGGLTRQAEQRRIARRLRTFDGDPRARVAREQLSRTRVLTHQVNELERELQRLVAAHRPALLAEQGRGALTAATLIGRTAGAERFPSDSHFARQAGAAPIPASSGRVDRHRLHRGGDRQLNRALHMIAITKARIDPQTKAYLERKRAEGKTRREAVRCLKRHLARKVHRLLSMPAVDPDPVELNAAITGRCLT

SEQ ID NO: 471909 - protein, 367 aa, unidentified
MKKVSTASGKTTKNFPQPKLTIGLDLGDRSSWYCLLDEVGEVLQEQKLSTTPKAMREVFGTLPRCRIALETGMHSPWVSRVLSELGHEVIVAHARTVRLIGESRKKDDRLDARTLARLARIDPQLLCPVKHRSAKAQADLTVIRARAGLVRARTALVNTARGLAKSYGERLRGCNVRNMNPEKAKGLSAELQRALEPLLAGIESLSERIREYNQRIEQLAQQSYPQVALLKQVKGVGTLIALTFLLTLEDAHRFRKSRDVGCYLGLQPGRRNSGQSEPQMHISKEGDPYLRTLLVQGAQHILGPFGIDCDLRRWGLKLAERGGRNGKKRAIVATARKLAVLLHHLWVSGEVYEPLHNSQQSSLALAA

SEQ ID NO: 471910 - protein, 422 aa, unidentified
MLEKTQDEQEIIARVAALDIGKAELVCCVRVPDPKSGSRRVQEVKSYSTMTRSLQVMADRLMDLGVTRIVMEATSDYWKPPFYLLEAHGFDVWLVNARDVKNLPGRPKTDRLDAVWLCKVAERQMLRPSFIPPVPIRRLRDLTRYRIGLVSDQGREKNRVEKLLEDSQIKLSVVASDIFGVSGRQMMAALIAGERNPQVLAQMARTSMRTKIPQLEEAFVGHFTDHHRFLLTKMLARIDTLDGDIADLDTQIEAHLAPIADAVARLDQIPGVGATAAAVIIAEVGLDMTRFPTPAHLSSWARFAPSVKESAGRKKGTGSTGHGDRYLARVLGEAAAGASKTNTFLGERYRRIARRRGKKKAIVAVGRSILVITWYLLSDPEVDFHDLGSGYYDSRINPERRKRNHIRQLEALGYKVTLEPAA

SEQ ID NO: 471911 - protein, 338 aa, unidentified
MPLYGGIDLHANNSVVVLLNEQDQRIYHKRLPNDLATIVEQLAPYHADIEGLVVESTYNWYWLVDGLMDAGYRLHLANPAAIQQYSGLKYTDDHSDARWLAHLLRLGVLPEGYIYPKAQRPVRDLLRKRAHLVEQQTANVLSVQNIILRNTGARLSANRIKSVSQAEVDTLLPNADQALAVSSALAVLHCLAEQIKTVETRVRTRIQSTPLYELLQTVDGIGPILAQTILLETGDIGRFPSVGDYASYCRCVDSTKVSNGKRKGQGNVKNGNPYLAWAYAEAAHFARRFNLKVQRYYQRKQAQTNVTVAHKTVAHKLARACYHMMRHQAPFDAAKAFG

SEQ ID NO: 471912 - protein, 374 aa, unidentified
MTITTSESPATASEVILGIDTHLDVHVAVALDGLGRRLGELNVPTTVKGYHKLLHWAEGFGPVCCAGVEGTGSYGAGLARYLKAAGISVMEVERPKRRHLRRNGKSDPIDAEAAARAVLADDTAGEPKSGDGQAEMIRTLRSARQSAVKARTQAANQLQALLVTAPENLRHRLRKLPTKNLVDTCARLRPGAAPSNVQTATKFALRSVAWRYQQLSEEIAQLDEQLDRLVADAAPELTALLGIGKDHAATLLTVAGDNPQRLKSEASFASLCGVSPIEASSGKVVRHRLNRGGDRDANRCLHLICVVRMRHDQRTREYVARRTAEGKSKREIMRCLKRYIAREIYRLLVPKAGASPPTASVTQAAYPRKLAAQP

SEQ ID NO: 471913 - protein, 424 aa, unidentified
MNFTQNDRLKQVTANTLIVGVDVGSQTHFCRAFDWRGFELSRRVFKFSNDRMGFLTFLRWTEELMNKTEMKKVIVGCEPTGCYWLTFQKFLQDHDVKLVTVNPFTVNRSKELDDNSPEKSDLKDPKTIAMLVKEGRYSTSYLPEGVYAEIREASVCRDQIMKQHVRLSNQIQGWLQKFFPEYLDCYSDWDSTSGLMLLKSAPLPQDILKIGAGGINQIWRDAKVRAAGLKRAQTLVEAAQESVGLEAGEAARLEIWVLVNDYILKAEQLKRLDEYLEEKVKEVPNVEKLLAIKGVGMSTVIGFIAEVGDIGRFTDPKQIQKLAGLEIVKKSSGKKKGQPRISKRGRRKLRRTMYESARALMNWNPAFQDVFLYYRNRTRNPLGGMQAKIAVACKAIRVFYVILQTGCDFDEEKFRRDIIRPEAA

SEQ ID NO: 471914 - protein, 412 aa, unidentified
MNIRVEKACGIDVHKAFLSATILTLNGTKATKKFSTSLDGLLDLRTWITENNCQRVAIESTGIYWIPTYTILEGKVETIVANPVQIKHIPGRKTDALDSEWIAEVCLNGQIKPSYVPCKEIRDIRELTRTYMKLTQERTAHKNRIHKILQRAGVRISGVLSDIFGKSGNIILNGILNGKSIDQTFKEINNKRVKKKKEQVKEAIKGELSENDIFVIKECLEAISFLNNQITTFESRIFESLKEIRKELEILMSIPGIGFIIASSALAEIGNINVFPKAKNLVSWSGLAPAINESAGKSSNGHITKQGNKFLRTILILAANSAAIGKPTKLKLFYQRIKMRKGHKKAIVALARKLAVIIHHLLKFKEKYSEEEIKEKNVKFPKSITLQELDLDEIIELLCKAGYTINKSSLAG

SEQ ID NO: 471915 - protein, 427 aa, unidentified
MNEVMAGMDLHRNNVVCGLVDQDGRRVVEKRLPCELETIVQWLEPYRTRLRRIAIESTYNWYWLVDGLQEADFDVVLANPARIEQYSGLKHADDSSDAFFLAELLRLNILPTGHIYERQLRPVRDLLRRRLLLVRQAAALKLSFKSLYARTTGQTLSLSRLQRLTPAEVPGLFAHGAEQLIAQEQLRLIGELGQSIAQIELAVGREVKDWASYRWVQTIPGVGKILGLTIALETGPITRFASAGHYASYCRCVRSQRVSNGKVKGANNGKNGNRYLAWAWVEAAQFARRYYGPCRRFFDRKAGEVNGALASKALACKLAKAGWHVMREGVPFDWSRAFPGGVPGGEPERQVRAAGAPRTPPPPHRPAREKDPTSLTPLGSVSSRVSPGREDSRTAAPSAKTRSKTQAKGAKPPVSTESRTKIMKKRT

SEQ ID NO: 471916 - protein, 407 aa, unidentified
MQEATQHDAVDVFVGVDVDVGVDVGKGRHHAVALRRNGKRLYNKALPNDEVKLRALIAELKTHRRLLFVVDQPSTIGALPVAVARAEGVLVAYLPGLAMRRIADLHAGEAKTDARDAAIIAEAARSMPHTLRSLRLADEQLAELTMLRGFDDDLAAQLTQTSNRIRGLLTQIHPALERVLGPRLDHPAVLDLLERYPPPSALAAANEKTLANRLTKLAPRLGKNWAAEIVQALNEQAVIVPGTQAAAIVMPRLAQPLAALRKQRDEIAAEVERLVLAHPFWPVLTSMPGVGVRTAARRLTEAAQKAFATAAHLAAYAGLAPVTRRSGSSIRGEHPSRRGNKVLKRALFLSAFAALRDPVSRAYYSCKIQQGKRHNQALIALARRRGDVLFAMLRDGTIYPPKSAPDA

SEQ ID NO: 471917 - protein, 325 aa, unidentified
METKKLCCGIDVSFTTLDVCYQNNLGEFFHLRVGNNNEGFLKILQHTGTHYHFVMEATGVYYIRLAFFLYNRDCSLSVVNALSVKRFIQMHGERNKSDKKDAAWICRYAIEQRPPFWQMPDGAYFQGKQLYNTIREYQEQIKRFNNQLHSLGLLHVQSKDTIKSIEKMRSNLKKEVKSLEQKLQELLEQWQPAQLKNISSVKGIGKRAAAMLIIFTQGFKHTTSHRQLISFAGLSPTEYTSGTSIQGKPKICKRGGKPLRDVLYMCAMNAMKTNPACKALYERLRAKGKTGKQGLIAVCNKLLKQVFAVMKNNTLYQPAYCSAKP

SEQ ID NO: 471918 - protein, 420 aa, unidentified
MDEVTEEAAELVARVAALDIGKAELVCCVRVPHEEKPGRRRGEVRTFATTTRSLLELRDWLTCLGVSLCVMEATSAYWKPPFYLLEDAVECWVVNARDVKNVPGRPKTDRLDAVWLCKLAERGMLRPSFVPPPWQRELRDLCRYRRTLVQERTREKQRAEKLLEDTQIKLSSVISDIFGKSGRDMLEALVRGQRDPARLAELARGSMRGKRSVLQEALTGHFRDHHGYLLRMMCDRADALTAQIEELTTRIDEVIAPFAHQMAQLDEIPGVGRTGAQELIAEIGVDMGRFPTAGHLVSWAKYAPRARQSAGKSKPGTTGKGNPWLASALGEAGIGASRTKTFLGSRYHRLARRRGKQRALVAVGNSLLVIAWHLLSDPGAHFTDLGPDWHDRIAPIRRKRQLIAELERLSGMKVTLHQAA

SEQ ID NO: 471919 - protein, 316 aa, unidentified
MKKELFIGIDVAKESLDTAFSPAAEVLHSANTPAGHRALAKDLAKRAPTLVVLEATGGLEKPLAACLVNAGLPVAVVNPRQVRHFAQAIGLLAKTDRIDADVLARFAQAVRPKPRPWPDKLQRELAALMSRRMQLVEMITAENNRLSSTPTGRVRKRIAAHLEWLRKELGRVDEDLDDLIRQSPTWREKENLLRGVPGVGPVVSRTLVSLLPELGTLNRKEIAALVGVAPFNRDSGAYRGQRAVWGGRSRVRAALYMGALVASRHNPLIRTFYQRLCEAGKPKKVALTACMRKLLVIINAMVRDQRPWLPVSAGEA

SEQ ID NO: 471920 - protein, 387 aa, unidentified
MPQQLDDLSRSLTPLQQDSTIVAVIEMSQASWLVAGIVPGIERHPLKKLEPSEVELLRLLMRWRAEATQNGRTITRIAVAFEAGRDGFWLARWLRARGIEAYVIHPASVAVSREHRRAKTDRLDTGLLKRVFLGWLRGEPDHCHMVAIPTLAEEDAKRPNREREGLVRERTRLVNRVKSCLVRFGVRTFKPTLRNAPDRLATLRTPEGVPLPPNTLLELRRDMARLRFVMDQIKEVEEARAQGLNQAPPDKTHVMVRLLARVIGIGLETADMLVQEVLARTWRDRRAVARYAGLTGSPDESGSRRREKGLAKAGNARVRRGMIQLAWRFLLFQKESALAQWYRARTADARGSTRKTLIVALARKLLIALWRMVTTGEVPAGVVLRAA

SEQ ID NO: 471921 - protein, 346 aa, unidentified
MPVAEVDTFAGIDVSAYELSVALRRGQGHDKPAMAKFPNHPSGHKALVAYLLRGGGRVRICLEASGNYSLDLALTLQAHRQVEISVINPRRARRFAESLGERSKTDPVDARVLCEYAARMPWVRWQPPSPVALHLRALTRAIADLGVIHTQQNNRAYAAAASQALPVLVVKEMQRHKKYLEQRMTRLRREAVRLIACDPELDRRFRLMLTTIGIAETSALQILGELAVLPDMLDARQWVAFSGLDPRLFKSGKSVEKRPRISRSGSRHLRRALYMPALVALRRDPYLRRFYQNLLARGKARLQAVVAVMRKLLHALFAMFRTNQPYDGSKLCCAVDMAGNAIAACA

SEQ ID NO: 471922 - protein, 326 aa, unidentified
MDDTIYDHYIAIDWAISNMAIARMTKKSNKITVIDVPSKIEELKLYLKQLKGSKVLTFEETTTSQWLYAEVTDLVDRIVVCDPHRNKLLNEGPKNDKIDASKLVQLLKAGLLKEVFHSSDVFLYLRRLVSGYEDLIKAGVRLQNQRSSLIRACGSRDVAGPDAFVLDCLDRQIQVYSEEKAAYEKEFKSLAKKYPPIRHQDSLPGIGHINAVKIVARVVSPYRFADKGHFWSYAGLIKHEKISGQRSYGKRTPRYSRQLKDAYKTGTKAAIKGNNPVGDYYRFLVEEKGEPEYDARHKACRRLAVLSLGVFKSGRPYQPYQRLTTT

SEQ ID NO: 471923 - protein, 338 aa, unidentified
MNIVFLGIDLAKNVFQLCGLNQAGKPVYTKRTGRKELLQMLANIPACLIGLEASTGAFYWQREFEKLGHKVKVISPQYVKPFVRGQKNDGNDAQAIAVALMQPTMQFVPPKSPEQQDIQALHRARQRIVNHRTATVCQIRGLLLDQGIPIGSAVSRARRAIPLILEDAENGLSSRMRRTIAELYDLFNDLGRRIHFFDKEIETVFRQSEACQRIAKIKGIGPETATAVVAAIGKGTEFKNGRHFAAWLGLVPRQHSSGDRQVLMNMTKKGDKHLRTLFIHGARAVVRVATNNNDGHMNQWVNQLKERHGFNKTTVAVANKNARIIWSMLRNETGYQVV

SEQ ID NO: 471924 - protein, 387 aa, unidentified
MLVAAHRSEAPTAIRTDLCAIFVSLELSRSKWLITSLSPGGGEKMSKHMVAASDVAGMLARFAELKRKARARTGRCFPIIVVQEAGLDGFWIHRVLEAEGIESYVVDPASIVTSRRRRRAKTDRIDGEALVRALLAYQRGEPRVCAMLRVPTPEEEDQRRLSRERQALTNERVRHVNRIKGLLFSQGVSDYEPLRRDQRKRLEECKTGDGRPLPGHLKAQIGRELDRLELLLEQIKTIEAGRDAMLAATQVVSPAPTMLLILKGIGPEFAAVLWSEGLSRHFDNRRQVAAYAGLAPTPWQSGWVDNDQGVSKSGNPRLRTTLIQMAWLWLRHQPHAALTVWFKDRVKQNGGRLKKTTIVALARKLLVALWKYVNAGVVIEGAVLKTV

SEQ ID NO: 471925 - protein, 368 aa, unidentified
MSNNVLYVGLDVHKNSMDIAIAQADGEVRYYGRIDGYHKDLDKVIRKLHSKGAEFQFAYEAGPCGYQVYRHLTAKGYKCLVAAPALIPRRPGDRIKCDRRDALSLARLFRAGELTAIRVPDVDDEAMRDLTRAREDAISVERRAKQRTAAFLLRHGRRYPGKTTWSRGHWTWLLQQVMEHPAQQIVLQEYLDAVREASARVQRLTGQIRELLPQWPRAPFVAAYQALRGVSLITAATVVAEVGDLSRFHNPKELMAYLGLVPSEHSSGTSVRRGRITKAGNGHARRVLVEAAWAYRLRARITRPLLQRQEGLPDSIRQIAWKAQLRLCARYRRFLARGKAKQTIVTAIARELAAFLWAIGQAVIPVTA

SEQ ID NO: 471926 - protein, 434 aa, unidentified
MSHRLQVGIDFSQQRADVCLLCPDGQFIEPHRAFDNSLLGYGLAKRLLLDALDQFAFDGVDVSGEATGYYWLPFFLQLAADPDLEPHDLKLHVLNPRWVYWFKKCFAQDDKSDQKDPYYIAERTRTRPSAIPWTPDEDALRLRFYTRLRFHLVQNLAREKCYFSAFLFLRASAYRRLKPFSDLFGVTSRLVLSQQPSLDELADLPVDVLAAQLHELSGHHLPDPFNNARKLKQVALESFALPESLSLPVQRILELTLDHIRFLEGQIAQVDAWIAAEVASCPAIVNLTTIPGVGPVFSAGVGSEVGNTQRYLQGTKWDSKRKQNRPRNLRDAEDAVAKTAGLWWPRISSGDFEAQDRHMAKSGNRYLRYYLIQAADRMRQSIPEYGTFYARKHREAAKHHHKRALVLTARKGVGLFVGLLHRNEPYRPGGASNT

SEQ ID NO: 471927 - protein, 367 aa, unidentified
MKKVSTVAAKQSRKTAEQKLTVGLDVGDRSSWYCVLDECGAVVLEQRLSTTPKAIDKVFGGMPRSRIALETGMHSPWVSRRLSELGHEVIVAHARNVRLIGESRRKDDRLDAQTLARLARIDPQLLCPVKHRSARAQADLTVIRARASLVRARTALVNTARGLAKSYGERLRGCNVGNMNPEKAEGLSPELQAALQPLLAGIEALSEQIRESNERIERLAEESYPEVTLLKQVKGVGTLIALTFLLTLEDPHRFAKSRDVGCYLGLQPGRRNSGQSEPQMHISKEGDPYLRTLLVQGAHHILGPFGVDCDLRRWGLKLAERGGRNGKKRAIVATARKLAVLLHHLWVSGEVYEPLHNSQRRAMATAA

SEQ ID NO: 471928 - protein, 383 aa, unidentified
MPEHIRYLGLDVHRETIAVAIAEGEQAARSHGTINHRPEAVAKLIRKLGPVENLRCCYEAGPTGYGLYRQLVRMGVACIVVAPSLIPVKVGDQVKTDRRDAEKLARLLRSGELTAVWVPDEAHEALRDFTRLRESAKQDLHRVRQQLGKFLLRLSVVPPTRLSRWSKGYRAWLSSLQLPQALEQETLEAYLDHLDASGACLAKLNARLEELAVSHEQARLIQALACLHGVGLVTAITLVAELGDLSRFPTARALMGYVGLGPREHSSGGRVRRGGISKRGNSHARRVAVEASWHYRHAPGVGPALQRRRRHQPAGVLAIADKAHARLHRRYRKLLGRGKLPQQAVVAVARELLGFIWAIGRELAASRAAAPVEQAVPAAEEAA

SEQ ID NO: 471929 - protein, 400 aa, unidentified
MRTVFGIDVSKASSEVAIVINGEKIHGYTMPNDTIGFTRLLDDLKTVQKPEIIFEATGVYSHRLQAFLEENGYAYTQLNPLEAKKQLDSLRVRKTDKIDAETLAISQFVLNRKPTYIQEEVYQELRDLSRFYQNLTEDIVRTKNRLHKVLQVTFPEMENILSTPTREQYWNLVMTFPYKDFVLELSKDELLEGIRQSTSKRISDKRVAYLAQKLAALANQSYCAVKKNSPILEEVRYYAKELLRLSEQRQAVLEQMVELAQPLPEYEILLSIPGIAETTATSMIGELGDIRRFQSANQINAFIGIDLRHYESGNFLVKEHITKRGNPYARKILFKCIHNIAAASHTNHCHIEDFYEKRKRQSQTTSTKPHTIASIHRLIRTMYYLITHNKLYDYTSTQNR

SEQ ID NO: 471930 - protein, 352 aa, unidentified
MSMIAFDSHKRYTFARVENEQGEHPQEFRIEHRRGNIIAFLSKQEPGSRVAIETIGNWYWIVDEIERAGMVPRLVHARKAKMMFGCVNKTDKLDAKGLNLLQRAGTLPTVWIPPAEVRDKRELPRTRMVFAAERTKLKNRIHSVLDKYGLQEAFEDISDIFGATGRRVMVCVLEQLPPHTRYTAELLLEQLDQTQQKIEAIEAQMNTLFKETEQHTLLKTMPGVGFILAVVILQEVGDIGRFGRAERFASYSGVTPRVHASGGKVRYGRLRPDTNHYLKWAFSEAGNSVAVNRDRFPSRHVSQLYHRIRSRAGHAKAVGAVGRHLAEATYWILTKNEVYRERGLSKVSPTGA

SEQ ID NO: 471931 - protein, 385 aa, unidentified
MANQNDLSRSLVALEQNNTIIAVIEMSLNYWLIAGIVPGVDRHPLKKLNVDETALLQLLRRWRDAAAKAGYVITRMAVAFEAGRDGFWLARWLRARGVEAHVIHPTSVAVPREHRRAKTDRLDTELLKRVFLGWLRGEPDHCSMAAIPSLQEEDAKRPTRERENLVGERTRIINRMKACLVRFGIRNFKLTLRKAPERLNDLCTPEGDLLPPNTLAELRRDMARLRFIIDQINEIEASRLQQLEQAPVEGPTAMVRLVARVIGVGIETADMLVHEILSRDLRDRRAVARYAGLTGAPDESGSKRREKGLAKAGNARVRRGMIQLAWRFLLHQKDSALTQWYRARTASAGRKRKTMIVALARKLLIALWRLVTTGEVPTGVVLRAA

SEQ ID NO: 471932 - protein, 362 aa, unidentified
MSDITTTIARSKLTVGLDMGDRFTQVCVLDEDGEVMEEGRVTTTPRAFQQRFAAMPPARLVLEAGTHSLWASRLLGELGHEVIVANPRRLRFIYGNDSKNDRADANYLARVGKLDPGLLHPVVHRSEEVMAHRALLRSRDILVHSRARLIIHARSLVKPFGFKLPHCSTTAFVKKAQEHIPEILAPALGPVFGIISALTNQIRELDQKIEALARESYRETALLTQVQGVGTLTTLAFMLTIEDPSRFPRARAVGSYLGLRPRQDESGTLKPQLHITKAGDKFLRHLLVECAQYMLSSRGEDSDLKRWGLKLAERGGKAAKKRAVVAVARKLSVLLLRLWVTGEVYEPLRNAKRRGEKLPTPS

SEQ ID NO: 471933 - protein, 356 aa, unidentified
MTNAIPMDVIIGVDTHKDVHAAAAISGAGVHLATTTVPVSSKGYGELEAWAKSMGAVQAFGIEGTGSYGAGLSRFLRERGHTVVEVNRPNRQLRYQQGKSDAVDAESAARAVLAGQAVGQPKSGTGAVEMIRHLKIARDTAVKARTQAMQTLKAIIVCSPDALREQLDQISGKMTLLRRLVALRPGPLTSTLASAKASLRAIARRWLVLDAEIKQHDAHLETLTATRAPELMEAHGIASGTAAEMLLLVGDNPERIHSEAAFAKLCGACPIPASSGKTIRHRLNRGGNRQANAALYRVVIIRMRGHQPTLDYVRRRTAEGKSKSEIIRCLKRYVAREIFGYLCTKPALADAAATSS

SEQ ID NO: 471934 - protein, 607 aa, unidentified
MSTIASLDRIGVGIDTARYGHRVSFLRPDRKPAAKPLTVMENRAGYQALQDRLNQLHEQHPTAHFHVRIDAAGQYAVNLELFLRGLKLPMTISVGEPKRNKDYQKAHFPKRTTDDTESQAMARFAVVELPNATPAPSTPMILLREVAGRLQSKVKQTTQAINRLHNLLARVFPELATLTQDMSAGWVLKLLDKYPTAERIAQAQIASLEKIPYLSVEQAHAVHQAAKQSVASLRGELAEALVRDLVTQVRLCQKAEQHLHQLLLEAFADLPASPHLQVLTITGIGEATAAALVAKIVDINRFATPNHLVSYFGVFPEESSSGVDKRGRPLPPGTLIMSPKGNDLVRFYLWNAARNAIQHNPAIRALYRRLRAKGKRGDVAFGHCMRKLLHLVYAVWKTDRPFDKEHFPWEGSSDTQPSATTPPSADAGTTPSANEKAVGHKRDLPAEAVVTTADSTLEPASPAVKPASQSAAPRPKVDFACVREHVTMEQVLQHLGYFASLRGRGQQRRGPCPVHSQPTAPERTFSVHLGKNAFQCFHAECAVKGNVLDLWAAIHRLPLYEAALDLAETFQVPRNREEEPVKGTSSPRTATAKTSAPAAATATDGAK

SEQ ID NO: 471935 - protein, 352 aa, unidentified
MIIIGVDFHPEFQQIASVDTDTGEFQEKRLAHPGEAEKFYRALTGKKVRVGMEASGHARWFERLLAELQFELWIGDAAEIRTKRVRKQKTDRQDAQLILRLLLEDRFPQIWVPSWENRDLRQLLWHRHRMVQARTRIMNQLQAVALNEGLRCKKRLWRERGRQQLESFPLAPQASRRRDDLLELLDRLNPTIAELSHAIEQEAEKCPAAQRLMTHPGVGALTALAFVLIIGEANRFHCGKQLASYLGLVPLEDSSGNRRRLGHITKQGSSILRFLLVEAAQVTVRSLPEWRSKYFHLALRRGRKIAKVAMARKLAVCLYWMWRKGWNYEQLTKFGSHAGQPGNRHGVQSNTE

SEQ ID NO: 471936 - protein, 313 aa, unidentified
MSYTSRFVGIDISKSSLDACVLPDGQTVTYQNTAAGIASFLAFLATVDDIERLVLEPTGGYERLVVAALQAARLPVAKVNAKQIRQFARACGQLSKTDRIDAFILADYARRMETRILPQRSSQERALADFVSRYRQLSHMIVQEKNRREKLTGRTKVWIEESLRFLLDQRQAIVDEMTACLKADAELGRKAEVLMSLKGIGLRTACFILADLPELGHTDKGQIAKLVGVAPLNRDSGLMRGKRMIAGGRRHLRDALYVAALPAIRFDPDMKAFFTRLKQQGKPGKVALVAVMRKMIIILNARMRDANATVLDA

SEQ ID NO: 471937 - protein, 469 aa, unidentified
MGKGSGGSGMTRGDRRRNARRERLRAVLPRDGAVIGIDLAEDKQALVVIDHDVRVLARKTVRVKAFRLGEALDWAVAQAKVKGFARVAVACEPTGPRWLQVQRLCAGRGLPLVCIQPLVSHIARQQQDFTTHKRDEADCVMIARLAIELHCYIPEELDQAWADLRHLGPAPAQLITAATASVLRIRDFLSVAWPVVPEACVHPFASVTWLAALQVTASRCGGRPEELAAAGPEAFTALVRAAVAGWGGKRTAGRVCRAVFAALTGTEGVVVAHRRGLLRRVAQELGDLQRTRAQLRETEADMVAVLGELGLSRLGEIPGLSAVGAAAILAETGDPRRYDRSSSLVKHAGLSPADNASGAFEGQAHISRRGRPGLRLAVWRAVWPMLVHNPVLAAKYAALTAAADAAAAQAGAGTRRASAAAAAARARRASARVACAASLLRWIWCLVAHGASWDPAVAAGAASSPAQAA

SEQ ID NO: 471938 - protein, 413 aa, unidentified
MIDVLVDRCAGLDVHRDSVMATVRVPTGRRRQRRQHRRCCGTTIAELQALSEWLADFGVTRVGMEATGVYWKPVFHVLERRFECWLLNAQHPHNVPGRKTDVIDSAWICRLVEHGLVRPSFVPPPEIRRLRDLTRLRKAQTSERTRAIQRVEKVLQDVGINFTSVASRTYSVSARAMLEALLAGTTDPDELAQLARARLRAKIPQLRQALQNRFSVEHHGVLIAQLLAHIDSLELAISHLDARIEVEPRPHADLVELLCTIPGVKARTAQTLIAECGLDMTVFPTVRHLASWAGICPGNNESAGKRRSGTTRHGNRWLRQALTEAATAAARSNNTYLASHHAQIRGRCGEAKATGATRHDILVAYYHITRDRVPYRELGADWHARRYSVEHRTRRLLHQLEALGVTVTVDTTA

SEQ ID NO: 471939 - protein, 347 aa, unidentified
MEKLIRVGVDTSKSVFQLHGVDGAEAPVLRRKLRRDRFLAFFAGLAPVRIGMEACGASHYWARELRALGHEVVLIPPQYVKPYVQRGKSDAADAEAICEAMSRPKLAKNLVPVKNAEQQAAQMLMKLRAQFIARRTQLSNSIRGFAAEFGFTAPKGFSRLGALLAEIGADAGLPELAREMFERLADDYARIDAEVAKLDIKLMELHSASEVSRRLATIPGIGPVGAMLLTIKAADATAFKSGRSFAAWAGLTPKNHSTAGKNRLGVITRAGNEMLRSVLVAGATAVIQHMRRGGKHVWPWLEALIARKPPKLVAIALANKLARIAWKLMVSGERYRPRAALPGVTQL

SEQ ID NO: 471940 - protein, 381 aa, unidentified
MTSISTAISNKQFIYAGLELSKNSWLLAIQVPGRDNPSLHPLKGGNVDGLMAKLDAAIERVAKTTGQTPSVTLCYEAGYDGFWLARFLKQRGIICQVMEPASLQINRRARRVKTDRIDVENILHTLIAWCRGERHVCSMVVIPSVEEEDLRRCHRERDRLIRERTAHINRIKGLLFGQGIRGINVKAHYKTLKPSELVTADGRPLPDHLGREIDREIDRLAQLQVQIAEVERERDRPVTSCEETERKRHDLMRLKSLGPALSSTLTREVYYRHFNNRRQVASYIGITPSAYDSGDGHRSQGISKAGNRLARVAMIEAAWLWLRHQPDSALSQWFHHRTQGQKGRIRRIMIVAMARKLAIALWRYLETGLIPEGAVLKAMRS

SEQ ID NO: 471941 - protein, 329 aa, unidentified
MNVNSQGREAVTAPAMNAGIDVSKHWLDAAFGSRLERFANDAAGMESLTVLLCQEGIDLVVLEATGGYEAAAAAALQVAGLAVAVVNPRQARDFAKSMGVLAKTDKVDAAVLRAFADVIARHEKRSQFLRAVPDEQRARLAALVTRRRQLLEMRTAESQRLSMAHKAARKSLGAVITFLDKQLAQIDEELDQHLREHFQGLSKLLRTVKGVGPVTTQTLAATLPELGHLDRRAIATLVGVAPLACDSGKRRGSRHIWGGRPEVRHTLYMATLSATEHNPVIRAFHQRLLAQGKPFKVAMVACMRKLLTILNAMVRDGTTWNPQLHAKNA

SEQ ID NO: 471942 - protein, 402 aa, unidentified
MNAVGIDVSKGVSTIAVMRPFGEIVASPFEVNHTVDELKKLVEMIRKLNGETKIVMECTGVYHLPVAYALNEAELFVSTVNPIITHNYDNNSIRKSRNDKSDAIKIANYTLTNWLKLQQFTPEEDVRHMLKIYSRQYNKYKKILTMLKNNLISLLDSTFPGANELFTSTPRKADGHEKWVDFIAYFWHCKCISSLSEKAFIERYRKWCKRAGYNFSQVKAEKLYTDAFGHCFIIPMTETTKCLITLATSQINTISETICNLANEMKSLAQSLPEYPVVMAFRGVGDILGPQLIAEIGDIYRYFQKSSLVRYAGLEPVENQSGKFRGGESISKQGSPHLRRTLFLVMDCLLKHKPVDDPIFQFLDRKRAEGKHYRSYMCAGAAKFLRVYYARVREYLEKLYVD

SEQ ID NO: 471943 - protein, 327 aa, unidentified
MAKRTTICAGIDTGKRKLDVALDGSSEQLQIDNTPEGYKVLLDWLRRHRVKRIGIEASGGYEQAVVAELRRKGIVVVVFQPAQVRAYAKFHLQRAKNDKIDAALIAACTAAVKKIHTPPDARLLPFAEHLTMINQIGEDITLLKNRLETCRNERIQQVWKEDISRLAKRERTEFKALVAAIREHRDLAERLDLIYSVSGSGMPTAVAILVRMPEIGQLTREQAAALAGLAPYDDDSGNHVGVRHIDGGRQRLRRALYTVALPASFRWNPHLITLYKRLIAAGKGHKRALIACARKLLIFVNAVVARGIPWGHERPPTVAASALPQTG

SEQ ID NO: 471944 - protein, 382 aa, unidentified
MKSIVFVGMDVHKSEFTLCCLQPELFTEDHFFGHMTTKPSAGEVKRYLGRIQDRYKKQIGGELRFICGYEAGCTGYSLYHDLTRLGIDCVILAPTSMPKYPANAIKTDKRDSEYIAKCLAYGNYKSVYVPDLVDEQVRDYIRMRNDHKGALKQLKQQINAFCLRLGASYPSGQNKWTHKHLRWLQQLEFELIHREILDEYLITYNSLINRLEVLERRIEEFAQEERYKEEVSKLICFLGIKSLTGLSILVETGDFARFKSASHYACYLGLTPGEHSSGTSIKRTNITKAGNSEVRRLLIEAGQSICKGQIGYKSKGLLARQRGNPSPIIAYADRANERLRRKYYRMIRSGKKRNVAVTAVARELACFIWGMMTNHMQNRAAG

SEQ ID NO: 471945 - protein, 342 aa, unidentified
MSTITVLGIDLGKSTFHVVGHDSSGKEQLRKKFNRHQLIEFLNNHPVTTVAMESCGGSHWLARKCQTFQHRVKLIPPQYVKPYVKTNKNDFIDANAIAEASTRPSMCYVGVKTQSSQVLCVIQRIRSSYIKDRTACMSRVGAFLLEFGLAFPRGHSAMKNLFPWLAKQSETLPKALMRELVEYHEHYIFLNEKIALQDKKIKELVNQDERAQLLKTIPGIGDLTACQCLADIANAGDFKNGRHMAAWAGLVPHQYSTGGKSTLLGISKRGNKALRTLFIHGARAMMSRPELAEKAFGNWVYELRQRKPFNVAVVALANKLARIAWSVMYYQKPFEAVKVGHQ

SEQ ID NO: 471946 - protein, 317 aa, unidentified
MTLPTASFVGIDVSKQQLDVAVRPRDETWTVAHDEAGLSALVVRLRTLAPTLIVLEATGGLEVALAGALATAGLPVAVVNPRQVRDFARSTATLAKTDRLDAQLLAQFADAVRPEPRPLPDAQAQELTALLQRRRQLVEMLTAEKNRLTFASRRIRPQLQAHIEWLHKQLAQFDDDLRQLVHASPLSREKDDLLRSAPGVGPVLSTTLLAALPELGRLTRHQIAALVGVAPLNRDSGTLRGRRTVWGGRAHVRAVLYMSTLVATRHNPVVAAFYRRLRAAGKAPKLALTACMRKLLTILNAMLKHHTRWAPVLAQDA

SEQ ID NO: 471947 - protein, 400 aa, unidentified
MVFLGVDWAEEHHDAWLENEQGEMLGKARIANDVGGVRQLHELVAEHAHDPSQVVVGIETDRGLLVSALVGAGYQIYAINPLSVSRYRDRHGTSGAKSDRADAKLLADLVRTDRHNHRPLAGDSELSEAIKVLAREHQELVWTRKRFINRLRSTLREFYPAALAAFGTDLGALDALAVLERAPTPWQGRQLSHAKIVSMLRKAGRQRNLEPKAAEIQRALRSEQLQAPAQLQAAMAIVVSSCVAMIKSLNFQLEQVATEMTASFEGHPDAEIYLSLPGLGVVLSARVLGEFGDDRARFADAKARKAYAGTAPVTQASGTKKIVLARFARNRRLADACYCWAFSSLTRSPGANRYLPHSANSRQDTPSSPPRLGQPPRRHPPRLLSRGPDLLGIARLATAL

SEQ ID NO: 471948 - protein, 319 aa, unidentified
MAQNDLVVVGIDVAKDKVDVCIRSLSLRCTFASTVDGRRELVSLLRRKKVGKAAMEASGGYEREWAKALRDARIEVRIVDPKRVRDFARSAGRLAKNDAIDSEMIAWFAETFGEAPAQAYDAEREKLAQIVNARQGLLDLRTTLQNRGEHAGPEPVQKMHARLLKTIAAEVVKLEAVIAAMIKATPHFAELAEIIESVPGLARTTSAGLIAKMPELGQVGNKVAPALLGAAPYDDDSGRRQGERHIKGGRRKLRNLFYMACLGAATRHNPVLKAFYDRLIAKGKKPKVALVACMRKLIVILNIMIARRQKWDPKLHVLG

SEQ ID NO: 471949 - protein, 363 aa, unidentified
MYDSTTVTVGLDVHARSIRFAAVRADELLEERTLPYDEEQVERLLRRWPSVRCCYEAGPTGFGLYRHLVDHGIDCSVVAPGLVPQRPGDRVKTDPRDARKLARLLAGGLLEPIHVPSPEIEAARDLVRAREDARLDRMRDRHRLSKFCLRHGLLLPTSSWTVVRRKWLGEQRFEHACEQLTFDTYVHAVDLVDARINRLEQAIRETAEQEPWRQLVGRLRCLRGIDTLTALALVTEIGDFNRFKSAHEFMAFVGLVPSERSSGEKRRQGSITKVGNSHARRLLVESAWHARRRPKVGYELARRQRGQDAVVIERAWRCQQRLYQRWQRMAGRGKPHQKIVVACARELAGFVWAIATDQPLRSL

SEQ ID NO: 471950 - protein, 428 aa, unidentified
MSYRIAGIDVHKKMLAVVVSDVEIESEFQFERRMFSSNPEQLRSLAAWLVEQKTEEIVMESTAQYWKPVWETLERYWKPLCEKREGTRRRSGTLHLAQALSNRGRRGRKRDFIDAERLVKRLVARELTLSFVPDAEQRLWRTVTRKKYQLRRDVVRLHNQLEALLEEAHIKLSSLVSDLLGVSARRMLKALADGETNPAALAALAHERLRATPEQLCDALGACTELKPVYRRLLKMTLEQLQILEQQIGQLDHELATLLHPHQDAVERLAEVPGFAVDSAQQIIAEVGPTAATFPSEKCLSSWVGACPGEEESAGVNYSHRSPKGNRHMRRLLNQTANAAVKAKGSIFEIIYRRCVPRLGHNQAIGVIAHRQCRLIWLILHQGTRYEERGPAVTKRSRYQRTWRMIRQLRNLGYRIELPNPQASQAQA

SEQ ID NO: 471951 - protein, 312 aa, unidentified
MDATVIAGIDVSKDRLDVHVLPDGMSFSVTRDDEGIAALVARLAPLQPAAIGLEASGGFETLVVAGLAAAGLPVVVVDPARVRAFAKALGQRAKTDPIDAAVIARFVAAMKPVIRPLPDAQTRDLADLLARRRQIVAMIGAERQRRTKATARIVKSIDRLVAALGKELAGLDHAIDKTVKGRPDWVEKEDLLASVPGIGKTIARTLIAELPELGKLDRRQVAALTGLAPFTRQSGQWRGKSFIGGGRADVRAVLFMGALVAARRNKTLKAFRDKLVAAGKPKIVAIIATARKLVTMLNAILRDNQPWREQTA

SEQ ID NO: 471952 - protein, 348 aa, unidentified
MARFVGIDIGKAKCRAAIMDPGGIILEEFTFTNNHEGIEGLASRLTLDDRVVMESTGSVWTNLYNHLDERHIPVALANPLKTKAIASAKIKSDKVDARILAHLLRSNLIAESYVPPQHLREIRALVRHRVGIVKIRTMIKNEIHALIDKHGLKHEFSDLFGKHGLEWLRNIELPPLDRLILNNHLTHLESLDQQTERVDEEIHNKACEDEDVRLLLSMTGIDVYSALLIRSEIGSIDRFPDYKKLVSWAGLAPSLHQSGNVEYHGSITKQGSRMLRWIIVEAARVAVNHDTRMRGFHERVKHRRGDQKAIIAVANKMLKIIWFMLTRREPYQSRNEKRYQQKLNSIAS

SEQ ID NO: 471953 - protein, 306 aa, unidentified
MYSINNTELSSLEETRCQFNGGKCAIKMGIDVHQDFYVVVEQLCGTNAKPPQRFHKLAFLHWAAKLKSQAREVHAVYEACGFGFSLQRQLSALGIVCRVVCPQKLDERNKRVKTDGLDAKALCLKLDRFVQGNRDALAVVRVPGEEEERARALHRQREQLVQVRKQLEAQGRSLLVNHGCAPVQQWWKKRAFAQLDVPHWIKELLANSQPILLALQEKIDQLTLHLQNAAIAEPPRGLGKMTSVIIDREIGDWCRFNNRRQIASYTGLCPGEYSSGQSRLQGCVTKHGNPRLRAALVELAWTSISH

SEQ ID NO: 471954 - protein, 411 aa, unidentified
MHAVGLDIHRNFAEVAEIRDGVARQLGRFDLVRDKVIAFAKRMGQEAEVVIEATGNTMAVAKLIGPHVKRVLIANPLQVRAIAHAKVKTDKIDALTLAKLHAAGFLPEVWQPDDTTERLRRQVAQRAIVVQARTRLKNRIHAVLSRNLLPLRKGDLFSGPGRVWLANQPLESDERQAVSGWLEELDHLRIQLERVDQTLAKAALGDERVRRLMTLAGINLTIAIGPIAPIGDVSRFSSPEKLVSYFGLNPRVRQSGDGRAHHGRISKIGRAHARALLVEAAWAAAVAPGPLRSFFTRIMRKRGKPIAAVATARKITVIIWHLLSKNEDYAFGRPALLQAKIRQMEIKGGLASKRGGNKPGRARDYNINALREKECALVAQAEAAYSRFVAAWSERPKSNTRRAGAAKEERR

SEQ ID NO: 471955 - protein, 412 aa, unidentified
MQVMYPTCAGIDVHKREVKVCLITRDAAEQRTKEVRTCRTMTRDLLALRDWLQDHGCPIVAIESTGVYWKPVFNLLEGEMEVVLINPSHIKHVPGRKTDVKDCEWLAELLEHGLLKGSFIPPQAIRDLRDLTRYRRRLVEMRTSEVNRLQKVLEDANIKLASVASDGMGVSGRAMLEALLAGERDAEKLAELAKGRLRQKKDDLVAALEGCFRPHHARLLAQILAHIDFLDESIAECEEQIEALCHPFAEDIERMDTEPGVDRRAAQDIIAEIGVDMSPFPSHKHLCSWAKICPGNNESAGKRKSGRIGKGNKWLRAILIECAHAAGRTKDTYLSAQYARFARRKGKKRAAVVVAHSLLGATYFILRDKVPYRELGSHHFDEINRAHVIHYHIRCLESLGLQVQVQELAVAA

SEQ ID NO: 471956 - protein, 366 aa, unidentified
MKTQMKNRDYPFTQFVGVDVSKAKLDFAFDDGKASRQIKNTEKQIVDQLIANIADPQQTIVVMEATGGYENLLISLLARHHIAFAVVNPLRVKNFAKGIGRDAKTDAIDAGVIARYGQVVQPSAQMVKSEESKKLRGLVERRRQLLDLINQEGNRLQQTTDEELLGYLRQTLETLRKQLKTVDQRLAKCLDSNTENARRIAIMNGVKGLGPVTIGTFVAELPELGQLNRGQIAKLVGVAPMNNDSGQRNGRRRIYGGRSYVRRVLYMATLVATRHNPRIKAFYQRLLAQGKLKKVALVAAMRKLITILNALIKNDKMWSDGPRDEKKERLRGISDAQDGAVGAPSPRISLEELRPRRASLCFSESP

SEQ ID NO: 471957 - protein, 342 aa, unidentified
MTLARIGIDLAKNVFEVHGVDERDKAVIRKTLRRGEVGVFFANVAPCLVAMEACSGAHYWARTLMDLGHDVRLISPQFVKPYVKTNKSDLNDAEAICEAASRPSMRFVTIKSGEQLSIQAAHRVRSRLVGNRTSLANQIRGILAEFGIVVARNIAALRRRLPEILGSDTDALDQMTRSLMLDLQEELVVADSRVRTYDRRIRQLSKSSEVCQRLERIEGIGPLTATALVAAAGNAASFQNGRQFAAWLGLVPRHHSSGGRTRLLGISKRGDRYIRTLLIHGARSALGRIRYKSDPRSQWLRKLCERRPYNVAAVALANKNARIAWALLRHGEAYDQRRTVAA

SEQ ID NO: 471958 - protein, 408 aa, unidentified
MNPLYVGIDVSSKSNVIYLMLPDGCKHSNFSVANSQDGSAQMVKRILSALNSHSLDTVTIGLEATSVYGDNLVYFLREDASLAPYCRKIHVLNPRQVKKFKEAYNDLPKNDFVDSFIIADCLRFGRINKEVYLGDYRYKALQNLTRARFYAVQNLVREKQRFLNVLFKKYSSMTQEKVFSDTFSTTALAVYEEFESAEALAYMDLHELTDFIMEKGRNRFPDPDAVAKAIQKAARSSYRLPKTVNDSVNQVLSISIASIKALETQIKEFDKAITAQAELLPNVLISIPGIGPVISAGIMAEVGDINRFPSQSQLGKYAGLAWKQHQSGDFEAENTRQIQSGNRFLKYYLCEGALSLVRCDTEYSNFYHTKYKEVNRYQHKRALALTARKFVRLVFRMLKDNRLYRAAE

SEQ ID NO: 471959 - protein, 338 aa, unidentified
MNYVGIDHHRQYSHITWLDEKGEVMKSGRVANLRRELEGFLQGARDVRAVIEAGRSSYTMVDVLADLGIETTVAHPKDVKAIAKAKIKTDERDSYKLAHLLRTGYIPEVHKRSRENRSSQRVLRQRAFYVGKQTAVKNRLRALLAQQGEEIRSEGERVENLFTDKGMKVLKGLALPEREAKLVGALLRTYHHIEERINETNALVKELYEKMPSAQLIQTVPGFGIFLAVLVAVEIEDIGRFEEVSQFHAYAGVIPSTHSSGERSWHGKIIKEGNRWLRWAVVEAVWPALRADFDIRCFYDRLKKRKGANAAKVATARRLLTIIYRMLKENRPYIPHKR

SEQ ID NO: 471960 - protein, 350 aa, unidentified
MVTLGGDSHKRTHTLVAVDDNGRQLGQKTLLATRSGHLEALQWAGRWPERRWALEDCRHVSRRLEADLLVAGEVVVRVPSKLTGMVRKVARTRGKSDPIDALAVARAALREPDLPMAKLDGSSREVRLLLDHRDDLVGERTRTQNRLRWHLHELEPETEIAARMLSRYHTLAEVERRLSEHQGVVAAIGLELVIRVRELTVRINELEGEIEGRVTGLAPTLLQLNGCGALTAAKVVGEAAGVSRFRSRAAFAMNNGTAPVPVSSGNQHRHRLNRGGNRQLNLAMHRIAVTQLKRPGPAQDYVAKRMTAGNTKTEALRALKRRISDEVYRRLLQDERASLASEIGACGEAA

SEQ ID NO: 471961 - protein, 423 aa, unidentified
MKTHTTGQSEQEFAAFIGIDWADTKHDICLQAAESSQREFSVLPHRPKEIDEWAGSLRRRFHGNRVAVCIETSRGALVYALQKYDFIVLFPINPATLAKYRQAFKPSRAKADPTDAQIALEILLGHRDKLKALQPQSPAVRELAMLLEERRQVVDDQRRIINRLISNLKHYYPLAHDWFEDKGTILFCDFLTRWPTYKQLHQARRATLEAFFRAHNCHHPKLIEERLAAVRNAAPLTEDPAIIRPKQLLVEGLVEQLRATLKSIERFDAAIACLAPTLPDYELFHALPGAGPTLAPRLLVAFGEQRDRYASAAELQMYAGIAPVTESSGKQHWVHWRMQCPTFLRQTFVEWAALTIPRSFWAKAYYRQQRARGCAHQAAIRSLAFKWVRILYRCWLTHTPYDESAYLNALKRRGSPLLASLAT

SEQ ID NO: 471962 - protein, 313 aa, unidentified
MIIPLRCVGIDVSKHFLDIFDEAIGASERIANATQAIIQLVARWRCDALVVFEATGVYDLELREALRQAGIRFARINPARARDFARASGQLAKTDPIDARMLAAFARAMQPATEQAATPARNALARLAKRRDQLVLMRAQEKNRRSEADDRAMAERIGRLIEVLDGEIEEIEADIRALIKAEQEISDDAQLMRSLPGVGPVACMQLIAQMPELGHVGPKQIAALAGLAPFNVDSGTYRGKRKIGGGRKRVRDALYMAALNAVRRADPFKAFYTRLRQAGKPAKLALIAVARKLLTVLNAMMRDRKPYKLAPAT

SEQ ID NO: 471963 - protein, 371 aa, unidentified
MVWTAPYGIECARMRLLRSQTREPSVNQIIRIGMDTSKHIFQLHGVDAAEQPVLRKKLRRSEVLTFFAKLAPTVVGIEACGAAHYWARMLIGLGHQVKLMAPQLAKPYVKRNKNDGRDAEGLCEAMSRPTMRFVPVKTPEQQAALMLIGVRERLVARRTQLSNAIRGYAAEFGLTAAKGLDKIEPLLAEIAANEALPKLARELFAMHGKEYAHLQAELKKIEARLMAWHRANADSRRLAGIPSIGLIGATALVMKAPDPHLFPSGRHFAAWIGLTPKDHSTAGKLRLGKITRAGDEMLRSVLVAGATAVIQQAKLGRGRPSPWLLALLSRKSPKLAAVALANKTARIAWKLMVTGESYHAERMPMASANAA

SEQ ID NO: 471964 - protein, 418 aa, unidentified
MFKIFRKNCCGLDVHKTWIYACIGITDSNGRTDYHERRFSAFSRGLFELADWLASFQCKEVCMESAGRYWIPVFNVLEKTCWVTLSHPKYTKPQKGNKTDRKDAKWICDLFMCDMIKPSFIPPSDIRHLRDLVRYRFKLTNMLTGEKNRAQNCLTVSNLKLDDVFSDVFGKSARSITEHILAHPGETFDVTPFVDKRCKHPIEEIQAAIDGSISPEQAIKLREVLHHTDEINSHKQNIEAEILHIASRYEPMLNLIRTAPGFSADPMTAIALISEIGVDMSVFPTAKHLSSWAGCCPRNDSSGGKRKSTRISRAGIYIKPLLVQIANAIVHSDKYPECKERYRRLKARRGHKKAIIGVCRMLLTAIWNILSKLESYTPYGYLADHKADPSKTLTTAQALNILRLRGYVIKDDPVPLTA

SEQ ID NO: 471965 - protein, 366 aa, unidentified
MVTYCGVDFHARQQLVKWCNSADGEIYERQLWHHSIDEVREFYAQFTGEVIVGFESSGYSSWFEALLEELGHQVWIGHATEIRRRARARQKTDRRDAELILDLLLKDEFPRIHRVSAASREVLRQLRYRHRLVQQRTRSYNSLQAIALGAGVSLKAKLRTRKGKEQLLGLAVTAAHDRQREEWLALISQFNSYIERVEKELELIAAADERVQLVRTHPGVGLLTGLALVHTLSPVSRFANSRKVAAYVGLEPREYSSGERQQFGGISKAGSRLLRLLLVEAGHKAINKDAQLKQLYHRVMHRREKAKAKVAVARHLLVRTYIMLRDGIDYAEFLRRGVAVRSARVSYRPQVPGKLIERLASEQQLS

SEQ ID NO: 471966 - protein, 456 aa, unidentified
MMVKQKRQMKIKVKVNALEQINPNAAGIDIGAEEIYVAVPPDRDTESVRSFPTFTADLRRLVEWLKACRIETVAMEATGEYWIPLYELMEEEGFEVCLVNARHLKNVSGRKTDVLDCQWIQQLHTYGLLNPSFRPPEQIVAIRCLVRHREMLVQYRTAHIQHMQKALTLMNVRLTNVLSDITGVTGLKIIRSILGGEHNPLCLAALREPGCKKSAAEIAKSLEGHYKREHLFALKQALELYEYYDQKLMACDAELEAMYQEFDPPDNPGTPPPTPRTQKRRKNQAHFDLAPALFRLTGVDLTRIDGVDELTVQKVLAEIGTDMSKWPTVKHFTSWLHLCPNNKITGGKVFQTGVQPTKNRASAALRVAAASLKTSDSALGAYFRRMCARLGTPAAITATAHKLARIIYFMLKYRKPFHDLGANYYEQQFRARVLRNLTRRAAVLGFRLEPAAQSVS

SEQ ID NO: 471967 - protein, 311 aa, unidentified
MYYIGIDVSKKDLSVFDGKDLKFINQEGLKSFKKYLKKKVNFSDLVIIFEPTGVYSLYLKEFCAENSIKAYIVNPKKSHNFTRALGRRSKTDKIDARTLYKFHKLIEAKDIKVPKIDQQAKTLSSYLTSYEFALKQRISLSHHLESLRDKRLIALMRKDLKRAKNLEDRIFDDIKEYLGKNQDLKEDYQRLSTIPGIGEKAAIALLTLFKTYQGTNRAQITALAGLDPIKRESGTSVKYKVTISKNGKGIYRKILYLPTLCATVHNQKIKIFYQRLLANHKTKKLAVIASMRKILLIAHAMYRDKTEYVAV

SEQ ID NO: 471968 - protein, 447 aa, unidentified
MKALPILNPNAAGIDVGSEQLHLSIAGDEPVVFGTFTDEVYRLRDYLKAQGVSSVAMEATGVYWLYVYAVLEAAGLEVVVVNGRHVRNLPGRKTDMADCQWLATLHAHGLLRGGFVPPAAIRRLQDYQRLRADHIIGASSQVQKMQQALERMNIKFHDVISDLDGVSGLKVVRAILAGERDPQALLLLCDPQIQKKKGDRVVRSLKGTWAPEHLFALSQGLAAWEFYQKLLSQCDEQIEVVLRELAGPEPPPPTAPAEIPGKRTGKNTPQIQQLHQLLLRLCGGRDVTAISGIGDYLLLQLLAETGTDLKAWATEKHFNAWLGLAPGSRQSGKRKGSVKVQRNRAGRLFCAGARSLVNSVDKALGGFYRRLAARKGGLVALKALARKLAELYYRVLRHGLAYAEQGLRAYEQKYADSQRRLLGKLAAKQGFKLVSLQLQAPPTGGTA

SEQ ID NO: 471969 - protein, 361 aa, unidentified
MKIIGCDFHPAMQQIAVFNTETGEYSERQLSNGDGEAERFYRALPVPSLIGIEACGNSHWFIDLLERLGHEVQVGDAAKIRASYVRKQKTDKRDAGHILTLLLEKRFPQLWTPSRQERDQRQLLIHRHKLVQIRVRVKNGLQHLALNQGVQKKDKLWNKTGQKILKELPLEGWTAVRRQDCLKLLAQLDQQIDLLDKAVEQAAESHRQARWLLQQKGVGPITALAFALTIGDVSRFQHSNQVASYLGLIPTEYTSAGKRRLGSITKQGNCFLRMLLVEAAQSVTRLDPQFHKHYVHLCRNKPKAVAKVAAARKLAVRLYWMLRTEQNSQKAVHIESSSGVPLVSESQTETLIERSRIQQRA

SEQ ID NO: 471970 - protein, 315 aa, unidentified
MTTSRGKFVGIDVAKDKLDIAILGEKKESQVGNNEKGITSLVKKMKTLKPDMIVVEATGGYQRAVVLGLYEAGLPVAVVNPVRVRQYARASGLLAKTDKLDAFNLAEFGKQMKPRRFEAKSEAERYVSALLVRRRQLEEMLKAEKSRLRTVPAAMRNSVERIIEVLKEEIKQLEKELDKFIKENEDWQEQEEILKSAKGVGRITAATLLAELPELGKLDRKKIAALVGLAPMNADSGKKRGYRKTKGGRMEVRNVLYMSTLVATRYNPLIKAQYQQLLKRGKVKKVALTACMRKFLTILNAMMRDKVPFRQMVTA

SEQ ID NO: 471971 - protein, 430 aa, unidentified
MKQSELLHSLFVGIDVSMKENVVHAMPFSPEDHPGHAHLRFSAPNTPAGSVGIVEKVSDFLKFYPDVIQVVIALEATSVYSFHLATFLSVAHFNGHIPAIVYSVNPKEIHAYKKTFTDVGKDDYVDAMVIADYARSNKIRSRPWKGPELLGLRVLTRLRFRIAKLMGIVKNSTGNSIYLECSGLMTGENPFCNVWTTTCQELLTTFQGPDEILSLPDEELLNFITEKGHGRFSHPLDVVEKVKKAARNSYRLDKRVYEPLTSGLSVSFFIIHSLEAAIKKLDKSIETMAKSFSSDSYQILLSIDGVGPVIAGGLLAEIGDIKRFKTDDALAKYIGLTWRGKQSGQSESPVKHLSKAGDVYLRYYVLLATGQIINYSAKYREAYERIRSRKTLFPYRAALNLVARKIVRLIFTLLDKHQLYSDNKVMVTLE

SEQ ID NO: 471972 - protein, 343 aa, unidentified
MQTITTIGFDIAKSVFQVHGVDATGQVVIRRQLKRRQVLAFFEKLPPCLVGIEACASSHHWSRELQALGHTVRLMPPAYVKPYVKRQKNDMADAEAICEAVTRANMRFVPTKTPEQQSCLMLHRTRHLFIRQQTAVINSIRAHLAEFGIVAPVGRKGVTELLHVVADLNDERVPEVARACLAALGTQLLALKEQILEFDRMILAWHRSNQTSKRLHYIPGVGPMLATALVASVADPRTFRSGRNFSAWIGLVPKQHSSGGKDRLGSISKQGDRYLRSLFVAGALAVIRYAKIHGTGHRPWLAALLGRRPTKVAAIALANKIARMAWAMMAKGERYKQPVALAR

SEQ ID NO: 471973 - protein, 399 aa, unidentified
MNAVGIDVSKGKSTVAVMQPLGVVAASPFEVAHNESELRELAKFLKRLPGETKVVMEYTGSYYEPIARFLHNEGIYVSVVNAILIHNYSGNSVRRAKTDKKDSVRIAQYALDRWLDLREYIPAEETRSTLTLLNRQYSAICKHKTQLINNLISLIDQSFPNANEFFDSPVRQSDGHMKWVDFIIKFPHCDCVSGISRAAFKDKYSRWCKKQNYNYADGKADEIYDHARSCVATLPDSECVRAMIQQSAKLLNSTLETAESLRKLMTATAEQLPEYDTVLGMYGVGRVLAPQLMAEMGDTRRFPSRKAITAFAGLDAPPYQSGTVDVKSRSISKRGSPHLRRTLFLVVETYLKRKPADEPVYQFLDRKRSEGKLYKVYMTAAANKFLRIYYAKVNQVLNA

SEQ ID NO: 471974 - protein, 353 aa, unidentified
MRIVVALDVHRRQITYKTLDRESGEVRRGRIVPATRGAVREWLEQFAGCEAEFALEGTTGWRFVVEEIERAGQRAHLADPAETAGKRGRKRRAKTDNADCDLQLKLLLAGELPESWIPPAYLLELRTRVRMRKVLIDQRTAWQQRLQAQLFHQGVAAGLKPRTRAGREALAQAELSPAGRELVALALRMLETIDRELAPLDRALCAFARRQPGCRALIANLYGVGVISATAILAELGDCRRFTSSDDAVRHSGLDVTVHQSDSKRAAGHLSHQGPELLRWALFEAAHQSARRSSPDHDYYLQVAGRIDHNRACLSVARKLCRRAHHILRELGDQALAPVERERQTDEAIQAAA

SEQ ID NO: 471975 - protein, 409 aa, unidentified
MDVVITRCAGLDVHQATVVATVRVPDDQGGRRVVTETFGTMTPDLLALRDWLQALGVTQVALESTGVYWKPVYYVLEDRFTLLLINMQALKRVPGRKTDVKDSEWLAQLLECGLLRSSFVPPPPIRELRDLTRYRVQQVRDRSQEVNRLCKVLEDAGVKLTSVMSDVMGVSGRAMLTALTQGTTDPTTLADLARGKLRKKLPELRRALHGRFRPHHAFLIEQILAKIDFLDDVLERLTAEIDRRLVSFEPMLTALDTIPGVDRLGAISIVAETGGDMDRFPTAGHLCSWGAMCPGHNESAGKRRSGKTRKGNRYLRATLIQAGLGAMRKNGSALQARYHRVKRHRGHKKAVVAVGHQILEIAYYIMRDGVTYDELGADYFDRRHTERAIRRHVRQLEALGFHVTIEKAA

SEQ ID NO: 471976 - protein, 335 aa, unidentified
MKHYAGLDLSMESTQVCIVDDNGRKVVSEKVGSSPEAIAMMLERYGPIERVVIETGRMSPAICLGLRELGVPVACIDARQAHQSLKAMKANKTDPHDAAGLAQLARTGFYKEVHVKSPAAHGVRSVITARSHLVEARVRLDNTIRGLCATFGYRPGAGQGKAFLERIMQAAHIPGLGDAIASLLSVRAELVEQIKEMDRRLRLIASQSQACEILMTIPGVGVQTSAAFAAAVDEAGRFRQSRNAGAYFGLVPRRHQSGELDWTGRITKQGDGSVRKLLYEAANSILTRSRETFALKTWAMKIAKRRGLKKARVALARRLAVIMHAMLRDGTLFQA

SEQ ID NO: 471977 - protein, 412 aa, unidentified
MEVVHAVCAGMDVSKTDAKVCVRVAGAGRRKTVETVTTWGAMTGQILDLREHLAAAQVTCVVMEATGDYWKPFYYLLQDLPGVEVMLVNARHVKNLPGRKTDVADATWLAQLGAHGLVRGSFVPPAPIRRLRDLTRTRTAITRERGREAQRLEKLLEDAGIKLSVVASDIVGVSGRAMLEALIAGQRDPGVLADLAKRRLRPKIPELTQALQGRFEEHHAFMARVHLDLIDQHTAAIEALTARIEQVIEPFRGFRDLICTIPGISTLTADVIVAEIGDDMSRFPTAAHLASWAGTTPGSNESAGKVKSSKTRPGNPYLQGALGAAAMSCAQHPGTYLNAKYRRVATRRGPQKANVAVQHAMLVAIWNMGTNGTLYDDPGADYFTRLNPERARTRAVQQLESLGYAVTLANAS

SEQ ID NO: 471978 - protein, 357 aa, unidentified
MESQEVKYVGVDCGKKSIEVVRINSENSLERRQFSTTESGINNLLQWLTLNDIVGLEAGSQSFRIAKSILNKGVQVIVLNPGNLATIYQSLKKTDKEDSLKIARLIQRHPIEELPTVPIPNDEEEDNRRLCTEQENWTRQLTQSKNRLHSLFTQAGLTHITKKHLRTKANREISVALLPSRYQKEAERILKVLDLVEQNLKLIEKEIQEALKKNKAYVQTIMSMPGIGMITSLAIMSYMGDCKRFSSAKQAAYYAGLVPRVDISGDTVRYGRIINRGCHSIRRVIVQAAWSLVRCQHGGKVKEFYQRLYLKKGAKKSIIATSRKMIEVLYVMIRTGKLFDSMPENILNRKLTQYGLM

SEQ ID NO: 471979 - protein, 414 aa, unidentified
MEVKYQRCCGIDVHKQTVVACVMVSGEQPGEPDKETRTFKTMSDDLGALARWLKAKGVTHVAMESTGVYWKPVYNLLEGQFEILVVNAERIKALRGRKTDAADAEWIADLLRHGLLSGSFIPTAQQRALRDLTRFRSSLVEDRARAVNRLQKVLEDANIKLASVATDVTGVSGRAILEALLAGQTDPQVLAELAQGRLRKKIDLLQKALAGRLKPHHRVMVTELLGQIDHLDETIERLNAEITEQMRPFEAEIERLDSIPGVSRRVAEVLVAEVGVDMQPFERAENLASWAGMCPGNNESAGKRKSGKTRKGSRWLRAALTEAAHGAARSKHTYLKAQYHRIARRRGAKRALVAVGHSILIIAYHLLTRQQTYQDLGENYFDERDHEGVKRRAVRRLEQPGYQVTLAPLMAVAA

SEQ ID NO: 471980 - protein, 342 aa, unidentified
MIVTKTICMNYQFVIGMDISKHSFDLAILLADSPKNIFHNAFNNDVKGFNEMMNFINETIPGFDVTRTLFCMEATGLYCNSLLQFFETQRANVWVENAVQMKRSMGIKRGKTDKVDSISIAKYAFKNAELIRLWKPGSAVLEKIKHLATLRERMVVTQKRLLTPIEELRDAGQGKMADLLYKSIKKSINALDADLKNIEAKIMEYLREDASLNHLFSLITSVVGIGFVTAINLIIHTQGFNVMCDSRKLACYCGVAPFPYQSGISIKGRTKVNHMANKKLKTNLHLAALTAIRYDPELKTYYDRKVLEGKSKMSVINAVRYKLLARVVSVVKNDREYVKKTA

SEQ ID NO: 471981 - protein, 345 aa, unidentified
MKIIGCDFHPSFQQVAICDLETGEFQERKLSHADGQAERFYRELGKPALIGIEATGNSQWFLDLVQRLGHEIRVGDAAKIRASYVRRQSTDKRDAGHILTLLLENRFPQLWRPDAAMRNQRQLLRHRDKLVEIRTKVKNSLQHLAMNRGMQKKSRLWTRTGMEQFQQLAMPGWASVRREDLLLLLKQLNHQIEQLDQAVKQAAEQHPQAQLLMSQPGVGPVTALAFVLTVGEVTRFASSKQLTSYLGLVPSEHSSGSKRRLGAITKQGNCFLRKLLVEAAQTTVRKDEGFRKQYQHHCRHRPKAVAKVAAARKLAVRLYWMLRSNTGYPEIAHIESNPRVPLGEV

SEQ ID NO: 471982 - protein, 475 aa, unidentified
MHYIGMDSHISTLDFAVVNESGRLVKASRVATSVNGFVEFVKTVPPPRTIYMEEGTLAAWALETCVRFREKLVITDAKKNHWIGSSGQKGDSIDALKLAQLARGGYIKEIHHPVGQRRRFRELMIAYHDTVRSTTRIKNKIKARFRQNGIQCTGVTVYSETYREEWKGKLPQEATLILILDGLWRQLEQSEQTEKEILAAARVQAKHYPEIKHFEALPGIGFISAATISAILETPYRFADKRKVWMYAGLELMIAYHDTVRSTTRIKNKIKARFRQNGIQCTGVTVYSETYREEWKGKLPQEATLILILDGLWRQLEQSEQTEKEILAAARVQAKHYPEIKHFEALPGIGFISAATISAILETPYRFADKRKVWMYAGLGLMKRSSGGKLYSEKLTTDYNRLLKYTLKQAAEAAIQAKDNPFRRKYLDMTLLHGIAPHRAKLTIARDMLATMWAMWRKGEKYSPEIREKTAYKQG

SEQ ID NO: 471983 - protein, 315 aa, unidentified
MQTPVDIGADISKDYVNVSCATHVFPNAKLLNRRAVLLAWLKRLPAGTRIGMEATATYHELLASLAHRLGLVVYVLNAKDVHHYAKATAQRAKTDRVDAALIARYVAKEHNQLHVWYPACPAQRQLQRLMRRRGKLTRTRASLRSSLQGVPSLRSDLRALLKHFDSLIAKLDTQARALVSRNVEREQAFGRLDDIPAVGNAVGIALLATLERWALPRANSFVAFLGLDPRADESGTRHGRRRLSKRGDPELRRLLYTAAMSASRTRVWAPLYQRAIARGLSRVQALVVLARHIARTAWSIYTHKTQFEPARVQNS

SEQ ID NO: 471984 - protein, 344 aa, unidentified
MFNLITGGEVMEQITTVGIDLAKRVFALHGVDAQGRVMLRRTVRREQLLETIATLPPCLIGMEAGSGAHEWGRRFETFGHRVRLMAAKFVAPYRQNGKNDGNDAEAICEAVGRPKTRFVPLKSAEQQAVLSLHRVRQGFVTERTATMNRIRGLLAEFGVVLAQRSPTVRRQALKAAETLPVLARRAIEDLCAQVRILDERIDSYDRDLQQQAQTSEAARRLMQIRGIGPLSALAIVATVGNARDFNNGRQFAAWIGLTPQQHSSGGKTRLGHITKRGDAYLRSLLVQGARSALHTATRHRDRVSRWACELEQRRGYHRTLVAIAAKNARIAWALLSKGETLRPS

SEQ ID NO: 471985 - protein, 391 aa, unidentified
MTKRKTETVNDLSRCLDALDMDATLIAVIEMSQSSWLVAGIVPGVERQPLKKLAIDEGALLNLLRRWRAEAEKEGHRITRIAVAFEAGHDGFWLARWLAAQGVETHVIHASSVAVTREHRRAKTDRLDTELLKRGFLGWLRGERGHCKMVTVPTLADEDAKRPSRERETLVGEASRIITRVKAAFVRLGIRSFNPKLKTAAARLETLRTPAGEPIPPNTLAALKRDLERHRIVKQQIREIEQTRLERLGKAPAEGSHAMVRLLARVIGIGVETADMLVQEVLSRNMRDRRAVARYAGLTGSPDESGSKRREKGLARSGNARVRRGMIQLAWRFLMFQKDSALAQWYRQRTANAPSTRKTLVVALARKLLIALWRLARDGVVPEGVRLRPAA

SEQ ID NO: 471986 - protein, 358 aa, unidentified
MTQVKKLDFSGTTIYCGVDVHKKSWRVNIQDSEFELEDFTQNPDAVVLYKHLARRYPGAVYKIGYEAGFSGFSMQRTLSQSGCECWVVNAADIPTSDKDKKQKQDKADARKLCNYLQLKKLKGIHIPEAEWEHARTLVRTRERIVHNQTRCKNRIWQLLHFSGLPAPAAQQEGRYWSKRFTDGLQEMDCGGSIHLQQSLQLHLKDYLQTRQLLLEATRSIRALCREEKYAGDIKLLRSIPGIGEINAAVILFELQDVTRFKRFDYLCSYVGLVPDTSDSGDTKRTKGITHRHNYYLRTALVESSWSVVRKDPALLMKYKAYCTRMEKNKAIIRVAKHLLSRINFVLKNKKEYVTGVVA

SEQ ID NO: 471987 - protein, 387 aa, unidentified
MSPTIAARRPAAVDYERTLILSIEVSNQSWVLAAQVPGLPHTKAKRTVDPEAEALMAAIAGYRSRAAAMGRSIERVIAVYEAGWSGFWLARWLTRHKVEVYVIQPSSVPVDRRMRRAKSDGIDAELLLRTLLAWLRGEPRVCSMVPVPDEADEDARRCIRERTELISERVGLTNRIGAILATLGVTDYNPLLRNRHHRLAELRTGLGEPLPPNAHAKIARLLARLELVLAQIAELERERDAVVETETPDHASKMIQQLISLRGIGVQSATVLVREAFVRRFANGKALGSYAGLTSSPYSSGGIDREQGIGKGGNRRLRTVMVELAWLWTRYQPAAAQVCWFRERVGSTGRRVRKIMVVALARKLLIALWRFVIDGVVPEGAVLKPAA

SEQ ID NO: 471988 - protein, 492 aa, unidentified
MAAEEKRKDADGTDGSAAVPGGHGGDGAEVSEDQARVIERAAAIDVAKGFGMVCTRVPGSRADRRLQKVWRVEATYRAVMALMDHLRAEGIQRLVLEATSDYWRIWYYLAEAAGLEVWLVNARDVKHLPGRGKSDRADCVWLCKLNERGMLRRSFVPPRAVRDLRMLTRTRSRLAQDQARHQARVEKILEDALLKISVVISDLFGTSGRRFLDALVAGERSPQALAALGDYRLKATRQELAEALTGQFRDVHALEIKTHLAILDVINQQIGRLDEAIEAQLALVPRTAPACTSCGEIGGGHAPGCAGEHEVLPSLADRLDEITGVGVINARVMIAELGTDPSQFPTPGHAAGWARLTPRTRQSGETAKPGRTGKGNSYLRGALGQSAMTAARTDTRLGAMYRRIARKRGKQKAIVAVSRVICEIAWILICDPGARYAELGADYYAPRSRERRTRDKIRELRRLNPGMKVLLVPADGAVPAGQAAVPDAGTAA

SEQ ID NO: 471989 - protein, 445 aa, unidentified
MLPIIYKRIAGLDVHKKTVVATRMRVVTEEEVEQETKTFGTTTPELLELYDWLNEWDLSHVAMESTGDYWKPVYNVLEGRFETWVVNAKHVKNVPGRKTDVIDSKWVANLMMHGLLRASFIPPKPQRALREMTRYRTTLVQERARVVNRVQKLLEGANIKLSSVASDVMGVSARAMLAEIAAGQTDVALMADLARGRMRNKIPELEKALTGIVQEHHRFLLAQQLGHIDFLDEQIETLSVAIGQQLESMRWPDGPSKPSTGVDAEDETGVTDESVLPLTWNAAVALLDTIPGVDRRTAEVMLAEMGLDMSQFPTAGHLASWAGLAPGNHQSGGKRYSGRTTKGNRFLSSIMVQGAWSAVRTKDTFLKSRYHRLAARRGKKRAIVAVAHSMLVSAWHMLTYQQPYQELGGDYFDQRKKETKVSYLVRRLEKLTGGSVSIELQSAAA

SEQ ID NO: 471990 - protein, 415 aa, unidentified
MISAVVERCMGIDVGKKFVVACLMVGPAAEDPRVELRQFGTFTEDLLRLRDWIAAEQCTHAVMESTGSYWKPVFNVLEDAVTVVLANPHEIKMRKGHKTDWKDSRWLAHLLRHGMVPASFIPERGIRELRDLTRRRRQLISACVSEKNRIQKILEDANVKLGSVLTDIFGVTGRAILAALLEGKLSAVEMANLAKKLAKRKIPEITASLEGHRLTAVQRFLIRQSLGHLEFLQASIRELEAETRTRIEAVEEYHRTVLLLQTIPGIREEAAAGILAEMGPRMEQFPSEKHLSSWVGLCPGNNKSAGVERSGHIGKGNHWLRSLIVECSWAASLKQGSLFCSKYRQLAPRIGNKRAVVAVGHAMVVLIFQMLRSGAPYRQTAIEAALESKRRKSIQRHVKALNKLGVVLKDIRYPD

SEQ ID NO: 471991 - protein, 343 aa, unidentified
MKISRVGVDLAKNVFQIHGTDAHGKTVWKRKLTREKWIEAICTKAPDGCEIGMEACAGSHHWARRLSEYGFKVKLIPPQFVTPYVKSNKNDANDAEAICEAMSRTNMRFVKAKTVEQQDIQAIHRVRSEVMSQRTAKANQIRGLVAEYGLVAPKQVSSLRKALPLWLEDAVNGLTPRFRHLVSGLWNDLNYLDERIANLDIEIREVANTDPVAVRLQQLRGVGPLVATALIATIGNGDQFAKGSQMAAAIGLTPRQFSSGGKDRLMGISKRGDAYLRTILIHGARSVIAGAKHRDDRLSIWVTDLAKRRHTNVAAVALANKTVRMAWAMMKNNVDYDPEYAVA

SEQ ID NO: 471992 - protein, 340 aa, unidentified
MFYVGLDIHTQRIAFCVLSDKGQLVQRGQVRGLDEVLRILEALPDRFEVCYEASCGYGHYHDLLQPLAARVVVAHPGRLRLIFRSRDKNDRKDAERLAKLLYLGETPAVHVPSQEVRTWRELINCRGQVIAKRTRAKNALRALLRGAGVVPPRHPALWTKAGLSWLRQLELPTPSQQLRRDLLLEEIETLLRQVRRIEQQLNQQAQHTPAVAQLRSIPGVGIRTAEAVAAFVDDPDRFRNAKAVGRYFGLVPCQDQSGDRNRLGHITREGAPVVRQLVAEAAWQARRRSPTVRAYFERVQRGDPQRKKIALVATAHYLVRVMWALLKRGTTWEENPAQAK

SEQ ID NO: 471993 - protein, 316 aa, unidentified
MSTPPPYIGIDVAKAELVVANGDAELFRVPNTSAGHRDLVKRLRQLSPAAVVMESTGPYGRDAAAALTAAGYHVAIVQPGRVRAFAASLGIRAKTDPIDARVIARFAAATKPRCFTPSSAAITRLRALNDRRDQLIDMRIQEENHLESVTDPLVAKDLRANIKRLLAAEKTYTKHMTQAIAHQPELQRLGDRLQQEAGVGFQTAVTLMTHCPELGRLNRQQVAALAGLAPYDRASGKHDGRRAIFGGRQRLRRALYLAAVTASRCSEWLKPYCDRLKAAGKPPKVAIIACARKLLVRLNALAAELLQDPQKEPLKA

SEQ ID NO: 471994 - protein, 425 aa, unidentified
MNFNTNDKINQVSENTLVIGIDIAKHKHYACAIDDRGRVLQKSFPIMQSRIGFENFYERLMALKAAYDKQEILIGFEPTGHYWMNLAAFLTNYGIPFVMVNPMHVNRSKELDDNLQTKNDQKDALVIARLMRDGRFSYPRHLEGIEAELRNGATLRSKIQEDLNALQNRIIRWLDRFFPEFTQVFKSFGKMAYAVLEMTPLPTDIVGKSPEELLFLYRQVDGMKSPQLPKAKQLVEVAESSIGLTEGLVMAKFEIATLLSQHKLMHAQLDELTAQLVELAKQMMEYEYLASVPGIGDVTIVDLLSEVGSLAQYTHPRQLIKLAGLTLRENSSGQQKGQKRISKRGRRKLRALLFRVMMPLILHNPAFKQLHEYYTTRTVNPLRKKQSIVVLCGKLLKVLHALCKRKTLFNEHQMMNDFARLQTAA

SEQ ID NO: 471995 - protein, 404 aa, unidentified
MGDENSTFYAGVDWGEEHHQLCVVDDRGQRRAEEQVSHDVTGLARLRTQLLRFGPGLPVAIERSEGLLVEHLQAHGHPVYPVSPRIAARARERYKVASVKDDRFDAYVLADTLRFEHQGWRPLSVPSPVLAGIKALTRDRDRPLETQQAIESQLRMILESYHPAPARLFSSVDRQITLSFVLDYPTPATASRVKATRMSGFLTRHHYTGRTSGQVLAERMRANLLTGSAGTVAGKSFSAQSYARLLGLLNSQLAEYDDAIASAVSEHPDAPIFASFPGVGPVLTGILLAEIGEDRGRYPDPAVLLAEAGLAPVTRASGRSHIVRFRYAANAHLREACMWWAFNSMKTSPWAAAAFKQAREDRKQHYHRALRGLAARWTRILWRCWQDGATYDPHRHTSAAALTA

SEQ ID NO: 471996 - protein, 345 aa, unidentified
MTIVKTRAITGGVDTHADVHVAAALDPIGGLLGVREFPATAAGYAGLLGWLGGFGTIALAGIEGTGSYGAGLARHVTAAGIRVVEVDRSDRQDRRRQGKSDPLDAVSAARAAQSGRARGAPKGRDGAVEAIRALTADGRSARSERVQTINQARALVLTGPDDLRIRFARHTAAGLVSGLASLRPRPGDVVGYATRIALREPGRRAEFPGAQLERLDELIGPLVAARAPGLLALHGVGPDTAALLLVAAGDHPERLRPEAAWAHLCAVAPLQASSGKVTRYRLNPGGDRQANHALWRIVLTRLSAHPPTLIYVERRTKEGKSKKEIIRCLKRYVAREVYRHLRAAG

SEQ ID NO: 471997 - protein, 321 aa, unidentified
MSRIWIGVDVCKDFLDAHARPAGVKHRFDNMPAGIEQLVAWAQSFTPQRVVLESTGPYQKAAVGALLAAGLPAVVVNARQVRDFAKGTGQLAKTDVIDAAILAHFGEVVATVVRPLLPKETLEFRDLCDRRGQLVRMLAAEKNHRHAAQGAAPRVLKNIDKHIAFLRRQVEELEGRMDRIVANSETFQAKDEILQSIVGIGPQVSRTLLVHLPELGQGSRQSIAALVGLAPFADDSGTSKRIRHIRGGRAKVRIALYQAAVSAIRFCTTMRAFYASLKARGKASKVALVAVARKLLVLANALLRTGTRYQPRTNSVCLENA

SEQ ID NO: 471998 - protein, 342 aa, unidentified
METKRYIGIDLHRNCFTACVRLENGRNYLTEWKLEELLRFTKKLRSSDEIAVEMTGNTRFFHQAVAPHVARVVAVDPNQFKVISQSVKKTDPNDARNLALYLAKDLLPEVRMKEKTEAQIASLTQTRDTLVKLRTALKNKINNIFSAYGINLSKESLGSEKGLRAVLETQIDLLVDLEVKILVEQIQALNKSIAQLEETISRESQKLQGHKNLTSIKGIGGLSAGILLSIIGDIRDFTDEGKLAAYFGIVPRISNSNETERSGRITKRGTKLGRTTLVQCALIAQRYSPYLKNYYERKKSRGTGKAIIALARKFLGIIYRTLKNHWVFEDFPNFVLAEEAKV

SEQ ID NO: 471999 - protein, 379 aa, unidentified
MNQYNTLYVGLDVHKESIAVAYAPEEPGTEPIYLGPIGTRQCDIDKMIRQLHAKAPRLRFVYEAGPCGYWLYRSLLKSGLECIVVAPSLIPRKPGDRVKTDRRDAVQLARLMRSGDLNPIYVPNIGDESIRDLCRLREDMMNDLRAAKQRLKSFLLRHDVRYTGRASWSPRHLRWLAQEVSLATPEQQIVFQEYLRSVTHLAERLVHAEEELREHVSGWRLEPVVRAYQALRGVQFHVATTIAAELGDITRFDTPRQLAAYVGLHPSEYSSGGNRHQGGIAKTGNSHARRVLVEGAWSYRHPARVSKEIQVRQESLPEEIRDIAWKAQVRLCKRFRRLSARGKHQNVITTAVAREMLAFMWAIAKKVQIAEHSQTALAG

SEQ ID NO: 472000 - protein, 320 aa, unidentified
MQSVCGIDVSKDRLDIMVLPEQQCFSVRNDATGWVELVERLRGFSISAIGLEASGGYERGAMRALLAAGMPARQVNPFKLRQFARASGVLAKNDPLDARMIASFVAIMPTQPAQLRAPAIERLAEMLAVRRQLSAEKVAAENASRLLEDAMLQRLSRRRIRRLAADIEMLDRHLAEIVGTDAALAHRYRLLTSMPGVGLVLACTLIALLPELGRMSRKQVAALVGVAPYAFESGKFKGRRCIWGGRAPVRNVLYMGAMSASNWNPVLKAFHDRLKAAGKLPKVVIVAIMRKMITALNAMVRDDVVWADHLSGRHSVPTAR

SEQ ID NO: 472001 - protein, 341 aa, unidentified
MNVKTIGIDLAKNVFQIHGVDEHGKRLFNKQLRRAQMASFFANIPPCLIGMEACASAHFWANKLISMGHNVKLMAPQFVKPYVKTNKHDAADAEAICEAVTRPNMRFVPVKTAEQQAVLALHRSRQSFIKQRTAQANQIRGLLAEFGIVVPRGIQQLQRRLPELVEDADNPLPVLFRTQLSLLQHHMAYLFDVIATLDKQIEQCYRQNALCQRIGKIPGIGPVTASALIATIGKANNFENGRQLAAWLGLVPRQHSSGGKQVLLGISKRGDTYLRTLLIHGARAVLQSAKHKQDAGSSWANQLMARRNNNIASVALANKNARTVWALLAKEREYCAPIISA

SEQ ID NO: 472002 - protein, 339 aa, unidentified
MNYTTVGVDIAKSVMQLHWIEPATGEIMNKPVKRAVFLEHFANRAPCLIGMESCGGSQHWARRLIEMGHQVKLMPAKFVKAFNTGNKNDAADARAIWMATQMPAKAIAVKSEAQQAVLALHRIREQKVKFRTAQINCLRGLLTEYGEVMGKSRAALDKAIPGVLERLADRLPAMLIESLLEQWNGLDGLDQEIAGIERRLHTWMKEDKACKAIAAIPGVGLLTATAAVATMGDPKAFTSGREFAAWLGLVPKQTGSGGKVQLLGISRRGDTYLRTLLIHGARSVLYHAKEPGAWVEQLGKRRPKNVVIVALANRMARTIWAMLAHDRPYDKAYVSVKPA

SEQ ID NO: 472003 - protein, 386 aa, unidentified
MYFVGIDISKYKHDCFICTETGEVIEENLSFTNTNEGFIQLLNLLKSLDNSQKIRIGFEATGHYGMNLKLFLEKNNYSFMEFNPALVKRFISTQTLRRTKTDKKDAMLITKYLISVDYKPHPKQFYHKYSLKSLSRMREKLVKQRSYYEIQITNVLDIIFPEYKPFFNNDFSKTCLFILNKYKSPNKIKNMKDFDSIRKISRGKFTSANFIKLKELAKNSIGISNDIFETELESLLTLHSQIEIEINKLETKIESIIKELNPPILSIRGIGTISCAGIISEFGDITRFKSADACVAFAGIEPSISQSGTESYTGHMVKHGSGHLRYFLMNAADYVFMHESIFTKFYYKKRSEGKSHRVALTHVAKKLVRIIYKLESENIIFNSNIN

SEQ ID NO: 472004 - protein, 450 aa, unidentified
MKIFIGIDIGKDFNLASFLNENGVEIDKRFKFKNNHLGFLSFKDNIDKLTYNCNFNYDDVLIGFESTGHYWINTDWFITEKLNIKTVMVRNDAVRHTRALNSKGKGKNDSLDSRTIAECLKNGYYFDVQGRKEDYIVLRRLTRERSELEKEIARYKNRFRAWLDVNNQIFLENFSNVFSAGALALLKVYPSPLDIIQDSYLEIREKLKEVGYKKINNTFKIYYEEARTYKNIINGITYADRLEINEYIEALEMYMKKKESLDEKIEALMNYLEGKVYTSLSQVKGMPVAQVASLLAEIGNVNNFKSARHLISYAGLNVQGEGSGKNKGYSWISKTGNRKIRKELYVITFNLIRHNDYFRGLYCYYKSYKRVNEKTNMEMLIALMCKLLRVIYGMLKYNIEFDLNEMLKNYDFRNINKEKFIDEFLGNSEKKQKIIPKEIEDIFLNNRKSN

SEQ ID NO: 472005 - protein, 286 aa, unidentified
MRLEPCRRRQGRVSFRQRLDEPEAETAVLQRLRRWKTAGQFVVEAQGLNRWFVNACQASGLRIIVAHPATLNLKRSGKKTDRRDAYELARRLWLGDIEKHARTYYPADEEYGKRKVVRIRHKCVALRQHVINQLRGLFGAYRLPAPQTVLYTPTSIAKLERVEFPTPELTVCVQTLVAALKALQQAIASLTRQIPQCAEAPRVAALKEQLPSVGAQTALTLDAELGDLKRFGNAKQLCAYAGLVLRVADSADRQSHGPLTKSGNTEVRWIVGQWALRLLASKALST

SEQ ID NO: 472006 - protein, 359 aa, unidentified
MKKPNTNTHDLTTTQNAPKAKSIKLGIDVHADSYRVVRQIDHATPQPAQKFTPEGFLSWARKQLELAEEVHCCYEAGPFGYGLHRQLEAMGIHNVVVRPQNWDEHHKGVKTDKTDALALAQRLSRYVDGNRKELAVIGVPTVEQELARSQSRQREQLLSHRLRLEAQGRSLLLYNGIRLKGRWWHPLPWLKLQNQLCPPLLELLTVIHRLLLTVQAELAQSTGRLEKAAKPQPHGVGALTSQVLEREILDWGRFKNRRQVASLTGMCPGVHASGGRSRSGPITKHRNRRLRTALIELAWRSVRFQPEYAPIKRWRLILMNPQVTSAQKKKAIVAVGRRLAIDLWRINTGRSTAAKLGLK

SEQ ID NO: 472007 - protein, 318 aa, unidentified
MIRYADEIQTALGLDVSQDSVTLFDSVTGQTLTIANETQALTAALDPLRNRDLAVCEATGGHEDKLLAVLCGLAIPVHRGDAAKIKAYIRSFGKRAKTDPIDARWLSRYAIDRSPGLMRWQPPEPCQAQISLLVSRRLDLVAMKRQETNRLKAPRGHLVADDIRDHIADLEHRIRTIEVQIEELINQHRDLTSRARALRSIPGVAAVLAPLLIATMPELGSLNRRQAASLAGCAPHPRDSGKLQARRHSSGGRRQIRPALFIAALAAARGKNPLADFYNALVRAGKPKRLALAALMRKIICIANARIRDAANLQPQLT

SEQ ID NO: 472008 - protein, 486 aa, unidentified
MNSIVLTANVQPNLDVNYIGMDVHSDNVVVCVRRNTINSSGQLVGKTIKTKKVVIKNSQEPLVELLSKYADGQQHIMTAESTFNWYWLADIAEDHGWNFRLADPCTVSQANIKAANDETDAEYLADRLRTGSLKSTSVLPRQLRGVRDLMRHRLRVMQEVSDKKVRLSNLYHNHCAHPMHGKLLAALQDAYDEINIDAVLESGICNNGSELIIGDLLTGLREAETRLAKIEAAVYGRIDEIDSYKAERMLLKTSMKGCGDVLSAIIVTEIGDISRFRTMGEFVSYCRLAPTSKLSNGKSKGQGNAKNGNAYLSWALTELATLMARFNEPIRRYLERKQEKTGLRVVAVRALAAKLARCVYQVLRKKESFDLGLAFGSKPTHGQMTAAAEAAQTPPEPALPPVPAVAGEHHCPAEESDAPIVVKEPVPVKSKRSTRKKAVSAASSEPAVAAEGRQTARKADRVKARCALTATPPSCAGTSCVKSRRE

SEQ ID NO: 472009 - protein, 351 aa, unidentified
MHRITIGMDLGDKKHQVCVLDEAGRIMQSVQVTNKGPAIEEFFLEYKGATVAIEAGSHSPWISRLLESLGCTVFVGNPRKLRFIWKNDNKFDVRDAEMLARIARFDPDLLCPIRHRGKQSHVDLALLKGRDILVKSRSCLINHVRGSAKAIGVNLPSCSSAAFARKAAGVLPAILAKALEPIIEEIAGLTEKIKAYDREIETISSERYPETACLQQVAGVGPLTALAFVLTLEESDRFAKSRQVGAFLGLTPRRDQSGETDKQLRITKAGNQYLRRLLVGCSHYILGSFGPDSNLRRFGLRIAERGGKNAKRRATVAVSRKLAVLLHRLWRTGEVYEPFFTARLNLTRKAA

SEQ ID NO: 472010 - protein, 293 aa, unidentified
MSANATSVGLDVHARSVVACGLDGRTGELFERRLTPDHGDIESWIRSLPGPVAVTYEAGPTGFGLARYLTGQGIECLVAAPSRLQRPSGDRVKTDLRDARHLARLLHLDQIVAVAVPGVEQEAARDLVRARDGVRGDLMRARHRLSKLLLRHGIVYCGGRPWTGSHDLWLRAQRRGALFATPGLGLAFDTAYDTVLATVARRDRLDAAITAMAAASAFTPVVCRLGCLRGVATLTAFGLAVEIGDWHRLTGSSIGAYLGLVPTESSSGDSRSRGSITKTGNGHARRLLIEAVC

SEQ ID NO: 472011 - protein, 364 aa, unidentified
MHDSTFIGLDVHKATISVAVAQGVRGGEVRHWGTIAHRPDHIRKLVEKLGAGGSRLHFCYEAGPCGYGLHRQLVELGHDCIVVAPSLIPVKAGDRVKTDRRDAVMLAKLHRAGELTSVWVPDAAHEAMRDLVRARATAMRVTGKARQHLQGFLLRHGRIYPGKKGWTGAYRRWLATVRFTHPAQQIVLQDYIDAVADAEARVERLTGQIADLLPSWSLAPVVDAVQAMRGVGFIVAVTVVAEVGDFQRFDNPRQLMAYLGLTPSEHSSGTSVRRGGITKAGSGLARRALIEGAWSYRMQARVSPKLLARLEALPQAVRDIAWKGQLRMCQRYRHLVAAGKAKVVVITAIAREMVGFIWAIAKTV

SEQ ID NO: 472012 - protein, 341 aa, unidentified
MIQSALIGIDLGKHNFHLHGQDKSGREVFRKKLSRAQMMQLFGNMPSCVVVMEACAGAHFVARQLAAMGHTAKLISPQFVKPFVKGNKNDFVDAEAICEAASRPSMRFVTPKTESQQTLSVLHRMRESLVHDRTKTANQMHGFLLEFGVSLPRGLTIMKRLTNVLAEHELPVRLTVLLQRLHDHFVYLDEQIRALDKELSSQLADDDLGSRLLSMPCVGPITASLLAVKMGDAKQYRCSRDFAASVGLVPRQYSTGGKANLLGISKRGDKHLRQLLVQCSRVYMQRLEHQKGALADWVRALLSRRHSNVVACALANKLARIAWAIATHHTQYEAGPDALNA

SEQ ID NO: 472013 - protein, 382 aa, unidentified
MDIIHACCAGLDVHKKTVVACIRSIGPDGTVSREVRTFGTTTAELLALSDWLEAHGVVPVAMESTGVYWKPIFNLLEGSFQVKLVNAHPIKQVPGRKTDVKDAEWIAELLQYGLLSSSFIPPPEIRNLRDLTRQRTQIVRDRATVANRIQKVLEDANIKLSSVASDVLGVSGRAMIRAIIDGEDDPDELAGMAKRRLRGKIPELKQALHGRVTEHHRFLLRSLLEQIEFLEGLIARFDARIEEAMAPFDEAAGRLRAIPGVGEKAAEVIMAEVGPDMTPFPTAGHLSSWAGLCPGNDLSAGKRRSGKTTKGSQWLRTTLVQVAWAASRTKDTIFSACYHRWAKRMGKKKALVAVAHKILVVVYHLLKNRTDYRENGKPVKVA

SEQ ID NO: 472014 - protein, 456 aa, unidentified
MKNFYLGADVSKGYCDFMFLDAKKRRIEQNFQLDDTFDGHQKLYHILSCLCDQHPDAQIYAALESTGGYENNWFDALVKFQSSLPLKTARLNPCGVHNNSKAGLERNITDPISAENVAKYMIEHPEYVSYQQHDPLTSLRKQWSFVKMLSKQKTQLLNQLESNLYAANPEILGYCKNGVPHWVLSVLARFPTAAKLAKAKKSSLASIPYVTEQKANKLIHSAKKSVASATDQITAQIIKATVKQIRQLADAIEAQEKILTQTCSIPEVQLLKTFPGISDISAIGLILEIGSVERFATAKKIASFFGLHPRYKQSGDGSWGFHMSKKGRVAPRQILYMVAMSAVQCNPLIAEIYLKHTEKGMKKKAALGLCMHKICRIIYGMLKHNRAFDASIDRNNRKKSLKHNTKNRKDKRRRYQSFDTNAPISARQNKKRKERKQSQSDNIAHNGIIEASVPIS

SEQ ID NO: 472015 - protein, 414 aa, unidentified
MRIVYQNVAGLDVHKKTVVAAIIVQQADERWRQERRTFGTMTADLLALSDWLMEHGVTHVAMESTGEYWKPVFNILEHNFEVILVNAQHLSRVPGRKTDQSDAEWIAELLQHGLLKASFIPPVGQRELRELTRFRATFVRERATLVNRVQKVLESANIKLASVASDVLGVSGRAMLEALIEGQASPEQMADLAKGRLREKRDVLVKALEGRVKPHHRFVLTELLCQIDSLEETIARFDQEIADYCRPFEEAVVLLDTIPGVARATAEAIVAEIGTDMSRFPTADHLASWAGVAPGNHESAGKRHSGRTRQGNKPLGAALNQAANAASRTKNTYLSAQYHRLAPRRGKKKAIVALMHSILVMSYYMIQRKEPYQELGGNYFDQRTPEVTANRLVKRLERLGFQVSLQESSITAAV

SEQ ID NO: 472016 - protein, 392 aa, unidentified
MYIVGIDIGKNHHEASIVSPEGKQIGRSLRFATTHKGADSLMSFIFKNIGNSPCVFGMEATGHYWYPIYSFLKAKGYTIYVINPIQSDSLRKMYIRQTKNDSIDSFLIAEVIRFGQFGTTSMADENILAMRQLCRYRDSVISSRTEIKLRIGTIMEQIFPEYEKQFSSLWVSTSMGILEKYLTPENIENAPIDELFEIIKDKSHNRLTKAKAISIKEAAADTFGIKIAQDAFSFQLKQLIDRMNFLDKQIEALDIEIMKYYEQFDCYLHTIPGIGIIGAATILAEIGDISRFKNSSALVAFAGIDPTVRQSGEFNSTHNHMSKRGSPYLRHAIFLAATTCSFHNSPLNAYYKKKRDQGKHHLTATGAVARKLTTVIYAVLRDSKPYEPKKFC

SEQ ID NO: 472017 - protein, 317 aa, unidentified
MSKHSMICAGIDTGKRKLDVAIKGQADELQVDNSPDGHRALSGWLRQRRVKRVGIEASGGYEQAVVAHLRRDKFEVVVFQPAQVRAYAQFHLQRAKNDKIDAALIADCTAAVQQIHAPPDPRLAPFAKHQTLIEQITEDISRFKNRHESCREQRIGRLWSEEIARLKGILRSERKQLVAAIRQYPDLAERLALIASVDGVGLATAVTILVRMPEIGRVTREQAAALVGLAPYDDDSGDHVGARCIDGGRERLRKSLYNATLAACFRWNAQLIAIYERLIAAGKPHKVARIACARKLLIYVNTVVERGTPWVQNPTAA

SEQ ID NO: 472018 - protein, 431 aa, unidentified
MNRPTMLFVGVDWAKDNHQVCVVDGESTIEAERVVDHTGPAIAAFADWLYQLAKGEPETVAVAIEIPRGSVVETLIERGFPVYAINPKQLDRFRDRYCPAGSKDDRLDAYVLADSLRTDMHCYRRARMDDPDIIQLRELVRIADELKGEANRDGNRLRDLLHRYYPQMLQVSSSATEAWVLDLLELAPTPACAAKLRKARVGKVMKKHRIRRITPSEVLELLRVPPLVLAEGSIEAASTHIGFLIPRLRLLQQQKKLVDRQIAALLDAMSVVASASTEQVETTEEPSPEQRKHRDAEILLSLPGVGNVVAATMLAEAAWPLGERDYPALRAHAGIAPITRASGRKRRVGMRRACNIRLRNAVYHWSRVATQHDAHARARYAALRARGHSHGRALRGVADRLLNVACAMLRDGTLYDPTRLRSVSATAAQEA

SEQ ID NO: 472019 - protein, 418 aa, unidentified
MRVETDEPEIVERIAALDVGKAEVVCCVRVPGPGAQRMQEVRTIGTMTAALLGLGDWLAELGVSRVVMEATSDYWRAPFYLLEDRFETWLVNAHDVKHVPGRPKTDRLDAVWLAKVAERQMLRPSFVPPPAIRELRDLTRYRVDLLAVRTAEKQRVEKLLEDALIKLSVVVSDSFGVSGRAILAALIAGERDPVVLAELARGRLRAKTDRLVEALTGRFTEHHAFLLAQMLQRIDGITADIATVQARIEARLGELTDSVTRLDAIPGIGPVAAQMILAEIGTDMGRFPTPAHLTSWARFAPGVSESAGRKKGNAGTGNGNRYLARVVGEAAVSAGRTDTFLGERYRRIARRRGKKRAIVAVGRSILVIIWALLSDTDAQFIDLGADYYATRTNPERRVRHHLRELQALGYAVTLNPAA

SEQ ID NO: 472020 - protein, 405 aa, unidentified
MRYYIGVDWADAEHAIWVADEQGTRVLSRAVPHTAEGLAEWGRWLDEQRAAGVELWAAIERPDGRVVDFLLDHGVVVYPVNPKALDRARDRFRMSQAKSDPFDAQVLAEVLRTDQARLQALQPSSAAAQELKLLTRDYARCVREQTRLVNQLTATLKEYSPRALEVCEDLTTQRARAFLRAYPTPEALAALSPKRWQRFARTQRWSAAQVATLWTTLQAPQLPVPAHVVRAKARLAGILVTQLEAAVHAVAEYREAVTGFFGTLPAAEWATTLPAGHGTTVPTLCAELGDAPGRWASWQHLQGHAGTVPVTVRSGKYRSIQFRFACNKPLRTALHQFALSSLQHSEWARAYYDRQRARGHRHHAALRALGAKWLKIIFVLWRRHVPYREEHHLATMARQQLRQAA

SEQ ID NO: 472021 - protein, 343 aa, unidentified
MQAVTTIGLDIAKSVFQVHGVDAAGNVIVRRQLKHRYVLPFFQKLPPCLVGIEACASSHHWSRELQALGHKVRLMPPAYVKPYVKRHKNDAADAEAICEAVTRANMRFVATKTPEQQSCLMLHRTRHLFIRQQTAVINAIRAHLAEFGIVAPVGRNGVEDLLNIVADCGDKRLPDVARACIAALGAQLRMLKARILEFDRLIVAWHRSNEASKRLDDIPGVGPALATALVASVADPKAFRSGRDFSAWIGLVPKQHSSGGKDKLGSISKQGDRYLRSLFTAGALAVIRYAKIHGTKHRPWLTALLARRPTKVAAIALANKIARMAWAMMARGDRYKEPVALAA

SEQ ID NO: 472022 - protein, 333 aa, unidentified
MLPPNCGTATPYILRNTVGLDISKLTFDATAIVGNAEYSAKFDNDSKGLNQFSDRLKSLGCQNLHICMEATGNYYEEVADYFAQYYSVYVVNPLKISKYAESRFKRTKTDKQDAKLIAQYCRSAKESELVKRQKPTDEQYRLSRMTAAYAQIKSECAAMKNRHHAAKDEEAAKAYAEIIKAMNEQLEVLKEKIKEQTEKPNCKEGVKRLETIPAIGRMTAAVLFHHLTSSKFETSNKFAAFAGLSPQQKESGTSVRGKGKLTKFGNRKLRAVLFMPAMVAYRIRAFPDFIKRLEEKKKPKKVIIAALMRKLAVIAYHVHKKGGDYDPSRYKSA

SEQ ID NO: 472023 - protein, 370 aa, unidentified
MSQSSTLYVGLDVHKDSIAVAYIAKDHEAHVISYGTIGTRHADIDQLTRKLQSKAKRLVFVYEAGPCGYWLYRYLTKKGYDCWVVAPSLIPKKAGDRVKTDRRDALQLARLMRSGDLTPVYVPKVEDEAIRDLGRAREDALRDLKAAKFRLKAFLLRHDIRYTGQATWHPAHLRWLSAVVCPTPAQQIVFQEYVRAVNEHTERLQRLEQELHEHVQTWRLHPVVEALQALRGVQCTVAVTTVAELGDLTRFDNPRQLMAYLGLTPSESSSGPRRRQGAITKTGNSHARRALVEGAWAYRYPAKVSRHLQLRLEKQPKVIQDISWKAQVRLCKRYSQLLARGKNANQIVVAIARELVGFMWAIASAVPVTP

SEQ ID NO: 472024 - protein, 354 aa, unidentified
MSSSIRPRKGIFIMKKNSFFIGLDIAKADFAASIFKTPDEPILTKEAIPNNPEGFDQFLLWLKEHHIDKTNSRICMEATGIYSQAIAYHLLFAGFSVSVEPPLKVKRAFDPVGHKTDPVDSKQIAEYAYRFQDELTSWQPKDEILEKIRQLLRVREQFTKQKVALKNAIQAYSKQRVQVILIKKAHQETLAQIEKQIARIDQELAKLIKGDPEILQKANHLKSIPGYGMLLAAHLLVITENFTKIQKSKRLAAFIGIVPYQHKSGTSVFKRAKIRHFGPEPSRKLLRLAAQSVATHDVTFRRYYLRKLAQGKAKALVLNNIANKLLKVACAMIQNNTRYIKEHRSIHPMYLKSA

SEQ ID NO: 472025 - protein, 353 aa, unidentified
MKSRMESKMSSPMVIGVDIGKEVFHLVGFTADGKIAFRRRIRRLGLKDVFEKLPPCIVAMEACLSAHFVSRTLRALGHEPRIIPAIYVKPFVKGQKNDYNDAEAIAEAALRPNLRFVQEKSQDQLDLQACHRVRSRLVSRRTATINQIRAFLIEQGIAVRTGPRALRKSLFSILENRKEEISPRTAKLIRGLYEDWCCLDERIETVTGETEILSRSEAKCRQLMSVPGVGPLISTAMVAAIGSGEAFERGRDFAAWLGLVPRQYSTGGRSILGRISKRGSKYLRPLLIQAAKVLLMRPHNWARYSFGPWLNAASERLHRNKLAVALANKLARIAWSVLRNDKAFDTHLEVAAI

SEQ ID NO: 472026 - protein, 419 aa, unidentified
MQVIYSRCCGLDVHARTVVACLCVDGHKQTRTFSTMTDDLLLLSDWLAQASCSHVAIESTGVYWRPVFNLLEGNFEVLLVNAQHIKAVPGRKTHVRDCEWICDLLRHGLLKASFIPPPHIRDLRELTRHRQTLVRDHAAVANRIQKLIESANIKLGQVATNALGLSGRLMLQALAAGEQDADHLARMARGKLKAKAAQLKQALKGRLTSTQRFLLKELLQQYDQLQSAIERTNQELNRLLETNSDPFLQQAVELLQSIPGVGQRVAETIVSEIGTDMTRFASDAHLASWAGMCPGNHASAGKQLTGKTRKGNVYVRGALTQAAWAAARTKQTYLSAQFRRLTTRLGKKRALVAVGHSILVIVWHVLSKRRSYQELGGDYFDRRNEDVYRKKLIRKLEDIGLKVTVETVTTLSALPESFS

SEQ ID NO: 472027 - protein, 350 aa, unidentified
MRRPKEKLIAGLDLHSNNVMIGVINQDGKRITHRKLDCDLKQVTEFLKPLKPQLQSMAVESTFNWYWLVDGLRGQGYSIDLANPAKIEQYNGIKHVDDKDDAFHLADLQRLNILPKAHVYDPELRPVRDLLRRRAGLVHQRTALLLSFKSLYARTTGKALDLADAKKMEPKEAPKLYKHPANQLIAQVQAEHIQALDKSISRIEKAVLACAREIPLYEKLLTIPGIGKILGMTITMEVGDIKRFKTDGDFASYCRTVDARRLSNGKCKAENNQKCGNKYLSWAFVEAANFARRYCEHCRRWYDRKAAKTSKVIATKALACKLAKAAWHVMDGETDYDATRMFPELATKKK

SEQ ID NO: 472028 - protein, 401 aa, unidentified
MPEQPVIQRWIGLDIHKAYFVAVGVNAEKCTILGPHKISNEHLEDWIAKHLLPTDAVVMEMTTNTYQFYDTLVPHVGSVIAVHPPHVLLVTGVKVKTDKKAALTLAQLHAAGLLTGVWIPPVEVRELRAVIAQRSKMVRLQTQAKNRLTSLLHRTHRERPTQLFKPEQKAWWESLPLTTLEKYIVASDLETLAFAGKQIDAIEEVLRQEAAKDERVPLLTQLPGIAMLTALTILAAVGPIERFEDSSHLVGYAGLGASVHDSGQMHATGHITKAGRRDLRGAMVDAANAAVRHHPYWKKEFERLEYRLGRSKAIVAIARRLLVAVWHILTNKAADRHADETSVAASMFKLAYEIKVSNLPKGTSARAFTRQQLDRLGIGQNLEVLPWGGRKVKLPPSQLKT

SEQ ID NO: 472029 - protein, 419 aa, unidentified
MSSLTQEFTAFIGIDWADTKHDICLQPANSQHREFDQLPHQIPAIEQWAYSLQKRFGGTIAVVLELSKGPIVYALQKYDFFVLFPVNPSTLAKYREAFKPSRAKDDPTDAELALDLLLCHGDRFKPIKPQSVEMRTLTYLVEQRRQLVGDKTRFVNRLCDTLKQYFPQTLDWFEHRDTVLFCDFMTRWPTLTQVKRARKASLETFFKTHNVRFDTVIATRISGIRAATPLTLDVAVLTAHQLQAMAQVNQLRATLQAIDQFDDAIAKLAPTLPDYALFNALPGAEPHLAPRLLVAFGEQRERFTSAAQLQQYSGVAPVTERSGKKCWVHWRWQCPTFLRQTMVEWAAQTINKSFWAGAYYRQQRDKGCSHQTAVRALAFKWIRILYRCWQNRTPYDESKYLNALKRRDSPLLKQVTTTS

SEQ ID NO: 472030 - protein, 464 aa, unidentified
MGHARARKIPAQLVEDEEYQLRHERVAGIDIAKAKADVCTRLPPQRDGGRRASRVEEVPATAKAILALAVRLIADGAELVVMESTSDYWRMWYYLLEGAGLSVQLVNPAHARQLAGRPKTDRLDAQWLARLAEMGLLRPSFVPPPEIRALRDLTRTRLQLVRDRSREWQRLEKLLEGALVKLSSVVHSLAKVQSARAILEAIAAGERDPKALAALAHPNVKGGRAAVEEALGGMAPGDHHPMLIRVHLDHITLLDRSVAEVEDEIEAALDAIPAAWGTDPGGETGPDAGRGPDPAVLPAAERLAEIPGVSPALARAIIAETGLDMTRFQTADHLVSRAGLAPAARQSGPRSRKPKKGQGDAYLRGYCTQAANGAARTDTFLGERLRRLSRRLDGNRARCAVARSILVIVWHLLASPDDRFADLGPGWHQRKTDTDRRTRSLMNQLRALHPDADVNITIVPGTAA

SEQ ID NO: 472031 - protein, 338 aa, unidentified
MKTYAGIDLHSSNNYIGVINAKDKRLYSKRHDNRIEDVLKVLGKFKAGLQGVVVESTYNWYWLVDGLMDQGYTVHLANPNAIQTYNGLKHTDDKWDSFWLAHMLRLGILPEGYIYPKHQRPLRDLLRRRLMFVRQRTSQILSLQSMITRNRGLNFSGAQIKRFRDEFIDNLFSDRHLVFTARKNIAAIRFLDQIVSEIEIEVSSQIKLKKEFISLLTTPGIGKILGLTIMLEVGNIGRFPKAGNYSSYSRCVESKKTSNGKKKGENNKKNGNRYLAWAYVEAANHAIRYCPKAQKFFQRKMAKSERVLATKALANKLTKATYYIMRDQVAFDEDKLFG

SEQ ID NO: 472032 - protein, 341 aa, unidentified
MHLYFVGLDVHKQVIAYCVKTAAGEIVAEGKIAATRAALDEWVETLPKPWHGGMEATMFSHWIYHHLKPHAASLKMGHAAKMKAISAGKKKSDKIDARTIADLLRCNLFPSCFVISPELGALRQQMRFRRLVVEETVMFKNKTAGLLMGAGVEYERRRLHGKRYFKELVKDNEWIGQEMRPLLAFNREQIETLQGMDERLIRMLERHPRLQARVKALQVIDGVGPVTGLTWALETGTPERFASIKAAMSYCGLTSALRESAGQQKRGPLSKQRNRHLQSVLIEAAKIAPMLNEQLKEVHRKAQEKGGHRNRATLAVARKLVAYLLAADRAFLAKQREHVAA

SEQ ID NO: 472033 - protein, 404 aa, unidentified
MEYNAVGIDVSKGKSTICIGRPMGEVVAFPFEIKHTKADVDNLIRRINGLDGDTKIVMESTGRYPLPLLTRLSDAGLYVSMVNAKLIKDYNPDNSLRNVKSDKADSKKIMAYTLDKWLLLKQYGAMDKIREQLKIVNRQFDFYMQQRISLQNNLIAILDLTFPGINDCFSSPIRPDGHCKWADFAYTYWHTECVCGKSLNAFTEHYQNWCKKHGYIFKKEKASDLYQFSKELIPVLPKNDTTKQLIRQAIDVFMSMSAAVESLRKQLDQIASQLPEYPVVMAMNGVGPTLGPQLMAEIGDVERFTKRSAITAFAGVDPGVDQSGTRNKKSVHASKHGSPELRKTLFQIMQILIQLAPDDDPVYDFMIKKRSEGKQYFVYMTAGANKFLRIYYGKVKEYLAKQKL

SEQ ID NO: 472034 - protein, 341 aa, unidentified
MQPYFVGLDVHKQLIAFCVKTADGEIVAEGTIAATRAALNEWVKTVPGPWHGAMEATMFSHWIYHHLKPYAARLQMGHAARMKAISAGKKKTDKIDARTIADLLRCHLFPECFVISPELGALRQQMRFRRLVIEQEVKFKNKTAGLLMGAGVEYQRRRLHGKRYFAELLRESQWIAGEMRPLLEFNRGQIESLQAMDRRLMQMLQRHPRLQERIQFLRGIDGVGPVTALTWALEVGTPERFGSIKQAMSYCGLTSALRESAGQQKRGPISKQRNRHLQCVLIEAAKIGPLYNEKLRETYQKACAKGVHRNRATLAVARKLVAYLLAADRTFFSTPVPAVPA

SEQ ID NO: 472035 - protein, 355 aa, unidentified
MIVIGVDPHKATHTAAAVDDGIGELLAERTVQARRTGHEELLDWARSLAGERVWALEDCRHVSVSFERFLLASGEQVVRVPPKLMAGARRSSRIRGKSDAIDALAVARACLREPELPSARLDGPEREIRLLVDHREDLVAERTRIQQRLRWHLHELQPELELPAGCLDRRVWLERLGRRLARREQTAQVRICRELVVRCRELTRRAAELERELAVLVSAQAPTLLELPGCGVLTAAKLVGETAGVERFSGEAKLAMHAGTAPLPASSGARQRHRLNRSGNRQLNCALHRIAITQGRWHPPARAYLARKESEGRSRKEALRCLKRHLARVVYRTLRALEEEKMTSTNRPVLVPALT

SEQ ID NO: 472036 - protein, 387 aa, unidentified
MFLVGIDVAKDKHDCFICDSEGNVLKDVFTFSNDREGFNLLLSFMPTSSENVKVGLEATGHYSLNLINFLIDNGYSPVVFNPLQINLFRKAHTLRKTKTDKIDAKLIALMLSSSDAKPHLDLSYHVMELKSLTRYRSRLKDQLARLKTSLARIIEIVFPELEDCVYSINQKSTMALLHQFPSKELIANAHLTRLTNVLKDNSRGKYSKDKALEIRNAAINSIGTSSDASSFELVQTIDMINFYSSKIDDLDAKIKDIMIELESPILSIPGISYNLGSIILAEIVDINRFDTSSQLQAFAGLDPVTHQSGKFIATGVSMVKRGSPYLRWAILNAARLVAMRDPCFQDYYQRKRKEGKHHFVALTHVAKKLIRVIFKLLKTNTQFVPQT

SEQ ID NO: 472037 - protein, 359 aa, unidentified
MGELSKVGMKTVGLDLGDRFSHFVVLDAEGQPVEEGRVATQDSALRKRFSGCARMRIALETGTHSPWVSRLLKQCGHEVIVANSRKLRLIYENRRKNDRVDALYLARLARLDPQLLSPLKHRGLEAQKDLALLRSREALVDARTQLINHARGLVKSVGQRLPSCSSQAFSRKVLSAIPESLQRGLLPVLEMITSLNGQIKTLNRRLAALADETYPETKLLQQVIGVGPITSLGYVLILEDHGRFSKSRAVGSYLGLIPGSRRSGASDPQMRITKEGDSLLRRLLVSAAHYILGPFGPDTDLRRFGLRIAQRGGKNAKKRAVVAVARKLAILLHHLWRSGEVYEPLYQETRKASHRGKAA

SEQ ID NO: 472038 - protein, 447 aa, unidentified
MPQPIVAVGIDPAKRLHRAVAVLFPDQVILDVALPNAYDAIANLDDRLTELANQHGAGLVYGLEDHRRYGLLFCQVLTERGREVRVVNPLWTSRQRAFYGQDKDDAIDGRSIAAVVLRRHHELPLATEFGEVAQAVREAERRLQDLDKARTRAVNRLHLQLSDSYTAVYEGFFGKLRSPFALRFFRRFPLPQDLVGHSVEMLASLLLELPGGKVGPHKGANRLIAMRGKAQTILETSAAMRKRPRSLALELKAELIGQLCDELLAIHDRVTRLNRMLRKTLLPATGQTITTVTGISTTLAATMIGETGSIARFRSPAAYAVYDGTAPARNSSGGRDRHKARRDCNHRLKRAFYLAARAAVQHDPIAQNYHQRCISRGLNYGEALKRVARRMSDLVYVLLKSGKAYDRSIVENAIERRREQAARAEPRRAKHSLVHSRPNNPNAPRSP

SEQ ID NO: 472039 - protein, 355 aa, unidentified
MNDAKYIGMDVHTATISAAVRDSSGNLVMEATLETKAETILEFVHGLRGSLHVSFEEGTCAAWLHDLLKPHVTEVLVCDSRKNALLRVGNKNDREDARKLSELLFLNKLHPVYHGETGIRTLKELARSYLTITRDLTRVMNRLKAIYRGWGIACAGQQVYAPRYRAEWLAKITEAGVRRRAEIYYQQFDALAALRQEVRRELLAEARKHPAMRLLRQIPSIGPIRAALLIALMQTPHRFRTKRQLWAYCGLALRTYDSGEYRFVGGQLKRSKKAVTIRGLNKNHNHDLKNIFKGAATRAAATAGPLQNFYEARIANGMKPPMARLTLARKIAAITLLVWKKGVRFDAEQLKQQAA

SEQ ID NO: 472040 - protein, 348 aa, unidentified
MEHYAGIDVSLECSSVCVVDASGKIVGEGKVVSEPEALVQYFRSHGVSVARIGLEAGPLSQWLYAAMRRAGLAVELLETRHVHDAFKAMPVKSDRNDARGIAQLMRLGWFRPVHCKSIAAQEVRAVLTARKLVQSKLRDIENSLRGILRGFGLKVGPTTARTFAGRIHVLVAGQANLQMIAHALLAVHAVLLGEFNKLEKHVRSLARAHVQARQLMTTPAVSPIVALTYASAIDDPARFKSSKKTGAHFGLTPKKYQSGETDVTGRISKIGDAAVREALYQAAHVMLTKPVKGCADLKSWAMRIARRGGMRKAKVALARKLAVIMHRMLANDKPFTPAVRTAPVVAAI

SEQ ID NO: 472041 - protein, 391 aa, unidentified
MVCVGIDVAKDKHDCCILDSDGTVRADCFTIPNNMDGFKQLLQTIRDCTKKSDKIKVGLEATGHYSYNILGFLLDNGLPTYVINPLHTNLYRKSLSLRKTKTDRVDARTIATMLLSDVDLKSYTDIAYHNEELKSLTRYRFDKVQERAKLKQSVSRLATILFPELEQLVSSIHGTSIYALLGEYPGAKQISEVHLTKLTNLLTTASKGRYGKEKAIQIREAARASIGSVMPAKSLELKHTIKLIQELASEINEIEDSIQKIIDELNPPILSIPGMGVNSAAVILAEIGDFSNFSSPDKILAYAGCSPSTYQSGKLTNCYAHMEKRGSRYLRHALYNATKYVCYWNPVFAEYLAKKRAEGKHYNVALSHAMKKLVRLIYALQKSGKAYLAAA

SEQ ID NO: 472042 - protein, 474 aa, unidentified
MGKGSGNGTTRGDRKRNARRERLRGLLPRDGAVIGIDLAEDKQALAVIDHDVRVLARKTVRVKAFRLGEALDWAVGQARAKGFVHVTVACEPTGPRWMQVQRLCAERGLPLVCVQPLMSHIAREQQDYTTHKTDESDCVMIARLAIELHCYIPEELDETWAHLRQLGRRRAQLITAETASMHRIQDFLSVAWPTVTETCAQPLKSVTWLAALQVVTSRCGGQPARLAEMAEEAFTALVQAAVPGWGRKRAFGPIRRRIFAALTDTEGAVAWSRRGLLRRVADELGDLQRTRTQLRAVEADMVAVLDELGLSRLADIPALTAVGAAAILAETGDPHRYDSSSSLVKHAGMSPSDNASGTFLGDAHISRRGRPGLRLTVWRMVWPMLQFNPVMAAKYQAMTQASAAAAEEHATAGTRQASAAAAAARARRAKARVACAASLLRWIYSMVVHGTSWDAAVAAGETATQRAPRPAEAA

SEQ ID NO: 472043 - protein, 438 aa, unidentified
MRKKKSKATKKVHFQGLALIHPNAAGIDVGSKEHLVAVPADRDPQPVRTFQAFTPDLHELAAWLKRCGIETVALESTGIYWISLYEVLEQYGFEVRVVNARHVKHVPGRSKTDVLDCQWIQKLHSFGLLNGSFRPEAQIRKLRTYMRLRDNLVVEGSQAIHHMQKALFEMNVQLSNVISDITGESGLRIMEAILTGERDPEQLASLCSIRIKASRQTVAKSLHGNWDEALLFCLKTALETYRFSQNKIQACDKCIENQLAAFEIRRALPNATHNLRTQLHQVCGVDLTKIPGIKEQSAQIIISEVGLDMSPWNTEKQFSSFLGLCPNNLITGGKILRRATRKVYNRAADTLRLCAQSLTHSKSALGAKYRRLRARLGAPKAIVAMAHHLARLVYRMLRYGENYVEKGIEHYEEKFRLQRIKWLRKEAKSLNLQLVAAQ

SEQ ID NO: 472044 - protein, 400 aa, unidentified
MLSIGIDVSKGKSTVCGMKPWGEIVYAPFEVQHTREGMSELVSLLHSSGEEVRAVLESTGSYHCPVVAALLESGIFVSVVNSLRMKRFCSQSIRKVKTDRIDAMQIALYGLAYWQELQPTRLPEDTYRELQLLARQYYQMTSILIKAKVDFNAICDQVLPGMQELMNDHAGRHKLSDFVLRYHHTTHILEMGETRFRKDYCKWAEKKGYRNCERMAAHIFATAQNGIPVLPNAPSTQIVITEAIRVLHTVEASRDAILTQMQALAKTLPEYSLVREMPCIGDTLAPRLIAEIGDVRRFHSKRALIAYAGIDAPLYQSGKFCANNRHISKRGNRYLRKTGYEVMQSYVMHKPANDPIFTFIEKKRGEGKSGKLAMVAGLNKFLRVYYGKVTELYRSLSAIE

SEQ ID NO: 472045 - protein, 382 aa, unidentified
MEVVYRCCCGIDVHKKIIVACLNQGGEQSLREFGTTTSEIKSLATWLTESGCEMIAMESTGVFWKPLYNLFELMDLDAMVVNAAHMKALPGRKTDVKDAEWIADLLRHGLLKASYIPSREQRELREITRYRKSLTEERCRETNRLQKILEGANIKLDSVVKDINGKSARKLLEKIIEDDVPTSEEEISKMIHGRMRSKLGQLVTAIEGITTPLQRKLLAQVIDHIDDLNRRIADLDKLVQDYMDEYEAAITALCDIPGIARRSAEVILAEIGLDMSRFPSAAHLCSWAGVCPGNCQSAGRRKHGKTTKGNKPLKTILTQCAKSARSVKGSYFSAQYQRIAARRGKNRATLAVAHSMLIAIYHMLKNSAPFRDLGSDLSLIHI

SEQ ID NO: 472046 - protein, 349 aa, unidentified
MSMLCGLDLHRDQITFDALDASTGEVWRGRLFQPHRLRLRRWLAEELGPRAHGEPVAVAVEGCTGWRYVVEEVVAAGFEAHVAEPAETHDKRGPKHRAKTDRTDARLLGELLAHGELPESWVPPEPVLEWRERIRLYKSLVDQRTQWAQRVHAELFQHGLPVSENAVRSPKTRAALTSPALPVSPAARQRIATAYQMMAATDALLVPLHDEIVAFARRQPACRALMRAHFGIGELTAVAVWCELGDCRRFSRSEQVVRHAGLDIKVDRSDRHHGKGYLTHQGPPVLRWALYEAAKCSYRRTSPDHAYYTATKERLHDGKLATLSVARKLALRCYHTLRALDPVELYAIP

SEQ ID NO: 472047 - protein, 400 aa, unidentified
MRVVFGIDVSKVSSEVAILVNGEKVHNYTMSNDAIGFSRLLGDLKTVHKPEIIFEATGVYSRRLQAFLDEHSYAYTRLNPLEAKKQLDSLRVRKTDQIDAEKLAQSQFVLNRKPTYIQEEVYQDLRDLSRFYQNLTEDIVRAKNRLHKVLQVTFPELETILSTPTGEQYWNLVIAFPCKDFVLELSKDELSKSIRLSTSKRISDKRVAYLAEKLTALANQSYCAVKKNSPIMEEVRYYAKELLRLSEQRQAVLDEMVELAQPLPEYDILLSIPGIAETTATSIIGELGDIRRFQSTNQINAFIGIDLRHYESGNFLAKEHITKRGNPYARKILFKCIHNIASASHTNPCHIADFYEKRKRQSQTTSTKPHTIASIHRLIRTMYYLITHNKLYDYRSTQNQ

SEQ ID NO: 472048 - protein, 339 aa, unidentified
MNVMIGIDPHKASHTAVAIDSAEDHLSSLKVRATHRQVDQLMDWAQSFEKRTWAIESVGGMGYLLAQQLVARGEDVLDVPATLASRIRVLATDRSNKNDPNDARSIAIAALRAPRLRIVEPANHVEVLRLLAKRNMDIGNQRQRIVCRLHSLLSELAPGGIAKELYVSDADTLMARLDPQTPTQQMRFDLVLELLDDVRRLDTQIKESHRRIKVAIKASGTSVIEVYGVGPIHAAALIGYSGDITRFADRDAYASYNGTAPIEWSSGGRVVHRVSRRGNRKLNHALHMAAITQLRNPGTQGRIYFERKVAEGKTKKEAVRSLKRQISNSVYRQLLLDAR

SEQ ID NO: 472049 - protein, 325 aa, unidentified
MAKWIGIDVSKDELAVCVMDEQKKVLNASFANDKKGYRSLSNYLKKRQVVAAAVCLEATGIYGEAVAMYLHESGYRVSVVNPLRIKRYAQSQLRRNKTDKLDAQIIADFCRTQEPPLWTPPDPSWLELRALTRRLDNLIQMQVQEKQRLQSVTSESVRASVQAHIGYLQQQIDELLRQIKQHIKQHPELKKQQELLNSIPGIGDKTSMRLLAEIRDITAFETVEQLVAFAGLNPKLRQSGKYQGQVKISKLGNAAVRTALFMPARRAKRSNPLVQPLVQRLTTQKCCANAITVAVMRKLLHFAYGVLKSGQPFDVDYLTKQALAA

SEQ ID NO: 472050 - protein, 416 aa, unidentified
MNAVGIDVSSRKSTVAVLRPLGEVVCLPFDVTHDIAGLASLVEKLKALDGETRVVMEHTGRYYEAVAKALHEAGLFVCAVNPLLIKEYGANSLRRVKTDKADAVKIARYALDNWADLRDFTPMDAIRYDLKTLNRQFQLASKQRTASANNLIALLEQSFPGIRKCFDSPVRSDGTQKWGDFAHSFWHVDCVRKQPFPAFCERYRKWCKRHAYLFKLSNAEEVYALAKRAVVLTPKSKVVKVLVQEAANQLSSISRSVEVYRAEMDRLAAMLPEYPVVMAMYGVGKSYGPQLMAEIGDVRRFERKQALVAFAGIDPMPNQSGDKNVRSNKSSKRGSPYLRKTLFNVIRTYLQCAPQDEPVFQFLNRKRAEGKPFYVYMLAAANKFLRRYYAKLRDYFASLDTLQSVDPIPATLKASL

SEQ ID NO: 472051 - protein, 521 aa, unidentified
MPRLRSAPPAKATKGFVLQKPNGLLTPRVQAVGPEHFGILAIDCAKARSRYFLADFYGRVLLEPTTLPHQRGDLQAAVDRVRQAMRQHHLADLVVAIERTGEYHRPVQLAFRQAGFETRLVHPFTSKHYRQPADPGNKTDDTDLAAICRATTHGFGLLEPTWPDDYLTIQLLRRHRRDLVDKNAMLQCQIREVLHAAMPGYAECFCHLWDDSPAPLVFARHTTSAQAVRQQGVAGLEQIARQEGLRCRAETFHKILAWATQAPPDAGHSADRRRVLVSLDDDRLAKTQQILELERDLAHRVVHTPYLLLLAIPGINIVSVADLAGELGPLSLYLNANAITGRAGLVPTRYQSDQVDCANGPLRRRGNRRLRAVLMQTADNLVQCNHYFRARAAQWSRAGKDPRWVRVKVAKIFSRLAFAVVAGRQLFPHPCCQPRHYIVGKLLQFHSAHHTDLVAMRRDLEAAAEQLPAQQRRAEAEPLQRQLDALARRRGPQPLAELIPLVLARLAGRVVQSQPHESAGP

SEQ ID NO: 472052 - protein, 411 aa, unidentified
MLKIVYPICCGLDVHKSFVYACIASTNERGVTTYQPKRFSTFSKGLRELSAWLAVNNCSDVCMESTGKYWIPVYNTLETTCKVVLANPKYVKSIRGKKTDKKDAKWIADIFKHDLVNGSFIPPPDIRQLRDLVRYHFKLTSYTTGEKNRAQNCLTVSNLKLDDVFTDVFGKTATAIINHILDHPNQPFDVSPFVHKGCKTPIDEIQAAVDGAICPEQAEKLRVISVHLNDLDKAKDNLMSAILTIAEKFLPQINLVSSVPGIKAFSAIAIIGEIGVDMSVFPSAKHLCSWAGLTPQNNESAGKKKTTRISRAGAYIKPLLVQCALNAIRCKDNPEIAKRYNAIKKRRGHKKAIIAIARVLLTAIYNMLKKNESYNPELYAKAVAPPKNFTISVDYAIRVLQSKGYAISPPG

SEQ ID NO: 472053 - protein, 472 aa, unidentified
MSPRAGKHLRTSATRTSAAMEDLAITHRHAAGIDVHAKEHFVAVAAEDVPAGFINADKQLPVGVRKFGSNTGDLEALAAWLKDCHVTTVAMESTGVYWIPLFDLLASQGFTVILVDPRQTRHAPGRPKSDVLDCQWIRRLHSYGLLTASFRPADAIVRWRSFQRQREMLIRYAAQHVQHMQKALEEMNVKLTEVVSDIVGQTGMKIIKDIVRGERDPHELAKHRHPHCKATEAEIASALYGNWRREHLFALRQALELYAFYRRQLRECEAQIEACLRGMADQSRSKALPACPRSHQRDKNAVGFGARALLFRMAGVDLTQIEGINETTALVVLSEIGTDLSSFPYEKNFVSWLGLCPQHRGSGGKILKRRTRRGANRTARALRMAAQGCHHAKNALGAFYRRIQARCGSPKAIVATARKLAERVYRMLRYGHDYVRQSEQVYNQAYQLRLIKSLAKKAASLGYKLIPETATS

SEQ ID NO: 472054 - protein, 389 aa, unidentified
MKIFVGIDIAKLNHFAAAISQGGEIILEPFKFTNDADGFQLLVSKLESFDKNSIIIGLESTAHYGDNLVRYLVAEFYQVCVLNPIKTCQMRKNNIRKTKTDKVDTFVIAKTLMMQDDLRFVSFYDLDMMDLKTLGRFRQKTIKQRTRLKIQLTTYVDQVFPEIQYFFKSGLHQNAVYALLKEAPSPKEIASMHMTHLANLLKVNSHGHFTKEHAKELRVLAQKSVGANDSAISIQITQTIQQIELLDSQLDKIEAEMTDIMKFNDSVIITIPGIGYINGGMILGEIGDIHRFSNPNKLLAFAGLDPSVYQSGNFQAKTTRMSKRGSRVLRYALVNAAWNVVRNNATFKAYYDAKRAEGRSHYNALGHCAGKLVRVIWKMLTDEVEFNLE

SEQ ID NO: 472055 - protein, 337 aa, unidentified
MDIRVIGIDIAKRYFQIHAVSSTGAVSIRRKVSRDGFLKLLAGLPPCLVGMETGSGAHYWARQLAQLGHSVRLMPPQFVRPYVKTNKNDAADAEACCEAVQRPGMRFVPVKSVDQQTAMALHRVRDHLIRQRTGTINALRGHLAEFGIVSAAQRTGLNQLIAIVEDDGAGELPFAMRAILQMLIDEIRAADERIAELDRKLKDAAKEDEACRRLIEVPGIGPVIATAVVANVQDDSRFTSGRHFAAWLGLTPKQHSSGGKERLLGISKRGDAYMRRQFINGARALVRIATGRAGGLWDWINALLARRSFNVTTVAVANKLARIAWSIQARKTRWRPA

SEQ ID NO: 472056 - protein, 311 aa, unidentified
MTILTSQAVVGVDIAKAEIVVYRADQQTTDHIKNERTALKRWLKTLPAQSAIAVEATNIYHLDTVELAHEMGHQVYVVDAYRVSHYRRGVGQRAKNDPCDARLLARYLTSEQDGLRIWSPPPKAYTSLKSLLHRRATLIQNHTGLMLSWANEPLLKKVRIAQQKAFKQADQAIQKLLRKVSKEAGIEENIDRCKAIEGVGELTATGLATTFIRGDFANGDAFIAYLGMDLTVDDSGKKNGARHLTKKGDPEIRRLAYNAAMAACRSAKWKPFYEAYLARGFSKTQALVALARKLCRVAFALMKNQSEYLSV

SEQ ID NO: 472057 - protein, 371 aa, unidentified
MREFSKYVGLDVHKETIAVSVAEANGGEVRYVGEIANTPEAVEKLVRQLRRGKVALSFCYEAGPCGYGIHRQLTDLGWECHVVAPSLIPKKAGDRVKTDRRDSLALARLHRAGELTDVWVPDGAQEALRDLTRAREDMKHLQRQAKQRLLAFLLRHGRRYSGKSHWTQAHYRWLELVKFDHPTQQIVFQEYVDTVKAMNRRIEGLDRQIESAAKETVFWPVIEGLMALRGVSLLTATTIIAELGDLRRFGSAPQLMAYLGVVPSEHSSGNSKSRGGITKTGNGHVRRLLVESAWTYRHPARKTSTLQRRAERAPEIVQEIAWKAQKRLCARYRSLESRGKLKVQVTTAIARELTGFIWAIGQASPFPINKA

SEQ ID NO: 472058 - protein, 415 aa, unidentified
MKFEKDTSGIKRYIAFDIHKEYVLAGGQNAQQEWVMQPRRIGMEKLREWAKANLRKGDAVVIETTTNVWDVYDIVEPLVSYVVVAHAGGVRQIAEARVKTDKKDIERLIRLLIADIVPEVWVPPVEVRELRGMISYRNRLVKTSTMIRNRLQSLIHRHNLILPKGMLRDKGWWEAQKVSALEKIQIRQELAMLDEMEKHKGEVDGELGQQSLGEVWGKQAMRLLQLPGFGAIISMTVLSAIGDISRFESAKKLVGYSGLGAGVHDSGKEHIEKRITKSGRKELRWALVEAAWRAIRISPYWKEQYEKYLRRMRKPNQAIVVIARKLLVVVWHVLTKQETDEHVSEEELAYKMLVLSWDLNEDVRMGLTYKQFAKYALMKLGVEHDITRFVRKNVPRRLAPRAEVLERMAELGIAQ

SEQ ID NO: 472059 - protein, 352 aa, unidentified
MTKITTIGLDLAKKVLQVHGVDVEGKVVVARQLRRKEVLAFFAKLSPCLVGMEACGGAHYWAREITKLGHTVKLMPPKYVKAYVKRGKTDAGDASAICEAVTRPSMTFVPVKSIEQQGLSMLHSVRSQLVSQRTQLVNAVRGHLSELGIVAERGVLGLAELAEIVRDKSDERLPVAARSALLVMVNQIETLGAEITRVDTALRKENKATDLGRRLETIPSVGPVIASAFRARVTKPELFKNGRHLAAWIGIVPENDSTGGKPKQKGLSKKGDRYLRALLVSGAMAVVRQARMHPDKHAWVASLLARMSAKQAAIALANKNARIAWVIMVRGGVYEAGHRAPAYRDAALSAVA

SEQ ID NO: 472060 - protein, 354 aa, unidentified
MIAVGVDVHKRQCSLAMQFEDGELASFAPFENRREGWLELLAVLPPEAEIALEVSTSGYFAMSVLEEAGWRERAHWVHTAGIDSLRKQKTDRLDARRLARKLSVADRDPLPEAWFPPRDIRELRLRARQRCWLAVLRAQGKNRLQSLLQMHGLRAPMTDVFGAAGRNWLSQQGLPGAVRESVEQILRLHDFLSEELEISEASLRAVDGEFPELRRLRTIPGIGAILAPVIWSEMGRLERFASADAFVNYTGLIPRLYESGEVSIRGGITHQGSAWLRWALVAAAQGAILGTNAFARRARRLRRRKPANVAKTAVARSLARCVYGVLKNQQDYQESRWGLRRPGVGRSWGAANLR

SEQ ID NO: 472061 - protein, 342 aa, unidentified
MKLTTIGIDLAKNVFQVHGVDERGKAVLKKPLKRDQMAAFFANLTPCLIGMEACGSAHFWANKLQAMGHTVKLMAPQFVKPYVKTNKNDAADAEAICEAVSRPNMRFVPIKHGEQQAVLALHRARQGFVKARTAQANQIRGLLAEYGIIIPQGIAHISKRLPEILEDGENGLPGIFRHLIARLGDHLKELDRQAQELEVQIQAWHRENAASKKLAQIPGIGPITASALVASIGNARNFENGRQLAAWLGLVPRQNSSGGKQTLLGISKRGDTYLRTLLIHGARAVIRVAERKAEHARSWLAGVMGRRNKNVAAVALANKNARIVWALLVQDRDYKADYGLVA

SEQ ID NO: 472062 - protein, 430 aa, unidentified
MSYKIAGIDVHKKMLAVVVSDVEVDGEFHFEQRRFGSNPEQLRSLAAWLLEQEAEEVVMESTAQYWQPVWEALERYWKPLREKREAARRTSGMLHLAQAQSNRGRRGRKRDFPDAERLVKRLVARELTLSFVPDAEQRLWRTVTRRKYQLTRDHVRLQNQLESLLEEAHIKLSSLVSNLLGASARRMLKALADGETNPAALAALADQNLRATPEQLCDALGACTDLKPVYRRLLKMALEQLQFLEQQIGQLDQEMASLLRQHHDAVQRLAEVPGLGVDSAQQIIAEVGPTAATFPSEKCLSSWVGACPGDDESAGVNYSHRSPQGNRHLRRLLNQSANAAARTKGSIFEIVYRRSVLRLGHNQAIGAIAHRQCRLIWLILHQGIRYEERGPAVTKRSKQKRTAKMIRQLRTLGYRVELSNSQLAAPGQAQ

SEQ ID NO: 472063 - protein, 369 aa, unidentified
MKSIAYGGMDVHRETVSIFILPATGMEPIVERRIENDRVKIKKFFSKWSSSYDLRCCYEASGAGYVMQRWLAGMGVSCEVVAPSLIPRRSGDRIKNDRRDARKLARLYRAGELTAIRVPSEEDESVRSLVRCRETIAKESRQSQQYILKFLRLRGIIWGGKSNWTKAHWQWLRSLRFEGCDEIVWREYLTLLEYKVSRLADLDVEIEKVAFSDPLRERVALLRCLRGIDTRSAMVILTEIGDFRRFAAPGQLMSYVGLVPSEDSSGEVERRGRITKCGNSRCRRVLVESAWKYAHKPALGKALKSRQAGQPVDVIRRSWNAQHRLYKKFHSVAHRKERCKAAVAVARELVGFIWAIMTDYETGTYAKAA

SEQ ID NO: 472064 - protein, 390 aa, unidentified
MIYVGIDVAKDKHDCFITNSDGEILFKVFTITNNLEGFDSLYQKIKSITTDPKIIKVGLEATGHYSYNLLGYLIDKGLPTFVINPLHTNLYRKSLSLRQTKTDKVDARTIAYMLMSDVNLKSYSDSLYHNEELKSLTRYRFDKVKERAKLKSSVSRLVCILFPELEKLVPSLHMSSIYKMLAEFPGAKHISNAHLTRLTNLLSEASKGHYGKETAITFRDAARNSIGSYMPAKSLELKHTIKLIQELDSEIDEIENEIKTIMDEINSPILSIPGINYRMGAMIIAEIGSFDRFDSPDKLLAYAGLSPSTYQSGQLDGAYAHMEKRGSRYLRYALYNATKYVCHWDSVFAAYLAKKRAEGKHYNVAISHAAKKLIRVIYHLEKTKQQYIKS

SEQ ID NO: 472065 - protein, 399 aa, unidentified
MLEQVWAGVDVGKEHHHCVVIDAEGRRLLSRRVANDEAVLLALISDVTGLAGQVRWAVDISTGEAALLLALLAAHDQQVCYLSGHQVNRAAGGYRGSGKTDAKDAAIIADQARMRRDLAPIRVPDEVIVELRMLVARRRDLQSDRVRAVNRLHETLLTISPALEKALDLTNQGPLILLTGYQTPAAIGQLGVTELTAWLRARKVRRAGELATRAVAAANAQQIALPGEALAAHLAGQLAEGVIALDEQIKHTDKLIEGRFHRHHAAPVILSMPGIGTLLGAEFLAATGGDTAAFATPDRLAGYAGLAPAPRDSGRISGNLYRPKRYNRQLQRVFYTSALISIRCCPESRTFYDRKRAEGKRHNQAVLALARRRVNVLWALLRDHRPYQASPPVSTAAAA

SEQ ID NO: 472066 - protein, 364 aa, unidentified
MNNQIYIGMDLHKNTSSFSVKDKEGKVIDECKLPTEPSAIKGYLKRFPDSSLAVEPVSQWYFYGDLIQGLGIDVHLANPLKVKAIASARVKTDKIDAGVLCDLLRSNLLPEAYFASADARYWKEMVRYRSSLIRLRTQIKNKIHSILFRNGLRHPFTNLFGVGGRKWLESLDLAEHFAFNLKQYLGLIDAFSQLIKEADERIEKVVGDNQPAKLLTSIPGISYISALTIMAEIGTIERFASAKKLQGYAGLVPSTYASGDRVVHGRLTKQGSRWLRWTMIEIAQRQLLCKRKPGFGWYYQRIKQRRGSGAAAAATARKLLAVVWRMLKDNRPFEIVPPAPRSKTSLLRGKSGAKDAHRKNIVSH

SEQ ID NO: 472067 - protein, 471 aa, unidentified
MPRRQRSASKPRHAPKPAARPPRDQPVTLTIQHPHAAGIDVHCDMHMVCVPADRDPEAVRRFGANTCDLEAIADWLQQCAITTVAMESTGIYWIPLFELLEARGFEVWLVEPGQLSHCGARPKTDVLDCQWIQRLHSYGLLRPSFRPPDSIVALRCYWRQRQMQIRYAATHVQHMQKALEQMNVKLTEVLADITGVTGRRIITAILQGQRDALTLARLRDHNCKNDLATIAKALQGTWRPEHLFALRQAYELYQFHHQQIDQCDDMIQAELARLPNRAAGKAFTTKPRRCGRKANDLSFDACGPLFKALGVDLTEVEGIDVGTALVILAEIGVDVSRFPTEQHFASWLGLCPRVHESNKTQKKKGPRQGKNRVAIALRMAAQALGRTQTPLAMFYRRIKSRIGGKGAVTATAHKLACLVYRMLKFGREYVKQSLAEYEAKIRKQAERSLQRKAAALGFELVPKPLPTAVPS

SEQ ID NO: 472068 - protein, 354 aa, unidentified
MKKSKKEFQSGDKVFVGIDLHKNKWHVTTRTAELELFSGSIPGKWEALKKILERYKGHVIETVYEAGYFGFWLHDELIEYGAECIVTPPSLIPQEYGNKVKTDRRDSRKLAHFLAKGLLKRVWVPTEKERYHRQVIRRRRQLVGDRIRTQSRIKAELQLHGLNLSAPHGKWTKIFLGNLGRIRFNNRWMQESFKRLLEQYYFLDEQITKQTDLLKELSGTELYKKRVEILMTIPGIGIIAAMELLLELQDLSRFQRADQLAAYVGLTPSQYSSADKIRMGRITCVGKNSLRAMLVQASWALIRKDGVMREKYDRLKSRSGGKRAIVAVARILLIRMRRILLDNNPYVIGLVATN

SEQ ID NO: 472069 - protein, 356 aa, unidentified
MNDAKYVGLDLHQATISAAVLDSTGKLIMECVLETKAATVLQFVQGLRGSVQVTLEEGTCAAWLHDLLKPHVAQVLVCDPRKNAPLLKVGNKNDRIDARKLADLLRSGLLSPVYHGDHGVGTLRELARSYLAITQDLIRVMNRLKAIYRGRAIPCSGQQVYAPRYRQEWLAKISEAGRHRRAEILYEQLDALRVLHQGVRRELLTESRKHPATRLLRRIPFIGPIRAALLIALVQTPYRFRTKRQFWAYCGLALQMRTSGEYRFVRGQLRRSKKLLAIRGLNTNHNHDLKNVFKGIATRAAIAPGPLQEFYAALVGRGMKPSLARLTLARKIAAITLLIWKKGVRFDPSYLKQQAA

SEQ ID NO: 472070 - protein, 391 aa, unidentified
MTMYFVGIDISKYKHDCCIISAADQKVVSKFTFKNDKSGFEQLNLILNSLSTPEDIKIGFESTAHYALNLELFLENANHSFMEINPVLIKDFKKSQTLRRTKTDSIDCELIARWLMTVEYKPHSKGFYHAYSLKSLTRLRDRLVRQRSFYLVKITNVLDHTFPEFKPFFHERLSKTALYLLENYGSAEKIARMNSASYGKLRSISRGKFSPQQFIRLKELAANTVGVNNSIFDVELNSLLTLYKSLVDEIKTLESEINRLVDEVHPHYMSIPGIGPISAAIIYAEYGDISNFSSPNQMLAFAGIEPSVHESGTEAYNGKMVKHGSSQLRYVLINCCLPLIRFDVTFATYYARKRSENKPHRVAITHVAKKLVRVIYALESQDIDFDPKKLR

SEQ ID NO: 472071 - protein, 412 aa, unidentified
MSLWVEPALIIRKGVDFVLYIGIDIASKKHDCCIMGQNAEILAPVFTFENNVEGYEMLLKNIHNHERDFSKVKIGLESTGHYGSNLISFLQAKGFGVVIFNPLQVDLYRKASTLRKTKTDKADAKFIAQMLITTESSTSLPIDPNIVELKALVRHRTRMKSMRTRLKVSVSRLVTILFPEFHAAVSTIHQVSSYALLVELPSAEAIRDCHLTRLTNLLSASSKKRYGRDKAVEIKSLAQTSIGSNSSAVGFELQQTIRLINNLDAEMKILDRQIKLMMIEINSPILSIPGISYNLGSIILAEIGNIENFSNPSKLLAYAGLEPSTHQSGSYLATRTSMVKRGSTYLRWAILQAAKLAAQHDATFKAYATKKRQEGKHYYVVLNHVGKKLIRVIFHLLKNNQEFVCMEQHSVL

SEQ ID NO: 472072 - protein, 344 aa, unidentified
MTYFTGIDVSLRSVSICVVDDRGEVRHEGKVPAQPAAIAECLRRFSTDVKAVGLEAGTLTQYLTYGLQAAGFEVICMEARQVKNTLAAMRNKTDRNDARGIAQILRTGWYSRVHIKSMHSHRVRALLASRKAILKKCVDLENELRGLLRVFGVCLPPRVGHGGFDTEVRQTFASDEMLACALNPLLDARTVLYKTYLKLDNAIKRLVKVDPVCKLLMSVPGVGPVTALSFKAGVDDPGRFKSSRTVAAHFGLTPRRFQSGESDNPGHISRAGDADVRSALYVAAHSLLTRNEQWSSLKAWGMRLAKTRGHRRAVIAVARKLAVILHRMWTDGTAFRWSAQEVAA

SEQ ID NO: 472073 - protein, 316 aa, unidentified
MSESMSFVGIDVSKNVLDVHVLSTGEHWQVGNDQAGCASLVERLKPLGKTMLVVMEATNVFWRMAAAALAGAGLACAVVNPRQVRDFAKSMGILAKTDAIDAQVLAQFAQRVKPPVRALPDAQCQVAAELLARRAQLMGMRVAEKNRLGTANAKKVRKDIEATIAFLEKRLAALDEEIDRWLKSTPIDQSRADLLQSFTGIGQNAARSLLITLPELGRLSGKQIGALAGLAPFAKDSGGKRGQRHIAGGRAVVRAALYMPALSAITHNPVIRALYQRLIQAGKHHYVAITACMRKMLVILNAMLRSGKPWKASHRA

SEQ ID NO: 472074 - protein, 337 aa, unidentified
MQITTIGVDLAKHVFQLHGIGPDGRVVLRQKLRRGQMITFFAKLPPCLVGMEACATAHHWARELRALGHQVRLMPAHYVKAYIKRGKNDAADAEAICEAVTRPTMRFVAIKTKEQQAVLVMHRTRELLVRQRTQTINALRGLLGEFGICEPQGIWHLGRLRAHLEDDTVPEPGRKVLSLLVEQLNEVEKRIAQVEAEIRAWHRSNPVSQRLAKIPGIGPLTASAIAATVPDASLFRSGREFAAWLGLVPRQKSTGGKQRLGRITHQGDAYIRRLLIIGAQSALQRSKEVRENAWVQRLLGRCARLKVAVALANKTARIAWALMRTGDIYRRAPVSAA

SEQ ID NO: 472075 - protein, 436 aa, unidentified
MRKFLECCAGIDIGKREITVTILTGSAEIEPVQQTRTFGTTVQELSRCLEWLLVSHCSTVVMESTGTYWVPVWNVLHEQIAVIVANPEHVKARRGEKTDPEDSRRLAERLRVGDVRGSFVPSAQIVELRDLTRRRKRLLSAANSERNRIQKLLEQANVKLGNVISDVFGVSGQRILQALLQHPQLPPADLAELAKGRLRHKQQALIETLQGHRLNDHVRWMIQHSLDHLVFLENQLTELSQRTLQKLQPFEREYELLQTIPGIAGETAAVILAETGGNMAQFPSPKHLTSWAGVCPGNNRSAGKQKSASIKRANKWLLAALVQSAWATVRQRGSIFKKRFYRQMQHRGRKRALIAAARSLLAVVWQVLQRMTPYDEPSNEIFQERERGKKIQHHLRRLQQLGVDISALELPPPIPSDRLHPLTNLHPLGVLGIHAR

SEQ ID NO: 472076 - protein, 367 aa, unidentified
MFSVIYVGMDVHQDSFSLCALAASSGEIIRETRCSAEVKNIVKFIKHLPENESNQVTLGYEAGIWGYSLHNRLVELGYDCVILAPSTMYSNAKHQMVKNDHQDAQMIAHNLASGTYKAVYVPDQEDDEVKEFIRLIKAMKKELKQTKQRIRAFVLRNGFRFERTPWTEVYLEWLSQLQLPRIKKMVLDEYLVHYHGLTDKIERLSRQLGDLSHQERYQEPIAKLRCFKGIDTVAAMTIHVETSDFSRFPNARAYAAYLGLTPSEHSSGKNVCLGRITKQGNSTIRTTLVESAQGLVRGDPSKKSKKLKARQINQSGRVISYADRAVNRLHKRYERMLHAGKPRNVAIIAVARELACFIWGMENNKIA

SEQ ID NO: 472077 - protein, 342 aa, unidentified
MDIKVLGIDLGKTVCSLAGLDEAGAIVFRKRLQRHRLLDFLDKLPPCIVAMEACGGAHHIGRFCLQNGHEPRLMSPLYVRPYVKVHKNDDRDAEAIAEAATRPTMAFVAIKTEEQLDLQALHRARERLVSDRTRLINQGRGFLMERGIRIGTGRHVFQKELIRLTAEGTDDLSRRMLTLLSDMASELSVINDRILAIDAEIRVLAKTDADMQRLMEIPGVGPTIATALVAAVGTGSSFGKGRDLAAWLGLVPRQITTGGKAKLIGISKHGNRYLRKLFIHGARTVLHLVRDRTSPIAAWADRLKERAHVNVAAVAMANKMARIAWAVLTKRERYQPNALSGL

SEQ ID NO: 472078 - protein, 369 aa, unidentified
MSECITYIGLDVHKETIAVALAEGSSRDQVCEHGQISNTPAALTRLSKKLSRSGSLLQFCYEAGPCGYGIQRHLTAAGHDCVVVAPSLIPRKPGDRIKTDRRDAINLAKLHRAGALTAVWIPDPAHEAIRDLVRARLAAVRSLRQARQQLSGFLLRHGRHYSRSAWTLMHRRWLAGLRFEQPAHHIVLEDCIATIEAATARRDRLTAQIELMLADWALAPVVHALQSLRGLALVAAATVIAELGDITRFTNPRQLMAYLGLVPSEHSSGGTRRQGGVTKAGNATARRMLVEAAWSYRFPARISRDQLLRQETLPKPIRDTAWKAQVRLCGRYRKLSRAGKPATTVTTAIARELAGFVWAIACQMPRPTN

SEQ ID NO: 472079 - protein, 338 aa, unidentified
MIGVDLAKSVFQLHGASMTGQPKFRKKLSRQGFAEFMSKQPPAIVVMEACGSAHYWAREISSLGHEVKLIAPQYVKPFVKRQKNDAADAEAIVIAAQRPEMRFVELKSTEQQSRAILFRARERLVHQRTELVNALRACLYEFGHIVPQGIHQLGRIKGILDEPNSDLPELMREECGDLIKQIAEKTVRINARTAKIKALAAEADTARRLQTIPGVGPLTALAVEAFAPPMESFRCGRDFAAWLGLVPRQFSSGGKERLGQVSKAGQSDIRRLLIIGAMSRLNWLGRKSIPEGSWLARIAARKPRMLVAIALANKMARTIWALLTKNEDYRDSAQAAAA

SEQ ID NO: 472080 - protein, 415 aa, unidentified
MLPQKGKVCGIDVHKKFVVAAVLSNSGEVWIERFAQTQPGLLALKSWVLDHGCEQVAVESTGVYWYSVYSTLEGRIEVIVANPYRIKNIPGRKTDIVDAQWIAELALNSLIKPSRIFPKEDRELRNLTRARENQVHSRTRLKNRIHRVLESASIKLSSVITDIFGKSGQYILQQILQGTSIDTIIQGIPSQKVKEKADALKDAIQHHLGDDQVLIIEQSLDQIGLINQQILDLDAEIQTRLEERKEELRIAMSVPGIGFISAATILAEIGNSQDFASADKLASWAGLTPAVYQSADTLRTGRITKTGSKHLRWILVEVAQAAARKKNSVLRTFFLRLKARKGYTVAIVALARKILCILWHLLTNREYYAEENIPAKRGKMPRLIDRTHKTIEQMIEILVQAGYVVQKRGLFDPGG

SEQ ID NO: 472081 - protein, 424 aa, unidentified
MKVTFQTCCGVDVHKSFLVATIIKTTGGIEPSYQKRRFSTFNNSILEFKKWLLENECLYVCMESTGKYWIPVFNLLEDEINVTIANPKWVKAVKGNKDDTKDSKWIGDLFRLGLVRGSYIPCKKIRILREFTRYRYKLVSCRSSEKNRYQNALTVCNVALDSVVSDIFGKSSTSIIDYLLEQSGTSIDHEVIASKLLKRLKAKEDAVIESIEGYQMTDSQKYRMHLVRAHMDYITAAINDVDSEIESLISSVPDYQNAAELLCTIPGVKHDSAITVISEIGIDMSQFCTSKRLCCWAGLTPGSNESAGKKKSVRITRAGVYLKPALVQCAHAAVKSNKSPYYKKKYESLVKRRGKKRAIIAIARMILTAIFQMLTTGETWNPCDLYKIDMPEALLEKQKQKAIKQAQKLLIREGLLPPTEPIAS

SEQ ID NO: 472082 - protein, 342 aa, unidentified
MAIVAGFDVHRAQITFDALDTESGEVSRGRIDATPAAVTRWSERFAGRAIDVAVEACTGWLFVCDALVAAGAVAHLAEPVETRALRGRKRRAKTDREDARWLRELLADRRLPEAWIPPEHVRQWRSRARLRHTLIDERTQWMQRIQATLFHHGVSGTPEKLRTRAGRAFLDRLALPADARERIEIALAMVDAIDAQITPLERELRQLARRQPGCRALMGLYGMGELTSLVTLCELGDVQRLSASRKAVRMAGIDIGVHRSDRRARVGKLNRQGSPQLRWALYEAALAACRPSSPDHADYLALKARGLSHTRASLTIARKLARRSFHVLRELGPTALEPVPTR

SEQ ID NO: 472083 - protein, 338 aa, unidentified
MNLSRIGLDLAKQVFQVHGVDRHEHVVCRRQLKRAQVRDFFRQLPPCLVAMEACGSAHYWARELRELGHTVRLIAPQFVKPYVKGDKHDAHDAEAICEAASRPSMRYVPVKSAEQQAVQSVHRVRSRLVRTRTALCNEVRGLLGEFGLIATRRGRAATMALLETVMATEPASLPAPMGELLRELKDELQTLEARIARLERQIQAHVRGDARIQRLLAVEGIGPISASAVAASAGDARQFRTGRQFAAWLGLVPRQHSTGGQQRLGNISKRGDTYLRTLLIHGARAVVRCCANKTDARSRWLQGLLQRRPANVVAVALANKNARILWALLSRETCYRPG

SEQ ID NO: 472084 - protein, 452 aa, unidentified
MKEVQEIPDEEHEQVLSRVAAVDVAKASGMVCTRVPHPSTPGRRVSKVWQVSATTNAILALADELAECDVERVVVESTSDYWRPFFYLLEARGLSVWLVNAHQVKNVPGRPKTDKLDAVWLAKLTERGMLRPSFVPPAEIRELRDYTRLRVDLTRERSRHAQRLEKLLEDALLKLSTVATDLMGVSGRAMIEALIAGQRDPRMLADLARGRLRVKHAALIEALTGRFDDHHGELARLLLDCYDALTVQIEQLTARIDTLIGQLPAAQPPAGDNGNGNSSAGGAAAAEARLLPAVERLDEIPGIGPRGAQLIIAELGLDMTQFPTAGHLVSWSRLCPRTIQSGTKSRSGKTGRGNPYLKGLLGEAAAAAAKTDTFLGARYRRLVKRRGKLKALVAVARSILVIIWHLLADPTARYHDLGPDYHTSRIDTERKTRGHVRQLQALGYDVTLTVAA

SEQ ID NO: 472085 - protein, 355 aa, unidentified
MNDEKYIGLDVHQATIVVAVLDSTGKLVMESILETKAATILQFFAGLRGTLAVTFEEGTWSAWLYDLLHSRVDKLVVCNPRKNALLKDGNKSDRIDARKLAELLRGNQLKPVYHGETGVRMLRELSRSYLTIVKDLSRVMNRLKAVYRSWAIPCAGRDVYYRRHRVQWLAKIREAGVRRRAERLYEQLDMLQHLRQQARRELLAESRKHAITAKLRQIPYLGPIRVALAVALIQTPHRFRTKRQLWAYSGLALETRTSAEYRFVEGQVRRSKKLLAIRGLNKDHNHDLKGLFKGAATMASVRPGPFQDFYTAALAKGIKPTMARLTLARKIAAITLTLWKKGENFDAEKLKSQAA

SEQ ID NO: 472086 - protein, 310 aa, unidentified
MSITPSWIGIDISKAWLDIADPALERAARVANGEPAIAAFAATLAGRDVIVVFEATGVYDTCLRHALAAAGVACVRVNPQRARDFARATGRLAKTDAIDAAMLAEMGRALCLAPDPVPDDTREKLNLLNKRRDQLVAMRQQKRLRRMAAADPVVCAGLDAHLDWLDRAVGEIEAAIRDLVRASSELTEAETLLRSTPGIGEVGAAVLIGLLPELGCRPARQIAMLAGLAPVNQDSGTRRGQRSIRGGRRRVRQALYMAAVVTLRTRSPLKAFYDRLRNAGKPAKVALIALARKILVTLNAMLRSKTPYAA

SEQ ID NO: 472087 - protein, 312 aa, unidentified
MTHQIFIGVDVAKDWLDIHHASHGATRINNSPAAARSFAARCAKEAAWVVFEASGGYDHQLRDALESAQVRFSRINPRQARDFAKAMGVIGKTDRVDARMLAELGARLTPAPTQPLRPERRTLQAQATRRRQLVEMRKQEATRLQQTADPVARADIRGVIALLDRRIAKIEKRIADLVSADPELAAIDRRLRTAPGVGPVVAATLITELPELGQIDRRSIAALAGLAPIARDSGRRSGPRSIGGGRPIVRTILYLAALQASRRSPGFIHFRERLQAAGKSVKAAIIATARKLVVTLNAMLATGTDYRPEAAN

SEQ ID NO: 472088 - protein, 375 aa, unidentified
MKEKVRFLGLDVHAETIAVAVAEPDGSIRELGTIANRAESVRKLVKKLGPIEQLKACYEAGPTGYVLYWQLTELGVECAVIAPTLVPMKAGDRVKTDRRDAGKLARCHRAGDLTAVWVPDEGSEALRDLVRAREAAKQDQLRARHRLSKFLLRTGQRSAPGVKAWTELYMAWVRQLRYRQAAQESTRLDYLHEVEHMAERVKRLEQAIAEAVKLASPEVQEVVKDLQALRGIAQISAVTIAAELGNISRFDTPRQLMGYSGAVPRENSSGKRQQRGSITKTGNAHLRRIAIEAAWSYRLRPGIGPGLRKRLEGVPEEIGEIAWKAQHRLHKRYSRLAAAGKDQRKIITAVGRELLGFIWAIGIKAETAARQRMAA

SEQ ID NO: 472089 - protein, 370 aa, unidentified
MLDTTTFVGLDVHARSIKAVSLDVMTGEVRAATFGYDAGAVAEWVLSVDPKARCVYESGVTGFDLQKRLSGLGVDCVVGAVSKMIKPSADRRRKNDRNDAEFLARMLSVGNVVKVWVPDDECEAARDLTRALEDARDDLSRAKQRLSKFLLRHGLAFDERTPTGRRKGNWTRAHWSWIESIEFAEKADNDVLAYYVDAVRRAAEEKARLEGLVGAEARKPRWRKRVDSLRCLKGVDTASAADLVFEAGEFSRFGNARSFASWVGLTPSEHSSGESDRRGAITKAGNKHLRKTLVEAAWHYLSCSARPKDPARGQVPDPGARRHAAKGVRRLVERREALLARGVHNNKANVATARELACWVWAVGLMAEEA

SEQ ID NO: 472090 - protein, 405 aa, unidentified
MKQSRTNGRDLEGSGALQLNNNEQTNTPMKKELYLGLDVHKDCIITAVAEEGRKGEVRDTGVISNDLHALEKWVGRLRKAHGRDVILRACYEAGPCGFGIARRLKQLGVECEVVAPSLTPKRAGERVKTDRRDARKLARLLRAGELTPVYIPEATDEAIRDLCRARTDAVDDRRRSRHRLKGFLLRHGYRYQGKSSWSAAHERYLRELVLPHPAMKVILEEYLQGIAAAGERIARCEVGMRALLEQWRLAPAVRALMALKGFQTVAAMIVVSELGEVDRFAHPRQVMAYLGLVPTENTSNDKRRQGRITKCGNAHARWLLVECAQHYATPPKVSQHLSRRQQGQPAQVRAISWRAQNRLHSRYTRLLGRRLQRNKAMVAIARELCGFIWELLHTQSCYHVRATSV

SEQ ID NO: 472091 - protein, 326 aa, unidentified
MEHELHYIGIDTAKEKLDVDVLCPDGRHRTKKFANTTKGHDELVSWLKGHKIDHAHICIEATGTYMEPVAECLYDAGYIVSVINPALGKAFAQSEGLRNKTDTVDARMLAEFCRQKSPAAWEAPHPLERALRALVVRHQALTDMHTQELNRTETAREVQRPSIDAHLLWLEAELKRLEKQIKDLTDDDPDMKHRRKLLESIPGIGEKTSAVLLAYIGLKDRFAHARQFAAFAGLTPRRYESGSSVRGASRMSKAGHVSLRRALYMPAMVATSKTEWGRAFRDRLAANGKKGKVILGAMMRKLAQVAYGVLKSGVPFDASRHNPVAA

SEQ ID NO: 472092 - protein, 378 aa, unidentified
MDVIYPRCAGLDVHAETIVACALWEEDGHIQKDIQTFSTFSKGLGDLLEWLEEHGVTHVAMESTGVYWKPVFAFLEGYVDLTLANPQRIKNVPGRKTDVSDAEWIAKLLRHGLVEKSFVPPADIRELRDFTRLRKKWVGQLTSEKNRIQKVLESSNVKLGSVLSDLFGVSGKDILARLLEKGYVDKDELDQCLRGRLKKKKQAVYDSLLGTLTEHELRLLRLLWKHVEELERLIEEVDQHIDRLLEPYREEVDLLMTMPGIKKQTAAVIIAEMGTDMSVFETPERAASWTGLSPGNHESAGKRKSTRTTKGNPHLRSALCEAAWSAARSKTHPLSRKFWSLAARCGKKKALIAIARRMLVIIFCMISRKEPFRQPQLI

SEQ ID NO: 472093 - protein, 519 aa, unidentified
MESDAAINSLVAGEHRSVPQDPVGESVSIFRRLSQASFVGIPTMKKNKGAKPKTKSEGSKAIQEPNPDAGGIDLSPTEIWVAVPPQRAQNSVRKFEAFTKDLLELVQWLVQCGVRTVAMEATGVYWIPLYQLLEDAKIKVCLVNARHVKNVPGRKSDVRDCQWLQYLLSVGLLRGSFRPAQAVCAARSIWRYRQELITTAGQYIQHMQAALDQMNIKLHYVIDDLTGLTGQAIIEAILKGQRDPVQLAKLRDKRIKAPESTIAKALEGDWRKEHLFVLQKAWESYHQIQHQIHQCDQELLAYARKLEAATQVIQAAKTMRLRPELLGTEPDSKMPVQKPPKVRKKTSKNQPQGPWKEELERFFSVDLTAIPGVSVLTGLTLMTELGNDLSAFKTEHHFASWLCLCPDNETSAGKVLRRRTRRSQNRVRYALRMAASSLHHDKSYLGQKYRRLRTRLGAPKAIVAMAHQLARIIWTLISRQWPFDHSVFAYEEKLNEQRQLKRLKASARQMGYQLAPIAA

SEQ ID NO: 472094 - protein, 346 aa, unidentified
MSQPQHFVGLDVSVKQTALCVVDAQGRVVHRALVESDPVVIGGHLLALGLAFERVGLEAGPLSPWLYAGLVEAGLPAICVETRHMHAALSARINKSDRNDALGIAQMMRVGLFKPVHVKTPASQQRRLLLTSRKLLQRKVYDIENDLRGQLRNFGLKVGVVGAVGFEQRVRDLVGDLPAIAAVVIPLLAARSALRVQLAKLHKMLLDEVRADPVCRRLMTAPGVGPVVALTYRACIDNPARFSRSKCVGAHYGLTPRLYQSGETARVGRVSRCGDAMMRAALYEAALVLLTGSRGRWSTLKAWGMGVAKRRGMQKAIVAVARKLAIVLHRMWRDASDFRWSTAQAA

SEQ ID NO: 472095 - protein, 365 aa, unidentified
MQKISTMRTSKKNILQGQLTIGVDLGDRSSAYCVLNAAGEIVLENKLATTPEAMKQVFGSMPRCRIAMETGTHSPWVSRLLTALGHEVIVAHAQKVRLITKSRRKDDRLDARTLARLARIDPELLSPVKHRSAQAQLHLTEIRARAVLVSARTALVNAARGLVKSYGERLRKCGTQQFRQETASRLSAGLREALAPLLREVESLNERIQEYDRRIEKMAKQTYPETTLLKQVKGVGDLIATAYVLTVEDPHRFRKSRDAGCFVGLQPGRRNSGESEPQMHISKEGDEYLRTLLVQGAHYILGPFGEDSDLRRWGKKLAARGGKNAKKRAVVAVARKLAVLLHRLWVSGEVYEPLRNSQKAMNAAA

SEQ ID NO: 472096 - protein, 431 aa, unidentified
MLKINPLSTLYVGIDVSSKSNYVCALDFFKNKYINSSFANNQPGAEELALKILECLNQHPDLTMVVAALESTSVYSIHIANYLSSCEELMRFKPYVFVLNPKCTANYKKSYIGLGKSDPIDAFVIADYARAGNIESEPWRGSQFLALKRLTRHRLHLVECMTREKTYLVSNLYLKFSELQMLEGDDQPFCDIYGATSSSVLMEYLSPEEILASSEEDLIAFLAEKSRNRIKDISKTADLLKKAARDSYRLDKALYEPLNVSIASSFNCIETFKREIKVIDNAIEKEIKGLNPNAFIILQSIDGIGPVFAGGIIAEIGDITAFHSSDALAKYAGLTWKSNQSGDFDGEDTPMIKAGNRYLRYYLGEAANSMRKHNVEYGTYYRKKYNEVPKHQHKRALALTSRKFVRLVYGLLARNQLYSGVSLDTSIKNSN

SEQ ID NO: 472097 - protein, 422 aa, unidentified
MKTDSLHVIHARAAGLDVHKMEITVSVRICAPGGGEPRVETQGFEALPSGLDEMVGWMLEREVDAAVMEGTGIYWLAPFEALEAAGIAVSLVNAHQVKQLKGRKSDVADSVWLARVCQFGLASPSYVPPRAFRELRVLTRYRRSLIDQRSRVRNRVQKIIDRAGVRVGGVLRDVFGMNGRRILDGLAEGLGRDAILGSLSHHVASKIERLGDALRLSLSGADRLLLCDLLLEHDALDERIGALDGELREGFAPWEDRIVLMLTIPGIDRAAAYAILAEIGPDLGVFGSSERLAAWAGLCPGNRESAGKRRSERTRRGSKVLRTVLIGCAHGAARTGGCQFRGYHKALMVRRGYKRAIVATAHKMLRVIYVVLREGRPYHDPEADYEALMVSRNAPRWVRMLRRYGYLEPGVPYGNAANFATA

SEQ ID NO: 472098 - protein, 349 aa, unidentified
MVVLGADVHKRTHTFVAVDGVGRQLGQFTVSADGKGHDKALRWARQQFPGERRWGIEDCRHLSARLERDLLSGGEQVVRVPPKLMAQSRASARTRGKSDPIDALAVARAVLREPDLPVAAHDETSRELKLLVDRREDLVGERTRMVNRFRWHLHELDPQLDRSVRSLDRAKTRLVLAEQLSHFDGLVAELTRDILADIDRITGVINALETRISHRVEEQAAGLIGIPGCAALTAAKIVGETAGIGRFRSEACYARHAGVAPIPVWSGNTAGRVRLSRSGNRQLNCALHRIAVTQIRLDGDGRRYYRKRLMAGDSTTEALRCLKRRLARVVFQTLKTQPEQAAALTPAAA

SEQ ID NO: 472099 - protein, 341 aa, unidentified
MNITTIGIDLAKSIFQLHGANSCGKKTFSKRVSREKFTEIVQQLPASLIGMEACGSAHYWARRFTQMGHRVQLMSPQYVKPYVKTNKNDRNDAEAICEAVTRPTMRFVAIKTVEQQDIQLLHKVRTKIIKEKVALGNQIRGLLMEYGVAIPQGDCSLKKALADLSSIKNSDLTENSIFIFNELYTEFLNLELRMEQYTKKLLLISKQNESCKRLMSIPGIGEITSTALISSIGNFSNFKNGRNLSAWLGLVPRQNSSGQKTRLLGISKRGDKYLRSLLIHGARAVVNQVKDKVDKTSLWIKGLLEKNGFNKTVVALANKNARIAWSVITKDTNYNAEHAHG

SEQ ID NO: 472100 - protein, 441 aa, unidentified
MNILFNWQENILGQSHVKRTIVINRDPEPVREFGFFTEDIQKLAQWLKECKIETVALEATGSFWIPLYDALIEQNIEVCLVNARHIKNVSGRKTDVQDCQWIQQLHSCGLLKPSFIPDQLTSKLRHFVRHRDALIRRAATELQLMQKALVEMNLQLQNVVSDIAGDTGMKIIRAICSGEQDPKKLSKYRDPRCKNSEETIEKSLKGHYKEEVVFCLQQALETYDHYQMQITHCNAEIEKRMKEFEDKSGGIPLNGRKREAKKNNIGFDLQGDLWRILGVNLMEIPSMNTQTALAFISEIGTSVEKWATAKHFASWLGLCPNNRVSGGKRLSGKTKAGSSHLRRALRLAAVALERSATALGAFYRRMKARLGAPKAIVAAAHKLAVLIYNLIKHGAKYQEKGPLYFEKEYKERTEKRLKRLAAQLGYDLTPKSQETVQTKMA

SEQ ID NO: 472101 - protein, 344 aa, unidentified
MVLIGCDFHPSWQQVCWVDMTTGETREQKLVHAAGEAEKFYRQLPPPALIGMEATGNCQWFVEMATAAGHDVWIGDAAKIRASDVRQQKHDKRDAALLLQLLIEGRFPRIWTPSSQQRDMRQLLIHRHKLVGLRGQAKNGLQHLAMNQGVQKKRRLWSAAGQKLLRELPLAPWASRRREDLLGVMAMLDQQVQSLDLAVKQAAENDANARLLMSQPGVGPVTSLAFVLTMGDGSRFQRGKQVASYLGLIPREYSSGGHQRLGSISKQGNRFMRMLLVEAAQVAVRCDPGFRNEYLHRCHSKPKGVAKVAAARKLAIRLYWMLRTQKRYPEIVRIESSSRVPLAG

SEQ ID NO: 472102 - protein, 457 aa, unidentified
MSQTKRSRKSRGLSPVHPAAAAIDIGATMHVAAVGPDRDKEPVRTFRTFTGDLERLADWFARCGIKTIAMESTGVYWIPVFEILQQRGFEVIVVNARDAKHVPGRKTDVSDAQWLQRLHEYGLLRASFRPQAEIAELRAYLRQRERLLDYAAAHIQHMQKALMQMNLQLHHVLTDITGVTGLSIIRAIVAGERDPSVLASHRDRRCQASVETVCQALAGNYRAEHIFALTQGLELYDVYQTKVVACDKQIEAILKRLQKSATPPANKLTPARQRTRQPNAPAFDARAALHAILGVDPTQINGLGPYLALKLVGECGTSLAAWPTAKHFTSWLALAPHNKISGGKVLSSKTRRTSNRAAALLRLAAGTVGRTDTALGAFYRRLSARVGKAKAITATARKIAVLFYNMLRHGMSYVDPGAAYYEDRYKQRVLHNLQRRAKSLGFVLQPSAPDIARADVS

SEQ ID NO: 472103 - protein, 351 aa, unidentified
MSLVMLGIDPHKQSHTATALVTGSHQQLATLRVPASPAGYRQLLAWAQQFPQRRWAVENARGLGYHLTQWLLARGETVQDVRTTATARVRELSRGRGRTTDALDAAAAAGIAALQGDAAQLQPEDATVVLAVLEERRSNLVAQRTRSVNQLHGVLRELIPGGAPPKLRADRAAALLRGLRPLTAADRARKQVAWDLVAEVGGLDRRLAMIGNRIQDTVAALGSRATQTVGVGPVIAGRLLGRTGRASRFPTAAHFASDTGAAPVEVASGERARHRLSRAGDRQLNHALHIIALVQVGTPGCAGYHSFRRKLAEGKTSREAMRCLKRRIADHVWRVMLSDEQARNHRQPQAA

SEQ ID NO: 472104 - protein, 370 aa, unidentified
MHEGKDIVLVADYHAENIEYRWFNQATGEERTGKYPTTRAGILRQVEQAIGELESGGKVVWIMESTTGWARVKDLLGPRVTFVLANVLQMPLPPKAKRRKTDKIDTGRLMREYLHGGLPRSFQPSVRWREIRRVVDCRQELVKRQTAIKNWIGALLHHETWDQRENLWSAAGQRRLAAIKLSACDRALVEIKLSQMKHLAAEIEQVEGIMQTAYDAWPDAQRVDAIRGIGMVTAVSLLAHIGPVERFATAEDLISYAGLAPGMWQSDGTCRHGRIGGGGTDSHLRYLLIEATTWLRQIPRYKPAYERMLQKRGKKIARIVIARMLLRGIHKMLKDQIRFNPMPRLSTTTKAATTETTTKTKTAETASCSR

SEQ ID NO: 472105 - protein, 338 aa, unidentified
MTCYSGIDLHSTNSVVVVSDEADRVLYERRLPNDLLKIRAALEPYRGELAGVVVESTYNWYWLIDGLQAAGYAVHLANPAAMKRYEGIKHSGDETDAAYLAHLLRLGILPTGYICPPAERAVRDLARKRSQLVRTRTAQVLAVENVFARETGGRMSANVIKRLEVAGLGEYGLGEDVTCSLAANVAVIQALTAEIEKLEARLRQRVRPRPQYRLLKTAPGIGEVLATTIMLETGPIERFAAVGNFASYARCVDSKHLSNGKKKGEGNVRNGNKYLAWAFIEAANFARRYCPEARRFYERKKAATNGIVATKALAHKLARACYHMLKEGQPFDVKRCFT

SEQ ID NO: 472106 - protein, 341 aa, unidentified
MRYIGLDVHKDNITACVLTSTGKPKFEKDFIKDSESWNLSELMEYGDKDGFCVMMESGTYAYQPFRFFSDQGVETHVVHAQALKVITQSDKKTDRKDAYTIARMLRLWKRGEIDLQMAFMPTREQCELKDICRYREEISRKIGDETRRIKSHMSRNCEYLPESFNDFQSQRARNYVRFNFSSDLTLMNRMAGLERLFAERDSIQKEVESRLPDSRDVEILMTIPGVARQTAVQIMSMIVDIDRFDDAEKLCAYFGLVPRVRDSGGKEHHGRMTKNGDRMMRAIMERVTESHVRNCDSSVTKYYKRKCSEMGTKKALITASRKMLSVIFAMLKSGSDFRLAA

SEQ ID NO: 472107 - protein, 298 aa, unidentified
MTMISSEECFSSASSGTVVEVVLGVDTHLDVHVAVALDHLGRRLDTFSVPTTKKGYEDLLAWAESFGGVRCAGVEGTSSYGAGLARYLRAVGIEVKEVERPKRRHRRRNGKSDTRDAEAAARAVLAGETAGEPKSGDGRVEMIRVLRSARRSAVKARSQVTNQLQGFLVTAPEELRQRLRELTTKELVAVAARLRPSKDLDDVETATKFALRSVARRYQALSEEIAELDTQLDRLVSETAPELISLPAIGTDHAATLLLTVGDNPERLGSEASFASLCGVSPVEASSGKVVRHRLNLM

SEQ ID NO: 472108 - protein, 426 aa, unidentified
MDIVHPRVAGIDVHKKVIWVAVRLPGDQRGGRAVTVRRFATFWRQLQKMAAWLTELGVTDAAMESTGVYWWPVYHALAGEQIEVCVCNAAHMRNVPGRKTDLRDCQWIAELHEHGLLRPSFIPAAHVAALRQRTRYRKKLVEQRISEGQRLTKVLEDAGIKIDSVASDLLGVSGRAMMEALIAGERNPARLAELAKGVLRRKMEGLQMACDGRFTAAHGQMCRLHLDAYDHLTARIAELDVLVAGAAAPFRAVIARLVTIPGIGQRTAEVIVAETGGDMTRFATPARLAAWAGLAPGDNESAGKRRRAAARPGNRHLCTALVESAWSTARTRSRPGARFRRLARRFGRGNEKKAAVAVAHTLASIAWTVIKNEHDYTEAGEDYYERLDRRNHDHLVRHHQQALARLGYQVTLSPPGDGSPPPAQAA

SEQ ID NO: 472109 - protein, 383 aa, unidentified
MERKIKPKVFAIDVGESRLVATKMEINNNTVKEADTREFKYNEEGLKELIKFLEGYEEGIMEATGVYFYHVYNVLRDNGLKVNVINPVQTVEVLGKKTDKNDSIRLAIAYAAGTVKGSYIPTGEMQELREMTRHREGLVERKTQVKNEIRKVLETAGYKLPPFEKKTKEIVRKLATDEKLTDEEIKEYSKLLGRKLTRIEAFILKQLLDLLNIIEEQIKEVENEIMKFLPEEAVELTKIPGIGPISAATIYAELGDVSRFESSKQAASYAGVSPRTKQSGKTEFHNGLIKGNKHLSRVLFLVARSAKNTAQFNGFYQALLKRTSNSKKATLALANKICRIVYHVLKDGEYKGETKKTRYRGGGGEGPQVDPNQVVPSALQAIA

SEQ ID NO: 472110 - protein, 315 aa, unidentified
MILVGCDFHSRYQQIACVDAETGDLIERRLEHENGEAFEFYRSLTAPARVGVEATRGLQWFARMLNQLGHELIVGDAAKIRTMVVRRQKTDSRDASHLLELLMNDRFPEVWAPSSSENDLRQLLWHRQKLVWIKVSVKNQLHGLAMSQGVCRRSKLWNAEGRKQLANLTLDPWAGRRRDELLRMLDQLEESIEQLSAAVEEAGQDREDVRLLLTHPGVGRIVALAFSLMIGPVDRFPSSKHLVSYLGLNPREHSSGGRQKFGGISKQGNRLMRTLLVEAAQTAARVEPNLRRHYRHLRFRKASAVAKVAIAGNWP

SEQ ID NO: 472111 - protein, 376 aa, unidentified
MREKLRFLGLDVHAETIAVAVAEPDGEVRSLGTIPNREDSIRKFIRKLGSPQQLRACYEAGPTGFVLYWQLTQLGVKCDVVAPSLVPKKPGDRVKTDRRDALKLARSHRSDDLTAVWVPDEESEALRDLVRAREAAKQDQLRARHRLTKFLLRTGQRPPLGVKAWTERHAEWLQKVRYTHPAREATLLDCLHEVQHMAQRVKRLEQSIVEVIQLAPASMQEVIRGLQALRGIAHISAVTIAVELGNITSRFENPRGLMGYSGAFPSEDSSGKRIRRGGITKSGNAHLRRIVVESAWSYRHRPAIGARLRRRQEGLPAEITEIAWKAQNRLHKRYMTLMARGKDQRKTMTAVARELLGFIWAIGIKAEAAAQQQMAA

SEQ ID NO: 472112 - protein, 347 aa, unidentified
MKILALDLGKFKSVACVYETTSARHRFERTTTTAKALHDLLVEHEPERVVIEICSIAGWVSDLVRMLGIELQVTSTMHEAWRWRQVKRKNDRADALKLAQLSALNQLRLVHVPERETRQWRALINYRHRLIRQRTSSKNHIRDVLNREGLWLARGSAAWTSKGLEQLLELARPLAEVGLGELWRGELAVELLNLQTLEQQLRQVETKLDELGGAAAGVRLLQTIPGVGPRLAEALVALIDKPQRFQRGKEVGAYLGLTPKQIQSGESNRLGRITHAGSRVVRALLVEVSWVGLRYNSWMRGVYERTRRNSKTRKKIAIVAVARRLLIRCWAMLRDGTAWQPEYRAIR

SEQ ID NO: 472113 - protein, 344 aa, unidentified
MKKEEFECIGVDVSKNTLDVALFRGKVDWNEGHIKVENNCVGYKEMKKWLCLKGAEKRQLRVCMESTGLYTHNFRTWLEKEGITYYVVDSKLMHNFAPPQSIKGIRQTKNDKADAFRIAIYCSLFHDAMVPSKLPSAAYFKLKRLLAERRQYLKQSVLYKQQLHDISIYDTVSSRLRKEEELKNLKNHIKQTDAEILTVLETDEAIKRNYNLLISIVGVGLVVAVTTIVLTENFTTFTNPRKYASYIAIAPFPHESGISVRGATRVSKQGFRQAKADLSISVLSAMSYDPELKEYWLRKKAEGKHAGTILNAIKFKIVLRMFAVVKRGTPYVNTKGYKRMKHGQ

SEQ ID NO: 472114 - protein, 371 aa, unidentified
MTQSSKTLYVGLDVHKESIAVAYAPEDRGAEVVSLGPIGTRQCDIDKLIRRLESKAATLMFTYEAGPCGYGLYRYLTGKGFACHVVAPSLIPRKPGDRVKTDRRDAMTLARSMRSGDLTSIYVPGIEDEALRDLSRGRDDAMQDLKRSKRRLKSFLLRQDIRYEGRATWNAAHLRWLAAVVCPTPPQQIVFQESLRAVTEQHERRQRLEHELQAAVQGWRLYPMVQAIQALRGVELTGAVILLTELGDLTRFENPRQLMSYLGLTPSEYSSGARRRQGGITKAGNSHARRALVEGAWAYRYPAKVSRHLQLRLETLPTEVQAISWKAQVRLCKRYRQLTARGKHVNQVVVAIARELAAFAWAIARLVPLPA

SEQ ID NO: 472115 - protein, 338 aa, unidentified
MLHSGIDLHKRTVVLSTVDAVGAGVDEAELPTSRAVVRAYFTAHPGPHRAVVESTATWYWLRDLLVPMGIDLRLGHSKYIKAISYAKVKTDAIDAHTLAQLLRSDLIPEGHMISAAHREERDLLRARLRLVSQQVRCRLVVEGLLAQYNVASVAALPPLVQLRVDLLTQQRTLLTAHVKQIEKELAPRLVPTPDAQRLLYIPGIGKIAAFTVLLEIDTITRFPTVKDFVSYCRLVPSAKNSGGKTRQQRSKDGNKYLKLAFHHAAVRAIQYFPEIQRFYRSMARRKPAAVARALVAKELARAVYFVLSRQETFNGTFKEHTLSRTKTTKWPRLANPPA

SEQ ID NO: 472116 - protein, 369 aa, unidentified
MQENTSVATLVDLRKRKNIGRMTIGIDLGDRKSHFCVLNDQAQVIARGFLPTSISAFRHEFESLPPSLIAIEACGHSLWASQVLKVCGHDVLVGNPRKIRMITESDRKNDRVDAETLARLARADRLLLAPIQYRTQEKQVQLAVIRARQVLVRSRTALINCARGLVKPMGLRFRACSADAFAKRAAATPLPEVLRIALAPLLKQIEALNESIRDYDRQIEQIAATQYPETCLLKQIKGVGTLISLTYVLTLEDPHRFAKSRDVGAFLGFLPREKQSGERWPRLGISRAGNEYLRTLLVQGAHYILGPLGPDTDLRRWGLQLAARGGGGAKKRAVTAVARKLAVLLHHFWKTGEVYEPLRKNQLSDTEAA

SEQ ID NO: 472117 - protein, 338 aa, unidentified
MKITTVGLDLAKVIFTVHGVDEHGKAVLRKTVRRAKLLELFAQLPACVVGMEACSGAQHWARELRKLGHEPRIMAAEFVEPYRQGGKNDANDAAAICEAVSRPTMRFVAVKSVEQQAVLAVHRVRQGLVEERTALGNRLRGLLAEYGVVVGTGLDRLRRALPEILEDGANTIPGIAREVFADAEQHLRQLDARIATYDRRIAALAKASAPAQRLMKVEGVGPVTATALVASVGDAKVFHNGRQFAAWLGLTPRQHSTGGKQRLGAMTKHGDVYLRTLLIHGARAVLRVSPLRSDAKSRWVQTLRQRRPDNVAAVALAAKTARISWALLARDRNYQSTD

SEQ ID NO: 472118 - protein, 414 aa, unidentified
MELLHERCAALDIGKKDLKACVRTPNPAGKRSRRQEIRTFATTTNALLGLRDWLIAERVSLVVMEATGDYWRGAFYLLEDDLNVILVNAAHAKGLPGRKTDVCDAAWLCQLGECGLLRASFVPPEPIRQLRDLTRYRTTLTAERSREAQRLEKELEDAGIKLSSVATDILGVSGRAMLAALIDGERDPQVLAEMAKARMRPKIPHLVQALTGNFGEHHAFLCRLHLQRIDQLTAAIEELSARIEEQMRPFARQLEHLATIPGVGQTVAEVIVAETGADMGRFRTAGNLASWAGVCPGHHESAGKRRSGKTRHGNRWLTGALGTAAMATARTKDTTYLGTRYQRLARRVGKKKAIVAVEHSILTAVWHMLTDDVDYADLGGDYFARLDPELAMRRIIRQANTLGFTVRFDPIQAA

SEQ ID NO: 472119 - protein, 412 aa, unidentified
MVSVMNQDTGFDIWCELDVGKQAHHACALDAAGRKVFDKPLPQDQTKLEDLFHNLAEHGRVLMIVDQPNTIGALPIAVARSMGITVAYLPGLAMRRAADLYPGNAKTDAKDAFIIADTARTMPHTLRRVDAGEETLAELKVLVGFDEDLAAEATRLSNRIRGLLTQIHPALERVVGPRLTTKQGLAVIEQLGGPQGIAGLTKSKLLRVITKAYPRNAQAFADAITTALGEQTVIVAGTAAAEQVLPKLAASLRQVLDQRAELALQVEKVVDAHPLAEVLTSMPGVGVRTAARILLDVGDASQFPTAGHLAAYAGLAPVTRRSGTSIRGEFPARSGNKHLKRALFLSSFAALRSDPISRAYYDRKRAQGKKHNAALICLSRRRCDVLFAMIKNREPYRAPAPAPDPSPMPLAA

SEQ ID NO: 472120 - protein, 316 aa, unidentified
MNTLSNPEINVGVDTGKKQLDIYIRPLAIFFKVENNPQGIKEAVKKIKLHAPSRIIIESTGRFETLFVEACRKAELPIMVANPLLVRRFVAATGKLAKTDRIDAEIIAFYGEAIKPRLSAVKPEQLGLMSNLLSRRRQLKEMATMEKNRLAIMPKSFHKDIHQLLKAIEKQVERIDTQLDELIENTPKWHQLSALLQSTPGVGKVLAYTLLAELPEIGQLSSKQIAALVGVAPMNKESGTYKGKRQIRGGRHQVRTVLFMAIRSAIRCNSVIKSYYERLKLVGKTPKVAIVACMRKLITILNTMVKKNTHWEANPI

SEQ ID NO: 472121 - protein, 349 aa, unidentified
MRFYNKQHQFYCGIDLHARTMYVCIMDHEGTILTHRNMPTTVQTLADVLQPYRQDLVLAVECIFTWYWVADLCSRIGVEFVLGHALYMKAIHGGKVKNDKIDSQKIAALLRSGMLPMAYVYPQQMRSTRDLLRRRLYLSRQHAQLQTHIQNTNTQYNLPPFEKRIDRRSNRTGIGDRFTDPMVRTTIEVDVALLDALHEQILAIERQINAQVPEHDPVAVHLLRSIPGVGKILALVIFYEIHDINRFPKVGNFISYARLVKCAHESAGKRRTGKNSKIGNVHLKWAFSEAACLFLRRNERAKHYHKRLVSKYGNAKALSIIAQKLGRTVYSMLKRRTPFDPKRFFETVG

SEQ ID NO: 472122 - protein, 360 aa, unidentified
MKKSNRETEWKERPAQTVGVDLGDRFSRYCVLNSDGEVIEEGRVATSEEGFRRQWEGEPRQRIIVETGTHSPWVSRLLKGLGHQVIVANARKVRAIWENESKNDRRDAEMLAQLGYSNPRLLSPVRHRSMERQRDLNLLRARDTLVRARTMLINSVRGLVKSAGGRLPACTADYFAKKVSSMLPKELKAAGEPMVEQITALTIQIRRLDQEIENLAQRYPEISLLRTVPGVGPVIAAAYVLTLDRVDAVEHSRSAGAFLGLRPRQSQSGDSDPEHNISKTGNLYLRRLLVQAAHYILGRFGKDSALRRWGLKLALGGKRAKKRAVVAVARKLAVILHRMWRTGQNYQPFPQPTAGVAQVS

SEQ ID NO: 472123 - protein, 418 aa, unidentified
METDYAVLIGLDWSSLKHDLCVLDTKTKETTRLVLTHTPEQINEWVSELIAKYPGQRIAICLEQSRGPLVYALMDCAEIDLYSVNPASFAKYRNAFQPSGAKNDVGDAALLLDMLLRHREQLKVWRPHTPAMRLLSSLCRDRRKIVDSRTKRTNALCAKLKEYYPQAIELVGDILYSELCCAFLKKWPSWDRLAAAKPDQIRKFYYAQRCRNPKVIEKRLELIATGCALTNDAAVIESNSMFIKALIDEIRVLNKSIAEYDARISKVFKEHPDTFIFKSFPGAGQQQAPRLMVAFGEDRDRYESAEDVASLFGVAPVLTSSGKQMSVRWRYHAPKFLRQSIVEYAGSSIIFSKWAKLYYNEQRKRGKGHNAAVRALAFKWIRILFKCWKDRVPYDEQKYLASLKQHGSWLAEAVNNAA

SEQ ID NO: 472124 - protein, 343 aa, unidentified
MEIQTIGIDLGKSLFHLVGVDSSGSVVVRKRCSRSQLLAYTANLRVQRIGMEACSGSHFLGRALRDQGHDVRLMPAQYVKPYVKTNKSDYIDAEAIAEAVQRPTMRFVPIKTEDQLDLQAVHRVRERWVMRRTAVVNQIRGLLLERGLTLPKGRCYVDQALPDILEDATLRLSDSFRLLLAQLKLELDQLTARIEQMDAVLQHTAKDNEACQRLTTIPGIGPVTATALIAAIGNGSGFRRGRDLAAWVGMVPREYTTGGKQKLLGISKRGNRYLRKLFVQGARAVMQRRHNQAPELSAWLAQLLVRTHQNVAIVALANKLLRMAWAVLCKNETYRPPALVPSS

SEQ ID NO: 472125 - protein, 351 aa, unidentified
MKEYIAFDSHKHYTLMEREDVATGRTRQVRIEHAPGAIRKSLAGCPAGTPVPVEATGNWYWIVKEIEEAGLRPVLVHPRKAKLMMGMINKTDKLDVHGLNRLQRNGTLPTVWIPPGDLRDLRELTRGRVALTRQRTRLKNVIRSALTKYGLQMGEVSDPFGIRARKGLDERVAQLPSETRFMTGLFLDQLDFIAKQIATVEKRFQALVKATPDMERLTTMPGVAAILAATIALEVGDASRFPDAEHLASYAGTTPRVHSSGGKTRYGKLRSDVNRHLKWAFAEAGNSVAVNHRRRPEKHVSRIYRRVRQRRGHAVAVGAVARHLAEATFYILAKKETYRDPSWRNGRAREA

SEQ ID NO: 472126 - protein, 340 aa, unidentified
MEKASMIGLDIAKNVFEVHGRSAAGEVVLRRSLKRSQVEKFFARQPKAVIGLEACGSAHHWARLLGKLGHEVRLMPPAYVKPYVKRNKSDAIDAAACWEAVGRPDMRFVPVKTVDQQAALSLHRSRDLLVSQRTQLGNALRALLAEFGIVAGKGKAGLAQLVDELRAGQLELPADAVMAAMALADQRAALDAAADALERRITAQAKADKKAVMLKTAPGVGPLSAHATLATMPDPSLFKSGRDFAAWLGLTPRIHGTGGKTHTGRITKQGNQPLRRLLVLGATAWVSYAKAHPEKASPWLRGMLARRPKKVVAVAQAARTARILWAMLTHNQPYRAPAVG

SEQ ID NO: 472127 - protein, 345 aa, unidentified
MDHFAGLDVSVKETSVCIVDDTGKIVREVKVASEPEALLAVLKNPAYHFKRIGLEAGPLSQWLFSALAEAGLPVVCVETRHMQAVLKAQINKTDRNDARGIAQMMRVGIYRPVHVKTLRSQKLRMLLTHRKLLQSKAIAIENDLRGTLRNFGLKVGIVGRVRFEARIKELVENLPDLAVLVEPLLLVRRTLREQTMILHRRLLAVVRDDEVCRRLMTIPGVGPVVALTYRATVDVPARFRKSKAVGAVFGLTCSKYQSGEIDMSGRISRCGDEMMRVMLYEAAQSMLRSKKWSWLKAWAMQIARRRGMKKAIVALARRLAVIMHRIWVDGSEFRWTREQAAAAAA

SEQ ID NO: 472128 - protein, 348 aa, unidentified
MAYFVGLDVSVKETSVCVVDDSGKVISEQKVLTEPDNIITLLTSIGETYARIGIEAGPLSQWLVNALIAADLPVICVETRHMKALLTAQQINKTDRNDARGIAQMMRVGLFKPVHVKTLVAQEQRMLLTSRKLLQRKLLDVESDLRGTLRNFGLKVGAVSGGRYDARVRELVEGFPGLAAIVEPLLTVRRVMRQQFAVLHKMLLDTVRDDPVCRRLMTAPGVGAVVALTYRATIDQPQRFVHSRAVGAHVGLTPKRYQSGEIDYDGGVSKCGDALLRTMLYEAAQTMLTRAKKWSWLKAWGMRVAQRRGIRRAIVAVARRLAVVLHRMWVDGTEFRWSKDSATVLNAA

SEQ ID NO: 472129 - protein, 415 aa, unidentified
MEGLQPLHRRVAGIDVHRMLHVVTAVLEQPDGSIEQTSREFGGFRRDCRALAAWLAELRVELVVMESTGIYWKSVHAHLENAGIAAWVVNAHFIKHVPGRKTDMSDSQWLAVLARFGLVRASFIPPKDLRELRLVSRYRRKLTQMHSAELNRLHKVLDDAGIKLGGVVSDINGVSATAMVKGLIEGQDIASLLRLARGALKLKRDDLQAALDGDLSARHLFVLKHLHAHIESLQRELAEIDAYLLGAMQPYALAHGLLQTIPGIDQIAAALILIEIGDDMARFGCAERLASWAALCPGNNESAGKAKSGRTRHGNGVIRYILCECANAARWTKSTLAAKYRSLMVRKSHKKAIVAVAHKMIRLIYVLLTRQQAYLDQHIDYAAMSAKKNAPRWIKQLKLIGKWPAPKSEPASASA

SEQ ID NO: 472130 - protein, 314 aa, unidentified
MNTLQHFVGIDVSKADLDLCSLPSGARQRLANSASGHQQLLQLLPPPGQVLIVLEATGTFSRRVTAELLQHGHLVAVVNPRQVRDFAKAMNILVKTDRVDAAVIAQFALKVQPRVMQQVPEKQGELDALVTRRRQLLQLRVAEHNRCEDIESSIVRKSLLKTIKHLDVQLQLIEDAIAKLIESDEQWKNKSDLMQSVPGVGQVTASSLLAEVPELGQLNRQQIASLLGVAPFNRDSGTFRGQRSIWGGRRAVRSVLYMAALSARRANPVLKAFADRLTAQGKKTKVVLVACMRKLLVILNTLLKNNSSWAPRHA

SEQ ID NO: 472131 - protein, 388 aa, unidentified
MQIITDRPQAPTAIRTDLGAIFVSLELSRSTWLITSLSPGGGEKMSKHTVLSGDVAGLWARFCQLKDKVQVRTGHVVPIIVIQEAGLDGFWIHRFLQDERVESHVVDPASIATSRRRRRAKTDKIDGEALVRALLAYKRGEPRVCAMVRAPTPQEEDRRRICRERKTLTAERVEHVNRIKGLLFAQGISDYEPLLRKRRERLEELRTGDGRPLPEHLKAQIGRELDRLELTLQQIKSVEAERDAMLSPSDEGTPAPGAMLKNLKGIGPEFAGVLWSEGLFRNFSNRRQVAAYAGLAPTPWRSGSVAHEQGVSKAGNPRLRTTMIQLAWLWVRHQPRSILTLWFHQRVQLNGGRVRKVLIVALARKLLIAFWKYVTAGVVLEGAEITAA

SEQ ID NO: 472132 - protein, 354 aa, unidentified
MSTKSNSPVATIGIDIGKNAFHVVGLDRRGAIVLRHRWSRGQVQARLANMPPCLIGMEACVGAHHLSRRLQLQGHDARLMPAKYVRPYSKGQKNDFRDAEAIAEAVQRPTMKFVATKTPEQLDLQALHRVRQRLVSQRTGIINQIRAFLLERGIAVRQGLRFLRAELPIILANRSDVLSPRMLRVIEGLMADWRRLDERIGGLSEEIEALARQDPACERLMTVPGIGPIISSAMVAAIGNGAVFTKGRDFGAWLGLVPRQISTGDRTILGPISRRGNRYLRALFVQAAWVVLVRTKDWDRYGLKAWIDAAKKRLHHNVLAIALANKLARIAWAVLNKERAFECVRTRAASSQPA

SEQ ID NO: 472133 - protein, 420 aa, unidentified
MRNAGIHANSLLEVRRMYNAVGIDVSKGKSTVAVLQPGGTVIRKPFDVSHTSQNLNELADYLSSLDGTTKIVMECTGRYHEPMVRALSEAGLFISIVNPHLIKNFGNNSLRKVKSDPADARKIARYTLDNWTELRQYSGMDNTRTQLKTLNSQFSFFMKQKVAAKANLIALLDNTYPGVNKLFDSPTREDGSEKWVDYAYSFWHADCVRKIGLKAFTERYMSFCKKHHYIFQQDKPEKLFNASKELVAVFPKEKTYKLLIQQSIQQLNLASEHVERLRREMNELASTLPEYSTVMGIYGVGKTYGPQLIAEIGDVSRFTHREAMTAFAGVDPGVDESGQHKSKSNRASKVGSARLRKTLFQIMTTLLQNAPEADPVYRFLDKKRSQGKPYYVYMTAGANKFLRIYYGKVKECLRNLEQTE

SEQ ID NO: 472134 - protein, 377 aa, unidentified
MKKRTSKGSVTSKVDRNVKHATLIKLGVDAHADDYWVVRQIENGPLQPPQRMSFEKFLRWAEKQRTLADRVVACYEAGTFGFYPARELIQRGVECLVMVPIKLDEGNTRVSNDRLDARRIAVRLDRYLSGNTEALNVVRIPTVEEEEQRDLGRQRQTVMGDIKRYADRGRAYLRKWGYRVKGAWWEESVWERLQKNLSEVRVAYLNPFVAILKALNEELKSVQAALMVQAEKHVKSQGRVLPVGMGLLSHELVRLEVCDWNRFHNRGQVGSMTGLCASESSSGPRRQQGSATKHGNPLMRYVLVEMAWRMTRFQPQCHAVAGWHEELATPKLSSPRRKKIIVAIARQLAVDLWRVATGQTTFEKLNFVMPGTPSAAA

SEQ ID NO: 472135 - protein, 347 aa, unidentified
MQPLVYYVGMDVHKLTISYCVQLPDGTHVAEGKILAKRAALKDWAELLPRPWVGGLEATIFSHWIYYLLAPYAQHLYIGHPLRMKAIFSGKKKNDRLDAASMADLLRTNFFPAIQVVPAWCAELREVLRFRHLLVRRDVQMKNKITGLLMAGGIEYDKEKVHGHRYFEKLLKERPEIRPTTRPLLQFSRQQVETLQRMERQLCASLEDHPELAGRVARLRTIDGVGPITALTWALEVGPAERLPSISKAVSYCGLVSAQRSSAGVDKRGPLSKQRNKFLQSALVEAAKLAVHYNSLLKAVHERELQRGNRNRATLAVARKLVAYLWAADRGHQPTARPQPADTATTV

SEQ ID NO: 472136 - protein, 349 aa, unidentified
MNKHKIIGIDLAKRVFQVCVVDTHSSRVQVNKELKRHQVLDFMRRQPACRVFMEACGGSHYWARQLQALGHTVALISPQFVTPFRKGHKTDANDALAIVEAGLRPDMRFVPLKSVEQQDIQSLHRIRERYIHQRTQLINQVHGLLQEYGVISGRGQKALKQRVWRALEDADNELSMLMRDLLAEQMTELDRLNERIQSLDKRVEQMSHAVGPCRQLLAIEGVGPVVATQLYSALGNGDAFKKGRQASAYLGLTPTQHSSGGIAKIKGIGRTGQVSLKAALIRGAHSVINTVGDKQDAKSRWLRSLVARVGKNKAAVALANKTVRTAWAVLHSGQSYCREFNDGSALMVS

SEQ ID NO: 472137 - protein, 312 aa, unidentified
MAMLSFCGVDVSKDRLDVVVLPEGWFFSVSNDTAGWAELVARLRPLTVSAIGLEPSGGYERGIIRALLAAGLSVRRINPNKLRQFARARGVLAKNDRLDARLIAEYVAIMPTRVVQPDAAVERLAGIVTMRRQLCDEHVAAENQAAHLEDAMLRRLSKRRQMRLEADIRLLDKRLAEMVAANVALAQRYELLTSMPGVGPVLAFTLIALLPELGKMSRKQIAALVGLAPYDFDSGKLKGHRSIYGGRMPVRNVLYMAALSASRYSPALKTFHNRLVAADKKSKVIIVAVMRKMITTLNAMLRDSAAWQPRSA

SEQ ID NO: 472138 - protein, 334 aa, unidentified
MKELKSCVGIDISKDSFEVCIKQLKDERAVIKATHSFLNDFTGFEGLLKWTLHKVSNPIFVMETTGVYHEDLTHFLYSNEQKVSVVLANKMKHFAKSLNMKTKTDKADAQMIAQYGLERQLEWWQPMMPQMKNLRDLCRERLSLKKDLVRCKCQVHALKHAHSTLDVVLQLKQQQIEFLDKNIQVIENEIIRITAEDKEFSQRVKNIETIKGLRLLTIVTVLCETNGFSQFNNIRQVVSYAGLDIAERQSGLFKGKTRISKKGNARIRECLYMPALSATSYNEQIKALYQRVIERNPTIKRKGVIAGMRKLLVLIFVLWKKNESYNPEYQWNAH

SEQ ID NO: 472139 - protein, 354 aa, unidentified
MNNVKYIGIDVHQATSVFAVKDCKGELVGESVLKTDPSAIVDFLKGQSGTVRVTFEEGTYANWLYDVIKPHVAKVIVCDPRKNKIDGSKTDKIDARKLAELLRLNALNAVYHGEQSNQTLKEYARSYLSLQQDSTRIMNRLKAIYRSRGIGCRGKTIYGPKNRKEWLDKLEDKGARCRAERLLKQLEIFGKLRAEAQKDLVRESRKQKDYRILKGIPGLGSIRIALILAFVITPHRFRNKRKFWTYVGFSVVRRGSSEYEITEGELRRKKRKPLPRGLNNNYNHVLKDVFKGAALTAAYRGKFKKLFEQRVANGTAENIALLTLARKIAAITLAIWKKGERFDIKRHQLSEQKT

SEQ ID NO: 472140 - protein, 493 aa, unidentified
MIGYSIGIDLSINGAHDCTVLDATGQLVQRFTFDSSSAGLQQLEQRIRAIDPSHGAPVIVMEPTGLAWFLPCLYLYAQLPDVRVVRIKTSKVAALRRYLKQDAKSDRLDSLTLAKMPLVDPEKLYAVDFPSAALQGLDRMTRQRARLVESLIGRKNRLQALLRGYLPGLMAAAGKPWEPVFRALLTVSLNPFTLAGAGRNMTELREALQDKFARKALPENLLPQLRTACEHLTRLYRPIIEAGLLTEAFFDDVCDEVARELRLMDAEEQEVKDLETAIARRYQEVAPQDHLGTMPGLGAVTAPTMLAAVGTPQRFQNQAAFRGWTGIVPHASESADSQAKGLPMTKAGPKRVKLALYQAAQFARLWDPQLAKIYYDQMVHKGKPHHKAMGAVMSHLASRIHAVLTEQRDYVLRDMDGREITAREARIIVQTQYQVPAEIRAERRTSRRRKRDVSTGLHRGSAKRSSQRSSPSSQQHSTRSQAMDQTGAVVISR

SEQ ID NO: 472141 - protein, 647 aa, unidentified
MATWAVGVDLGRKGAHVAVLADDKGQQSGPAVSFSTSIEELDRVRSELCARAPKGTELVFVMEPTPTWRPVAKYLKACGHRVFLANQSQASSLRSLIKRHAKTDRLDALTLAKLPSVCPEAVRPAPLPDDPRWEMLRWGVKREYKLSRLIADLVKSIKEAAEECIPGVADLFPEPERPLDNLVYREYCALGRHRGMTVKRLLEEIRARLGRPLKPEEALRVKKLFSLAQHALKLHGRLAPATSAIADAIGEDLCFLDRLNAEQERVKRENYVLYRELDEKGCVMSLPGVGKTLAPVFLAVAPAVAYMTSNKQLRKFSGYVPRVDNSGLKEGKGQSMTKAGPAWFKRGLYLASDAGRKRDPQLARVYRRAMVEKGFPHKKALCEVAVRLSDRLFRVLKDNRLYELRDAEGNPVSAREAREIIRAKYAVPEEVRARLRRRKKHKRGSSDERDAALRHLPAMLTPSGQKGSTEAAPRSTGPKRVGEILAEHLGPEFFARLAASAEHSQFTIAQAHPATLSVAATGEIPEDGQGTRSSLAESTSAPIKLQREPASAAFKPQATEELQPTVPVEDTTAPDGFQHGARASKTSGEAYDSPGPYGHRPSFPPSAGPDAISAQPSWLDPVVAFGSAREATAPPGPDLPRGRDRPQ

SEQ ID NO: 472142 - protein, 491 aa, unidentified
MNSIFQCSNSAIEKIFAEAGSPKKVMCVPIDYAKKQHTALVCNGEGMQLRGVFNLHNTADGVIFLEDIIKGLCKKHSIRKNHVFFGGEDCTAFCYNFIHALLEKKYLGIGINAYEGAEARQNQLASTDKLDLLGIASVLINKKHGRTLSTDYGQARLMRELTHQRDSLVKAHSASSYRIHHWVDQLMPGFLDAKQSGVEPFSEACLWLMSQHFSPRQLLARKSDVLAEKLRLFMLRNIDAKVAQLKQLARSTLPPPAALCETLQDNLAREVALYQHLNGTLHGLNQQIARRLAATPGAMLTTAPGIGLILASGLYAEIGEPVRQRNIASMAAYAGLVSRLKQTGGPDNPARSLGRSRRACVPLKRRIIDIALSIGQYGAEELQSDYRRRAEAHQDVRFTMGRRMLRICMHLVQHQDFFLPPSLLAQHATGDRKAYYAKAWAPILIKWRNAGAIQQAFADGAPLEQWRTMLNELYNLKLSKLSPQYDRLRDR

SEQ ID NO: 472143 - protein, 373 aa, unidentified
MPKYSTAFGMDVHLRSTTVCALDADTGEAVTRRFPGNPWGEIAGWMDGFPGPSLAAYESGYLGFAPQRELAGLGVECVVAAVSKIPRSAADSASKNDRNDAARMAKAILAHDISPVWVPSPEVEGIRDLAGAYDGATARLATAKQRLLAFLAKRGFVYGGTTPAGNPRKYWTYDFLRWLDKVRPEDDGGVRTLAALRNEVEAAAEARADLLSEYRAAVNASPIAAEAAALQSIKGCAFALAAAFASEVGDFTRFRSGRQVTAYFGLAPSQRSSGDSVRLGGISGAGNALVRKLAVEGSWCYAAARHQPKLMPRDTGVPLEIRMHGRKGSERLLRRREEMLARGMPAAKANAATAAELVRWLWALGMMCREGAE

SEQ ID NO: 472144 - protein, 385 aa, unidentified
MISTITRLRIIPSQFEIFAGLDVDKKSISTTFTDHASLVKSLRLPYSATHLLNYVNKHFAGKRIVFVYEAGPTGFGLHDELVARDHTCLVVAPSMVPSERGKRVKTNRLDSRNLSLRLRGGELNGIHVPSRNYRELRHLVQLRDTQMQQLRATKCRIKALLLYEGIEFPDPGGRWNAQTIAGLYALPCTSEVRFKLDHLIGTLYFHFNSAAGVQKRIRQFCKNDPELQRCITFLTSLPGVGWITAAHAVARLGDWRELKNVRQIAGFIGLVSSEHSTGDKDNRGPITRTGDSRLRNKLIQCAWVAINKDPELRAFYRSVYQRQPKKVAARKAIVAVARKLTTRIYVVLKEQRPYVIRQEISVAPLTAEETIGPRERLDASQNEQL

SEQ ID NO: 472145 - protein, 323 aa, unidentified
MNEKSPIVYAGVDVAKATLQLHFQGRQYCLDNTPKGCAQLLQLVQASSRVQLICEATGGYEKDLLTACHAAGQAVSRLNPALVRHFARAQGQRAKNDPLDAAVLTAYGTALQPEPTLPTDTALENLRDLVQWRDHLQEQLTRARQTIEHGVPAFIARKQKQLVAHLNQQLQAVVKEMADALKRMPPLQAQVQALIQLDGVSMVTALNVLSRMPELGTLDRQAAAALAGLAPWVRQSGPWEGQRHIGGGRALVRRSLYMSAVVLARMKHTPLGTFYARLRAAGKPAKVALTAVMRKLLLQMNRVLKELTTPKNIPENGLTFPCF

SEQ ID NO: 472146 - protein, 341 aa, unidentified
MIVTRVGLDLAKSVFQVHGVDHAGATVVRRRLARSQLLGFFGKLSPCIVGMEACSSAHHWARELTRIGHEVRLIPPQYVKPYVKRNKTDAADAEAICEAVGRPNMRFVPIKTVAQQAVLALHRVRSLLVRQRTATINAARGLLGEFGLVAAKGAARLDELRRRLGSTTPDDVPPAARMAIEMLFEHIDDLRGRAEAVEAEIIAWHQASETSKRLAGVPGIGPLTASALVAAVGDARQFRSARHFAAWLGLTPRMASSGDKQRIGRISKGGDRYLRTLLIHGARAIVGAVKRPNLRPRPWLSPLLARRPIPVAATALAHKTARIVWAMLSRDEAYRSAVGAA

SEQ ID NO: 472147 - protein, 462 aa, unidentified
MRLVAASSVSLARLPIHHEFSARPDRTELLLMTLVNAHALGVRRETTRMSQSSFPMPAPAPLAYVVGIDIGMQSCMMCCLTMEKRQVIKPSPFANKAEGFSSLFERLERLGTPADQILVGLEATSRYGENLYYALLSRGYRVCLLHPAQMHAFAKQRALRAKTDRVDATTIARALLSDDARFGYVPSEQVATYRELVRLQHQLSDDVVRYKNEIHALLVVLFPEVTEVFADPTRPTALAFLKRYPSAQAVAQAQVDTLSQLLHELSPKHYGRRTAERLLDVAKNSVSSGVAISARSTSLRILCDQLEHTQANLKQLEQEIESLLDQDPKVKGLLLIPEFGLMTVAVLRAELGDLDRFARMDQVVAYVGLDLEVKQSGKYVGQTKLSKRGSGRVRRILYLAALRSIWLEGSPFGAYYHRLVDRGMKKGMAVTAVMRKLLIVAAHLIQTQQVYDPGKVAAPSVG

SEQ ID NO: 472148 - protein, 412 aa, unidentified
MQYFVGLDWAAQEHAVCVVDARGKVVAQFMVEHTAVGMTELVTRLSKLAPPSELRLAIERPTGLIVDTLVESKFAVVPIHPNVVKSSRPRYSAAQGKTDLGDAYLLADLLRTDGHRFRTMTPLSDETKALRGQVRVRDDLVRQRVALANQLRCLLEQFWPGAAEIFPDIEAPIALSFLEAYPTPQSAAGLGEKRMAGFLVRHSYRGRRPARELLERMRGAVPSSCGQLEADAKGKCVSALVAVLRLLVEQIATLTAAIERAVEAHPDGKVVTPLFRHGRICAAQILAELGDDRGRFASAEQLTAEGGMAPITRASGKHHAVSFRWACNMRLRSALALLADTTRRTMLWAGAIYQRARDRGHEHAHAIRILGRAWCRVIWTCWQNHEAYDPTKHRAALPFAATPVNFVEQEAA

SEQ ID NO: 472149 - protein, 392 aa, unidentified
MTCTDHPLPAPTAARSDDSTLFAALELSRKSWLMATNAPGEEKVSKRTIAAGDGRALLDLLAGLREKAERRIGKPVKVVVIQEAGLDGFWLHRLLEANGIESHVVDPASIAVDRRKRRCKTDALDVDALLRTLMAWARGERRVCSMVRPPSPEDEDHRRLSREREALVKERIQHTNRIKGLLAAQGITDFEPLRPGHRARLDGLTTGDGRALPPQLKEEIRRQLARLDAVINDLKTVEAGRDALLADDTVAVSTADGTPPAAAALSRLKGLGPEFVSILCLELLFRSFNNRREVAAYGGLTPSPFKSGGIDREQGISKSGNPRLRKMMIQLAWMWIRYQPGSAISRWFTGFAGTKRGRIRRIGIVAVARKLLVALWRFATQGVVPDGAALKS

SEQ ID NO: 472150 - protein, 338 aa, unidentified
MKTHVGVDLHQRFCYLTAVDASGKLLGQGQVVNQAAALAQWLGGLERPRQVVVEASGFWPAFHRAVHRHAERIVMVHPQRVKAIASAKLKNDRVDSSTLAHLSRCDLLPEAWMADEATQQLRLRVRLRINLGRQRARAKNQLQAVLHQEGFIKPVTDLFGKRGRAWLQQIELSAAARMVVETWLREVDRLDAEIAVQRRELERLAAGDARARWLQTVPGIGAYSAMVMLAEMGDVARFSNKQALASYAGLVPMVRESAGRKKRGGITHQGSNTLRWIMLQVAQVACRYSPAVRAWYMELRRRKPAQVARVAVARKLLCVAWALLRHGVCFDEQVFARS

SEQ ID NO: 472151 - protein, 408 aa, unidentified
MDLTPMHKRVIALDVHQAKITACAVVELDDGRVEVTKQDFGAFKRDRRALAQWALEIRPEVVVMESTGVYWKSPFAALEAVGITAWVVNARHVKAVPGRKTDMADAQWLATLARAGLLRASFIPPLLMRQLRLVARQRQKLVGMCSAEKNRLHKVLVDAGIRINVVVADIHGASARAMVKALIAGKPMHEVLECKGRLRATREELFEALSTEQFSDVHRFVAEEIVQHIEQIEQRVSRLDQYLLEGLKAYEPQLRLLQTIPGIELQGAAMLLVEIGANMGSFGSAERLASWVGICPGNNESAGNRKSGRIRRGNAWVRRLLCEFAQAAARTRCALKAKFESLALRKGHKKSVVALAHKMLRTIYAMLSAGTHYQDKAVDYEALSVARNAPRWIKMLRKHGFIATPAPA

SEQ ID NO: 472152 - protein, 370 aa, unidentified
MSVRRILAKTIDTDLEYEAIGIDLAKNCVSAALLTTDGEVVCIDRLDYSELEKSAQVLTPTTFAMEPCTEMNYLVQKLEAWGHRCLVIGGKNVQNYVENHYSGQKTDLNDAQALAFLAQDKQLRTIKAKDIEQQKYASLTTLREQYIKQYRQTIVSLKGICQAWGLNISKGISGKAQLKDLIENHAAFPEELRESLVDMVTHAQTTQKVLNKITKTLEVLAKNDKVCQLIQTIPGLGTICSCRLRATIGDIKRFKNPKDFPAYYGLVPRSIATGHNEKKGKITHRGDRTMRSLMVQGAGCVIRLATCGKLKSKQLTKWILKKQKEKMPWGKLVCAVAAKLLRIVRAILISSKPYNPKIAGVAKCSLSKGS

SEQ ID NO: 472153 - protein, 378 aa, unidentified
MALRTAAHDGPVLFLALELSKSAWLLAAHPPGADKPKLHRIGAGDTAALLATIAALRARVAGESGTVVDVACCFEAGRDGFWLHRLLLANGVASYVVEPTSILVNRRARRAKTDRLDAQGLLRVLTAHCRGDRQACSMVRVPTPEEEDAKRLHREREHLVQERVRVENRIEALLATQGIRGRPSLRSWGRDMAAVRTGDGRALPTRLRAELDRLRRRLVLTLEMIREVEAERAAALAAEPQDDTCRTIAALCRIRGIGETSATVLAREVLYRPFANRKQLASYVGLAPMPYQSGGMDRDRRVSRSGNPRARTAIIQLAWLWLRYQPGSALAGWFRGRVGALAGRTRRIAIVAMARKLLIALWKYARTGLLPEGVEIGA

SEQ ID NO: 472154 - protein, 431 aa, unidentified
MQNDFEYFAGIDWGSEKHRVCLTGRDGQILAERWIEHNGDSLAQLAAWLRQHTSDSPSPLAAAIEIPRGAIVETLLENGFAVFSINPKQLDRFRDRYSPAGAKDDRRDAFVLADALRTDMHCFRSVKLDEPAMIRLRELSRLDDELAQEQNRAANRLREQFHRFFPQLLQLSECADEPWLWALFEMAPSPLAAARLTQARIARLLQQHRIRRITATEVRAVLKTKPLTLAPGAAEAAAEHALLLLPRLRLLHQQRTDLGRRINAMLDELATPPDGQHEHRDAAILLSLPGLGRKIAATMLSEASQAIADRDYHALRCYSGAAPITRQSGKKENRAHAPRHQRAIAECSLPLGAGQRRLRSSKQEALCRHACLRPLAWKSLARHGRPLAQNPHLHAHHPDPLRRTAQGRMTQERLGAPGRRPSPCCLTVDKW

SEQ ID NO: 472155 - protein, 398 aa, unidentified
MIYVGIDWARSRHFVTVLDESGVRLHQQYVKHGAEQLQALAETLVAIEPDPAAIRVAVELHDGAILAWLVIQGYNVFPMNPKSADRARDRYRPAGGKDDRTDAFVLADTLRTDAGALRQLKPDSPRAEELLSWLRNRESLVRERTARMQQLRAILAEWCPELSALCSNFHSRWQRDLLATFPLQQELAHVDIEQAKAACARKLCPSSCRQLEAVLTAPCLPIPPGRREALAWQVRELVRRIGDLIESIKEIELHLRKLIEAHPRARLVRSLPIKGVVGCATLLAIMEMADYATWQELVARWGVAPVTKQSGNKKSVRRRRGCDHFVCQVLTQFAHCTAQVQDSWAREFYQAKRTAGVAHHTILRQLARQWVRILCAIWRDDTTYDETLHQFNQHQRAA

SEQ ID NO: 472156 - protein, 328 aa, unidentified
MIRSALGIDIAKLKFDVCLLNTQGKLRHKVFPNTASGFSQLAMWLTKQGVTPELHACMEATGTYGEALAYQLHQDGYTVSVVNPAAVKAFAGSRLSRTKTDKVDAELIARFCLAQQPLAWTPPAPEVRELQALVRRLEALVEMRVAEENRLEAGSVVAAVRASVEEHVAYLAAEIKRTEELIRNHIDNHPTLKQQSELLDSIPGVGQTTAALLLAEIVDMTQYRSARQVAAYAGLVPRERRSGSSVRGRTRLSKIGNARLRKALYFPAITALWCSPFFKQWAEGLRERGKCKMSVIGAAMRKLIHLAYGVLKTGQPFDPEWERKEKTA

SEQ ID NO: 472157 - protein, 337 aa, unidentified
MEYFAGLDVSMKETHICVVDRDGKVVLETKAVSLPEAIAGALEKAPGCQRVVLETGRMAPMLYHGLDALGAPVICIESRQAHQALKSLATHKTDRNDARGLAHLARTGFFKSVHVKSLAAHAVRALIIARKKLVGQRVTLENQIRGLAVVFGIRLPRGLSPAFAEQVTNGSQGVAGLTTAIAALLAARNAVLAAITAIDRDMKRLARASEACRRLMTIPGVGQLTALAFVAAMDEPERFRRSRDVGAYLGLVPRRYQSGEIDYSGRISKCGDRRVRTLLYEAANVMLTRCRGKLALKDWALAIGRRSTMRKARIALARRLAIIMHAMLRHGTEFRAA

SEQ ID NO: 472158 - protein, 423 aa, unidentified
MSETVSGAEPRFAAFVAIDWADQKHVWSLQPANSEKRQHGQIEHTPEVVESWVAMLCGRFGNQAIAVAIEQSRGALVFMLSKYEQLHIYPIHPRAAAQFRAALFPSGAKDDPVDAELLLDLLVHHRARLRPLRPDTEQTRLVQHLVEGRRRLVDEKTRQSNRLTAKLKLYFPQVLNWFDEVDSALVSALLERWPTLEDLQKARPATVRSFLTGHGCRGNERIEQHLEQIRQAVPAIRDLAVIQSSVTTTKILVDMISTLREGIATFDQQIDRAVTAHPDFAIWDSFPGAGPALAPRLLAAFGSRRDRYETAADMQKFSGIAPVVERSGKMEWVHFRWACPKFLRQSFHEWAGHSIGFCGWARAYYQLQRQSGHDHHAAVRALAFKWIRIAFRCWKDGVPYDDSRYVASLRRRGSPLAQAISQP

SEQ ID NO: 472159 - protein, 352 aa, unidentified
MDHFIGLDAHKNSCTFVVLNPKGRVKQKTVIETSGRALIEFVKRIPGRRHLCTEENTQSQWLYEILSPHVHDLAIVLGRKSRGNKDDERDAHALANRMRLGDLEQRIYKLPVSFTTLRDLVRSYQMINKDLVRVKNRIHALYRSRGVPTQDSGCPFCVQDAPNTSGCHKPGFHQTMERLRTQKQSLEALKDEAEKDMIAEANRHAIMRILQTAPGFGPVRSAQLLSIVITPHRFRTSRQFWSYCGLAIVQRSSDDWGRLPNGKWVRTSVYQSRGLNRNFNRAAKTIFKGAAMTVSTSSRNPLRADYERLLANGTKPNLARLTLARKIAAIVLSMWKNQQAYEPGRRSDVKNK

SEQ ID NO: 472160 - protein, 387 aa, unidentified
MTVQLQISTFVPRHYEIFAGLDVDKHSIAVTFTDHTKLLKSLRLPYSSEHLLNYARKHFPDRRLAFVYEAGPTGFGLYDDLRASGHPCLVVAPSMVPTAPGQRVKTNRLDSRKLSEGLRGGQLRSIHVPSPTYRQLRHLVQLRDTHVRQLTATKCRIKALLLYEGIAFPEAPAGGQWSARVLRQLEALPCAEAVRFKVNHLIGTLHFHFLSAAAVQKQIRRFCQNDPELRQVIGLLTSLPGVGWIVAAHLIARLGDWREITNVRQIAAFLGLVSSEHSTGDQENRGAITRSGDSRLRNKLIQSAWTTIGKDPELRAFYRRIYQRHPKKVAARKAIVAVARKLTTRIYAVLKQQRPYVLRPDSSSAPSTAEETAGPRGRLDTAQNEQK

SEQ ID NO: 472161 - protein, 355 aa, unidentified
MINTKYIGMDVHTQSISIAVRNSVGKVLMDCVIETKASTILQFIDGLRGDVRVTFEEGTWAAWLYDLLKPHVTQVVVCNPRKNALLKEGSKSDKNDARKLAELLRLNHLQPVYHGENDIRTLKELSRSYLTINKDLTRVMNRLKALYRGWGIACPGNDVYAPRHRAEWLDKIREAGVRRRAEHYYQQLDVLRLLRQEVRRDLLVESKKHRGWKLLRQISGIGPIRAALLIALMQTPHRFRTKRQLWNYSGLGLETHDSAQYRVVKGQLERSNKPVTLRGLNKDYNHDLKDIFKGAALRASIAAGPLHGFYEALLAKGRKPTMARLTLARKIAAITLIIWKKEVRFDANHLKQQAA

SEQ ID NO: 472162 - protein, 346 aa, unidentified
MKKIFIGIDFSKEKFDATVIKAEGVEERSERKHEVFDNKVSGFRRLIRWVKSVQDEQDTGLWLFCGENTGGYSKALCNYLYGSGYDMWLENALSIKRSSALQRTKSDKADSGVIAEYAMRNYDQMRLYKPLGKNLERLREVFLYRHNLVKLKASMTTRKGEKKLTQEKSDISRFMAMSSKHLISEFNKKIDECDMRIKKIISEDEELQMNFEIITSVPGVGTQNAVCLMVYTDNFGRFGYDSRKIACYYGVAPFGRQSGTSVNTPPHVSPFANKLIKALLTQAALASVNFCPQMATYYHRLVEAGKKKPVALNNVKNKLLHIIIAMVRKGEKYNPDHDYYAALKAA

SEQ ID NO: 472163 - protein, 363 aa, unidentified
MRYHGMDLHKKYSTISVRNEEGTEEKFVRAQADIKGYVASLGSEDAVVLEASGGALYWAEKIQSQGASCVVIDAYRFRIIRDSWQKTDKRDAANLSLALWLASRSGEMKLPEVWRPGQVVRELRRLFGLYELLNKQIRQLKNEIHGVLLDNGVRDRALGKRLADNPAEAEEHLKTVELSAASRVCVMTSLKLLKSVQEQKEALTHEIYQAGRPLEAEVKLLISIRGVTPLLALAFLSEVGDVTRFRSARQLHSYLGVVPTVRSSGGVTHSGAINRRSRGLTRSLFTQAVIHLVDSSPVLAHFYHDLVVRKGYGRARIALLRKTFSMMRRMLLSRETYRWLEPRLYQKKLNDYTKKMKKEENAA

SEQ ID NO: 472164 - protein, 354 aa, unidentified
MTETAVGTQVVVLGVDTHQQTHHAAIIDTLGLPLADLEFPASAAGYQQLLDWARTHGRLEQAGVESSASYGAGLTRELTAAGIEVIEVNAPDVRARRAQGKSDQLDAYAAAMAVLTGRATGHAKDTTGVVESIRMLYVARRMAVDHRTELGDQLRDLCTTAPDEFADQLKTRTTTPQRLALVESFTAPASLTDPRAAFVFAAKSIAGRYRQTHREVTTLTRELNKLLKPLVPTVLGLPQVGPITSARLLITIGHNAERMRTEATFAKLVGVAPLPASSGKTVRHRLNRGGDRAANSALHMIVVGRMKSHDPTRAYLARRGNEKTKKEIIRCLKRYVARELYKAFTTDLGALDNL

SEQ ID NO: 472165 - protein, 312 aa, unidentified
MSTSLFVGLDVSKTQLDLAVADQDAPAVYRNDDAGITTLVAQLRPTAPTLIVVEATGGYETQVVTALGLAGLPVAVVNPRQVRDFARALGRLAKSDRIDAAVLAQFAARVRPAPRPLPDATHQTLAALVTRRRQLVEMLTAERLRLTLADGAVRANIAAHIRWLEQRVQESNTDLHQQLKASPLWRATEQLLRSVPGIGPTTAAVLIAELPELGHLTRRQLAALVGVAPFNHDSGAYRGIRITWGGRATVRGALYMATLVATRHNAVLRAFYQRLRAAGKPPKLALIATMRKLLTILNAIVKTARPWTEAIA

SEQ ID NO: 472166 - protein, 358 aa, unidentified
MTIVAHTHPFVIGVDTHARNHALAILAAPTGEVIDDAQFPATAAGLTRAVSWAARRTSGDLDVLWVIEGVGTYGARLARAAADAGYAVVEAARMSARANRGVGKSDPLDARRIAQAVLPLDVTALRRPRADSGVRAAVRVLVASRDHMSTERTAAVNALTALLRVSDLGIDARRPLTSGQLATVAAWRTREEDLATATARAEAIRLAKRVSALEEELRTNTKRVTELLTQSPARELLNQPGIGPVTAAVALTAWSHPGRLRSEAAFASLAGVNPIPASSGNTVRHRINQGGDRRLNRALHMAVVTRMRMDPRTRAYVERRTTEGRTPREIRRCLKRYLARQIYRHLNIAAAQNAPSTA

SEQ ID NO: 472167 - protein, 495 aa, unidentified
MDLPNSDGRFVKAYPVETAEAFCDGHVAAFDFFGGVPQSILYDNIKLAVAKIVKGGRRLRSKMFAELQSHHLFEDRFGRPGKGNDKISWGLPPAMLPVLARSTIEELIMEANVCNREPSLSNSVEEAAIFVSIELSRARWLVTSLSPNTNKFSRHSVPGSDIAELLRLLGELRAKAERRINAGVRIICIQEIGFDGFWIHRVLESNGIESHVVESASIAVSRRHRRAKTDAIDGELLLRTLMAFKRGEPRVCAMVVVPTPEDEDRRRLSRERKTMVKERIEHINRIKGLMASQGIVGFEPMRSKSRDLLDNLRTGDGRPLPERMKAEITRELKRLELLRKQIAEIEAERDALLRPCETTEPSPGAQLLKLRGIGPEFASVVWQEGLYRQFANRRQLAAYAGLAPSPWQSGDMNKEQGIAKSGNPRLRTTMIEAAWLWLRHQPKSALTLWFQNRVKGDRGRHRRIAIVALARKLLIALWRFATLGEIPEGATLKIA

SEQ ID NO: 472168 - protein, 415 aa, unidentified
MKVVFPTCCGVDVHKTFVVATIITTPADSLQPHYQKKRFSTFNSDLNRFADWLLEHNCLDVCMESTGKYWVPVFNILEKRGIRVVIANPKWVKAVKGNKDDTKDSKWIGDLFRIGLVKSSFIPELNIRILREFLRYRYKLVSMKSSEKNRFQNAFTVCNVALDSVVSDMFGKSATAITDYLTSDESFDPDHCVSLLQRSLKKKAEKVLESIEGYSISDEQKARIKVIREHYDFVEKLIAKVDTCVNEMVEKYEGEINLLCTIPGIDRNSAITIISEIGADMSQFGSSKRLCCWAGLTPGNNESAGKKKSVRISRAGVYLKPALVQVAHAAVKDKANPYYALKYERIAKRRGKKRAIIAIARMILMAIYTMLCTGEVWNPVDLFKIDMPEHLKEQQLAKAIKQATRFLEKQGLTVA

SEQ ID NO: 472169 - protein, 361 aa, unidentified
MLTRSQSTKFSFKGEKIYVGIDTHKKNWKVGIYHKDIALKSFSQEANPDILVKYLTRNYPGAEVHCAYEAGFCGFWIQKHLTRRGINCIVVNPADVPTSHKEKEFKTDPRDCLKIARALRSNLLEPVYVPTDEGIESRHLVRLLHDMSKNYTRYKNKVKAILDFYGIEYPQEFSSVNNHWSKGFYNWLQTIKLKSEQGNWTLQFYIEECLKAKELKRQATKKVRELAKKEPYKKLVDLLRTIPGIGLVTAMIILTEIESIKRFRTLDKLCAYIGIIPSTNSSGEKERVGEITNRGNKYLKGAIVESAWMAIRYDPALLYKYLQLKNRMDGNKAIIRIARKLVARTMYVLINEKAYEVRKYV

SEQ ID NO: 472170 - protein, 386 aa, unidentified
MATPIRTRIEQETPHQPTLFLAFALGKNTWKLGFTIGVAQQPRERTISAGALDTFQQEITRAKQRFGLPEDACVVSCYEAGRDGFWLHRSLVAHSIQNHVIDSASIEVNRRQRRAKTDRLDVRKLLTMLLRHMAGERKVWSVVRVPSVDEEDRRQLHREMLTAKQDRTRVINRIQGLLAGHGVQLALQGDVDAQLDQVQQWDGTPLPSALRTRLKRAWQQVGFLTAHIQTLEAERRARLRRREDPVSDQVRQLFMLRGIGVHSAWLYVMEFFAWRDFQTSKQVGALAGLTPTPYQSGQSRRELGIAKAGNRHMRAMAIEIAWAWRRFQPASALSEWYERRFGAGSARLRKLGIVALARKLLIALWRFVKTGVLPEGAVLKTAASSR

SEQ ID NO: 472171 - protein, 465 aa, unidentified
MKSKTPKSKKEKKKISVDQGWEAINPQAAGIDIGAKEHFACVPAKATPKNVRSFGTCTADLNALADWFKECGVTSVAMEATGVYWIPVFQILEERGLAVILVNARQTKNVAGRKSDVQDCQWIQRLHTYGLLQGSFRPEDAYCVLRTYLRYRDELVSARSTQCQHMQKALQQMNVQLVQVLSDVMGVSGMTIIQAILEGKRDPVKLANMVDRRVRATPIQIQKALEGDYREEHLFVLRQAFSLYGTYEEKINACDEQIVRETATLSDKVDPQHKPLPPRKEGRPASKDKMQGQDMREVLYRKFGADLTAIEGIGVTTALVVLTEVGPDVSGFKTEKHFCSWLGLCPDNRISGGKVLSSHTRRVMNRASDALRMAAVTLERSQSALGGFYRRMKGRLGAAEAITATAHKLARIIYRLIKHGEAYVRQGMEDYERKFRERKLHALRKTASSMGFNLIAKQELTSPVS

SEQ ID NO: 472172 - protein, 339 aa, unidentified
MKRLYCGIDLHSNNSVVVLIDDEDRAVYEKRLPNSFEVILLELSRYKKKIAGVVVESTFNWYWLVDGLQEEGYKVHLANTAAIKQYEGLKYTDDKSDARWLAHILRLGILPEGYIYPKEERAIRDLLRKRSQLVRQRTTHILSIQNLMSRNTGRSMSGTKIKTLTELEVDGMFGSDDVAAAVKCNLRACRFLAKEIILLEKMILSRASIKPEYENLLTVDGIGKALALTIMLETGDISRFGKVGNFASYCRCVDSRRISNEKKKGENNGKNGNKYLAWAFVEAANFAIRYNKVIRRFYERKKSKRNGIVAIKAVAHKLARACYHILKDNVPFSVELAFS

SEQ ID NO: 472173 - protein, 436 aa, unidentified
MSEKKQKNETEFAALVGIDWADQKHAWALQVSGDINVERGELDHKPEAVDDWAAELSRRFADRPIAVALEQARGSLLFMLTKYVHLVIFPVHPATIANYRRGFRPSGAKSDPTDADLLLDLLAHHRDKLRRLDPDTAETRALQFLVEGRRKFVDDKTRYSNRLTAHLKMYFPQVLDWFSVVSSALVCDFLQRWPTLEKLQRARPETLRKFFLGHHIGTSELDRRLEQIRQAVPATQDEAVIRSSSTYALALVRILREVRMAIVGYDEQIDRLARQHPDFAIMDSLPGAGAALVPRLIAAMGTQRDRYQNATELQSYSGIAPVLASSGKQHWVHWRWSCPKFLRQTFHEWATHSIRSSTWAKDYYDRQRAKGKPHHVVIRALAFKWIRILFRCWKDRKPYNDDLFRHTLARRRSFAGPVQLQWKTCAGFSKIDAITP

SEQ ID NO: 472174 - protein, 349 aa, unidentified
MSQTLNNRIAVIGIDIGKNSFHVVGLDGRGAIVLRQRWSRSQVETRFANMPPCLIGMEACVGAHHLSRKLQGLGHDARLMPAKYVRPYSKGQKNDFRDAEAIAEAVQRPTMKFVATKTADQLDLQALHRVRERLVSQRTGIINQIRAFLLERGIAVRQGQRFLRAELPRILASPTNALSLRMVQVIEDLTGDWRRLDERIEHLSKEIEAIARLDSGCERLMSVPGVGPIISSAMLAAIGTGDGFSKGRDFAAWLGLVPRQMSTGDRTILGKISKRGNRYLRVLFVQAAWVVLIKPKSWERYGLKPWLEAARKRLHHNVLAIALANKLARIAWSVLARDRGFEANKVQIA

SEQ ID NO: 472175 - protein, 359 aa, unidentified
MASIALARTDVIVGVDTHKDQHVAVTIDGLGGRLDAVFVPATNDGYAELLAWADAQGRVVTFGVEGTGSYGIGLARFLRRHGRTVIEVGRPPRKAERRAAGKSDTLDAEHAARQVLAGTVTATPKTSDGDIETLRLVKIARDTAVKAHSQAMITLKATLVTASDALRADLEHRSDFKLISACAAFQPTNDLTDPDVAMRHVLGSLARRWLALHEEIKTHSRHLKARTTAVAPQLLEAFGIGPDIAAELLVAAGDNTDRIPSEAAFAKLCGVCPIPASSGKTSRHRLNRGGNRQANAALYRAVIVRMRWHEPTIAYVQRRTTEGLSKKDIIRCLKRYVAREVFNLLPVSATHTNQLPVAA

SEQ ID NO: 472176 - protein, 343 aa, unidentified
MTQVTTLGIDIGKTVLHLVGLNAVGQVVLRRKVSRGQLLDFLANLQPCLVGMEACGSAHHLARRLRAHGHDARIIPAQYVRPFVKTNKNDTVDAEAIAEAVLRPTMRFVPIKSEEQQDLQAMHRCRQRLIGRRTALVNQIRGMLYERGLTAPQTTGALAKRLAEFLAVDGDADVTALLRELLQDLREEWLWLDQRIAAIDDKLRQLCRQSDMTCRLTAVPGIGVITATALVAAISDGSGFSRGRDLSAWMGLVPSQHSTGGKARLGGISKRGNSYLRMLFVHCARALLRVLDRERSRLGQWVASLEQRTHRNVVIVALANKLARVAWAVLRPGASFDRTLMAV

SEQ ID NO: 472177 - protein, 388 aa, unidentified
MAQTSAFHSPSATPDFDQTLVMAIELSSTKWVLAAQVPGLPRLKAKRTIEPTAEALLAAIESYRERAKREGHTVQRVIATYEVSWSGFWLARWLARQDVETHVLQPSSVPVDRRARRAKSDGIDAEVLLRTLLAWLRGEPRVCSMVPVPSEADEDARRCTRERTELVAERVELVNRIGAVLATLGVSDYDPLRRDRRERLATLRTALGATLPPHANAKITRILDRLDLVRAQIADLEQQRDAVLEDAAPDKAGEMIQQLARLRGIGVQSATVLVREAFVREFANGKALGSYAGLAATPHSSGGVERELGISKAGNRRVRTVMVELAWLWQRYQPGAAQVRWFRERAGGTGGRMRKVMIVALARRLLIALWRFATQGVLPEGAVMKPSI

SEQ ID NO: 472178 - protein, 350 aa, unidentified
MSNHKFAAADVHAATTTFAVLDASGKFVMETVVETKAESLLSVVKSISGAVHLTFEEGTHAAWLYDLLRPYVAELLVCDPRKNRNDSGNKSDRIDARQLARWLRSGDLSSVYHGHDGTKVLKELVRGYENLVSDSVRTKNRLKAVYRSQGESTSGGDVYKLEKQEEWLSKLQSSGLRSRAEWLYSQMESLDGLRGEAKKAVLREAGKHRPCSLLKSVPGIGPIRSATIVAHVATPFRFRTKRQFWSYCGLAVVTRGSSDWEIDGEELRRSRRPVATRGLNRNHNRHLKDAFKSAVSDARAFRPHLDSLVESGMRESMARLTVARKIAATTLAIWKKGEKFILSKAVIRSE

SEQ ID NO: 472179 - protein, 364 aa, unidentified
MSAVPAGRCLPYWLTQREDTNMGTQITGGVDTHLDVHVAAALDERGGLLGTASFATTPAGYAELVGWLASLGSVVVIGVEGTGSYGAGLTRHLQVLGIAVVEVDRPNRQRRRRSGKSDTHDAVSAARAAFAGDALGAAKTRDGNVEAIRVLRLARNSAKRDRTRALNQMRALITTAPDELRAQLRGLSIPRLVSAAVGFRPAGRTDVTNANRVALKTLARRVLELDAEIDMLDELLTPLVAETAPELVERVGVGTDTAGALLVAAGENTSRIHNERSFARLCGVAPLDASSGKQQRHRLSRGGDRQANSALWRIVITRLSYDPATRAYLERRCTEGKTKTEAIRCLKRYVARELYAYLPQERLA

SEQ ID NO: 472180 - protein, 349 aa, unidentified
MSHKLNSAIAVIGIDIGKNSFHVVGQDRRGAIMLRQKWSRGQLETRLANLPPCLIGMEACVGAHHLSRKLRMLGHDARLMPAKYVRPYSKGQKNDFRDAEAIAEAVQRPTMKFVATKTAEQLDLQALHRVRERLVSQRTGIINQIRAFLLERGVTVRQGLRFLRAELPRVLATPCDALSPRMLRVIEDLAGDWRRLDERIEGLSSEIEVLARRDAGCERLMSVPGIGPIISSAMVAAIGGGDAFSKGRDFAAWLGLVPKQISTGDRTILGKISKRGNRYLRVLFVQAAWAVLIKPRSWDRHGLKPWLEAAKKRLHHNVLAIALANKLARIAWSVLAHGRTFEASKIRAA

SEQ ID NO: 472181 - protein, 352 aa, unidentified
MKPNFEPGKWFMQCVGVDIAKSTFTACLCMYEFDMGCSTNPVVFNNNKTGFNQFVKWSRREALKGYPLRFLMEPTGVYYEPLAFHLNKLGLDVCVVLPNKAREFAKYEGILTKTDDMDAYTLGMLGCLDKRLKSWTPPSPVYRELRQMTRFVADINKVRTELQNHLEALVHSEITERSTVKHYNKLIDEIDRQLAANQKAIREKIKQEPGLPERIDRIVTIKGVGFMTVVTILAETNGFALITNRKQLTRYAGLDVPAHQSGPVDPKRHISKQGNVHIRTALYFPAIVSTQYNPQMKDFYGRLCARKPQSKMIGVTAAMRKLLLLIYSLWKSGEEYDPERDMPVSSKKKERG

SEQ ID NO: 472182 - protein, 361 aa, unidentified
MSSVTTTVADFYRYVVGVDTHAASHSYAIVAGPNGALIDQATFPTTTAGLRRARAWIGRRTGGDLDGVLVAAEGTGSYGAVLGDVLEEAGYRVVEAPTPRRERGRGKTDTLDAALAARSTLVMPLVLLRDRRVGEAQTALQVLTVARDQLNADRLRCINALTALIRRHDLGLDARRALTDSQITMIAGWRRREESLGAATARAEAVRLAKRILVLHNELADNRNQITTIVAAQAPELLDLPGVGAITAAVILAVWSHPGRIRSEAAFAQIAGTCPIPASSGNTVRHRLNRGGDRRLNRALNTIVLTRMRTDTNTRAYVERRLAEGKTSKEIRRCLKRYTSRQIFRTLAATHRPPEMVPSAA

SEQ ID NO: 472183 - protein, 411 aa, unidentified
MRLLVGDDWAQDHHDIEVMDEAGNVLVRRRVPEGVAGIAQLHELISRFLPEQGTDVEVQVGIETGRGPWVAALIAAGYTVFAVNPLQASRYRSRHSVSGAKSDAGDAHMLADVVRTDAHQLRPAAGDSPAAGAVKVLARTHKTLIWERAAVTQRLRAQLLEYFPAAVTAFDDLDAPDNLELLAKAPDPARAKKLTRAQISAVLRHAGRYKIAARTDAILAALRSPQLGQPPALTAAYAATVRSLIAVIATLNEQVAVLQGQVEAHFGQHPDAEIYRSQPGLGAITGARVLGEFGDDPHRYACAKARRNYAATSPITRASGKKKIVAARFVHNDRLIDALMIQAFAALRVSPGARTFYDDLRARGIEHNDALRRLANRLVGILHGCLKTRTRYDEATAWGHRETTGQSPVAA

SEQ ID NO: 472184 - protein, 350 aa, unidentified
MNANPNRAVRVYCVDLAKRKFQVHGYTDAGACVYRRTLSREAFEKLFRQVSGTEALVVMEACASAHHFGRQFLARDLKVKLVPPQFVAKLRHGNKTDGNDADAIYAVHRDPRVRPVPVKSVQQQDLCAYHRVRELLVKQRTQLINQARGLLAERGLVAARGHEGFAELLRAVAGHTHSEVTEPLGDLMRLIAAQIQGIEAQIDAVERRLREALKSSELARRLDRATGVGCITATAVVGTFGERVERFADARQFAASLGVTPRENSSGETRRLGGITKRGDPYLRKLLVQCAQSIVNACQRRDDAICQFARRLLDRRPRNTVVIAVANRLARIIYAMIKHGTDYQPAHASN

SEQ ID NO: 472185 - protein, 323 aa, unidentified
MNKYNEIFGVDISKDMFDVYGSKSGHNQFKNAASGFMSFLKNLPKKSLVVMEATGYYHYRLAQFLFKQGVLVSVVNPLSVKRFIQMKLAKVKTDKSDAKAICEYGQINQVPLYSALSDVQSECLQLFRLLDSYLKKRTMTKNKLHGEDVLGIPSKHVYRSLKRNRKHLDTEIASIETKLLSLVKQDQQAQLTLLKSIPGLGVKTALYLIVITDGFTKFETAAQLCSYVGITPTIRQSGSSVRGRSSISKVGNKKLRNLLFLCSFSACKHNKSCREIYERIVNKGKSKKLALIAVANKLLKQAFAIAKSGNPYDETFVSALMAK

SEQ ID NO: 472186 - protein, 389 aa, unidentified
MKIFVGIDIAKLNHFAAAISSDGEILIEPFKFTNDADGFQLLVSKLESFDKNSIIIGLESTAHYGDNLVRYLVAEFYQVCVLNPIKTCQMRKNNVRKTKTDKVDTFVIAKTLMMQDDLRFITFFDLDMMDLKALGRFRQKTIKQRTRLKIQLTTYVDQVFPEIQYFFKSGLHQHAVYALLKEAPSPKEIASMHMTHLVNLLKVNSHGHFTKELAKELRVLAQKSVGANDSAISIQITQTIQQIELLDSQLEKIEAEMTDIMKFNDSVIMTIPGIGYINGGMILGEIGDIHRFSNPNKLLAFAGLDPSVYQSGNFQAKTTRMSKRGSRVLRYALVNAAWNVVRNNATFKAYYDAKRAEGRSHYNALGHCAGKLVRVIWKMLTDEVEFNLE

SEQ ID NO: 472187 - protein, 359 aa, unidentified
MTMLAEQVDGVIGVDTHRDTLAAAAVSPIGAALATTDAPANARGYRRLLEFARQHIPGRRCWALEGVGSYGAGLAAFLDQAGEQVVEVLRPKRSAVRGGRKTDMLDAIRAGKEALASEHLIQPRARGEREALRVLLVTRHGAVLASTAAINQFKGLIVSAPDDLRAELRKLKRPAQINRCAQLRDRPAQSIEHRMTVRALRSTAQRVQTLQAEARDLEGEIISLVRQMAPELLELQGVGPITAAQVLVSWSHPGRFRSEAAFASFAGVSPIPASSGLTNRHRINRSGDRQLNRALHTITLIRMRLDPATKTYVARRISEGKTSRDAQRCLKRAICRQLFKILERSGRTPTTSSEPLDSI

SEQ ID NO: 472188 - protein, 395 aa, unidentified
MALARKCFLGLVLGGVGDLAQLARPSDAAPFSDEAPPAASAIELKSEKTAKAKRILLGVDVHLRGYQAARKVDNGVIGVVDTFRSEVELLLHVEKQRPRAEQVVVVYEAGPLGYTLYRKLKAAGVLCYVCAPDGAEQRRKRRKNNKIDARNLTSKLFNYLNGDKEALPLARVPTEAQEELRLTSRQHDQLVEERKCLGAQGNAVLLGQGFGSWSNWWRPKAWTQLSNLVPAWLLERLQIWVDVLKVLDEKIAQAKAAFARSCHGPRPKGVGALSQMQLQSEVLDWSLYSNRRKIACLAGMVPSEWSTGDKERRGSITKVGVPALRRIIVEMVWRIVLFQPQYKPVQKWQAVLRGSNPALKKKAVVAIGRQLMVDLWRLQTGRVTAQELNLVMVEA

SEQ ID NO: 472189 - protein, 384 aa, unidentified
MKRRAKVSQIGLDCHRKFSKVSARDSQGQIVWRKRLEHRDREVLRRELGEWPKGTPVMLEGTFGWGWLSDELLAAGLEPHLVSSRKLGAWRKARGLVKTDRTDADLLSELWTQQPRWWEVWLPPPEVRDLREWLRYRMTLVRLQTGLKNRVHAVLHRHGVMHDYSDLFAPQGRRFLTLLVGSPEAPLSKSGRATLKGYLQLLEHLRRQIAQATLEFRRQLVRTPEGRRLRTLPGISWILAYTILAEVGHLERFAGAKHLASYSLLAPRADETGEDDGQAPIGRHVGHAGRRTLKWAWIEAAHSAVRCDARFRGIYDRRTNNGQRDRNRGMIAVAHELCRVGYVVWKKEVDYTEDPPGRPGRRIPTQTSRSGTGQPDPAMVAVVP

SEQ ID NO: 472190 - protein, 423 aa, unidentified
MSQNQPEIQYAAFLAIDWADQKHVWSLQEANSSTRLRGEVDHMPEAVETWVAQMSQRFAGRPIAVAVEQSRGALVFLLSKYEQLHIFPVPPAMTANLRKAFYSSGAKNDPSDADLLLDLLQRHREKLRRLSPDTEATRRIQNLVEERRKLVDEKTAQSNRLEAHLKIYFPQIPRWFGDVDIPLVCALLERWPTLEALQKARPDTLRSFFRKQHSRKEELIESRIKAIGEAMPALKDRAVVEAKVAVVKVLVQLIQVLHEGIEGLNRQIQEAAEAHPDFFIFDSLPGAGAVMAPRLLAAFGSQRERYQNAAEVQIFSGIAPVSESSGKSSGVHFRFACSKFLRQSFHEWAALSITQSQWARAYYELQRRRGKKHHAAVRALAFKWIRIIYRCWKEQVAYDENVYLAALAKHNSPLVAATKAVAL

SEQ ID NO: 472191 - protein, 348 aa, unidentified
MLHAGLDLSRRKIDVCLLSAAGEIVEEFASPPDADGLLGLARRVGRHERPVRAVIESMTGARFVHDRLEALGWDVLIADAAKVKGLAPLACKTDKIDARVLAVLSHRDLVPEIWLPDPRIRREREQARFRMHLVKHRSMLKHRIHATLISFGHPCPVTDLFGVAGRELLDRLDVPQPWRGTVDASLHLIDDLDRQIDAINRELRASGADHPSVPLLLTVPGIGWVLAFTIAAEIGDITRFASPKKLCGYTGLCPRVYQSGDRDSRGPLTKQGPKYLRWAMLEATMHALRHPAYRERYQRNKRRLGRQRGAKVAQIDVARKLTEAIWHMLTNHQPFAPAPGGSAFRLAA

SEQ ID NO: 472192 - protein, 423 aa, unidentified
MAYRIAGIDVHKKKLAVVVADVEVEDEYPLERRWYGSNPEQLQRLAEWLSEQQVEEVVMESTAQYWKPVWGALERYWKPSCEKREGAGRMSGTLHLAQALSNRGRRGRKRDFRDAERLVKRLVSQELTLSFVPHAEQRLWRTVTRTKYQLRRNKVRLHNQLEALLEEARIKLSSLVSDLLGASARRMLQALAEGETDPAALAALADQRLRATSTQLRDALGACTELNPVYRRLVKMALEELQLIEQQIGQLDQQIASLLHQHQDAVQRLAEVPGLGVDSAQQIIAEVGAKAATFPSAKNLSSWVGACPGEEESAGVNYSPRSPKGNRHMRRLLNQAANAAVKRKGSIFEIVYRRLVPRLGHNKTIGAIAHRLCQLIWMILYKGVRYEERGPAVCEQSKRVRTLRMIRTLRKLGYRVELQAHPA

SEQ ID NO: 472193 - protein, 339 aa, unidentified
MNITTIGIDLAKTSFSLVGSGKHGKIVLRKTLSRNKLFPFIAQCPPCLIGLEACSGAHYWAREFEKLGHQVRIIAVKFIEPYRKGGKNDNNDAEAICEAVRRPNIWFVPVKSADQQAALSVHRVRQGVVRDRTAWVNRMRGLLSEFGIVMAKGRYAAQSAIPAILGDDDNGLPVLAREMIHDLWSSILQANEQILSYDRVLSRMAREDETAKRLLTIPGVGEQTATGVVASVPDPRLFKNSRQFAAWLGLVPRQYTTGGHVRLGRITKRGDKYLRMCLVHGARAVVAKLGDKQDHVSCWVRDLIERRGYLRAVVALAARNARLIWTLMMKREDYRPINH

SEQ ID NO: 472194 - protein, 337 aa, unidentified
MNIIGCDFHSRFQQIAMLDTETGEIVERRLEHENGEARKFYGALSSPARIGIEATGYARWFERMLQEQKHELWVGDAAQIRAAMVRKQKTDSRDALHILELLLSNRFPKIYISKLEDRDVWQLLRHRCKLVRWQTSIRNQLHALAMGEGVCRKKKLWSRGGREELDSLSLDAWASRRRSDRLELLDRLAPCIQELDQAVEEAAKDCPTAVLLQRQAGVGPVTSLAFALMVGPVERFGNSRRLVSYVGLNPREESSGGKQRMGAISKQGNSMVRWLLLQAAQTASRYDEDLRRDYRRLVSRRGRAVAKVAIARKLAVRLYWMLRQASEQLNAADSHAG

SEQ ID NO: 472195 - protein, 375 aa, unidentified
MNNNNTLYVGLDVHKESITVAYAINSEPVELMGKIGTSPTDIQNLCKRLRSKSSQVSIVYEAGPCGYGLYRRLVKSGFDCMVCAPSLIPKKPGERVKTDRRDAIRLVRSLRAGDLSAVYVPGIEDEAFRDLARAWASARDDLRHARQRLKSFLLVHGVHYVGRADWGPAHRRWLSKYSFESPWRQLAFDEHRRTIEDRQAQCERLESALKEAVTEWRLYPVVEALQAMRGIQFITAVGLISELGDLTRFEHPRQLMSWFGITPSEYSSGGSRHQGSITKAGNSYARKLLVEAAWSYRHPARISPAIQKRQENLPRPVIDRAWDAQLRLCKRYRKLQAKGKNVNITIVAVARELAGFIWDMGRIAMPVAQQPQCHK

SEQ ID NO: 472196 - protein, 322 aa, unidentified
MRLPNPLCVGIDVSKATLDIAATAEIEQFTTSNDSDGFDEIINKLKECRISLVLMEATGGFEAAIACSLQAAGFDVTVINPRQARDFARAMGYLAKTDRIDARVLAQIAEVINKHPDRERFIRPIQDAERQVLTAMVVRRRQLIAMHVAERNRLHPAHPQSRKSINIIIKALDDELARVDAEMSKHVQNHFKELADRLNTFKGVGIRTTASLLAEVPELGNLTRREISALVGVAPVNRDSGTMRGRRTIFGGRIGARTALYMAALVATRFNPVIKAFYSRLLAVGKPKKVALVACMRKLLTILNAMLRKNEEWDMSYHSVSL

SEQ ID NO: 472197 - protein, 348 aa, unidentified
MKSLHYIGFDVHKKAISFCVKTAAGEIVEEGSVLAQREVLRQWASARPQPWRGAMEATLFSAWIYDTLKPYGEQLEMAHPAKMKAISAGKKKSDTIDARTIADLVRCNLLPACYVAPPRIRELRRLLRYRSLVVSEAVRMKNKMAGLLMEAGAVYVKEKLHRKKYFASLLEELEEVPESVIDLLRLSRGALEMFENTQKRLVRELLADPELAQRVERLMTIPAVGEITALTWALEVGDPQRFPSGSDAMSYCGLTAALKSSAGKQQRGPISKQRNHWLQTTLIEAAKLAPRWNPQLAALHARELERGHRNRATLAVARKLVTYLLAVDKSRQPFQLRVPLEEPTQKAA

SEQ ID NO: 472198 - protein, 350 aa, unidentified
MPQLNVPRSAAVYGIDIGKNIFHVVGLGSDGVPVQKVRFRRDTLLQFFERAAPAIVGMESCAGSQWIARKIKALGHKVRLIPAQFVKPYVKSNKTDIIDAEAIAEAATRPTMRFAALKSEEQADLQALHRVRDQMIGTRTRLINQMRAFCLEYGIALRQGAGLFKLDLPQVLEDKSNDLSSAMRKLLADLFADLRQLEQRIGDVTREIEAIASREDVARRLMTIPGIGALGATALLAAIGNGRQFQKARDLAAWLGLVPREYSTGGKQKLLGISKRGNRYVRKLLVHGARSCFRHLDRTRDRLGNWLDGLQARMHPNKAVVALAAKMARIVWVVLTKPGALYERRDPAFT

SEQ ID NO: 472199 - protein, 398 aa, unidentified
MTESSDYESVQVFIGVDVGKDTHHAVAINRSGKRLFDKALPNDENKLRSLISDLKQHGQILLVVDQPATIGALPVAVARSEGVLVGYLPGLAMRRIADLHAGEAKTDARDAAIIAEAARTLPHALRTLKLADEQIAELSMLCGFDDDLAAQTTQASNRIRGLLTQIHPALERVLGPRLDHPAVLDLLQRYPSPEKLASLGEKKLAAQLCKLAPRLGKRLAADIAQALAEQTVVVPGTNPAAVVLPRLALQLITLRKQRDEVALEVEQRVLAHPLYPVLTSMPGVGVRTAARLLTEVACRAFASAAHLAAYAGLAPVTRRSGSSIRGEHPSRRGNKALKRALFLSAFAALRDPLSRAYYTRKMSQGKRHNQALIALARRHCDVLFAMMRDGTFYTPQAS

SEQ ID NO: 472200 - protein, 388 aa, unidentified
MEAQTVDTMPPVAADHDPVRCLLAIELSKKSWIVAITTALSDKISRYTLDGCDWKGLLELMERIRTRVAREVGRPVEMISCYEAGYDGFWLHRLLERHGVRSHVIDPASVQVDRRARRAKTDHIDAKRLLRSLMAYLRGEPKVWSVLRVPSVAEEDDRRLHRERDRLIAERGQHVNRIKGLCAIHGIYDYEPMRRDRMLRLEQLHTGDGRELPPRLKAEIARELQRLELILGMLKEIEAERDAIALTEKVSAHTNAKKIQNLVKLKAIGAEIATVLTGEVFYRPFNNRLQVASYVGLTPSPFQSGSKCRDQGISKAGNPKARSTMIELAWLWLRHQPDSPLSIWFRERVGTRKGRIRRITIVAVARKLLIALWRYLETGVVPTGAVLN

SEQ ID NO: 472201 - protein, 342 aa, unidentified
MSLIKAIGIDLAKLVFSIHGVDECGKAKLKQTVKRNKLLETIANIPHCIIGMEACSGAHYWAREFTKYGHDVRIMASKFVIPYRQSEKNDANDAEAICEAVTRPKTRFVSIKSEEQQAVLCLHRIRQGQIKDRTAMINRLRGLLSEFGIIMPKGRYPAQKHIVEILEDTDNALPALARELLNDLWQSIKLQNQDILKSDRKLYALANQMKDAKRLMTIPGIGEVTATAVVATVSDAKHFSTSRQFAAWIGLVPKQYSTGGKPTLGRISKRGEKHIRTSLIHGARAVIANCTNKMDRTSLWIKALIERRGFKRAVIALAAKNARLIWSLLQSGNEYQVNYVKT

SEQ ID NO: 472202 - protein, 317 aa, unidentified
MSNESKVVGIDVAKARLDAAVVPEGESFSEANDEAGITALVERLKHLKVGLVVMEATGGYEASAAMAISAAGIRMAVVNPRQIRDFAKASGYLAKTDAIDARVIAQFGLVIEPQVTLPADEETRELQAMLARRSQLIAMRTQEKNRLAVALGSMRKPIKEHIAWLDRHIEDIDVDLTNKLRSSPAWKAKDDLLRSFKGIGPVNARTMLADLPELGRLNRKQIAALVGVAPFNCDSGTFKGQRHIWGGRARVRTALFMGATAAIRFNPVIRTFYKGLVARGKPHKVALVACMRKMLTTLNAMAKTQQPWRPDYRPQAA

SEQ ID NO: 472203 - protein, 325 aa, unidentified
MKDAAGRVQQEGKVGSTRGELDDWMKGLPQPWTVAMEATIFSGWIYDHLQSHAVEIKVAHPLMLRAIAAAKKKNDTIDAGKIADCLRCDFLPECHMMPPEIRDRRRTLRYRHLLVKQMVQMKNRVSGLMETGVEHNKSRLHEVGYFGKLLATSAEIDASIRPLLKLSRETIERCQKTEYALVSSLQRDPLLADRIRRLRTVPGVGPITALTWALEMGDVSRFRTLRQAISYRGLCGDERSSADKVMRMPLSKQRNKHIQRVLVEAAKLAPRLSPELALVHEKEKQKGNSNRATLAVARKMVAYLLAVDRQQREFIPTEQRRSRAA

SEQ ID NO: 472204 - protein, 377 aa, unidentified
MKRIKFVGLDVHAETIAVAVAEQEGEIRSLGVIPNREESVRKLVKKLGPVEQLRFCYEAGPTGYALYWQLTRMGAKCEVMAPTLVPVKAGDRVKTDRRDALKLARNYRGGELTAVWVPDAEHEALRDLVRAREAAKKDQLRARHRLSKFLLRHGRRPPVGATPWTVKYLEWVKRDVHFAVKAQEATLLDYLHEVEHMAARIVRLDSAIEEAVKVAPAKMRAVIEGLQALRGIAQISAVTIVAELGEVTRFSKARELMGYGGIVASENSSGERQRRGGITKTGNAHLRRVVVEAAWAYRHRPAIGFTLRKRQENLSEEVKEMAWKAQHRLHARYGKLMAKGKNKGVVVTAVGRELLGFIWAIGVQVEAQQKESLRQAA

SEQ ID NO: 472205 - protein, 359 aa, unidentified
MREQRNEISFRGQKIYVGIDVHLKSWSVTVLSETSVLKKFSQHPSPEALYGFLTRSYPGAEYHSVYEAGFCGFWIHERLTALGIDNIVVNPADVPTKSSEKLRKTDTVDSGKLARSLRANELKGIYTPDSVSLEMRSLIRLKNSITKDTTRQKNRLKSQLRYLGIEIPQEFLTPFSNWSKRFFAWLKEIETLTPSGRQALDIHIRHLEELRRQKLEMTRALRTLAKTDRFREPLRLIMSVPGFGQATGMAFLSEICDITRFRNAEQLAAYIGMIPMCHSSGEKDGTGDITIRKHAVMRCNLIEAAWVAVRQDPAMNLFYTEQCKRMPKSKAIVKVARKLVNRLFFVLKHQTEYVNSIVS

SEQ ID NO: 472206 - protein, 314 aa, unidentified
MSDRTSESDRIVIGVDPHKASWTAAAVGPGLRPLATIRVPVDPQGYRDLRRFAARWPAAVWAIEGAGGLGAPLATRLSADGIAAVDVPAKLAARVRVLSTGHGRKNDDADATSVAVAAQSAAGLRTVTVDEAVTALRALVEHRDDVVKTRTQTVNRLHALLTQLLPAGAPRQLTADTATQLLCPVRPRSIAARTLRRLAAELITEIRHLDRRISVANTEITHAVQASRSTLTELRGIGHLNAGKILARVGDVHRFRSAAAFASYRQRIGSGWSRRRGRAQRGERAGYRGWSSAGRGARPVGGAPCGPQRDDCTL

SEQ ID NO: 472207 - protein, 388 aa, unidentified
MNNTNTNNTNKKQTHTQANKAAPEAKAKTIKLGIDVHLDRYVVVRIIDGGTPQPPQRFGPPEFLLWVAKQIMLADKVFTCYEAGPFGYSLHRKLEKMGVTNYVVRPRDWDEYAKKVKTDKRDAKQLALHLDRYVNGNHDAFCVVRVPSPQQEQQRSISRQRESFQRERQRLAAQGRSHALYYGEHIQGEWWQEEVWKTLAAQLPPIVVNLLEPLHRLMAVLEVELKTRTREVEAAAPEQLPVGLGKLTSQILEREVADWNRFKNRRQVASYTGLCPSEDSSSDRRFQGSINKHGNRRLRPVLVECLWRLCVFQPEYRVVKKWLPELSNPKTSRPRRKKIIVAMARGFSVDWWRVRTGRCQAQDLGFKLQAPSPSAKTKSAPITSSQNK

SEQ ID NO: 472208 - protein, 304 aa, unidentified
MNGTGIDVSKRQLDIGTTDGETLQVSNNRSGFSELDVWLKKRPTSQIVLEATGGYEQPVLDLLHKVGHPVARANALRARKLAQGLGQIAKTDRLDAYALAQMAALVKLPPYQPLQPWQQKMREFVRARRQAMDALTIARQQQEMVLDRELRRLLQGNITRLQTMVERLGKQIAEQVGQQPQLKTLKSMKGVGPALQAVLASYLPELGRITGKRIASLVGVAPMSHDSGTMRGKRSIHGGRAEIRQVLYMAAMSAMRHEPRLRDFYQSLRARGKEGKVAIVAVMRKMLVILNARVRDAESGLVPA

SEQ ID NO: 472209 - protein, 472 aa, unidentified
MAPPVLPRREKKKTKTMTAMPHPHGSHRSVRLTFTQPYQTLWLREAGKESVLASEERPRVVPIVAGQSRNDGGFLVRRINIKPKGDKHMKKHRYIGLDVHKESITIALAEGGRQGEVREYGSVGGSLLALERALGKLKKPGVELHCVYEAGPCGFVIYRRLKKLGIDCAVVAPSLIPRKPGERIKTNRRDAIKLARSHRAGELTAVHVPEARDEAIRDLCRARTDAVRDQRRSRQQLKALLLRLGYHYTGKSSWTEAHLRYLRELKFTHPAQKTVLEEYLIAVSQAGERIARLNGQIELQVASWRMKPAVEALMALRGIQIIAASVLVSELGDLRRFAHPRQLMAYLGLVSSEKSTGPHRRQGSITKCGNTHARWFLIECAQHYALPPKVSKELSRRQQGQPRVIKALSWKAQTRLHRRFWLLMQRGFLRQKAVVAVARELSGFIWAVLHEVTLPTPASQAVGNHGSPNPSS

SEQ ID NO: 472210 - protein, 475 aa, unidentified
MNVNGKRKKNQVVTANIFEQQELLKKAEVIRANLTASTWRELETNGKFDKNEKLSFISDDMLILGCDVGSETHYLRAIDTRGRELSKSAFPFSNDSEGFQSAKEWAVTIAAENNKNQIVLGLEPTGHYWFCLATWMISNGISVVQVNPYAVKQTKEVEDNSQLKDDTKDPKLIANLVKDGNFGMPYLPEKLYAELRRLSMFRDQLNEDRIRSINRMHREMKIYFPEYKDALGKVDGTFSLELLKQAPFPEDLTALGEDGIRQIWHDAKLRGRGYSRAGEILQYAKVSVGIKDGATAGKTAVQWFVRKIMELDAELAVIEEQINQKCQEIPHTGNILEISGIGENTLSGILAEMGDISRFDDVKEIQKLSGLGLVACSSGKHKGETKISHRGRKRLRYWLFQAAKSAVAHAEEFKELHVYYTTRADNPLKKMQSLIVIACKLLRIIYTILKKGTVYDPKKMLLDIRRPEKKEAIAA

SEQ ID NO: 472211 - protein, 388 aa, unidentified
MSLDRTDAPATGEYATIYVAFELSKAKWKLGVIVPGKEKMSEYTIAGGDLAALQALLLKARKKAERSGKPVQILSCYEAGYDAHWLHRWLTDRGVTNYEIDPSSIEVNRRARRAKTDRIDLAKLMRTFLSYLRGEPRACSMVRVPSVEDEDRKRLTRERDRLVKERGAHTSRIKSLLHAQGIRAATPMRRGFLASLATLCTGDGRRLPVKLKQEIVREHQRLCLVNQQIAELEATSKAELGAATPGSAEAKIVQLINLRSIGPTLGQKLVHEVFYRSFDNRRQVGSCVGLVGSPYCSGTIQRDQGISKAGNARARAAAIELAWLWLRHQPGSALAAWFRERVGKVNDQHEKRRLKRITIVAVARKLMVALWRYLTTGVVPAGAELRTA

SEQ ID NO: 472212 - protein, 411 aa, unidentified
MDVVHARCAGLDVHKATVVAGVRMPSPRCGERCGETTTFATTTRGLRELREWLIAHGVTHVALESTGVYWRPVYAVLEGVVEMILVNARHVKMVPGRKTDVRDCEWLAQLLECGLLRGSFVPPAGVRDLRDLTRLRKTLIRERSQHVNRVAKTLELAQLKLGCVVTDIMGKTGRAILQALSTGIDDPVRLADCAQGNLRKKRAALREALVGRLTPHYAFLLQQHLSLIDALDVHIATLDARIAEAMAPFAEAATLVQSMPGIAARAAQAIIAETGIDMSQFPTAAHFASWARLCPGNNESAGKRRPTTTGKGATWLRATLQEAAWAAVRSRKSYYRALYHRLRARRGPKKAIVAVQHAMVVALWHMLKHRVSHRDLGADYFDRQNTERIRRHHVRRLERLGYDVVLVEKAA

SEQ ID NO: 472213 - protein, 324 aa, unidentified
MTFFIGCDTAKAKLDIAVVNSVGREMPELTATILNEPRDVATMLLTLSGAYPDDEFVCVVEATGCYHLAFADACFDLGIVCRVYNPLITKQQIRASVRGKKTDRTDALMIARLGLRGEGRPYTPDPYKTTKYYGRGCQRLSVLNSSFRQYKNHFSALVDDTMSDELREVLDGVQVAIKEARAQLYKDLAVSADGIVFRRLQTIPGIGPYVAASIIGEVQDMRRFTTTKSIIAYAGLDPRIKQSGKSLNSTGRLTKRGSSYLRRSLFIAANIARQHDPYFQALYDKKRAEGKRYTVANCVVARKLLTIARAVWITEKNYDLSFWD

SEQ ID NO: 472214 - protein, 445 aa, unidentified
MNPHNTATKKSPFDLNCYAAVIGIDWADQKHALATLELPVQNQTQPELSTLEHKTNALVEWISSVQERFAGGRIAIAIEQRKGALIHFLSAFDFIDLYPIEPLSLKSYRKALYPSGAQSDPVDAALLAEFLLKHHTRLRCYRPQSAPVRQCAQYCEDRRRFVDQRAQALQCLKASLKLYFPLALELFADLSTSLAHAFIRRWPTLEELQRVRPTTLHAFFYRHGSRSQKLIEQRLDLIAAARPLTSDPGVIEPQSLRVKCLLEHIATLSRIIGSYEQRIQELVKVLDADGIFASLPGAGSCLSPRLAVLFGQDRRRFASAAELQMLTGTAPVTHQSGKKKFVTMRWACSTFQRQSLVEYALSSLRFSSWARAFFDLHMPQDPNADKPTYSVLRKLAFKWLRIIFRCWQTRTPYDESKYIQSLRRSGSPLWHQLQKTINAPAPSIL

SEQ ID NO: 472215 - protein, 415 aa, unidentified
MSNPLYVGIDISSKENVVCCLTKDSEKQALSRFTVHNNRPGIMELQDRIRQLEQKHNFSEILFGLEHTGCYSTHAAMYLHRHLDFGCPDVRVYMFNPSLIKQFKKAHFLDAPKNDRVDAWYIASRLKAGHLPHPFTWSEPLMALQRLTRARYHIMEALVRESNFLMTNLYLKCSDYTLVFDNNLSATSLAVMEEFESIETLAEASVDELTEFLIKHGRNRFEDPAAVAKELQKAARSSYRLPKAMNDSVNLAMASSIRVIRTLQEQLKSLKKAISDHLDTIPQTLDSVPGIGPIYASGILAEIGDIHQFASHKQLAKFAGLAWTENQSGDFRASQTRLIRSGNRFLRYYLIEAANKVRMHDPVFAEYYATKKAEPKQYAHKRALALTARKLVRLVYHLLKTNQLYQAKGGNRQVN

SEQ ID NO: 472216 - protein, 360 aa, unidentified
MNNITLLAIDLAKNVFQLYGTDARGKTVFERRIRRDKFLDFVKTVNRCNIYMEGCGSANYWGREFIKLGHQVKLINPKYVKPFVKRNKNDRNDSYAIASAARDPKMTFGEVKTEAQQDVQNTHRIRSLLIGQRTALANQVRGFLAEYGIIIPKGVTHVRKQVPVILGNNETNLSRLTLNNLLELYQNLVQIDEKIERYNKIIEDLFDGNEVCERLEEIPGVGKLSATILASVLGNGSGFKNGRHFAAFLGLTPKEHSSGEKDKLLGISKGGDTYIRTLLIHGARSVLLYSSKKTDVLSMWLKRIKERSGANVAAVALANKMARMALAMVKGNCDYKPNHKPRLQNALIGALPQTPEYLKA

SEQ ID NO: 472217 - protein, 381 aa, unidentified
MTCRELPGAGLGPTPDNMNKCLHTELSSHEETRSEFNPGTAVIKLGIDVHQEHYVVVVQEGGGNPKPAQRFKKEAFLCWVAKLKQKSGAEMHAVYEACGFGFGLQRQLTALGIACHVVCPQKLDERNKRVKTDGLDAKALCLKLDRFVEGNREALAVVRVPSEEEEQLRAIHRQREQLVKTRKRLEAQGRSLMVNYGVEPVPGWWKRRTFAALVVPAWMRELLNNSQPLLLALEEKIRALTVKLQTAAAPGQPRGLGAMTSVVIDREVGNWTRFRNRRQVGSYTGLCSGEYSSGQTRLQTCVTKHGNPRLRAALVELAWRLVRFQPEYKPVVKWRRVLAKGALATGATRKKAIVAVARQLAVDLWRIRTGRLNPEQLGLSI

SEQ ID NO: 472218 - protein, 375 aa, unidentified
MSTNLRNVGLDVHADTIAVAVAEPGGEVRPLGIIPNRPEPVAKLIRKLGPREHLRVCYEAGPCGYVLYWQLTKLGVHCDVVAPTLVPTKPGDRVKTDRRDAAKLARCYRAGDLTPVWVPDAAHEALRDLVRAREVAKHDQLRARHRLTKLLLRQGIRPPEGVKPWTQRYRRWLDAVPFDQPARRATFGDYLHEVDHAAARLERLEHALDDAVQATPASLRAVIAALQTLRGIRQVTAATIVSEVGPLSRFPHPRQLMGYSGTVPSEHSSGAAIHRGGITKTGNAHLRRVLLEAAWAYRFPPKCTKGLRQRQRGQPEAIIDLAWKAQHRLCGRYRRLLARGKPTPQVITAVARELLGFIWAIGVAAERAGTAAAAA

SEQ ID NO: 472219 - protein, 349 aa, unidentified
MRFYSHQHQFYCGIDLHARSMFLCIQDQSGKILLHRNYRAGPDALLGAIAPYREDLVVAVECVFTWYWIADLCSREGIAFVLGHALYMKAIHGGKTKNDKIDSHKIAALLRSGMLPMAYVYPQGMRSTRDLLRRRLYLARQHAELQAHIQNTNTQYNLPYFEKRIDRKSNRAGIATRFTDPAVRTSVEVDGALMDALHQQILTIERQINAQVPEHDPVAVHLLRSIPGVGKTLALVILYEIHDINRFPAVGNFISYARLVKCPHESAGKRVKGTHNKIGNVHLKWAFSEAACLFLRKNERGKLYHQRLVSRYGKAKALSILAQKLGRTVYTMLKRRSPFDAKRFFETVG

SEQ ID NO: 472220 - protein, 422 aa, unidentified
MSLPLQGELLSLNVVGALFFVGIDWAAAVHAVCVLDSDGRKVAAFTVEHSAAGLAGLVRRLARLGDPQTMPVAVERPDGRLVDALLQAGHPVVPVKPNAIKTWRESEAGSGAKSDAGDAYVIADYLRCRQRRLTVAVPYSAQTKALRTVVRTRDDLVDTRVAATNQLAALLDAHWPGAKAIFADVESPIALEFLTRYPTARHAAHLGAKRLTAFCVKHHYSGRRTGEALLARLRAAPAGTLDETLCQAVHHAVIALVTVLKALGAALKDLSRSVTATLGEHPDGEIFTSLPRSGQINAAQILAEWGDARQAYDRPDSVAALAGVTPVTKESGKHRAVHFRWACNKRFRVAVTTFADNSRHASAWAANVYTQARARGHDHPHAIRVLARAWIRVIWRCWTDRVPYHPARHGNAQQLNLQDQAA

SEQ ID NO: 472221 - protein, 389 aa, unidentified
MYYVGIDISKYKHNCFILDSVGEIIVNDFIFSNSHDGFQSFLTILESLASSQNIKIGFEATGHYTSNLKRFLENAHYSFMESNPALISKFIHAQTLRKTKNDAIDSQAIARWLMTVDYKPYPTGFYHTYSLKSLTRLRDTVVRQRSLYMVKLTNILDHMFPEYKPFFNESFSVTALFILEKYHSPENIASIPDEDYDAIRRISRGKFSFARLISLRELAINTVGDSNSIFEIQLQSILNLYHAADSEVANLEAEIIPLIQELNPHMLTIPGIGPMTAAIISSEYGDMARFKSASQMLSFAGLEPGYYQSGCSEFHGKMVKRGSSQLRYTLMNCTMPLIRFNPIFASYYHKKRLEGKPHRVALSHVAKKLIRILFTLETTNTDFNPLKLR

SEQ ID NO: 472222 - protein, 350 aa, unidentified
MNYVGVDYHKKYSYMVVKNEDGRVEGRGTVNNTKEEVQQFLEPYRPGMAVVEATRNWGIYDWLDEVLDDVALAHPLKVKAIAEARIKTDKISADILADLLRADLLPRAYAPSKQTRELKNVLRQRMFFIRVQTMVKNRIYDVLDRHPEVVSQAPEVSDLFGAAGMQWLGQTALPGEDNKLLISELGLLKFLKEEISQSNGTVKKLGKKDSRARQLQSIPGIGPFFSVLILYEIDDISRFRDEKKLCAYAGLVPSTHASGGKVFHGRITKTGSKWLRWAAIEAAQTAVRSNSEFNAYYQRIKIRKGTNAAKVATARRLLTIVYRLLRQGRFYERREANTQKIVTPAALAMD

SEQ ID NO: 472223 - protein, 347 aa, unidentified
MLRVGLDLIRKRLDICAISDQGELVDELAAPFDEEGLCRLSERMAEKHAGRVRAVVESMNGARFVHDTLEAQGWDVLVADAQRVKVLAPLACKTDKVDARVLAELSFRDLVPAIWLPDPQVRRERELARFRLHLVRHRSSLKNRIHSTLITFGKPCPVSDLFGVAGRKLLERLDVPEPWRENVEASVVLIDQLDRQIDAVASELKYVGADHPYVPVLMSAPGVGWLVGFSIACEIGDISRFSSPTKLCGYTGLCPRVIQSGESDRRGPISKHGPKYLRWALFEAALNACDHPLYKERYERTKKRLGRQRGPKVAQIELSRKLAEAIWHMLTRNQPFAPAGAPFRLAA

SEQ ID NO: 472224 - protein, 379 aa, unidentified
MNDYSKYVGLDVHKETIVAAIAKAGRGDAMQYGEIDSTAEAIQKLAKKMSANGERVLFCYEAGPCGYGIYWQLKEMGQECMVVAPSLIPKKAGDRIKTDSRDAVTLARLSRAGELTAVWVPDKEQEAVRDLTRAREDMKVMEHHARQQLGAFLLRHGKLYSGKSAWTQAHFRWMEDLRFEHSCQQIVFQEYVDMVKHAQGRLEALEQQMLAVLETWSMREVAIALMALRGVKLIAAMTILAELGDLSRFESAPQLMAYLGLVPSEHSTGQKKKRGGITKSGNGHVRRVLVEAGWSYRFPARKTAALQRYAEKASDEVQEIAWKAQKRLCMRYRHLLLKGKLKVEVCTAVARELTGFIWAIACEVMKKRGIKTITKAKAA

SEQ ID NO: 472225 - protein, 352 aa, unidentified
MALHRAFVGIDVSKEWLDLWLAPLKRFERAGNDGAGWAAVIGLLKSLGIEAGVVVAFEATGGYEQGLRRALLEAGFDVRRLNPLRVRLYAKSLGRNAKNDRIDARVIARYAEAADTTPDILDPARERLAELVSHRRRLVDERVAVGNQTSTLHCVLLQAQNRKRLALIERQIDETDALILEAVGQVPSLVAKVGLLKTLKGVKDVTAIALVALLPELGRITRRAIAALVGLAPFDHDSGKFKGTRSIAGGRAAVRTALYMAARAAARSKSPLGDFYQRLIAAGKSPKVATVALMRKMLVTLNAMIRDNEAWKHASHRRGDGSLPLPPCGRGAKGRGPKSPSPVSTGEGGTRP

SEQ ID NO: 472226 - protein, 384 aa, unidentified
MITIGVDAHKRVPMAVAVDAAGRELARWRGPNSIARWRELAPWGAALDGPVCWGIEGAWNYGRGLAQHRITTGAAVVEVNPRWTAAGRRRARRRDKHDRLDAQAVALYVWREGATLPRLVADDDTAVLDLLVSEREDLVTEATRLRNQRHQLVLHLDPEYTVHLPSLRSQAGLAVLETYTTADNDPLQQQRAAAVRRVAQRLRLVTAQAKALATAIQHRAAPRCAPLTTICGVSFLTAGALAGMLGPGNRFSTDAQRAAFAGVAPLEASSAERVRHRLNRGGNRRRNAILYRIVLAQARHSLAAQAYLARRSKEGKTRREAIRALKRFIVRAIWRQWQACHAALAQPQQALAASRHAPRRWRSGGYMIPSVLMASPVGFALRRR

SEQ ID NO: 472227 - protein, 387 aa, unidentified
MSQTVAALIPAAVNYERTLVLAIEVSNKSWVLAAQVPGLPHTKAKRTIDPEAEALLAAISGYRARTTATGRSIERVIAVYEAGWSGFWLARWLMRHGVEVYVVQPSSVPVDRRMRRAKSDGIDAELLLRTLLAWLRGEPRVCSMVPVPDEADEDARRCVRERTELISERVGLTNRIGAVLATLGVSDYNPLLRNRSRRLAELRTALGEPLPANAHAKIKRLLARLELVLAQVAELERERDAVVETEASDKASKMIQQLTGLRGIGVQSATVLVREAFVRRFANGKALGSYAGLASSPYSSGGINREQGIGKAGNRRVRTVMVELAWLWTRYQPGAAQVCWFRERVGSTGRRVRKIMVVALARKLLIALWRFVIDGVLPEGAVLKPAA

SEQ ID NO: 472228 - protein, 361 aa, unidentified
MKTVRSNELNFDGQNIYVGIDVHLKSWSVAILSEHSALRRFSQSPEPEALHKYLASNYPGATYFSVYEAGFCGFWIHEKLTSLGINNIVVNPADVPTMSKEKLRKTDAVDCNKLARELRSGSLEGIYVPGTESLEMRSLIRLRNLIVKDSTRAKNRIKSLLRFHGVEIPEEFTRCSIGCWSKRFLNWLHSVELSTAYGKKTLELHLEQFVRLRRMLLQETRAIRDISRTEPFEKPIRLLTSVPGIGITTAATLMVELDDIARFSNAEHLASFIGLIPMCHSSGDNDAVGDITVRRHFMLRCLLVEAAWIAIRKDPAMTLAYGEYRKRMNPQKSIIKIARRLVNRVYFVLKHQKEYVPCVVK

SEQ ID NO: 472229 - protein, 386 aa, unidentified
MKLVGIDIAKYKHAAFIMDASTGESLCDPFLFKNNKDGFQKFYDELNKYTQDELLIGMEDTGHYNFAIESCLLAKGYKVALINPITTKNLRKASLKTVKSDKEDAILITKALLDKDYYRIISIQDEKLKEARELTRYRTQLTIEMNRKKNILQRHIDIVFPEFNTLFNNEYTITYLNILRKYGDAYTIAHTDIRSLRKCFKYCNIFSAEDLKELASNSVGIHDVSISFIIQSVISSIDLINSQIEELDKKIEELAITQDSSITSIPGISIITGTSILAELGDISKYSNAGKLIKFAGVNPYISESGEFSADKTAITKKGSKYLRATLYRVIIPVIRHNPAFNNYYHLKRSQGKGHLCALGHCVRKLLRIIYHLEINHITFDINSLK

SEQ ID NO: 472230 - protein, 412 aa, unidentified
MLKIVYPICCGIDVHKKFLVACIAFTNDKGVTTYKSSRFSTFTNDLRKLSGWLSSNSCTHVCMESTGKYWIPVYNILEATCEITLAHPKYVKAIRGKKTDKKDAKWIADLFKHDLVAGSFMPPLPIRQLRDLMRYRFKLINFKSSEKNRIQNCLTVSNIQLANVVSDTFGKSSMRIIDYLLENPDDKDFDFVPLLHPSMLDKVDKIRLALDGVITPEQQQKMNIILQHYDGLEKCKSNLESLILSLSEPYAKERALVSTVPGIKNPFSAIAIISEIGVDMSVFPTAKHLCSWAGVTPQNNESAGKKHSVRISRAGVYIKPLLVQCANAVVKSDKHPEIKSRYLSIKKRRGHKRAIIAIARMLLTAIYHILKKGEPYNAELYKKAEIMPQTRKITVEQAILIAQRHGYSVIKG

SEQ ID NO: 472231 - protein, 409 aa, unidentified
MRYYIGVDWADAEHAVWVADEEGQRVSATMVPHSAVGCSEWGRQLDEWRAQGIGLWAAIERPEGRVVDFLLDHGVRVYPVNPKALDRARDRFRQSGAKDDRFDARVLAGFLRTDHAHLMALEPSSEAAQELKLLTEDYQRQVRAQTRLVNQLTATLKAYYPRALEVAELTTALAAAFLQAYPTPAPLLTLTERQWQRWAKAHHLSAARTTELWSRLKAPQLPVPSHVVRAKSRLMQALVTELAAVMAAVARYRQAIDDFFARMPAAGWARTLPVGEHGVTVPTLWGRLGDAPGRWQSFRHLQAQAGMVPVTVRSGKQVVVAFRFACDKQLRYAVDQVAWLSLPRSEWARAYYDEQRARGHRHRRALRALGAKWLKIIFMMWQRHVPYSEEHHLATMARQALRHPEKRIA

SEQ ID NO: 472232 - protein, 343 aa, unidentified
MGEVSTIGLDIAKSVFQVHGVDGTGAVVMRKRVGRAKVLEFFGGLSPCVVGIEACPSAHYWSRELQALGHTVKLMPPSYVKAYLKRSKNDANDAAAICEAVTRLSMRFVPIKTQEQQTGLMLHRTRQLLVRQRTMLSNAIRGHMAELGIISAKGRNGTAELLQIIANVADDRIPPVARFCLDLLARQYLTLIAEVSSIDKRIHAWHRSCEQSRRLEEIPGIGPIVATALVAEIGDWGAFRSGRSLAAWIGLVPKQHSTGGKERLGSITKQGNRYLRWLLVAGAMAVIRYARQHGTKRPWLVRIMDRRPAKVAAVALANKIARMAWAIMVRGERYREPKLLLAA

SEQ ID NO: 472233 - protein, 385 aa, unidentified
MRSQTFIPRDYDVFSGLDVDKRSISVTFTDHDRFLKSLRMPYSAEHLLNHVRKHFPNKKVAFVYEAGPTGYGLYDGIVAQGYPCLIAAPSMIPKAPGQRVKTNRLDSKALSENLRGGQLKSIHVPSALYRELRHLTQLRDVLVSELVGMKQRIKSLLLFEGIEFPPAPPGSQWSFMVKDKLRKLPCSGTVRFKLDQLLDSLEFNEKQVLKAIREIRRYCQNDPELSQCMKYLMTLPGIGWITASQLLARIGDWRELNNIRQLGGFLGLVPTEHSTGERTDRGSITRTGDERLRSKLIQASWSAIRQDGELREFFRTVYRKHPREIASRVAIVAVARKLSVRIAVVLMKQRPYEVRQKVHSAPLTQEETSPQGTTRREPEPGEKNS

SEQ ID NO: 472234 - protein, 415 aa, unidentified
MKFKKDTRGIKRYIAFDIHKEYALVGGQNVQQEWVMIPRRIGMEKLREWAATNLRKGDAVVIETTTNVWDVYDIVEPLVSYVVVAHAGGVRQIAEARVKTDKKDIERLIRLLIADIVPEVWVPPVEVRELRGMISYRNRLVKTSTMIRNRLQSLVHRHNLVLPKGKLRDKAWWERQKVSALEKIQIRQELAMLDEMEKHKAEVDGELGRQSLGEVWGTQAMRLLQLPGFGVIMSMTVLSAIGDVTRFENAKKLVGYSGLGAGVHDSGKEHIEKRITKSGRKELRWAMVEAAWRAIRISPYWKEQYENYLRRMRKPNQAIVVIARKLLIVVWHVLTKEETDERVSEEDLAYKMLVLAWDLDEEVRMGLTYKQFAKYALMKLGVEKDITRFVRREVPRRLAPREEVLMRMAELGIVQ

SEQ ID NO: 472235 - protein, 400 aa, unidentified
MSGSRRPFQGFVGIDVSTDKFDACGIREDGAKLFQFSAAMDRNGFEKLKCHLSSVPLGSVLIGMESTASYHVNLFSYLISEGYAAVVLNPLLISNYVKTQLRKTTTDKKDAWVIAQFLLANRDSLIRRATSPLISDLRELARRRESLVDQMISLKNDIKRILNITFPELEHMAGIFTKSILKLLQRYPSGYALQEADPDHLTRMLIKDSYGRKRGAFAEALLKAARSSIGTPSPMKDVILKQKVSLHFHLEEALQEITEMLLQTSRGMMGDDMDILNSIKGIGEKSAASFLIEMGGDIQQFDDPNKIIALAGIDPAVRQSGKHEGSSRITKRGNRHLRRIIWLMMTQVIHCCDVFRVYYRKRRKDGLPYKKAVLATSHSLIRVIYAMLTQRTFFCQAVNS

SEQ ID NO: 472236 - protein, 403 aa, unidentified
MISVGIDVAKGKSTVCIVRPFGEVLMKPKDFKHTQSELKVLADKMKMYDEEIHLIMEATGTYHLPIKSYLEEKNYDVRVINPLEMKRYRCQGIRNPKTDRIDSMIIAKYGIDNWYYQPKELEMEGERAELKFLGAQYFSIMKTRQDRMLKLYNIMERSLPGMYGVLDDFNKATGKDKQSDFVYDFYHLDMITKYSEKKFYEKYYAWTKKKGYLFSEKEAGQLYLIAKEGIPTIKPSENTKLVVREAVNILREVNASLYSILTQMTEIAKQLPEYEMVMSMKGIGSSLGPRLMAEVGDPRRFHNAKALIAYAGIDVDPYESGTFKGTERHMTKRGSKIMRKIGYEIMDAVNKHQKIYAGDPVCEYFLKKREEGKPYRVAMFAAYNKFLRIYHSRVSALLNETEA

SEQ ID NO: 472237 - protein, 337 aa, unidentified
MSTIHILGIDLGKHCFHAVGNNHTGKDVIRRKFSRSQLLRFLSVLEPTIIAFEACGGAHWLARKCEAYGHRVRLIPPQYVKPYVKGNKNDFIDAAAIAEAASRPSMRFVSAKSEEAQVIAAIHRVRDGYIKERTACMSRIGAILLEFGLSFPKGHAKMKALFQWLAEQDIKLPQSLVAELLSIHEHYKYLNEQVSTQDRKLKAITENNENAELLKSIPGIGDLTATLCVANISSPSNFGGGREMAAWLGLVPRQYSTGGKSKLLGMSKRGNKHLRALFIHGARSVLSRIETTGKVFGDWLVNLRATKPFNVVVVALANKLARIAWAVLYHRQAFKAV

SEQ ID NO: 472238 - protein, 359 aa, unidentified
MSEITRVGVDLAKLVIQVHAVDCAGKLVTNRRLSRDKFLAWCAQLPAGCVVAMEGCGSAHYWARKLVALGLIARIIAAHLVAPYRLQGKGGKNDANDAAAVCEAASRPNMRFVPVKTTAQQGLLCVHRLREGLKEERTACVNRIRGLLAEFGLVVSRSPEKLRENLTSMLEDASNDLSGLARLVIDEAYGHWKEIEERIQWCDERIKAHVKDDAQAKAATSLMGVGPVTASAVVATVGDFKQFRNGAQFGAWLGLTPKQNSSGGKNHLGGITKRGDMYLRSLLVQGAKSATLTAHMRDDPISKWLHRLREKSGWQKATVAMANKNARILWAMMTKGEKFDPRHMSIKPPGGGTSVAAMA

SEQ ID NO: 472239 - protein, 465 aa, unidentified
MAARKQKRMSAQVVEDEDYQLRYEVAAGIDVAKESAVVCVRMPPAARKKHRTSHLQTVPATVPAIGELAAELLAAGVQMVSMEATSDYWRIWFVVLEEAGLAVQLVSSSQARNLPGRPKTDKEDARWIARLTEMGMLRSSFVPPPEIRALRVYTRHIWDLTADRTRYWQRLEKLLEDALCKLTSVVSKLAGHQTARAVIEAMVAGERDPQVLAALGQGKMRNEKLPALAEALSGMRFGPQHAHTAASLLRSIDLLDAELSDLQERVTAHLAAIPGSWGVDCDGVTGPQAGRAADAAALPAAERLDEIPGLGREAAAALIAEIGLDMSRFPTPEALVSWAGLTPTARQSGPRPGRGKKGHGNTYAKRITVLAAYAAANTDTFLGERFRRLSSRPGGGGRKKAGCAVGRSILIIVWHLLNDPAARYRDLGSGWHARHTDRSRKARNARRQLEALGYDVVITLREDAA

SEQ ID NO: 472240 - protein, 394 aa, unidentified
MILVGIDIGKNKHTFSIINKSSGEILLSPSDFSNNLEGFLFLIQKLNNYTKSELLIGMEDTGHYHFALLKYLLDRRYTVALINPTTTDLTRKLQGGITKNDPLDSLTICDVISSNHRNKPYRVTTLNRFDLYEQKQLTRHHHNLKEELNTYKNRLQKCIDIVFPEFNSLFHSKYGIVYMNILKAFSSAKAIANADIRSIRKCFEFKGKGKRIFLSAEQLKLTAKSSIGIPSVAEEIQIRHLVSQIELLKKQISEIDKRIEEFSLKNNSPILTIPGISHFSGTSIISELGDICNYTKASQIIKFAGVAPYHYESSQFTAQHTAITKKGSKYLRKTLYQIILPVISNNEVFHAYYTKKLNEGKGHRCAQGHCIRKLLRVIYHLLSTRQPFNPKLLV

SEQ ID NO: 472241 - protein, 335 aa, unidentified
MQIYGIDLAKEKFDVSFFDLTSKKVSNQPSHKVVKNNFKSIGRFLETLPSDAVLVAEHTGVYGDTLLKCCMDSNVKIAFVGGYVIHRYRATPDRAKTDVLDCALLREFGERYPDKLKYRKFPEEALYELRQLARHREMLVEQRKQLMTADKSEDCRPIRSLAVKRSMDRIKEMLDTEIAETEKEMLKVINGHDSIHHNYEIVKSVNGVGLVTAVELLVKTDNFTKITTARQYSAYAGTAPYEKSSGKMDKGAHISKIGNRRSKTLLYICAESARLHNKEIKLYYERRTLIDKKPRHYVLNAIANKLLRIIFTLVEKGEYYDANFIRQDPRVVKYN

SEQ ID NO: 472242 - protein, 424 aa, unidentified
MSQTEFAAYVAIDWADRKHYWQLADSDGRRREHGDLLHTPAAIDTWVTGLLARFADGPVAVCLEQSRGPLAYQLGKYARLVLYPVHPATMASFRQAFYPSGAKGDPSDAGLLLELLLHHRQRLRRLDPDTAETRLLQMLTEQRRQLVDERTRHSNRLTAWLKMYFPQPLEWIDNIDSPLGCDFLERWPTLQQLQRAHVETIERFFREHNSRSQARIDERVEAIRKAVTAVEDTALLQAGATASTSLVVLLKALNGAIESLDQRIAEQVPKHPEAYLYAALPGAGPALLPRLIVAFGTRRDRFQSASELAAYSGIAPVTRQSGKSKSVQFRFACPKFLRQTFHEFAAHSTARSQWAGQFYQQQRKRGMRHHAAVRALAFKWIRVLFRCWKEGKPYEEARYLQALEQRGKLRNPTSEASPATKSEA

SEQ ID NO: 472243 - protein, 358 aa, unidentified
MEAEVVCGLDVHRSVLVGSLRQGGRVIGCESFQTNRGELKRLDEWLKSHDCTTVGMEATGVYWKPVYHALEAGRRIVVANPQHIKAMKGRKTDRADAAWIARKLEDEDGIRPSFVPAREVRETRELVRGKLKQKVERMRLALEMPLTEAQQWELRAQLRRHQDVESEVQKVAQELVQRLKGMEAEVCRLMSIPGIGEDGARLLLGFFGNDLSLFPSDGHFSAWIGLSPGDNESAGKRSYAGRRKGNRFLQGKFTQFAWAAVRTKGCWLQHKYRSLCGRMPKQKAITAIAHKLAVIVYHVIKDGTEYKDHGLDYIPGARKAGALRKAIVLIQRHGGTVQLEQSHTIETHPEFRSQGFTG

SEQ ID NO: 472244 - protein, 423 aa, unidentified
MDVIHQCVAGLDVHKAVIMACVRLTAGNKVSREVRTFETTTAGLLALLAWLTESGCTHVAMESTGVYWKPIWNILSDGDFELMVANAAHIKNVPGRKTDVNDAMWIADLVACGLIKASFVPDEQMQEWRSLMRGRKQLVREQTSHVQRIQKTLEEANIKLDSVITDILGMSGRRMIEAMIAGVRNPAKLAVLADRRIKASPKELYDALHGRLTDHHRFMLQLYLGQYDSLTSAIEEIDRQVDALLDRMDQEVAAGQAPFRDLIRLLCTIPGISTLAAQTILAEIGRDMSRFPTAGHLVAWAGLCPGQNESAGKRKSSRLRKGAPWLKTMLVQCALPAARKKDSYYKAQFNRLKSRRGPQKAVCAVAASILTAIYHMLKDGTQHQDLGAGHFDQRPAEAKAKRLVAQLAKLGFEVQLQPLPTAA

SEQ ID NO: 472245 - protein, 423 aa, unidentified
MDILYERVAGLDVHKDTVVSCVRVSTGGQTQRECRTFATTTEGLTALAAWLEERRCTHVAMEATGVYWMPVWKILGQGDFELIVANAAHIKNVPGRKTDMNDAMWIADLQACGLIKASFVPPEEMQELRSLTRTRKQLVREQTRHAQRIQKTLAEANIRLDSVLSDPMGASGRRIIEAMIAGVRQPGKLAELASKQIKAPPKELYDALHGRLTDHHRFLLDLHLRQWDGLDAAIRNIDREIAQRIDRTDAQIGTGKVPFRALIDLLDTAPGVSTVAAPAILSEIGYDMSRFPTAGHLLAWAGMCPGHDESAGKRKSSRLRKGAPWLKTMLVQCAWAAKRKKDSYYRAQFFRLQSKRGPQKAICAVAASLLTAIYHMLKYGIEHRDLGADHFDRRPTELKAKRLVAQLAKLGFAVQLQSIAQAA

SEQ ID NO: 472246 - protein, 409 aa, unidentified
MEQVIERGAGLDVHKKSVTACVRVPGPEGGRRQEVQTFGTTAAALLTLRDWLSVHGVTHVAMESTGVYWKPVYYVLEERFTCLLVNAAHVSKVPGRKTDVRDCEWLAQLLEHGLLRGSFVPPVPIRELRDLTRYRAVLVQDRTREANRLHKVLTDAGIQLASVATNVLGKSGRAMLAALVEGTSDPAVLADLAQGKLRRKLPALREALAGHFRGHHAFLVSQLLAHLDYLDEALDVLTAQIQEALSPFASEAARLDAIPGVGARTAEVLIAEIGVDMRQFPTARHLASWAGLCPGTHESAGKRRAVRTRKGNHWLRAALIEAALAAINVRDSALAARYRRLVRHCGHKKAIVAVAHKMLTTAYLLLADGRAYQEPGAGYYDAQRKDRLVRRALHTLEQQGYRVTLELAA

SEQ ID NO: 472247 - protein, 366 aa, unidentified
MGMLAEHADHVIGVDTHRDAHSAAAVATGTGTVAAHTTVAADAFGYKRLLRFARRHARNRRVWAIESSGSFGAGLTTFLLANGEWVVEVDRPKRAARRNGAKSDELDAIRAAREALEREHLAQPRARGDREAVRVLLITRRGAIRARTKAINHLKALVVTAREELRHQLRNTPTDELVYRCSRLRTLPSHSTEHRATVLALRHTARRILALEAEANDLESEIEQLVKQTVPELLAEIGVGPISAAQLYCAWSHRGRLRNDGAFAMLGGSAPIPASSGQTIRYRLNRAGDRQLNCALHTIVLTRLQHDPATRAYAARRLAEGKTPREIKRCLKRYVARRLFRILEANGPHPVAPPRPPRSRTIGHCS

SEQ ID NO: 472248 - protein, 364 aa, unidentified
MSHFTNMSPTNEVGKPLNSHGPVRCLYHSAIGVDVHAQLLVCCFQKHLPETNQLLSEQAQFGTSNSQIKQFVDWVSSHKPEIILMESTGVYWMSPYEALESAGFTSQQLAVVNARDIKAAYGRKSDKADARRLTEFARMNSFKRSFVPSRDIRTARLIARRLHHATQDCTRESNRMQKLLSCSGTRISSVFSSFKGKAAQKIINSFLDDSYPEFIACVRSNCSRLRATFTDIVDAFRQLNTPTFKELLLEQRKSWRQAMERRDRLEALLRIQMKPYKKTVDQLCAIPGVKELAALKILSEIGTDLSSFRSSEAFCSWIGIRCGNNEPAGKAKKSGTPKGNNYLRAYLTEVGQAIALVKTYNGFA

SEQ ID NO: 472249 - protein, 476 aa, unidentified
MVVPNQEPKKPAKGKKSTKPDKSPQRSIPVPVPASTAALNVINPDAAGIDVHSNMHMVCVPADRDANPVRQFGANTADLHEIAAWLKKCRVRTVALESTGVYWIPLFELLEAEGFEVKLVEPGQLSRCGARPKTDVLDAQWIQRLHSYGLLRGSFRPPDSILALRAYWRQRQMQVRYAASHVQHMQKALEQINVKLAEVVSDITGLTGMSIIEAILGGERDPVKLAKLRDERCHCSEDQIALALQGTWRPEHLFELRQAYELYQFHHKQITECDNQVQAELAQFPNRAGEKTRTHKPRKRGRKSNDLRFDATGPLFKALGVDLTLIDGIDVGTALVILGEIGVDVSRFPTEKHFASWLRLCPPQDESNNTKKRRGRRKNTSRVANALRLAARSVGKTMTPLGLFYRRIRSRIGALGAVKATAHKLACLIYRMLKYGHEYVVQSLEEYEAKTKANMLKVLQRKAAAMGFQLTPIPTQ

SEQ ID NO: 472250 - protein, 414 aa, unidentified
MNAVGIDVSKGKSMIAVMRPFGEVVASPFEVVHTVSELKKLSGFLISLKGETRVIMEYTSSYYKPIARYLHEAGIFVSVVNALLVHDYGGNTIRKVKTDKKDAVKIANYGLDRWIDLVEYAPVEDVRQMLKTFNRQYNQYMNVKVSLKNNLISILDHTFPDENRLFTSSPRKDGHEKWIDFAAKFWHCECVCGLSEKVFKERYAKWCQKEGYHYNEEKAEEIYSESCGHIDTLPKNDTTKILITQAIEQLNAVAVTLAVIRGEMLKLASRLPEYPVVLAMRGVGEILGPQLMAEIGDLRRFRRKESLVAFAGVDAPPFQSGQFESKSRSISKRGSSDLRKTLFVIMTVLLKNAPVDDAVYQFVDKKRSEGKHYYVYMIAGANKFLRRYYGIVKAYLNNLDPENENTSIFDSSGI

SEQ ID NO: 472251 - protein, 362 aa, unidentified
MSKSTTIIAFDQHAATTVAAVLLPGQRTPALHSLGSDAPTILRFVERVRRSGAIQCCYEAGPCGFELQRALTTHGIPCEVIAPALIPRRPGDRIKTDRRDATQLAILYRAGALTAIHIPSEQEEAARDLLRCREDICVDLLRARHRLSKFLLRHGRRFTLTKKAWTTRHAAWLQAQRWPLPALEQTHRAYVRAVDEAVARLQAVDTELRDLLTIEPLRARVERLRCFRGIDDLTALTIAAELGDARRFPSAPRMMAFTGLVPAEYSSGTKRVRGAITKTGNAHLRRVLVESAWHYRHHPFLGRSLRLRQRGAPADVIDRAWHAQWRLHRRYRRLAARGKPKQHIVTAIARELSGFLWATLTQ

SEQ ID NO: 472252 - protein, 315 aa, unidentified
MTASPMVGVDVAKDRLDVAVRPSGETWSEANDDAGVRALVARLRPLGPALIVCEATGGFERAAIAALAAAGFPVVVANPRQVRDFARAPGQLAKTDQLDAAILALFAERVRPTPRPLPDAAAQLLDAVLTRRRQLLEMLVAEKNRLGFAPKPLHRGIQAHIRWLERQLDDVTKELAGLIEASPVWRAKDDLLQSVPGVGPIVSSTLLGELPELGTLSHKQIAALVGVAPLARDSGTRRGKRMVWGGRASVRTALFMAALCGRRWNPTLKVFYERLKAAGKPTKVALIACARKLLTILNAMMRDQSRWTSNVQYSC

SEQ ID NO: 472253 - protein, 351 aa, unidentified
MMIIGVDYHPSFQAIAFFVEETAECGEQELNHSDGQAEKFYRDLKQRGISVRVGMEATGYSRWFERLLADVGFELWIGDPAEIKTRRVKKQKTDRKDAQLLLRLMRGNNFPQIWVPGPENRDLRQLLWQRHRLVQMRTRIMNQLQALAMNEGYRWKKKLFSEQGRALLEKLSLAPWASRRRQELLELLDRMNPTIEELTAAAEQEVKKRPEALRLMTHPGVGPLTALAYVLIIGTPKRFHCGKQIGTYVGMIPSEDSSARKQRLGHISKQGNSLLRFLLVEAAQAAARCNPQWRRRYLHLAMRRNKSIAKVAMGRKLGVRLYWMWRNGCAYSPSFEFGSYVGQLGTGHGVQ

SEQ ID NO: 472254 - protein, 405 aa, unidentified
MVNKKLYVGIDVHKRDQVSTILTMSVLKKKNNEWKKVKPILIKNNIKDYESLHKVIHRQGRNPSSVSIAVDHTGNYSLPIVHFLVSKEYKVYFLTNQSVKAAKERLLKEENKTDRLDSAILAYLLYLRDFHDLSLNISATQPDLESHASLLRSLVLQRAQYVRLEVQATNRLHQYLLVVFPEGEMNYFSQLLRIAPYYPTPKDILYNGLAGIENITEKDRESIIALAQDTVGVPGDPYRWIISDLCEQRSDAHLKVLLISRQIKKEVDAHPYGPILRSFPFVGDVIAATLIGIIKDISYWPNDKTLKKVLGVYGREYISGANPPVRRPGKSGNRAGKVALFQACIGCIKKTAPNNDFKDYYERQISHNKIWIQAMANTSGKMAEIMYHCLKTDAKYQNQGKYKVP

SEQ ID NO: 472255 - protein, 323 aa, unidentified
MSKHSMVCAGIDTGKYKLDVALEGCREQLQIDNNADGHAALSAWLKRHKVQRVGIEASGGYEQEVVTCLRRDKFVVVVFQPAQVRAYAKFLLQLAKNDKIDAALIAACTAATKKIHAPPDQRLAPLAERMTLIDQLTEQIAKCKNFHEGSRNARIRQFWKEQIAHFNKLLGAELKELAAAIGQHQDLAERLALIESVDGVGRKTAVAILVRMPEIGRLTRGQAAKLAGLAPFDDDSGLQVGIRHIAGGRERLRGSLYKAALPAAFYWNAQLIALYKRLIAAGKEHKAALIACARKLLIFVNTVVARGTPWVSNRSASAVRAAA

SEQ ID NO: 472256 - protein, 432 aa, unidentified
MPRYVGLDVHKQFIEGCFIDEQGKQLHRCRVAVTRESIQTFVAQCLQPSDHVVMETTTNTWEVADLILPQVAKVAIANPLKVKAIAESKIKTDKVDAGVLAQLLRCDFLPEVWIPDKTTRLLRQMCAYRAGLAADQTRIKNRIQSLLAQRLIPVPVPVLFNGCGRNWLSNLELNPQDRVLVDGCLRVLDQLELEKSGLQKALAQLSYDNDQIRLLMTLPGVGAAGAQALYAALGDWKRFKDGAHVASYLGLSPSTRQSANHCYHGSITKAGNSLARWLLTQAARQVAQHPGPLGVFFRRIHKRKNFNIAVVATARKLVTIGFLMLKNAEPYRYSLPGPTQRKLSVFRVEATGSRRSKSKLRLPMQRREPGTRVQSIPSLDEVYFSENLPPVTKADALASGERRMLQQMGIANLPERLQVVQTRTYQSRKTAS

SEQ ID NO: 472257 - protein, 351 aa, unidentified
MTRKTDAVVASTIGIDTGKNTLHLIGLDDKGAIVLREKLARGRIAARLANVPKCLIGIEAGMATHCVARELIALGHKVKQVPPVYARPFRQGHKNDFRDAHAVAEAVQRPSTRCVPVKTDDQLDLQALHRVRSRLISERTAVINQIRGFLLEHGIPVRQGLRFLRQQLPDILAKRIDILSSRIIRIIEDLSGDWRRLDERIENVTEEIEELAHGTEGCRQLMTVPGIGPIIASAMVAAIGSGTAFARGRDFAAWLGLVPKQMSTGDRTILGRISKRGNRYLRTLFMQGARVILLRPANWAKHSFGPWLAAAAKRLHHNVLATAVANKLARIAWTVLVQARSYETRVTSEMA

SEQ ID NO: 472258 - protein, 321 aa, unidentified
MAILSFCGIDVSKDRLDVMVLPEQESFSVRNDAAGWAELVARLRGFAIAAIGLEASGGYERGAMRALLAAGLTACQVNPFKLRQFARASGVLAKNDPLDTRMIASFVAIMPTRPAQPRPPAIERLAEMLAVRCQLNAEKVAAENASRLLEDAMLQRLSRRRIARLAADIDMLDRHLVEIVDTDATLVHRYRLLTSRPGVGLVLACTLIALLPELGTMSRKQVAALVGVAPYAFESGKFKGRRCIWGGRAPVREVLYMAAMSAGNWNPVLKAFRKRLKAAGKLPKVAIVAVMRKMITMLNAMVRDDVGWADHLHGRHTVPTA

SEQ ID NO: 472259 - protein, 400 aa, unidentified
MRQQVWAGVDAGKSDHHCVVINVEGIQLLSQRVVNDETALLDLIGAVTALADGGDITWAIDLNAGGAALLITLLIASEQRLLYIPGRTVYHASAGYRGDGKTDAKDAAVIADQARMRRDLQPLRPGDDIAVELRILSSRRTDLVADRTRAINRLRAQLLEYFPALERAFDYSTSKAALILLTGYQTPDGLRRAGPARLTAWLAKRKARNASAVAAKAIEAANAQHSIVPGQNLAATMIARLAKEVMALDTEIGATETMIEDRSRRHRHAEIIVSMPGFGVVLGAEFLAATGGELSAFDSVDRLAGVSGLAPVPRDSGRISGNRKRPRRYDRRLLRACYLSAQIAIRTDTPSRNYYDRKRSEGKTHTQAVLALARRRLNVLWAMLRDHRPYQPTAPNTAAA

SEQ ID NO: 472260 - protein, 462 aa, unidentified
MGHARARKIPAQLVEDEEYQLRHERVAGIDIAKAKADVCTRMPPQRGGGRRASRVEDVPARAREILALAVRLAADGVELVVMESTSDYWRMWYYLLEGAGLSVQLVNPAHARQLAGRPKTDRLDAQWLARLAEMGLLRPSFVPPPEIRALRDLTRTRLQLVRDRAREWQRLEKLLEGALVKLSSVVHSLAKVQSARAILEAIAGGERDPGTLAALAHPNVKGGRASVAEALEGMALGGHHPMLIRVHLDHITLLDRSIDAVEDEIEAALDAIPAAWGTDAGGETGPDAGRGPDPAILPAAERLAEIPGISPALARAIIAETGLDMTRFQTADHLVSWAGLAPVARQSGPRSRKPKKGQGDAYLRGYCTQAANGAASTDTFLGERLRRLSRRLDGNRARCAVARSILVIVWHLLASPDDRFADLGPGWHQRKADTDRRTRSLLNQLRALHPDAEITITPATAA

SEQ ID NO: 472261 - protein, 358 aa, unidentified
MRIIGCDLHARQQTIAMLDSDTGELEEKTLEHEGDTVREFYSTLSGPILVGIEATGSMQWFLELMEELGIECRVGHPAKIRKAETRKQKHDRRDARLLLTLLAENRFPTIWMPSTEQRDLRTLLRHRHQWVRLRSRVQHTLQSMALNRGLRLGHSLWSRVGQQALRALPLAPHASERRAALLVLYPHLQGSIDELDKEVCEEVSQHPQARRLLTHPGVGPITALATEVFLGDPLRFSDGKALASYIGMIPSEHSSGRRQRLGAMSKQGNALLRYLWCEAAMHAVERDPELKRFYRRKLVQKGLGKARVAAARKLGIRLWIMMRDQIDYQEFCRRGKARQENGSVHAGMPDLDSGPAAQ

SEQ ID NO: 472262 - protein, 338 aa, unidentified
MNIVFLGIDLAKNVFQLCGLNPAGKPVYTKRTGRKELLQMLANIPACLIGLEASSGAFYWQREFEKLGHKVKVISPQYVKPFVRGQKNDGNDAQAIAVALMQPTMQFVPPKSPEQQDIQALHRARQRIVNHRTATVCQIRGLLLDRGIPIGSAVSRARRAIPLILEDAENGLSSRMRRTIAELYDLFNDLGRRIHFFDKEIETVFRQSEACQRIAKIKGIGPETATAVVAAIGKGTEFKNGRHFAAWLGLVPRQHSSGDRQVLMNMTKKGDKHLRTLFIHGARAVVRVATNNNDGHMNQWVNQLKERHGFNKTTVAVANKNARIIWSMLRNETGYQVV

SEQ ID NO: 472263 - protein, 368 aa, unidentified
MKSIAYVGIDAHKDTHTICVLPEGSTEPFLRHTYASDKKVIQDAFRALSERYDLRCCYEASSCGFVLHRWLLEIGVFCQVIAPSLTPVRPGEHVKTDKRDALKLSKLYRAGQLTPIRVPSASEESIRRLTRLRETVVRDVARAKIMLGQFLREHGRIFGGKSRWTQSYWKWLRGQTFAAPDDFVFMQYKSLLEFKLASLEQIETHVNDWAQTDTYRDDVRRLCSLRGVGIVSAMILVTEIVDFKRFGSAGALMSFLGLVPRESSSGQHQSRSSITKAGNSRCRRVLVESAWKYAKKPSLCSALKARQEGLPGDLVAHSWKAQQRLYRKYWSITNRKEKGKAIVAVARELVGFIWAIMNWSGQAAVLTN

SEQ ID NO: 472264 - protein, 307 aa, unidentified
MSGIGIDVCKKHLDVAVFQGPARQFNNTAAGHCKLVRWLNTLPVKQVVLEATGGYELAALDALHQAALPVARANAQRARSLANTLGRAKTDRLDAAMLAYMAEKIDLHPYVPLEPWQRRLGEYVRARQQVIELLKMAKQQLLPVADKPLRKMLQGNIKQLVRSVARLDVLIAEQLKTLLIEHPHLAILKTLKGVGPVLLAVLMCRLPELGTLGGKQIARLVGVAPLSNDSGSVRGKRGIKGGRADIRQTLYMAAMSAARHEPRLRDFYRSLRARGKEGKVALVAVMRKMLVILNARVRDERAAMRPA

SEQ ID NO: 472265 - protein, 376 aa, unidentified
MEGGSLMLNTTTFVGLDVHARSIKAVALDAMTGEVRSATFGYDAAEVAGWVSSVDPSAKCVYESGATGFDLQKRLSSMGIDCVVGAVSKMIKPPADRKRKNDRNDAEFLARMLSVGNVVEVWVPDDGCEAARDLSRALDDAREDLKRCKQRLSKFLLRHGYVFSETTPTGRRKGSWTAAHWAWIKSISFPEKADNDVLAYYVDAVRQAMEDKARLERLVEAEASKPRWKRRIDSVRCLKGIDVTSAADLVFEAGEFSRFKSARSFAAWLGLTPSEHSSGESVRQGGITKAGNKHLRRVLVESAWHYLGCSPHSKDLAKGQVPDPAARRHAAKGVRRLVERRRAMLERGVHKNKANVATARELACWCWAVGRMVENG

SEQ ID NO: 472266 - protein, 382 aa, unidentified
MQASTIDTPTAGHCDTIFVTIELSQKTWLVTLHSPDRDRISRHKLEGGDHAGLLALIESIRARSALKLGTAPKVVSCYEAGYDGFWLHRLLAAAGITNLVFDPASIAVEQRSRRAKTDRIDGELLLRTLMAHLRGEPRVVRIVRVPSVEQEDARRASRERDRLVKEQTGHTNRIKALLRLAGMAVGYPRRGNWLHWLAQQRDWQGQPLSPHLLAEVTREHTRLMLVREQLAALEQAQAAQVPPVPAAMVERRDLLQRLKALGPAFATTLTNEVFYKDFRNRRQVGAYCGLTSSPWRSGGIDREQGISKAGNPRARLKAIELAWLWLRHQPESELSHWFRTRSANAGKRAKRVAIVALARKLIVALWRYLTTGLVPAGATMKA

SEQ ID NO: 472267 - protein, 399 aa, unidentified
MIYGLDVHKEFIQVCALGAKGSKRKEYRIAGTEEAIADWACKLGPLDQVVLEATFHSWAIHAIVSRTAGRVVVANPMEVKAIAHARIKTDKVDAYTLARLLQADFLPEVVLPDASAWALRQLVAHRRLLVKQRIAIKNTIRSALNRRLIPQREGESFSLKARQWMRSLELPPTERFLLHNSLDLLEAIDERIAAADAELLATAAVEEQARLLMTIPGVGVNVALGLLAAIGDIQRFPSPEKLSAYLGIVPRVSQSAGRCHHGRITKAGSTIVRSLVVEAAQILARSPSPLATTYWRVRRKRGHNVAVTALARKLVVVAWHLLQKGEPYRYAPAARTRQKLRALIPRDQRRRAAHSPETLDQVYREAGLPELSPPSQAERRAAAVNRRARTRITNSSPRA

SEQ ID NO: 472268 - protein, 350 aa, unidentified
MSVSEQYVGHQIIGMDLHRRRSVLVRMTEAGERLETVRISNDPEYLREVMTRAGEAPEVVLEACYGWYWAADTLADLGATVHLAHPLGVKMFSYRRLKNDERDAADLADLLRMGRLPEAWIAPPATRELRGWVRHRAKLVGLRSNLKCQVHGILANAGITVPMSDLFGASGQRLLATADLATESRSRIDSLQRMITALDFEVELFAKLVAGRLRTHPGYQAIQLIPGVGPVLAAVFVAEIGDITRFRQPEQLASWAGLTPKHHESDTTVHRGRITKQGSRLVRWAAIEAVQRLPGHTRIGQVRDRVAARRGRNIGVVAAARELTELVFYGLRDHHVRALAGHTPRTPVSA

SEQ ID NO: 472269 - protein, 482 aa, unidentified
MAKHQSPPVEENQQRRFRRRRARAKGRLEDRQTAEVRRVEGLGVVNAHAAGIDIGSFSHWVCVGAGASQEFPAHTDGLHAIVVHLREQHVTTVAMESTGIYWIPLYELLEAEGFEVLLVDPGYTRQVKGRPKTDRLDCQWIYRLHSVGLLAAAFRPDEKTCQLRSYLRQRANLIRYGGQHIQHMQKALEQMNLKLTEIISDITGLTGENIIRAILRGVRDPRQLAKYRNCHCKASEAEIAQALTGTYRDEHLYALKQAYEAWRFYAKQRDEIDEQIQQQLARMKQDRNLPPLKPRKLVHGRKPNQPRFDVRTALYYVVGIDLTEIEGIEETTALTIISEIGVTMSKFATVKHFCSWLGLCPQIKKTGGVIKSSRTRPGANRAAAAFRLAAFGLHASKGALGAFLRRKKAHLGAPKALVAAAHKLARLVYYALKNGLTYVRQTQEAYETKMRAKQFQSLQRRARQLGFALVDAASGETATFAT

SEQ ID NO: 472270 - protein, 352 aa, unidentified
MIYIGMDLHQKTTTWFACDDDGQRAGSGKVESSNEGWKSVTDRFGSTGTEVRVAIETGSITWFCVEQLRSLGIEPTVVDARHFKLIAESRKKSDRRDARTLAFALLNGTAQQCTVAVPSERARRGRSLLQARKTIVEQGTQSRNAIKGLLRGCGCTLAAALWRHPEQLRQALDELQRVPDWMRALLNGHYGVWLETQRQRALLDKQIQDELALWPDAKHLQTLPGFGPLVTIAVASAIDDPRRFARGRQVGSYAGVVPSVRNSGDSTRHGGITHQGRSLLRHALTQAAHSALRGHALAERHKTWARSLDARRGRQVAVIALARRLLIIAHQMWLTGELYDPKHCSTPTALAA

SEQ ID NO: 472271 - protein, 415 aa, unidentified
MALKIVYKICCGIDVHKTFVVACVASTSDKGITSYESHRFSTYTSGLKTLLQWLIDRNCKDVCMESTSKYWIPVYNILEKGCSIVLAHPKYVKAIRGKKTDKKDAKWIADLFKHDLVAGSFMPPSDIRQLRDLMRYRFKLTCFKSSEKNRLQNCLTVSNIQLGNVVSDTFGKSAQAILDKLLENPADTSFDLEPLVYKSLKKKLPELRDAIDGFITPEQAGKLKIIKDHYDNLESRKAELEELILALAAPYQQELTILQTAPGISSNFTAIGIISEIGTNMEAFPSAKHLCSWAGLTPTNNESAGKKKSVRVSKAGCYIKPLLVQCANAVVKSNKHPEIRNRYLRLKKRRGHKKAIIAIARMLLTALYHMLKNGENYNAELYRKSDLPPVDREITVEQALMIARNQGYKIKSATA

SEQ ID NO: 472272 - protein, 341 aa, unidentified
MNIITVGIDLAKSVFAVHGVNDSGKAALVKPKVQRADLLPLVAQLPPCLIGMEACSGAYHWARLFRQYGHTVKLMAPKFVAPYRMTGKRGKNDAADAAAICEAVTRPSMLFVPVKEEHQQIILCLHRTRQGFVEERTASYNRLRGLIAEFGIVLPQKVVCLRREIGAHLEDLPGYANLCVGDLLAHADELDKKIEEYDRAIAKAAREDARSKRLMKLPGIGPVTASALLASMGSGHDFDSGRQVAAWIGLVPGQYSSGGKARLGRITKAGDGYLRSLLVMGARAVLNSLGDKQDRFSRWARSLEERRGYWRAVIAIAAKNARLAWAVLKYGEDFRLEPGKE

SEQ ID NO: 472273 - protein, 353 aa, unidentified
MKKLFIGIDFAKEKFDAAIIEACGLKEFGNREYGTFTNDKKGYRQFFKWVKTNADKSVENEWLFCGEDTGSCSLGLSKWLYGKGLDIWIENAYSIKHSSGIQRVKSDKTDSSMIAEYAWRHQDKAVLFEPLSESLSQLREVFLYRHKLVQQHIAMDVRKQDKEAAEPSKAISFIKRKSKHLMSEIDNAIKECDLMIDRIIESDAELKENYAIITSIKGVARQNGACLLIFTNNFRRFDLDARKIACYYGVAPFGKDSGTSIHSPAKTSHFANKLIKSLLGQAAHCAKKFNPEIREYYNRLIGRGKKPQVALNNVKNKLIRIIVALVRKKVYYDPKTYMFYNAKFTDVKKMLNS

SEQ ID NO: 472274 - protein, 409 aa, unidentified
MRIIGLDIHRAFAEAVAWEDGKLNRLGRVDMRRDLLSAFAARLSPEDVVVVEATGNAASVVAVIAPHVKKVVIANPMQVRIIAHAKIKTDTIDARVLAQLYASGFLPEVWIPDEPTQALRRQVTRRNQIVRQRSRLKNIIQSILHAHLIPSCPHQDLCGPRGRDWLAVQVVPEDERLAIERHLREFDRLGEDLKVIERDLARSALADDGVKRLMTIPGVDMVVALAMAAAIGEARRFDKPQKLVSYLGLNPSVRQSGPGPAYHGRITKRGRGHARGMLVEAAWAAARAPGPLRAFFLRVRARRGQHVAAVATARKLTIIIWHLLIKGESYTWARPSLHAKKLRDLELKAGHKAARGQKGEAHAYNVKSHRDEERRWVEQAETAYTRFVAGWNRRGPKNVRTGAAKEERL

SEQ ID NO: 472275 - protein, 345 aa, unidentified
MKKVIAGMDLHSNNVVIGVMDMDGHRLASRKLPCELTEVVKFLTPFKKRLERVAVESTYNWYWLVDGLQALKYPVVLANPAGMEQYSGIKHADDTNDAFFIAELLRLAILPTGHIYDVELRPVRDLLRRRLMLVHQRTALMLSFKSLYTRTTGQGLTLSQLKELEIKEAQELYEHPANQLIAGMQIKHIEQLTESIEKIEKAVLGSARELPYYEKLATLPGVGRILGMTITMEVGDIKRFADPGHFASYCRTVEAKRMSNNKKKGENNSKCGNKYLAWAFVEGANFARRYDEQCRKWFDRKASRTSNIIATKALACKLAKAAWYLMAEATDYDPKRMFGQPAKAK

SEQ ID NO: 472276 - protein, 321 aa, unidentified
MDKYNEIYGVDISKDVFDVMNSKGKYVKLSNDESGFKKLVKTIEKDSLIVMVVTGYYHYCLAQYLYHKGYLVSVVNPLSVKRFIQMKLSKIKTDKSDAKAICEYACVNEVPLYTGKNKNQAECIQILRMLEVYTKQSTALKNKEHGEKTLGKPSKTVYHSLNRMLKSIKREVQVLEKRLLELVKEEQQDQLTLLKSIPGMGVKTAMMLIVMTDGFERFENSKQLCSYIGITPTIRQSGNSVRGRSRISKMGNRQLRSLLFLCSFSAYKYNKSCKDLFDRIVAKGKSKKLALIAVSNKLLKQAFAIVKSGLPYDENFVSKLS

SEQ ID NO: 472277 - protein, 344 aa, unidentified
MIYIGIDVSSKNFVIHAIDGRKRVVFKGEILPEKGTLLKFLKELGGEPKYVVFEAGNQMKWIAQTLLKVNDVTLHVVHPNELKWISQCNGKTDKVDAKKMAELARGDLLPRKVHIVEGTVRELREMLSARQVLQSKRVALINGIRAMMLQEGIKLPEKFFTRLDWHARLEKAPISEATKVIIASYMGVIESLAFAEDSLEGKIIAVKDDRIKRLETIPGIGKLSSRTLVGALDEASRFDNKKAAAKYGALTPSVYQSGNVTHMGHICRNGRHEIRRVLLQCAHTVARMKSFESKPLREFFERIHKRRGKKIAVVALARKLLTIAYGVLKTETYFDPKMLSPNRA

SEQ ID NO: 472278 - protein, 361 aa, unidentified
MLRIVYPICCGLDVHKSSVFACIAATDEKGVTTYQNRKFSTFTNDLMALAEWLATNNCKDVCMESSGKYWIPAWNILEPTCNLVIAHPKYVKAIRGKKTDKKDAKWIADIFKHDLVSGSFIPPADIRQLRDLTRYYRKLVGFNTGEKNRAQNSLTISNIKLDDVFTDVFGKSATAIIDHMLEHPGETFDVAPYVHGRCKTPIPEIQAAVDGSISAEQAEKLKIIRSHMNNLELCKMELESVVLGIAQKYWPQVLLVLTVPGIADPFMAISVIAEIGVDMSAFPTAKHLCSWAGLTPQNNESAGKKKTTRISHAGTYIKPLLVQFAVAISKSEKHPEIRNRYLALRKRRGHKKAVIAIATKG

SEQ ID NO: 472279 - protein, 451 aa, unidentified
MKTTKSRGAANAAQITVVHPHAAAIDIGAQFHVVAVGPERDPEPVRSFRSFTQELHQLAQWLKQVEVTTIAMESTGIYWIPAFEVLEAYGFEVVLVNARDVRNVPGRKTDVNDAQWLQKLHAYGLLRASFRPRHDIATLRAYLRQRERLLEYAAAHIQHMQKALMQMNLQLHHVVQDVTGVTGMKIIRAIVAGERNPEELARHRDVRCRASIETIRDALVGHYQDEHVFELTQAVALYDFYQTQVKQCDERIELVLRQLQENAAPVNTPLPAARRRSKQSNDFSFDVRAELYDVLGVDLTQIHGLGPYLALKLVAECGTDMSRWPTVKHFTSWLCLAPGNKISGGKVLSSKTRRSSSKAAAALRLAAVTIGKTDTALGGFYRRLSARIGKAKAVTATARKVAVLFYNTLRFGIKYVDPGAEYYEERYRQRVLKNLTRRAESLGFVLQAKPT

SEQ ID NO: 472280 - protein, 456 aa, unidentified
MAKHKRKKSPAEQQLPAQLHAVNLHAAGIDVGAEAHWVAVPVEADPQPVRAFPAHTASLHALAAWLTLCGITTVALESTGVYWIPLFELLETQGFEVILVDPGTMPKNGRPKTDVHDCQWLQRLHTLGLLSAAFRPDDPVVVLRSYLRLRLTLLADAARHIQHMQKALTQMNIKLQHVVSDITGVTGLRIIKAILNGERDPRRLATLRDQRCKEDETTIAQALHGTWREEHLFALHQAVAAYEFCHQQIQEGDAKIAAQLQTFEDRSKGESLPPKPRKRHRNRLSFETRPLLYRMTGVDLTKIEGIDETTALIVLGEIGLDMSRWPSEKQFTSWLGLCPRVRVSGGRVLSSRTRPTANRAAAALRLAAASLHHAKSALGAFFRRMKARLGTPKAITATAHKLARLIYAMLKHGTAYVAGSMAEYEQKYRQRVVHNLSRKARELGYELHPVLGGPPA

SEQ ID NO: 472281 - protein, 349 aa, unidentified
MHSTTVAVDLAKNVFELAVADTTGKIVDRQRLNRVRFSSFFVQRAPCRVLMEACGSAHYWARRIAEHGHSVQLLPAQYVRQYVRRNKTDRADAAALIEAARCADIQAVPVKSLEQQQMLALHRLRSQWLGTRQRYLNTLRGLLREFGIAIPLGARVARSHIAQHLAQSRRDLPAAIRPLLDQMLGDVDQLERLTDQIERQLACLTHTDTVVQQLRQIPGVGLLTSTALRATVGDIQRFPCARRFASWLGLTPREYSSGEHRRLGSISKRGDVYLRTLLVHGARSALMAAHRQQRTGRPLDRLRQRALACQRQRGHNVATVALANRMARIIWATWKHGRPFDGNWACSAH

SEQ ID NO: 472282 - protein, 423 aa, unidentified
MPGTVNTMETEREVVCGADIHKQFLLATILTKDGQKFQDRFDSNFEGLLNFRQWLLDHDCQRLAVESTANYWQPIYFVVGKDVEFVLANAYQIKHIPGRKTDVLDSEWIAELCLKDLISPSRIFSEDDRDLRSMTRTRENYVKMRSQIKNKIHQELESACIKLSSVLSDIFGKSGIHIIRGILNGLSIDDILDHIPSKKLKAKRGEIQDAIQANISPVQIDLISLLLDSVDFLNREIESIDKQIQSLISTRQEDLKIAMSIPGMGFTSASTILAEIGNFRDFNSGEKLAAYCGLVPSVYQSAGKLITGHITKHGSPHVRRMLIEVAHAISRTKADSKLKRFYFRIKSRHGAKVAVVALARKVLCILHHLIVNREMFEDGISSKSKREKTSRSSISTEMIIEDAIQILVRAGYLVQKRSEKGGG

SEQ ID NO: 472283 - protein, 345 aa, unidentified
MLYLGLDVHGKWTTIKGFDAETGEMVEHRQVSNEPEAMAAVLGRLPGPLHGALEAGTNSWAMYRQLRPFFEQLVIADPAQIWDRKRDRGAKTDPRDALGLAQKLQRGEIKGIYVPDERTQDLRVLVRSKVRSTRWVTKLVNEIGCLLRSWGYVVPVSLLSKKGQRQLAEAQLPGRSARILELWREMLEKAQEIEKELEAAVKEEAEADPICAQLRTMPSVGPFTALVMRAEIGDISRFPDSASFISYAGLAPRVFQSGEQCRYGSLGHWGNRWIRYALVLLANRMASAGRGSYLHRFYWRVKLREHRNGAKIAVTRKAAHLIYHLLRSGRPWREPAPKQGAKVTV

SEQ ID NO: 472284 - protein, 346 aa, unidentified
MLYVGLDLSRKRLDWQALEREGGRVGIGAVPPDRDGLAKLVQRLGDAGDRVLAVIESMSGARFVHDELELAGWDVRIADAAKARGIAPLACKTDTIDTWVLAELARLDLVPEIWLPDATIRAERERARFRLHLVKHRSSLKNRVHAILFQHGVPNPSSDLFGAGGRRLLERLQLPEPWASTLAASLALIDTLAEQIDRCQRELRSLGADHRYIPLLLTCPGIGWILAFTIASEIGDIHRFPTPRKLTGYTGLCPRVEQSGGRDRRGPLRKNGPNYLRWALVEATHTALRHPLYSPIRERIHARYGQKRGTKIAAIDVARRLSEAIWHMLTTNQPFAPAGAPASLAA

SEQ ID NO: 472285 - protein, 312 aa, unidentified
MTDQIFVGVDVAKDWLDIHHARQGAKRIDNSPAAARAFAARCAKEGAWVVFEASGGYDHQLRDALETAEVRFSRINPRQAGDFAKAMGVMGKTDRVDARMLAELGARLTPAPTQPLPPERRALQAQATRRRQLVEMRKQEATRLQQTTDPVARADIRGVIALLDRRITKIDARMSKLVAADPELADIDRRLQTAPGVGPIVATTLIAELPELGKIDRRSIAALAGLAPIARDSGRRSGPRSIGGGRPIVRTILYLAAIQASRRSPEFVQFRERLQAAGKSVKAAIIATARKLVVTLNAMLASGTDYRSTTLA

SEQ ID NO: 472286 - protein, 366 aa, unidentified
MKKTSTIRVNRNMIFKGHKLTIGLDLGDRWSFYCVLDEAGQIILEQKLPTTPEAMKQTFGKIPRSLIALETGTHSPWVSRLLRELGYEVLVAHAQKVQLISKSNRKDDRHDARTLARLARIDPELLGPVRHRSAKAQIHLTVIRARAELVSARTALVNAARGLAKSYGERLRKCGTQQVSRELAAELSVELREVLEPLLQEVESLNERIQEYDARMEKIARESYPQVELLKQVKGVGTQIALTFVLTLEDPHRFPKSREVGCFLGLRPGRRDSGESQPQMHISKEGDPYVRTMLVQGAHYILGPFGQDSDLRRWGLKLAARGGKNAKKRAVIAVARKLAVLLHRLWVGGEVYEPLRNNHQAMRAVA

SEQ ID NO: 472287 - protein, 367 aa, unidentified
MSSVASQAGLIHLGMDTSKNTIVVATLLPGEDSPATDRIANEEAAIRRLVGRFADRSVLRAWYEAGPGGYELWRLLASMGVACQVVAPSLIPKGSSDKVKTDKRDSRRLARLGRAGELTPVRVPSPAEEAVRDLARARDAMLADRKRARQRLTAVLMRHGRIWRGATYWTAAHRAWIAAQRFGEPALAAAIGYYRATLAVREAELAALEAELMPWAAREPLAGPVARLGCYRGIAELGALTLAAEVAGWRRFPAARAFMSYTGLVPAGYSSGERTRRGHITKAGSEPVRTALTEAAWSCRHAPAIGAGLRRRQAGAAPDTLARSWTAQRRLHDRYVHLVHHGGKAAPEAAVAVARELAGFVWAEMTA

SEQ ID NO: 472288 - protein, 353 aa, unidentified
MNNDITIGLDLGNKKHKVVGLDGRGKVVLKCELNNDKETLGAFFKEHAGATVAMETGTHCRWISSLAKHCGCDAIVGNARKLRAIWESSQKNDWKDAQMIANIARTSRELFHPVSLRDDEHHALVQLIELRDIVVAQRTQAVNAIRGMCKACGYMLPKCDAGGFHRHLDDIPESEYWKFEPLVDRLESLAENISMYDWKIQDYADVHFKEDVELLRTIPGVGPITSCAYAAFAPDPKKFGSPRDAGCYFGLTAGQDQSGDLDKPKKITKGGNEMMRKLLVTAANYILRESSKDSSLKRYGERICARGGKIARRKAKVAVARKLAVVMMAMLQSRKPYQDTLAARTETKENVSA

SEQ ID NO: 472289 - protein, 345 aa, unidentified
MERYVGLDVSLKLTAICIVDRTGKIVREGVVASDPEIIATFIKSHAPHVARVGLETGATSTWLWTELNKMGLPVICIDARHAKAALKLQINKSDRNDAAGIARIMQCGWYKEVRVKDLDSHAIKALLVSRALLVKIKRDIENQIRGLLKNLGHVIGQAKMNVFSVRAAELANARPELTGAVEPLLKARDAIGQQIADLDRKVMRVARDDAHVRRFMTAPGVGSITALCFLATIDDPTRFKRSRSVGAYIGLTTRRYASGEIDWTGRISKCGDKMLRSYLYEAANVLLTRVAKWSALKAWGVRIAKRSGIRKAKVAVARKLAVILHRMWIEGSEFKWSAKEANQPT

SEQ ID NO: 472290 - protein, 322 aa, unidentified
MAMLSFGGIDVSKNRLDVMVLPEEQCSSVPNDATGWANLVEQLRGCSIAAIGIEASGGYERGVMRALLAAGIPARQVNPFKLRQFARASGVLAKNDPLDARMIASFVAIMPTRPAQLQAPAAERLAEMLAVRRQLSAEKVAAENASRLLEDAMLQRLSRRRIGRLAADIDVLDERMVEIVATDAALAHRYRLLTSMPGVGAVLACTLLALLPELGRMSRKQVAALGGVAPYAFESGTLKGRRCIWGGRAHVRHVLYMAAMSASNWNPVLKAFHDRLKAAGKLPKVTIVAVMRKMITILNAMVRDDVTWADRYIGRHSVPTAR

SEQ ID NO: 472291 - protein, 388 aa, unidentified
MSKPFDLSKSLAALDQDSTLIVVIEMSQSSWLVAARAPGLARDPLKKLPPDPEQLFKLIDRWREESRRAGRVVRRVCVAFEAGRDGFWLARLLAQHEIEVHVIHPTSIPVKRDHRRAKTDRLDTELLMRAFLGWLRGEADHCSMAAIPTLAEEDAKRPTRERESRVNARSRLVNRMKGALARLGIRGFNPKLRKAAEKLEELRTGAGEPLPPNTLAELRRDMAQLRFVADQIKQIEKAREARLEKAPREGAHPMVLMLASIKGVGLETAEMLVAEVLSRKLRDRRAVARYGGLTGSPDESGSRSREKGLARSGNARVRRGMIQLAWRFLMFQKESALAKWFEARTANGPRGVRKTMIVALARKLLIDLWRFVEDGTVLVGVELFDSRA

SEQ ID NO: 472292 - protein, 312 aa, unidentified
MADIVRLAGIDVSKDKLDVHVLPSGESRMVPYDRRGLAGLRRWLVGLGVALVAVEASGGYEREVSEVLEEAGLIVHRLNPLRVHRFAQLKGRLAKTDRLDARTIAEFACAYPQERQPRRDPRRERLAEHLLVRRHTQEAILDCINQLEHLRDKQLRRLILARKTSMERTLAILDRDLARLIAEHDDLAELSERLRTVPAVGPVLATTLIALLPELGSLTRRQVASLVGVAPFDRSSGRHKGTKGIQAGRGFVRKALYMAAMVASRHNPVFVAFNERLAGKPGKVRLVACMRKLIVILNALVRDSAQWQPRPL

SEQ ID NO: 472293 - protein, 404 aa, unidentified
MTIVMGLDQHRAQITAEWLDTATGELSRARVAPADRDGVRQFAERFGGEKLEVALEATTGWRFVFEELHAIGAQVHLAEPAETAARRGTKKRAKSDRADARHLRELVMVGRLPESWIPPEHLLDLRARVRLRHALVDQRREWQQRMQAVLYHHGVPPRSGLMSAASRAWLADLTLPAAAREQITVALAMIDAHDTQLVPLDQELRDYARRQPGCRALMRHYKIGPLTSITILAELGDTRRFSSSREAVRYAGMDITVHQSDARRAPGRLSRQGPPALRWALFEAAQCAATSASPPSTSRASTTPRSSTPSTPARPRRSRSTHCCAPDSPTRGPADRRSSREAIVRRRQLGLSRSGGGDSGLSAPGGGGAATVIRSRSGRRVETQARSKAWLAPEVPRHRRRGSK

SEQ ID NO: 472294 - protein, 313 aa, unidentified
MNEPDVFVGIDVSKVQLDVAMRPTDDRWPVSNDEPGITILVERLRTIQPVLIVLEATGGLEVPVAGALAEAGLPVVVVNPRHARDVAKATGRLAKTDPLDAQGLAHVAEAVRPTPRPLPEAQAQALSALLTRRRQLVQRLTAERRRLQSAPQRIRADIQAHITWLERRLARTDDDLAAAIRSSPLWRAKDEILPSMPGVGPVLSRTLVAEVPELGLLNRQKIAALIGVAPFNCDSGTLRGKRVVWGGRAHVRAVLYMSTLSAVRHNPVLKAFYDRLRAAGKAAKVALTASMRKLLTILNAMIKHHTCWQAKTG

SEQ ID NO: 472295 - protein, 327 aa, unidentified
MRYLGMDVAKAKLDCLLLNEDGDKGKSKSVANSRTGIADFLIWIGKQHISPNELHVVMEGTGVYHEQAALALADAGVTVSIVNPAQTKDFGRGLAVRTKTDGMDSYVLARYGALLKPVAWTPPAPEARMLQALIARREAIAQDLQRERNRQEKADATDTPVLIRKSLSDSIEFLSKQLVQLQQDIDQHIDRHPGLKNDLALLQSIPAVGPQVGSNMLAVMHAHNFGSAEQLAAYLGLVPVERQSGSSVLGRARLSKAGPAKVRAVLYMAAVVATRCNPHVKALYERLLARGKSKMSALGAAMRKLVHLCFGVLKTRQPYQRDYAKIG

SEQ ID NO: 472296 - protein, 357 aa, unidentified
MQVATIGLDLAKHVFQIHGIDAAEKVVVRKQLRRSQVMAFFEALSSCLIGMEACATAHYWARELTKLGHEVRLMPAKDVKAYVKRNKNDGADAEAICEAVRRPTMRFVRVKSAEQQGQLMQHRTRDLLMRQRTQVINALRAHMAELGIVAAQGREGIKALLAIIADDGDERLPVDARASLIVLAAQLQALQTLIGSIEKRIIALHRSSEASKRLATTPGIGILGASAITTIVTDPKAFRSGRDFAAWVGLVPRQDSTGGKQKLGPISKQGDRYLRRILVVGAHAVLRRARQHPEKYPWLHSSWRDVRSRSSRLRWPIKWRASLGPYWPRVRAIGCLGSRQREKGLANGRMRFTSVRS

SEQ ID NO: 472297 - protein, 338 aa, unidentified
MTIVTIGVDLAKNVFELCGLDADGNCLLRRRVRREGLLQVLGKIPPCVIGVEACAGAFFWQRRFESLGHEVRIIAPQHVKPFARRQKNDRNDAEAICVAIRQPRMRFVPKKTIEQQDIQTLHRARQRLVNHRTALVSQMRGILLDRGIAFAQSIARARRMIPEIVADLSNDLTDLCRETLGSMLAFLHEIDRRVREFDRRIDRVFRESEACQRIARIRGVGPKTATAVVAAVGDGRDFENGRHMAAWLGLVPRQHSSGERRLLMGISKRGDQHLRTLLVHGARAVVRTAASKTDRFSAWVNDLKERRGANKAIVAVANKNARIIWALLNSGEDYRAAA

SEQ ID NO: 472298 - protein, 382 aa, unidentified
MQTIDTIKPTILLAIELSASTWLVAARVPGREKPHLHRIDGGDTAALLALISSLQARAARGLDATIGVVCCFEAGRDGFWLHRLLTAHSVVCHVLEPTSILVNRRARRAKTDRLDAEGMLRVLAAYLRGDHQACSMVRVPTPEEEDAKRTHREREKLVQERQRIENRIEALLFTQGIRKRPSLRSWERDLAVLRTGDGREIPRHLRAELDRLRRRLVMTLELIREVEAERDQAAKTKPQDRACHKIAALSRIRGIGENFAAVLTREVFYRSFDNRRQIASYVGITPMPYQSGGMDRDRRISRAGNPRARTTMIQLAWLWLRYQPGSELAEWFRERVGTLAGRTRRIAIVAMARKLLIALWRYAETGVIPAGAEIRAEITVAA

SEQ ID NO: 472299 - protein, 319 aa, unidentified
MDVLGIDISKHKFQVALLLSSGKWKQHTFANSNPGFAELLEWLAKQDAANVHACMESTGGYGDALATFLCDRGNAVSVVNPSRIKAFAGSELVRTKTDASDASVIARFCASQRPELWQPPSELERALQSLVRRRMDLLAARSQEILRLQAPTVSAQVRPSLEHHIAFLDQEIADVEAQIQKLIDDDPDLRRRRDLLVSIPGIAERSAASILGEMPGIEQFRDGKAVAAYAGLCPRHNQSGIFAGRSRLSKIGNARLRYALFFPAMTAMRLNPALKVFANRLRARGKKPILIVAAVMRRLLVLAYGVLKSGRAFHLAETP

SEQ ID NO: 472300 - protein, 395 aa, unidentified
MYFLGIDIGKRTHVASIMNEEGKVLLKGFSFPNTTEGAESLIERMVDYSGAPSDFVIGMEATGHYWLSIFSYLHESDYLIHVVNPLQTDGWRKGTEIRKRKNDIIDSILIADLMRYGSFVETVLSDENVFSLKQLSRYRTYLVGTASDFKRKIIAVLDQVFPEYATIFTKQGVFGKASKELLLAFSAPIDLENISSETLAQYLAELSRNRIKAEKADQLKQAASNSFGVKFAQEAFTFQLRSMIEQLKFIESQIKETEREIKHIMDTLNSVILTIPGIGPINGATILGEIGDIQKFSNPKKLVAYAGIDASVTQSGQYEATHNVMSKRGSPYLRKALFSAALVASQCDPVFSAFYQKKVSEGKHHLTALGAVSRKLCYVIHAILTKNEPYIIVSD

SEQ ID NO: 472301 - protein, 406 aa, unidentified
MFYGGIDVAKYRHEICIVDESGNVILQIFVDNTRNGLDKLIHNLKRLEIEVSNVEFCLEATGHYWLSLYYHLTELGYKIHVINPIQSDALRNFYVRKTKTDRKDAHLLADIVRFGHISETKLASETVLKLQNLSRLRFEFVRQVGGLKNRVLGILDRIFPEYPQCFSNVFINTSRELLKSFTAPEDLAEADLSELTAFLNKHSRGRLGVDRAKQIQALAKGTFGINIALDAFTLELRLLVEQIEFIEEQISVIEEAIDQVMEEMRPSKDTAYRHVLETIPGIGPVLAASIIGEIGDINRFPNAKALVAYAGLDATVRSSGQFEGTRNRISKRGSPVLRHSIWLAAVSARRFNPEMKEFFEKKRSEGKHTLVATGAVARRMVHLIYSLWKDNRPFDSNYQWSPTNSR

SEQ ID NO: 472302 - protein, 419 aa, unidentified
MSKNMLCGCDVSLENNTVWLMLDDGSQPAKLFNADNNQLGAETLVERIYSIAKEHCVSDILIGTEATSMYDWHLLEYLAESKLALEFNLKLYRFNAKWIKNFKKSLAPRGKSDPIDSFAIAERLRMGRLPKEYIPDTKYQPLRKLTRFRFHLMQQIAREKNFFLANLFLKASAYSRVSPFGSTFSATSLSVINDFFSVDELAAMPVEELTEFILEKGKSHFSKPAEIVDNLKRVARESYRLKPELAPTVNLILASTFNNIRCYKEQVKLVDEAIAENLKAFRHTLDSISGIGPVYAAGILAEIGDVHRFLNDSSLAQFTGLTWPKHQSGRFQAEETRMSHAGNQYLRYYLVEAANSVKRCDATYKAFYEKKYKEATKHHHKRALVLTARKLVRLVWTLLTRQVLYQPGYCSFEDLSKIG

SEQ ID NO: 472303 - protein, 449 aa, unidentified
MSKKGKSMGLPIVNARAAGIDIGSRIQVAAVPPELSDEPVQTFQSFTGDIERMADWLVSVGVTTVAMESTGVYWVPVFEVLEGRGLTVVLANARDCKTVPGRKSDVNDAQWLQRLHACGLLRASFRPTRDIAALRTYMRIRERHLEYAAAHMQHMQKALTHMNLQLHHVISDISGVTGLKIIRAIVQGERDPDTLAALRDVRCRESVQTIRKSLVGNYQPEHVFALAQALKLFDSYQERVADCDTQIEQALKMLCADKVEPQEPLAKPRTRTKQSNSPSFDARPLLYQLTGTDLTQIHGLGPSVALSLISECGTDLSRWPTEKHFTSWLTLSPGCKISGGKVLSAHTRKSSNRIAARLRLVATSVGRTETALGAFYRRLAARIGKAKALTATARKIAILFYRAMRFGIHYQDPGANQYEQRYRERVIKQLQRRAAQFGYALQPSEACVS

SEQ ID NO: 472304 - protein, 384 aa, unidentified
MNKDNIVFIGMDTHKDFCENAYCLDSRDSTPQPLGRITTTKHAITKLARQFQSKYPNSTLHFVYEAGPCGYWIYRLLTKLGHVCYIVAPSLIPKAPGDKVKTDKRDALKLTRLLKNADLHPIYVPEPEDVAVRDLSRIRETAMHDLKKAKARMKLFLLRNNILYGGSSRWGPKHRRWLTELILPHPAQQIVLQECISTLNERFSRLERLDNELKHQVVNWRYFPVVKALQAMRGIKLIVATGMIAELGDLNRFDHPRKLMSYLGLVPSEHSSGDKRRLGPITKCGNSRARRLLVEGAHAYRYPARMSTEIQKRQEGLPPQISEIAWNAQLRLCKRYQRLMHRGKHRNVVVTAIAREISAYIWQISKHVALPPVNPKQRLVRVPR

SEQ ID NO: 472305 - protein, 345 aa, unidentified
MPIVGGLDIHRKQITFDYLDTETGQVRRGQICPADREHLRAWLARFAGRDDVAFAVEGCTGWRYVAEELAAAGVTAHLAEPADTAFARGRKRHAKTDKTDCRHLRLLLAEGRLPQCWIPPGRILECRALLELYHDLRAEHTAWVQRIHAVLFHQGAPALGEGTLRTGQGLAALRDVLAAHLSPAGQLQVATALAVLAALEARLHAVRHQLLAEARHLAGAKVLAARLYGVGPFAALAMTCWLGGAGRFSSSRQAVRFAGLDVTVWSSDRKGPPGRLSRQGPPVLRWAVYEAGKTHARASAPDHAYYAQVKDRCNGKRAALSEARKILRQACHILAELGDDAFAAA

SEQ ID NO: 472306 - protein, 360 aa, unidentified
MNANPVAARMHIHCVDLAKEKFQVHSFSHSGECLKRRTLTRSQFERFFCDAQMPRGLIVMEACAGASHWSRRFEAVGHQTRLLPAQFVAKNRVGNKNDGNDADAIYATHCDKRIRPVPAKTLEQQDLAALHCARQLLIKQRTQLTNHIRGLLAERGCVAGKGDKGFQLLLARAAERLDPEVSEPLLEIIGLQLKILEALDAQLDALEKRVHQAAQQSPLAMHLTSIFGVGPVIATAFVAEYGRGVERYADARQFAASLGVSPTEQSSGSTHWLGPITKRGDAYRRHLLTQGAHSVVSNCHRHLDPLSDLARRLLDKHKRHNVVVIAVANRMARIIYALLKHPQDYRITRQGWANITAGGY

SEQ ID NO: 472307 - protein, 457 aa, unidentified
MKKKRQSPNQASKLDPIHPNAAGIDIGAQNHWVCVPSGRTNECVRRFGCYTADLYAIADWLTESGVETVAMESTGVYWIPLFQILETRGFEVKLVNAHHVKTLPGRKTDVLDCQWLQQLHSYGLLSGSFRPEDEICILRSYIRQRDSLIRSASVHIQRMQKALTQMNIQLHQAVSDITGTTGMAIIRAIVAGEHDPQVLAAKKHHRVKRSEAEIAAALNGDYRKEHLFVLQQELHIYDVYQSQIAECDRQIEQCLSQFNDKIDISQSPLSPLKHPRHKPQGNEPAFDLRTHLYRMSGVDFTRVDGLGVLTVQIILSEVGLDPSRFPTVKHFTSWLGLCPGSRITGGKIKSSQTRPVVNRAANAFRMAAQTAGKSNSALGAFYRRLRSRLGSPKAITATAHKIARIFYKLWTTGEDYTDPGMDYYEQRYRERMVNNLHKKAQAFGFELIPQPSANTVS

SEQ ID NO: 472308 - protein, 438 aa, unidentified
MKVMYERVAGIDVHKDMIKVAVRSPGDKPWTRKTEILTFRTFYGVLRAMARELRRRGVTHVVMEASGVYTEPVYYAQCEEDFTEVAVVNPAHAKALKGHKTDAKDCARLAELFECGLLQGSYIPAAGLKEMRDLSRYRMKTVQARTSEIQRLAKALESAGIKLGSVASEITGKGPVAMIEALISGERRGAVMADLAKGRARTAGKLADLSMALEGRFTDHHALMCRLHLDRITALDAAVADLEARIAATAADWQREIDLLKTIPGFGDVVAWTWIAEIGPAPHQWFASHHKLASWVSLAPGNNVSAGKRKYGRTGDAGTYIKPMLIQAAWAATQVRGRLQARYNRLVRRMGGPKNPAAKKKAIVAIAHTLLKIAYTVLKTGTGYQEPGADFYTRRESPGHRQAWLERQIQKLHPGCTVTITISPSPDPAPEAALPLGA

SEQ ID NO: 472309 - protein, 351 aa, unidentified
MNSIDYIGFDIHKKTISFCAKAQDGRILDEGTIPARRSDLSAWAKRRSRPWWGAMEATLFTGWVYDHLKPLAQELKVAHPAMLKAIAASKKKNDKVDARKIADLLRCDLLPECYMAPSAVRELRRVLRYRNLVVRQATRMKNRIAGLLMETGTLYNKERLHGKAYFSELLGSLREIPASVIELLKLSRAQLEFFATIQQRLVKGLRADGGLRERVERLQSIRSVGEILALTWALEIGEVRRFPSIADAVSYCGLTSAQRNSAGKEQRGPISKQRNKHLQTILIEAAKLAPRYNPQLAAVHERELQRGDRNQATLAVARKLVAYLMAVDKSGQPFQVRVSAGAESKDEQPVG

SEQ ID NO: 472310 - protein, 346 aa, unidentified
MKDTIVGVDLAKEVVQVCVVKNNNVISNKELTISQFTNYLVKSKPVSIIFEACATSNYWKQMALRQGHDARLISAKLVSKIRQNQKTDKNDALAIVQASQLVDIVFINGKTFIQQELQTLIRMRELSVKHKVALGNQLKAFLLEFNIRVSPKKGGLSGVVETTLEDAENGFSFEFREGLDLLWKAYQHMLTNIKEYDRLLSHALEQHNDCKKLLALEGVSTINAVNLYTAIGCEDLGVFKTGRDASACLGVTPIQHSSGGKSQIGSIGKHIKNSALRSALISGAMSVVQQLLKREPRTQKEAWLKQLMDRRGNKCAAVALANKTVRTAFAMLTQGTEYKAVPLVAE

SEQ ID NO: 472311 - protein, 450 aa, unidentified
MAKTKKRKHRKLERSLPVMRPNAGGIDIGATEIFVAVPADRDMETVRSFASFTEDLHALADWLQQCRVDTVAMESTGVYWIPLFQILEARGIEVHLVNAQHVHHVPGRKSDVLDCQWLQYLHSVGLLRASFRPDQAVCEIRSLMRHRESLVQMACVHVQHMQKSLDQMNLQIHHVISDITGVTGLAIVDAIVAGNTNPEELAKLRDYRIKASVETVTKSLVGDYRAEHIFTLKQSLNAYRYYQQLIGDCDQEVQQRIESFETKDGGSGSSTVDVCDSNSITGAFDLRAHFERIFGVDLTAIPGFDVLRVQTIFSELGADLSDFPTPASFASWLNLCPKDGTSAGRKIRGPKIKTKNRVTQVFRMAGQSLHNNKSFLGDFYRGQRARYGAIKAVKNAGHKLSRIFFHVVTTRQPYDETVFAKLEARHQQRRFRKLQNIAKQMGYSLVATPA

SEQ ID NO: 472312 - protein, 346 aa, unidentified
MLYVGLDLSRQKLDVCVLDEDGRTVETLAVRPDADALRTLAARIARYGELVNAAIESMTGARFIHDQLELAGWDVEIADAAKTKGLAPLAAKTDKIDAHVLAELARRELVPAIWLPDPSVRAERERARFRLHLVRHRTALKSRIHATLMTFGHPVPVSDLFGLRGRELLDSLAILEPWATTLARSLALVDELDGEIARSEAELRRLGADHPYVPLLTSIPGISWILGYTIASEIGDISRSASPKKLAGYTGLCPRVYQSGAMDRRGALAKNGPKYLRWALIEAATQAIRDPRYGARYQRTKRRLGKQRGSKIARVELARELTTAIWYMLTRQEPFRAVGPTCGLVA

SEQ ID NO: 472313 - protein, 406 aa, unidentified
MDLVYSHVCGLDVHKKSVVACIITPEGKEIRTFSTMTDDLIGLKEFIKSKGCNVVAMESTGSYWKPIYNLLELENIKILLVNAKHIKNVPGRKTDVKDAEWIASLLQHGLLQGSFVPDREQRELRELVRYRKSLIEEKSRELNRIQKVLEGANIKLSSVVSDINGASSRSILEAIINGEENPETLAELSQGKLKNKMDELKRALKGLINHHQRMLLEIQLRHIDYLDEEIAKLDEEIKNRMLPFEKDLALLDTIPGVGRRTAEQIIAEIGTNMEQFPSAAHLCSWAGLCPGHNESAGKQKSARTRKGNQKLRSSLIEAARAASRAKGTYLSSQYHRIAARRGANRAAVAVAHSILIIVYHILKQKQPYIELGPTYYEEKKRNMIIRQSLKKLESLGLKVTVESAVS

SEQ ID NO: 472314 - protein, 421 aa, unidentified
MNRILVGLDMSLKDMKAHIEDQDGKETTKPFAVDNNIPGANILVKQIVDSCIRRQADQVMIGYESTSVYGMPLQYFLADHPALKPHNPAIICFNPAIIDGFKKSFSNLPKNDYLDAFIIAERLRFGRLPKSCPVDFRYLALQRLTRHRFHIVGNIAREKNYFLSNLFLKFNGLCQNSVFSNNFGATATELLHEFLTIDDIAARPLDELIDFIMEKGRQHFEDPQATALALKEAVDKSYRIHPSVANSLNFVVKSCLENIKVLERQKKAVEKAIEHEIKSFQNEYTCLSSIKGIGPVIAAGIISEIGGISRFDHDNALAKFSGLYWSEYQSADFVAEDTYLKRTGNEYLRYYFIQAADQMKKYLPEYSAYYARKCKEAKTHKHKRALVLTARKAVRLIFALLRDEKLYKPSAGKGGYNSINL

SEQ ID NO: 472315 - protein, 484 aa, unidentified
MEDRRLVGIDLGITSAHTVRVLSGEGSLVCRRKAIPTVDSLGEVERVALAGTPAGTLLEVVLEPTGPAWLPIAVFFSARGHIVYRVSSAKAHDLRRVLSRHAKSNGIDADTLARLPLVDPAGLHPLQLPDAARAALDRRVRACDRLTQQAATHKRRIKDLVHQLLPASPLVGELGQADLAVLERWADPHALVAAGRTRLQRLLATASAGQQGAQRATQWLAAAHAALELYGDHPAIAWQDLAAEVTSEVRLLRATQAELAAHARERESCYRRVDPAALARSLPGLATIGGPALVATMGPASRFANASKFRCFTGLAPKASETGQSDRKGQPISKAGNRLLRTTLVRAADHARRQDPQLARTYHTQMVERGKDHLGGAVCARRPLGRTGLGGHGPGHTVCGLRHRWHPRHPDPGQGHHRPPLDRARTGPPAAAQQEGEGPSTSPYRTCAWRSRRNEATLPLLGHSWPTAQPRQADPAATLTPKPP

SEQ ID NO: 472316 - protein, 337 aa, unidentified
MEYFAGLDVSLEKTHVCVLDRNATVVFESAVVSSPGAILSALNQAPSCERVVFETGRMAPMLYHGLADLGVPVVCIESRQAYQALKTLATHKTDRNDARGLAQLARTGFFKPVHVKSLPAHAVRALIMARKKLVGQRVTLENQIRGLAVVFGARLPRGLSPAFVEQVITMSDGIAGLSAAMRGLVAARDAVLGAIAAIDADMKRLVRASEACRRLMTIPGVGPLTALAFTAAIDDPTRFRRSRDLGPYLGLVPRRYQSGEIDYTGSISKVGDRRVRTLLYEAANVMLTRYKGELKLKDWAFAIAKRSNMRKARIALARRLAIIMHAMLRHGTEFKPA

SEQ ID NO: 472317 - protein, 419 aa, unidentified
MDSSKTQKIKRINPRTMIVAVDIGKGFHAGYFRAPNGEERKPFLFFNSAKSFNEFWHSAQEFSRNHDLEEIVVGFESSGPYAEPLFHYLRKKPVTLVQVNPFHTKRVKELTGNSPNKTDRKDPRVIAAVISLGHALTLVVPKGPSAHLRRLTQARERVIKRRTAALNQMQDLIFVIFPEFLKIMKGISTKTALYLIKNHPTAESIVALGLESLKTLIRTTSRGKLGPQRGEELFHASQSCVGVQEGKRSILLEIEYLISQISADNRFVASLEKQMEEHLEEIPYSHSILSLKGLGKVTVAGLIGEVGDFREFGTISEITKLAGLDLFEISSGKHRGQRRISKRGRPLMRKLLFYAAINVVKTNGILHKPYQEMLSRGMLKVKGLIAIARKLLRIVFALARDNTVYREDYCRNQHLKLAA

SEQ ID NO: 472318 - protein, 319 aa, unidentified
MAQNDLNVVGIDVAKDKVDACVRSPAQRQTFPSSAEGRRKLIAWLRRHKVGKAVMEASGGYERDWAKALRTTGIEVRIVDPKRVRNFARSAGRLAKNDAIDAEMIAWFAETFGEAPSQAYDAERERLAQIVNARQGLLDVQTELQNRSEHSVPEVVQQAQARLLKKIAFEVAKLEAAIAAMIKATRHFAELAEIIESVPGLGKGTSAGLIATMPELGHVSNKVAAALLGVAPYDDDSGKRRGERQIKGGRRKIRNLFYMACLGAATRHNPALKAFYCRLIAKGKEKKIALVACMRKLIVILNTMIARRQKWDASLHMVS

SEQ ID NO: 472319 - protein, 347 aa, unidentified
MEKVIRIGMDTSKSVFQLHGVNAAEEVVLRKALRRRKVLEFFARLAPTKVGMEACGGAHYWARELRALGHEVFLLPPQYVKAYVKRGKNDRADAEAICEAMSRPTMRFVPVKSAEEQAALMLAGLRDQMVRRRTQLTNAIRGYAGEFGLVAARGLSKIEPLLVRIAEDESVPELAKDIFAAYGQEYAELERRIAKVETRLMAWFRQSEPSQRLTQVPGIGPIIASMLVMKVPDPGAFHSARHFAAWLGLTPTDHSTAGKHRLGVITRAGDEDLRRLLVGGAMSVIQQADRGRGSPSPWLLGLLKRKELKLAAVALANKMARIAWKLLVSGENYDPRRSKVRALDKAA

SEQ ID NO: 472320 - protein, 472 aa, unidentified
MKKTKTIPSRKPTKPSSSVAEALQVLNPNAAGIDVGSASHYVCVAPHAVGAGQSRIREFGAFTHQLDGLVQWLKQCKVQTVVMESTGIYWIPLFQKLETGGIQTLLVNARDVRHLPGRKTDMKDCEWLQRLHTYGLLRGSFRPADGICRMRSVMRHRANLVSSAAQQVQLMQKALQQMNILLHLVVSDLDGQTGLRILDAIVAGQRDPKELVKLRDERIKKSTPEEMEAALEGDWRPEHLFALRQSLNAYRFFQEQLDECDLHLKETMEQVIVEMNLSASQAPQPEGDSRPTRKIKRKRVFGNAPKIDLSQHLRTLAGLDLTQTMGISTLSALVLISEVGIDMSRWRNEKAFAAWMGLAPDHKISGGRILSNRTRPVINRAATILRLMALATGKTDTVLGHFYRRIRARSGAPKAITATARKLACLVYHLIKHKEPYIEPELAGYLQRFEKQRLTNLARQARTLGYQLVPAT

SEQ ID NO: 472321 - protein, 319 aa, unidentified
MAQNDLAVVGIDVAKDKVDLCIRALALRQTCPNTAQGRRKLVAWLRKHQVGKAVMEASGGYEREWRKVLHDAGIEVRIVDPKRVRSFAQSAGRLAKNDTIDAEMIAWFAETFSETPSQTHDAAQEELAALVKARLALVELKIRLQSQSAHAAPGPVQKAQARILKSLAAEIEKLELAIAAKVKVTPHLAERAEIIESVPGFAETTSAILVAGMPELGQVSDKIAAALVGIAPYDDDRGKRRGERHIKGGRRWVRNAIYMPCLGAATQNNPVTKAFYRRLIARGKEPKVALVACMRKLICILNVMIARRQKWDAARYTLA

SEQ ID NO: 472322 - protein, 410 aa, unidentified
MEALLERCAGLDVHQASVVCCILISVPGRRPQKLLRRFGTTTRELEALRAWLAEHGVTHVGMESTGVYWKPVYAVLEGHFDLIVGNAHHIKNVPGRKTDVKDAEWIAQLVRHGLVAKSFVPPPAIRDLRELVRHRRTLIETRTATRNRVLKLLEGANIKLSGVASDVFGVSGMAMLEALAAGTANASAMASLARGRMRRKHDALEAALEGRMREHQRFLLAMQLRTLKAIDHDIAALDAQIEAQLEPFRAQHQLLMQIPGVDWVTAASILAEIGPDMSVFATARRLAAWAGVAPGNYESAGKPKGAATRKGNVFLKSALFAAASAAVRAKGSYYCDKYNRLRARRGPVRALMAIAHKLLIAVFHMLTTGEAFRELGESYLDQVTRKRSTTRLVQRLSSLGYDVVLVPKAA

SEQ ID NO: 472323 - protein, 343 aa, unidentified
MQTITAIGLDIAKSVFQVHGVDADGQVVVRRQLKRRYVLAFFQKLPPCLVGIEACASAHHWARELQALGHTAKLMPPAYVKPYVKRDKNDAADAEAICEAAARANMQFVATKTPEQQSCLTLHRTRHLLMRQQTSVINAIRSHLAEFGIVAPVGRNGVEQLLGVVADSNDRRLPEIARACVAALGAQLRVLKVQILEFDRMIRAWHRSSEASMRLDQVPGVGPVLATALIASVADPKAFRSGRDFSAWIGLVPNQNSSGGKERLGNISKRGDRYLRSLFTTGALAVIRYAKIHGTKHRPWLTSLLARRPTKVAAIALANKLARMAWAMMAKGERYKEPAALAA

SEQ ID NO: 472324 - protein, 437 aa, unidentified
MVPDAGGAVEEEKTMDILHERVAGLDVHKNTVVACARIMTGKETTRECRTFATTTDGLLALRAWLSECQCRHVAMEATGVYWTPVWRILSEGDFELIVANAAHIKNVPGRKTDMNDAMWLADLLAFGLIKASFVPTEPMHELRSLTRTRKQLVREQTRHVQRIQKTLAEANIRLDSVISDIMGASGRRIIEAMIAGVRQPHKLADLAGKQIKATPKELYDALHGRLTDHHRFLLDLHLRQWDGLDTTIRTIDLEIDQRIDRMDKDRATGESPFRTLIGNADTVPGVSAVSAPAILSEIGCDMSRFPSAGHLLAWAGMCPGQNESAGKRKPSRLRKGAPWLKTMLVQCAWAAIRKKGSYYQAQFLRLRHRRGPQKAICAVAASILTAIYHMLKDGTEHHDLGADYFDRRSTETKAKHLVASLTKLGFTVQLQPSAKAA

SEQ ID NO: 472325 - protein, 327 aa, unidentified
MKNVYVGIDISKATLDFCVVEPKRISFHKIKNNVAAIGKLLKTIKEIDPQAYLCMENTGYYNFNLYEVLEKFSFRTYVIDPKHIKRSIGLVRGKNDKIDAKRIAIFIERNHQDFESWKPIGESVKAIKILLSQRRFKIKQRTGLKQQNSDLKSVTFSKTTDKLIRINEKSIKEINKHIVEIETLIKKEINADHQLRTEINRIKTIPGIGDITAWTITVKTEGFKRLCDPRKLACFAGVVPFEQQSGTSLRTKPRVSKMADMTLKSVLQMAAMRAVRMQNDLRIYYLRKVEEGKNKMSVLNAVRNKLIHIAMALIKNQTNYKNRLQLS

SEQ ID NO: 472326 - protein, 436 aa, unidentified
MFVGHRFRTDPDELDTLWARLPKDAERIEVVMEPTRNAWVALAAWFRRHGATVVMVPPEQSADLRDYYNKHTKTDRLDSKVLARLPLLHPEGLHREDSLGPGDELKRAVKIRSGLVHRRTACMARLDALLEILGPAWIAALGSDMTLTALRFLARYANPVQVKRLGKARLAAFFRRSSRQAWADERADAVIEAAATTLRLWGADGGELDFDALAADIAAEARLALTLTDEINGFDKRIGALYDKADPAGIVRSVPGAGRVCAPQILGRLGDPTRFANLAAVRSFAGLVPAADSSGQADGHRGPTKAGDCCLREALFIAADHARKVDPTLAVRYQRLMLAGKHHDSAVCTLAAVLLTRIAACLRAGTHYLLRDTDGRVITEAQGRAIVAERYTVPPEVRAARRKVTPHRHPRRNERNERAKTGVATRSKASPVPQPA

SEQ ID NO: 472327 - protein, 433 aa, unidentified
MTNRLQVGIDFSQKKADFCLLFPDGQPLESHISFANSQLGCSLAKQLLLDTLNTYAFEGLDVSGEATGYLWLPFFLQLSADPDLAPHDLNLFLLNPRWVKWFKKCFPQDHKCDAKDPFYIAERTRTHRPEVAWSPPDCLPLRMYTRLRFHIVRTLAREKCYFSTFLFLKASSYRCIKPFSDVFGATSRLVLTQQPTWDELAALPVAELAARLYELSGHHLPDPHANARKLQQVAQESFSLDASLALPVQRILNLTLAHIRFLETQIAQVNTWIAAELEAYPVIGQLTTIPGIGPVCSSGVGAEIGGIQRFLQPQKWDQKRKHYRPRNLRDAEDAVAKIAGLWWPRSSSGDFEAEDRRMAKTGNRYLRYYLIQGADRMRQHIPEYAAYYARKYQEASKHRRKRALVLTARKSVGLVVGLLHRNEPYRSKEERLT

SEQ ID NO: 472328 - protein, 343 aa, unidentified
MAIYMLGIDIAKSTFQLHGADQAGKEVLRKRLPRHKLAAYIANLPVCTVVMESCGGANYWARVFQRSGHTVKLISPQFVKPFVKTNKNDANDAQAIVEAASRPSMNFVPIKQVEQQDIQSTHRVRTRIVKNRTALINEIRGLCLEYGVVLTPGAARVKSSLTTALADEANELTESSRNCMQGLYEELIDIEARLKKLNTRIRQLCRNNESCQRILKVPGVGELTATAIVAAVPDPGEFRNGRHMSAWLGLVPRQSSSGDRQVLLGISKRGDRYLRTLLIHGARAVLSHSKDSGSDYDRWVAKKKATLSHNKAAVALANKNARIIWSMLNTGGEFNYERQARAV

SEQ ID NO: 472329 - protein, 380 aa, unidentified
MNTTTVGIDLAKSIFAVCEGDSRGHGSRSSILKSGEFLKWLRTLPTGTVVAMEACSSAHSWGRTMQALGLEPRLIAAEFVRPYRKNQRIKNDTRDAEAVLTALHAPGMRFVTIKTEDQQQRLAWHRLREGWKAERTALFNRIRGLLTEFGIVVELGAAKIRRKLAELESDAAYPQSIQLMAQSVRAQIGILDQRLAECERQIARQSKSDPAVARLRSRPGIGPLTADAIVATVGNARQFKNGRQFAASLGITPRQHGSGGKMHLGAITRRGDSYLRCLLVQGARCVLQAALRLHKNKPNTLNRLQLWMITLHERVGYHKAAVAIANKHARQVWAMIARGEAYNAEAYKDWEAAHATVRPGDIQEASDYDLSTAALTAASV

SEQ ID NO: 472330 - protein, 378 aa, unidentified
MISAAIERCAGIDVGKKFLAVCVMVGPLQGEPQVEIRKFGTIRAELEGLRDWLKQQGVTHVVMESTGSYWKPVFNVLEDAVKVYLANPQEVKNRKGHKTDNKDGWWLAHLLRHAMIHPSFIPPRAIRELRDLTRRRKRLLGAGTSERNRVQKVLEDANVKLGNVLTDLFGVSGQLMLEALLKGQATPEEMAQFAKGRAKKKIPQIIAALEGHQMSEHHRRMIRYSMEHMRFLEEQIEQLDQDIVAKIQESGLEPQWQLVQSVPGVREASAAAILAETGTDMTQFPSEKHISSWTGICPGNNRSAGKNRSSRTTGGNRWLRSTLTECAWAAAAKKHCFLKDKFWRITTKSGGKKAPAVIAIAHSLLILTYQVLTTGQAY

SEQ ID NO: 472331 - protein, 335 aa, unidentified
MVAGTLGSLDKEGAMKMADNSVITAGIDTSKDKLDTAIHGQADSLVVQNETAGWKKLADWLKQSGVTRVGIEATGGYERGALRYLQQVGFTVILLQPLQVKAFGKLMLRRAKSDQLDAALIAHCTHTIDAYNKMAPDARFDALGDRLTYIEQIEEDIARFKTRLEHIGDTRLRRTVGADIKRLKKRRLDELMCLRKAVREHDDLAKRYTLVESIPTIGARTALSIVVRMPELGQLSREQAASLAGLAPFVHQSGKFKGETHIGGGRARLRRSLYIAALPGAFRWNPELKALYERLVARGKSPKCALVACARKLLIFANAVVARGTPWENTRPATA

SEQ ID NO: 472332 - protein, 445 aa, unidentified
MTLIYRRCAGIDVHKKSISVCARIRIARDRFRTETAVFLTFTQELEKMAAWLRERKIQHVAMESTGVYWKPVWNVLEASKGKFEILLVNPQQVKALPGRKTDQQDAERIASYLQEGLLRGSFVPPVPIRELRELTRRRTHLQGDRNRVINRIGRLLETANIKLGTVLSNIVGVNGRAILDAIIAGKTSAVVLANQVTGHVKRPYEEFVLALQGRYSDHLRWLLRQLLDQLDGLNRQTADVDERIRQITKPHQDLIERLCTLPGVSLISAHAIIAEVGTDMTPFPDARHLASWAGLCPGNSESAGKRFSGRTRKGDRYLRRILVQNAWVVAHLKDCALTAFFHRIASRAGMKKAAVAVAHRILTLAYFIIRDGSSYYEAGRNVYDLRHRERTASRLVRRLQRIGYDITLSSPPAAPDQKCAKCNRWGIACIHVRPRISKPAQESSR

SEQ ID NO: 472333 - protein, 360 aa, unidentified
MADYREAFVGIDVAKLKNAIAVAESGREGEVRYFGEVDASYASMRRIIQRIAAKFDRVHFCYEAGPTGYGLHRLIQSLGHECMVVASSLNPRKPGDRVKTNRRDALALARLLRAGELTAVWVPDEGHEAMRDLVRARAAAVETLRVHRQQISAFMLKHGRIYPRMKGWTMRYLCWLQEQQFDHPAHQIALQEMVEAVRVSKERVERLEKVIEEFVPNWSLAPVVRALQTLRGVDLIVAVTFATEVGDVSRFESPRQLMGYLGLVPGERSTGETVRRGAITKAGNGRVRHMLVESAWTYRHPPKVGARKLEIAWKAQTRLTARYRMLTGRGKRTTVVCTAIARELTGFMWAVAREAQAIRS

SEQ ID NO: 472334 - protein, 349 aa, unidentified
MKIIGCDFHPGYQQIAMWDKASGEMLECSLSHERKEEVRAFYAGLQGPVRVGIEASGQSQWFERLLVELGHEVWIGDAAKIRASCERKQKTDRRDAELLVKLLDENRFPQIWVPTPEERDARQLLWHRAKLVRMRSQVKNQLQALALNQGVQRKRKLWSATGRKQLENLPLLPWASRRRTELLALHDQLDASIGELDLAVIEQAHKRPAVRRLMTHPGVGPITALAFVLTLGPAGRFRRGKQVASYFGLIPAEHSSGGGGQRLGHISKQGSSFLRGLLVEAVQSAVRHEPGMRREYQRLAQRKCRALAKVAMARKLAVRLYWMLRTEMDYAQLLQGSHAGQLESFRGRS

SEQ ID NO: 472335 - protein, 338 aa, unidentified
MDKITTIGLDLAKNVFHVVCTNRLGKVVRKRMLRRSQVLKYFANLPISLVGMEACASAHYWARELGALGHEVKLIPPQYVKPYVRGNKNDYNDALAISEAVVRPEMHLVAVKTTDQQDIQALHRLRERRLRDRTALCNQLRGLLAEYGLIFPKGVSTLRRCLPELMEDGENGLSALFRRLLAQGYQQLRELDGHIDIYTRELGHQSQQDEACQRLQTIPGFGPIVASVFHSVVGNGEAYRRGRDVSASIGLVPRQHSSGGKEVLLGISKRGDRYLRSLLIHGARSVVIQAKTKDDRLSRWINRVVSARGFNKAVVALANKMARIGWVILAKKTTYQAV

SEQ ID NO: 472336 - protein, 341 aa, unidentified
MEIATLGIDLAKSVFQLHGVHEDGVVVLQKKLRRGAVLDFLSKLEPCLIGMEACPSSHFWAREIAALGHEVRLIPPAYVKPYVKRQKNDAADAEAICEAVARPNMRFVPVKTEDQQSVLVLHRSRDLLMRQRTMILNAIRAHLAEFGTITAQGPRKVFDLVRRLSDPDDRLDLPALARSALLSLAAQLESLAEEISKIERQLMAWHRQSAASQRLETIPGVGIITATAMAASVPDPSVFRSGRQFAAWLGLVPRQNSSGGKERLGRVSKMGNGYLRRLLVVGATSVTRRAGTTDSRTGAWVRSLLERKPTRLVTVAIANKTARTAWALLTTGESYRATPAT

SEQ ID NO: 472337 - protein, 356 aa, unidentified
MRFYPRAHRFYCGIDLHARSLHLCILDEDGAVALDKNIPARPESVLKALAPFRADVVVGAECMYAWYWLADLCAREQIPFVLGHALYMKLIYGAKAKNDKIDAHKIARLLRGGNFPLAYVYPKGMRETRDLLRRRNYLVRERSALFTHLQILNGQYNLPPFPKKLSFAANRAELDIPARFTDPSVQHSAAVDLAVIDVLDEQIGALELYLTRTAKVDDVQTYHRLQTIPGVGKVLALVLLYEIHDIARFASEGQFLSYARLVRPRHESAGKVVGWGGQKIGNAHLRWAFAEAACLFLRGSERAKQWKERQLKKRCEGRVLAILAARLARAVYHLWRKQEAFDEARFWQGQAAGALA

SEQ ID NO: 472338 - protein, 507 aa, unidentified
MEPNYRRCCGIDIHKKSVTVCVLPPVDKPESGIRKRNFPTFTRDLKQLRTWLKNCKVTEIAMESTGQYWRSVWNLLEGHFEKLVLVNPQHIKGLNGYKTDPKDAEWIAGLLEGGKLKGSWVPPREIRELKDLTRQRVHVLEDMNRVKNRIEQLCQAGNIKVSSVATDLFGVSGRKMLKAIVEGKHDAGWMADYARGALRGRKRELELALDGSFTGNQRWLLDRELLQLEWLEAQARVLEQEIERRVVPFAEPMRRLMTIPGIDQKTAWTIMAEIGVDMNVFPDARHLASWAGLCPGNRESGGRRMSGRTRKANRYVKSALCQAAWAASHTKQTYLSAFYKRLQVRKGAQKAVMALAHHLITVVYNVLARSEEYVEMGADYHDQRNKPKVVSRLVKRLTRLGYYVVLDPIVREPGKSEVSRMQMPGTTSLAASEPSPLKTARRSAKRVPLTKRRAASQSSLHARVGTIAKRKRGRPCKCVERGIICKHGLRPHPNLLEAKKVGDGRFS

SEQ ID NO: 472339 - protein, 380 aa, unidentified
MRNVRFIGLDVHAETIAVAVAEPGGEVRSLGTIPNRPEPVTRLIRKLGKPEQLRACYEAGPTGYVLYWQLSELGVKCEVIAPTLVPVKAGDRVKTDRRDAEKLARCYRAGDLTPVWVPDAAHEALRDLVRARLAAKRDQLRARNRLAKFLLRHGRRAPEGTTAWGTQHLKWVKGQSFEQAAQQATLVDYMHEVEHAAERIERLELSIDTAIETLPQKLRAVIEALQCLRGIAKISAVSIMAEVGELSRFESARQLMGYSGAVSREHSSGERIRRGSISKTGNAHLRRIVIEAAWAYRHRPGLGATLLARQREQSEAIKAIAWKAQHRLHSRYAKLLAKGKPKQQVITAVGRELLGFIWAIGVTAERSQANAPRRALKRAA

SEQ ID NO: 472340 - protein, 363 aa, unidentified
MSDGTLMTTSAAITILALDLGKFKSVACRYDPATGEHAFETIATTPPAVHDVLIEASPAVLVIEACSVCGWISDLAESLSIKVRVANTMGEAWKWKRVKRKTDRDDALKLAKLAATDQLPVVHIPELSVRQHRSLIKYRHALIDRRTGIKNTIRSLLDAQGLSLPGRSRGWTIASVNELKALSRPLSACDGANLWRGQLASELTMFEQVTALIKEADKKLDAIAATDERVTRLRTIPQVGARLAELVVTTLDDAKRFRTAKQVSAYAGLVPKQYQSGQMNRLGRITGQGPGLLRRVLVQVAWGLQRRTETRGHAVFERLCHGQRTRRKQAVVALARKILIWCWAILRDGSVWDDTRDRRLTVT

SEQ ID NO: 472341 - protein, 347 aa, unidentified
MRFYNGQHRHYCGIDLHAKTLYICILDAAGNTLVHRNAKATPAAFLEIIAPYREDLVVAAECMFTWYWLADLCAQEGIAFVLGHALAMKAIHGGKAKNDKIDSHKIAVLLRGGMLPQAYVYPQAMRSTRDLLRRRLHLVRKRGQLLAHIQNTLHQYNLEPWGKRIAYPANRQGLLDHFPDPAVRQSIAVDLSLLDHYDRLIPPLELDIVRAAKRHDADAFHRLRSVPGIGKILALTILYEVHDIHRFDRVQEFASYARLVKCAHESAGKKLGTGGRKQGNVHLKWAFSEAAVLFLRHTTEGKKILTRLEKKHGKGKALSILAHKIGRAVYYMLSRGTVFSMEKFLAA

SEQ ID NO: 472342 - protein, 319 aa, unidentified
MSDPSSAPSGMFVGIDVSGQRLDVHFLPTGRVVQRERTPEECRLLARELRRQGPALVVVEATGGLEIMLVAELALAGVPVAVVNPRQVRDFAKACGVLAKTDRLDAAVLARFARDIRPLPRPVADPQQRELEELVDRRRQLVETRTAETNRSERATSATVRRSIQVTLKFLERQIDQLDQELADRIKATPLWREKDKLYQSVPGVGPGTSRMLIAALPELGTIGTRQIIALVGLAPLNHDSGKFRGRKALRGGRKGVRCALYMAALTACRCNPVLGHYYRGLRERLPFKSAMAACMRKLLIILNTMAARNQPWTVPALP

SEQ ID NO: 472343 - protein, 367 aa, unidentified
MKKNSTTTQRGKRAPAGTEATVIGMDLGDKTSRYCELDRDGKEREEGSVATTKQALTQRFAGKKRCRIALEVGTHSPWVSRLLKSLGHEVIVANARQVRLIAHSSRKNDRLDARTLARLARADPRLLSPIQHRGEQAQQHLAMIRVRAALVEARTKLVNAARGFSKAQGERLPACDAAAMGVKEMAELPAGLKAVLRPLLEQVESLTGQIKKADVELEQIARTQYPETALLRQVKGVGVLIALTLVLTLDDPERFQKSRDAGCYVGLRPRQRESGASQPQLRITKEGDRYLRTLLVQGAHHILGWRGPDTDLRRWGLKLASRGGKNGKKRAIVAVARKLAVLLHHLWVTGEVYEPLRNSGAATTQAA

SEQ ID NO: 472344 - protein, 350 aa, unidentified
MPKPMSKQYVGLDVSLAETSIAVIDENDKVVWRGKVASTPEAIAEALKKHAPRAERVGLEAGQLASWLYHGLKAKGWPVFCIDARHAKAALSLKVNKTDANDALGLAQIMRVGWYREVAVKGHDCQALRALLIARAQIVSQITTLKNCVRGILKVFGRVLPKKLRATFIASVRETIDGDTTLEPILDPMLRTLVATMEQLQVYDRAAIRHAREDATARHLMTAPGVGTIVVLGYMTGVETPARFLRSTSVGAYFGMTPKRYQSGEVDKAGRVSKCGDGMVRGLLFEAAKVLLSRSAKPSDLQAWGRALAKRIGSKKATMAVARKLAVILHRMWTTGEPFRWTATPVPTTA

SEQ ID NO: 472345 - protein, 352 aa, unidentified
MLIIGCDLHTRYQVIARLDTESGEMVTRRLQHENGEARAFYASLPAAALVGIEATGYTPWFERLMTELKHVLWVGDAAQIRARAVRRQKTDTRDAEHLLELLSTHRFPRLWIPSPEQRDLRQLLKHRHKLVRMVTALKNQLHFLAMSQGVCRKSKLWSERGRQELESLALDPWASRRRQELLRLLDQLQPQIAELDTAVAQAAAANPAAVDLMTQPGVGPVTALAFVLTLGPVERFQNSRQVVSYLGLNPSEYSSGGRQRLGGISKQGNSMLRWLLVEAAQTAARFDPELRRKYQRLKFRRGGSVAKVALARRLAVRLYGRLRQSKTETQPVRMPGSSGSGVVLPPAAGSRQ

SEQ ID NO: 472346 - protein, 349 aa, unidentified
MKKHNSKTDDWKKEQGLVIGIDLGDKWSAVCVRGADGEIRYEDRVRTSTVALSQWFGSLGSSLAILEVGTHSPWVSRHLEQLGHTVIVANPRQLKLISESDRKSDGVDARMLSEIGQAMPRLLNPVKHRSAELQADLVVIRARARLVEVRTKLWVAMRGLAKSLGRRLPRRVKEEDVRAHDAGLLPLWETVTSISAKVREYDQQIERLAAEKYPEVARLQQVAGVGPIISLTFVLTLADGQRFRRSRHVGSYLGLRPRQRDSGERQPQLSITKTGDRYLRSLLVQGAQYILGRFAPDTDLRRWGLKLAARGGKNGKKRAVVAVARKLAVLLHRLWISKAEYQPLRQAVV

SEQ ID NO: 472347 - protein, 452 aa, unidentified
MEQPQEVEDEEFERVWERVAAVDVAKASGVVCTRVPDEGRPGRRKVHVWSVTATLGAVTELGDHLRCQGIEVVTLESTSDYWRIWHAVLEAAGLKVQLVNARSVKNVPGRAKTDKKDAVWLAKLTERGMLRPSFVPPYDIRRLREYTRLRADLVQDRARCWQRLEKLLERALVKLSSVSAKLTTQTSRAILEALIAGERNPKVLADLAIGKARARRRELAEALEGRFEDHHAELARMLLDQIDALTAQTGQISDRVSGLIAQVPAAQGVDADGTTGPEAGKGPDAAVLPAVARLDEITGCGVIAAQAIIAEVGLDMTVFGTPGRLVSWARRCPQTRQSGQKTTAGKPGKGNPWLNGILGEIAASASRTDTFLGERYRRLARRRGKRKALAAIARSILVIIFHLLSDRPARFNDLGPDYYDNRISRDRKIRNHVRQLEALGLTVTVEETAEAA

SEQ ID NO: 472348 - protein, 356 aa, unidentified
MSQNLDSKVAVIGIDIGKSSFHIVGQDRRGALVLRQKWSRGQVEARLANLPPCLIGLEACTGAHHLSRKLQALGHDARLMPAKYVRPYSKGEKNDYRDAEAIAEAVQRPTMKFVATKTADQLDLQALHRVRERLVSQRTGIINQIRAFLLERDIAVRQGLHSLRAELPGILGTRTDVLSPRMLRVIEDLAGDWRRLDERIEGLSGEIDALAHHDKGCERLMTVPGVGPIISSAIVAAIGTGDAFSKGRDFGAWLGLVPKQMSTGDRTILGSISRRGNRYLRKLFVQAAWVVLVKLGPEQWERYGLKSWIEAAKKRLHHNVLAIALANKLARIAWAVLHKGRAFECVKTNATASRPV

SEQ ID NO: 472349 - protein, 371 aa, unidentified
MADYREAFVGIDVAKLRNAIAVADAGREGEVRFFGEVDASEESMRRVIRRIATKFDRVYFCYEAGPTGYGLYRLIRSLGHECTVVAPSLIPRKPGDRVKTNRRDAFALARLLRAGELTAVWVPDEGHEAMRDLVRARAAAVETLRVHRQHVSAFMLKHGRIYPRKKGWTMRYLRWLQEQPFDHPAHQIALQEMVEAVCVSKERVDRLEGVIEEFVPAWSLAPIVRALQTLRGVDLIVAVTFATEVGDVQRFESPRQLMGYLGLVPGERSTGETVRRGGITKAGNGRVRHMLVESAWTYRHPPRVGAKKLYRLEQAPPKVREIAWKAQTRLTARYRMLSGRGKRTTVVCTAIARELAGFMWAVAREVQAIRS

SEQ ID NO: 472350 - protein, 414 aa, unidentified
MNLFVGLDVSSETLEACFLGNQIDQVFLRTRFANDTVGASQIKNEIIKLNDENHFKKIMIGMESTSLYSFHPAIFFQNDQELKALNVKTVIEDPRRVRKYAESYDTDKTDYNDAFIIADYLRIGRGTTSPMREEKFMALQRLTRSRYQLIQQLTETKQHFLENLCYKVNTLSRELDSVQVFSATTIELMTEELSVDDLANMPLEDLAELVQKKGHGRFKDPEVFAKTIQKACRNSYRLDKAMADSIDTILGILAREMRGLTKSIKDLNKAIEDLVSTTPEYKCLTSIPGVGSVYAAGILAEIGQIERFPDQSQLAKYAGLTWKRKQSGNFESENTKLSQTGNRYFRYYLVEAANSVKNRVPEYKTFYQRKYAETPKHKHKRALVLTARKFVRLVDTLLRNHQLYMPPKEAKETE

SEQ ID NO: 472351 - protein, 370 aa, unidentified
MNQSSTLYVGMDVHKESIAVAYAANDLHTEVIYLGAIGTRQCDIDQLVRNMQSKRNHLVFVYEAGPCGYWLYRYLTHKGHVCWVVAPSLIPKKAGDRVKTNRRDAIQLARLMRSGDLTPVYVPQVEDEAIRDLSRAREDALQDLKTAKHRLKAFLLRHDIRYTGRATWSPAHLRWLSEVVCPTPAQQIVFQEYVRAVNEPTERLQRLEKELRDQVKTWRLQPVVEALEGLRGVQFTVAVTIVAELGDLTRFDKPSQLMRYLGLTPSEYSTGDHRRQGAITKTGNAHARRALIEGAWAYRYPAKVSRHLQLRLEKLPKPIQDLSWKAQVRLCTRYRHLLARGKHVNRVVVAIARELSAFMWAIAQQLAVTP

SEQ ID NO: 472352 - protein, 405 aa, unidentified
MQTVYERCCGIDVHKKLIVACFRNGKTAELRKFETLTCSIKELGNWLLENDCQKVAMESTGAYWKPIYNILEMLGLDVIVVNARHMKSLPGRKTDIKDAEWIAQLLQHGLLKASFIPNREQRELREIVRYRKSLVEERARELNRLEKTLEGANIKLSSFVSNLTGVSSRRLIEQALFGEINPDNIDDFIHHSMRSKKEQLLKAMDGVLSSIQKQLVRAILDHIDDMTKRIGDMDRIIDEHMKHYTKAIEEIDKIAGIGKRSAEVILSEIGVDMNRFPSAAHISSWAGLCPGNNESAGKRKSGRTNKGNKYLKSTLIQCAKSAQKNKNSFFYAQYQRLVIRRGKNRATVAVAHSMLIAIYHMLKDGVPFKDLGSDYYSKFNTEKKARYYLKKLTELGVPLPVSVAT

SEQ ID NO: 472353 - protein, 342 aa, unidentified
MNYYAGIDVSLESSAVCIVDGAGKILREAKVASEPEALIAWFGSQRWAMERIGLEAGPLSQWLYAALREAGHAVELLETRHVRAAFKTMPVKTDRKDARGIAQLMRLGWFRPVHCKSIEAQETRTVLAARKLLQSKLYDVENSLRGLLRGFGLKVGKTTQRRFAGRITELVAGQPGLELVAQALLAAHAVLLGEFNRLDRHTQKLAKLHPQARLLMTTPAVGPIVALTYAAAIDDPARFRSSKAVGAHFGLTPKKYQSGQTDYTGRISKIGDASVREALYQSAHVMLTKPVKNCTALKGWAMRIARRAGMRKAKVALARKLAVLLHRMLADNKPFDPMVAAI

SEQ ID NO: 472354 - protein, 400 aa, unidentified
MNAVGIDVSKGKSTVAVIQPFGVVIAEPFDVFHTDSSLKELVRFIKSLSGETKVVMEYTGTYYEPVANELHNAGIFVSVVNPLLIDDYDTNRVRKVKTDKLDALKIASYALDKWIKLRKYEPAETVRKTLQIMNRQCIKLNKILVMQKNSFIALLDCCFPNANTLFTSPHRVSDGHEKWVDFVMKFPHVDSVAKLPLSVFRTKYQSWCKKEHYNYSESKAEQIHAYARTIVSTLPMTDAVRKMVSEAAKLLNSTLEALGTLHSEMDALASQLPEYETVMNLYGVGKVFCSQLIAEIGDVTRLKSNKSLTALAGIDPPPNQSGKDDPKSRRISKRGSPALRRTLFLIMTIYLQHQPADEPVYQFLDKKQAEGKPYKVYMIAAAHKFLRIYYARVKEVMPKE

SEQ ID NO: 472355 - protein, 423 aa, unidentified
MTSMTVALPLTNPPLPAEALVAGVDTHKDTHHVAILDHVGRPVADREFRADGRGYAEIITFLRGHGNVDRVGVEGTGSYGAGLSRALATAGMTVIEVARHDRQARRRRGKSDPLDAHQAAVTVLADTDTAIPKSGDGAVESLRILIGERRSAAKARAQVMNQIHALLITAPELVRHAFRALTGQRLVNTLAKTRPGTGGSGDPDVVARQTLKRLATRYLTMQAEIDIIEQQLGLLVRQVNPTLLSLGGVGPVTAATLLVAAGDNPERLRTRATFAALAGVAPIPASSGQRTRHRLSRGGNRHANAALHRIVLLRMRHREPRTMAYFERRRAEGLTNRDIMRCLKRHVANEIYAALLNPAADNPTGHELRAQRQQIGIPISILAATLGVPYQRLRRLEIGTRADPELEQRASLALAQLSPPETA

SEQ ID NO: 472356 - protein, 433 aa, unidentified
MQDVHDEPLFAERVAGLDIAKAEVEVTIRVPSDTQPGRRQQEIRTFATTRRELDALAGWLRSWGVTKAGMEATGDYWKPVFFLLESRGLDCDLYNAAQVKALPGRPKTDRADSIWLAKITERGMISSSFVPPEPIRRLRTCTRYRRHLTQAPAAEKQRVEKLLEDGHLKLSSVISDIHGVSGRDMLDAIAAGQRDPRALAQLARGTMRGKIRRLEEALDCSFFTDEHAAVLAMMLTTIDYYTAQIEQLTAKIEVLIEPCLHQAGQLDEIDGIGAICAQDIIAEIGTDMTVFPTASHLVSWARWSPQVKQSAGKRKGSNATGRGNPYLGAALGESTASAGRTQSFLGAKYRRLSRRMPKKKALVATGNSMLTIMHALLSDPDVRYTDLGADYYEARTHTRRQARNHVKSLERLGYQVTIQALNPDTGEPLAAAT

SEQ ID NO: 472357 - protein, 335 aa, unidentified
METVRHSVGIDISKDELVCCIGTSTDGRQDFLRAKSFGNNPHGFAALLEHVKPLEGRDIVFVMEATGVYYENLAYWLDSNERKVSVLLPNKVKHYTKSLNVKTKTDGVDAQVLSRFGLERRLDFWHMPSAMMRQIKFLSREYREAKAKIVVIKNQLHARNHSHGCPQSSEQRLGKQIGLLQTQLLEIEAELRTAVMSDTKLYDRVTKLNTIPGISFITTITILAETNAFALVGNTRQLASYAGLDVEHRQSGSREGKTRISKKGNSHIRNAMYMPALCATRHNPDMKSFYQRLAERKPAKKIAITAVARKLLILTYILWKNDQEFDENHFKGQLA

SEQ ID NO: 472358 - protein, 473 aa, unidentified
MARKKGEGRAVAGGLVLTGEPAEVRDEPAEVIARSAAIDVAKDSGMVCTRVPHESGQGRRVQRTWQVSARYAEVVALMAGLVAAGIERLVLESTSDYWRIWYYLAEAAGLEVWLVNARDVKHLPGRPKTDKLDCVWLCKLNERGMLRRSFVPPEAVRDLRALTRLRSRLAQDQARYQARIEKILEDALLKVSSVISDLMGLSGRRFLAALVEGERDPVKLAALGDRRLKASRRELQEALTGRFRDIHALEVGMLLDLIDAITAAITRLDTEITAHLARVPGIAPACAGCGEIGGGHAPRCPQEGSPALSVIERLDEITGIGTEAAQVIVAELGTDKTTFPAPGHAAAWAKLTTRTIQSGATTKNGRTGKGNPYLRAALGRAAMTAAKTDTYLGERYRRIARRRGKQKAIVAVSRTICEIAWMIITDPSVRFNDLGPDYYNQLDAGRQTRNKIRDLERLNPGMKVTLTPAAQAA

SEQ ID NO: 472359 - protein, 430 aa, unidentified
MKDSNRIRLQAFCQFKKEIRGSTEYLVVGLDIAKERHNAFFGTATGRTLHKGMFFGNTYDGFQKLLIQTEAIKVQHSLRKVVFGLEPTANYHKPLGEYLIKGGHLVVLVSAAATAKNRELLDGRWDKHDTKDSANVADLISQGKCLYYDCPGESLRSLRGLLSLKRRLKKEEHGLRVRIRNQLLAQYFPEMDQHFGSVASLNVVSRCLDPSLISLMEYDEFCRTVAPGKANLAQQRRLTQIWRAAKQSIGCSVGKAVSIEARIMVAGLNRVRETITIVDEKIEDICLVFPEYSFLLTIPGFGPDVSAKVLAAIGDPERFTSGKQVLKMSGFDLCASRSGKTSQSATPVISKQGKSDLRYALYQAAMSASLKNRSFMAYYTNKLKNREREKGIGVKMRVKLAAKLLIIAWTLMKKKVPFDPEYLNQGDGKV

SEQ ID NO: 472360 - protein, 360 aa, unidentified
MRALYAGFDLHGNSNYLGIMDGNGNRVFRKKLSNDLEWIREVLVAFKAEVVGVVVESTYNWYWLVDGLMEEGYKVHLANPSAIQQYSGMKHSDDRHDAFWLAEMLRLGILPEGYIYPKEQRPVRDLLRKRGHLVRLRTSLVISLQNILSRNLGRKVNVNEVKALREDRVTPLLESSEDLALAGRVSKEAIDFLTHQIRRIEGVVQKRIELREEYRYLLTLPGVGKILALTIMLETGPVCRFPTVGDYVSYCRKVPSQWTSNGKRKGSGNKKNGNKYLAWAYSEASELARRFYPEPRAYYHHKMQKANAPVAHSALAHKLARAGYYVMRDQVPFESQKLFGRRGRGWNGEPELGLVKSHEA

SEQ ID NO: 472361 - protein, 341 aa, unidentified
MRQYVGLDVSQRETAVCVVNENGQAIFEGKAKSHPGDLSKLLRKHAPLAERIGFETGAMASWLWHELRRVELPVVCIDARHAHAALSVRMNKSDQNDARGLAELVRVGWYREVKIKSEESQKVRAILVARFRLVSMRRDIENQVRSLIKECGLLFPRAIGQQFRNQVGELLGEDHQLLNVIGPLLSIHEHICQQQSKFDDEVRRLAKSDETTRRLMTVPGVGVVTALTFRHTIDDPSRFRSASTVGAYLGLTPRRNQSGETDTTGKISRWGDRLLRTYLYEAATVLLYRTKKWSSLKAWGMKLAKRVGMKKAKVAIARKIAVILHCIWVDGTSFDWSHAPA

SEQ ID NO: 472362 - protein, 312 aa, unidentified
MTDQIFVGVDVAKDWLDIHHASQGATRINNSHAAIRSFAARCGKEGAWVVFEASGGYDHQLRDALESAQVRFSRINPRQARDFARAMGIIGKTDRVDARMLAELGARLTPAPTQPLPPERRALQAQATRRRQLVEMRKQEATRLQQTADPVARADIRGVIAMFDRRIAKIEARMTDLVTADPELAAIERRLRTAPGVGPIVAATLIVELPELGQIDRRSIAALAGLAPIARDSGRRSGPRSIGGGRPIVRTILYLAALQASRRSLQFIHFRERLQAVGKSVKTAIIATARKLVVTLNAMLASGTDYRPIAVV

SEQ ID NO: 472363 - protein, 348 aa, unidentified
MSISMIAIDTAKSVFQLHAVDAAGKVQQRRKLRRGELIPFFEGLPRCTVIMEACGAAHHWARVLGGLGHEVRLIAPEAVRPFVKRGRKNDAADAAAICAAASRPDARFVPVKSPEQQGVLALHSARALLVKQQTMLANAMRGLATEFGLVVPKGMGRLEELAALVEEDGTLPEQARGVFAGLLGQCRATAERIGALEAEIAAHARGDDTARRLATVPGIGPITASLIAATVGGNIGAFRSARHFAAWLGLVPRQHSTGGRTRLGRITKAGDREIRTLLVLGATSMVYRAAQWNSAAGAWTRGLLERRPVRLATVALANKMARIAWALMTRKEVYRATGRAAAASAATA

SEQ ID NO: 472364 - protein, 339 aa, unidentified
MQLYSGFDLHSNNCHLGIIDESGKRIFKKKLDNEPERILQTLQPYRQNLAGIVVESTYNWYWLVDLLMAEGYRVHLANPAAIQMYKGIKHVDDTHDAFWLAEMLRLNILPEGYIYPKETRPIRDLLRKRGHLVRLRTSLIISLQNIVTRNSGVRLKAHEIKRFRDECISPLLTDNEDLALAGVVSKEGIDFFTRQIRRIERVVESRIDVEGPYRYLLTIPGIGKILALTIMLETGRIERFAKVGNYASYCRKVSSRWSSNGKTKGRGNAKNGNKYLAWAFSEAAELARRFDPQARAFYNRKRQKAQTMVAHGALAHKLVRAAYYVMRDQVPFMPEKLFT

SEQ ID NO: 472365 - protein, 316 aa, unidentified
MQPSPVCVGIDISKAQLDLVVEPGGESLTVPYDDQGLATLILRLSQISPRRIVVEATGGLERVLLRALVDAALPVIAVNPRQVRDFAKATGQLAKTDALDAAVLARFAVVIQPPERALPDPQTQELAAVLARRRQVLAMQRAEQNRLDRASTRVRKRIEAHLRWLNAELARLDEDLDDMIAQSPVWRNRDNLLQSVPGIGPVMSRTVLAELPELGLLNRKQVAALVGVAPFNRDSGRRRGHRTIWGGRAPVRTALYMATLVATRWNPVIREFYRRLRTAGKPPKVALVAAMRKLLTILNAMVQHGTSWRSTVVQGA

SEQ ID NO: 472366 - protein, 407 aa, unidentified
MTTYFAAIDWASHVHALCVVDERGAIRLACEIEHTAEGLARLLRELKRFERGEQRLRVAIERPSGLLVDTLVEAGLTVVPVHPNILKAARPRYRSHGGKSDASDAYMLADLLRTDGHRLRPLAPQSDAIRALRSLVRVREDLQRTRTRLTNQLRDLLLSFWPAAADLFHEIDSPIALAFLERYPGPQAASRLGPKRMAAFLATHRYSGRKTPEALLAHLHQGAPGHAGELLAEADAELVQHLVALLGSLAARMKLLDARIEHTVADAPDGPVIMSFPRAGRLCAAQILAELGDVRERFPDDAQLAAEAGVTPVTHASGKHRAVVWRWACNKRLRHAITILADNSSHDSPWAAAVYARARARGARHTHAVRILARAWIRVIWRAWTDRKPYDPALHNSARLAVQSTGG

SEQ ID NO: 472367 - protein, 278 aa, unidentified
MTETTIGIDISKATLDVHRLNDSTAAQFGNDKAGFRALKGWLKGHDIARVVYEPTGPYHRDFEVALEADYPLVKINPLQARRFAQSRGTKAQTDPVDAQMLAMMGAAFSLLPQPRTSAKQRNLKELHITRLSLIKDRTRILNRQKSLTIALLKRQAKARLKLMIAQIAQVDAEIQELLQNAPDTTRATEIICSVPGLSKVSSAAILIVPFMICGQITAGRWMPEVGTLSRKQVASLAGLAPMTRQSGQWRGKSFIQGRAKTATRCALYASSRRHATQS

SEQ ID NO: 472368 - protein, 368 aa, unidentified
MVVMTTEKPKKYSYFIGIDISRNELDFAVQKGSTYLYHKEILNQAAPITELVNEFKKLPNFVMSRAVFCMESTGLYCNIVVAVLKKFKANIVQENPLHMRHSFGNVRGKHDKVDAIRIAAYAYKNRDEMKLWMPRRKVVQQLADLTALRVRLLTTKVALKNPLQEQQDFLKKGAALETFNLCKRSITSLALDIAALEKRIMELISEDEQLKRLYAIVTSVKSVGMFTAVQMIIHTNEFKDINTAKKFACYAGVAPFKNESGVFIKRSRVSHIANKKMKSLLHICAVGALRYDSDIKAYYLRKIAEGKPKMSVINAVRVKLINRVFTCVHQNRLYQTDYKAGDVQNIGVIAEQPLGNRTVEVELRSVSG

SEQ ID NO: 472369 - protein, 317 aa, unidentified
MTTPSEAYVGIDVGKAWLDVALWGSDEVWRVSNDEAGVAKIMERVTALDPRLIAVEATGGYEQLVVQAMLMKSLPVAVVNPTRVRALAKATGKLAKTDVIDARLIAEYAFKIQPEALAPKEANEIRLKALVTRREQLVAMRTAEQNRLGTAQNSLQADIGEHIEWMTARIKDLEAEIEELVDSLPAWRAQAKRLDSIPGVGMVTAVTVLAEMPELGQLDRQKIAALAGLAPFNRDSGQKRGKRRIFGGRKGIRRVLYMACLSATRYNPVIRSMFQRLMKKGKLFKVAITACMRKMLTIMNAMTRDQVNWKVPEPISA

SEQ ID NO: 472370 - protein, 464 aa, unidentified
MAKTRKRSKRRLEDLSCVNPNAAGLDIGSEEIVVAVPPDYDEQPVRVFATFTPDLHLLVDWLVACGIDTVVMESTGVFWIPIYELLEQHDIIPYLVNARHVKSVPGRKSDWNDAQWLQKLHALGLLQASFRPDAEIRTLRTLVRYRAELIERRAPHINHMIQALKHMNIQLNLVLSDITGTTGLAILRAIVAGERDPMQLAQLRTPGCKHTEAEIAKALTGTWQEAQLFILRQSLEVFDYYTTKIAECDREIEQQYQAMESRWMVDAPLPDLPPAKPESKSKNEPSFNVRAQVARIIGVDLVAVMGLSAVTVQTIISEIGADMSRFPTVKHFCAWLGLAPRNDISGGKVLRSRTMKVRSRANQAFRQAAQSVARSDSAVGAHYRAMRARLGPGQAIVATAHKIARIVYHLLKTGEPYREEGAAEYEQKRQARELKHLARRAQKLGYSLAPIPASAPESQPEGGG

SEQ ID NO: 472371 - protein, 410 aa, unidentified
MLFIGDDWAEAHHDIEIEDESGGVLARRRLSEGLAGITMLHELVAEHLDPAAESDQVLVGIETERGPWVQALLASGYQVYAINPLQVARYRERHSTSGAKSDAADAHLLAEIVRLDRGHHRRVAGDSEIAEHIKIATRAHQTMIWSRVRQVNALRSLLREYYPAALAAFGADLASADALAVLAAAPSPEQGRRLSQARIETLLRRGGRQRNVTPTAAKIRAALSSDQLTARPGVVPAYAASASALIAVLTAMVQQIEVLAGQVEQGFGQHPDAEIYRSQPGLGVILGGRVLAEFGDDPGRYADARSRKNYSGMSPITKASGTKRVVLARYARNRRLGDALFLQAYSALRSSPGARQFYDRQRARGATHYQALRALANRLVGILHGCLRHHTLYDEHRAWHTANQELSTAA

SEQ ID NO: 472372 - protein, 314 aa, unidentified
METSAQPVFVGIDVSKNKLDVALWPSGEGFAVERNAKGLNSLCAKLAALNPVTIALEATGGFETVAAAALAAAGLSVAVVNPAQIRAFAQALGKRTKTDPIDAAVIARFAEAAKPAIRPLADAETQLLADLIARRRQIVDMIVAEKQRLDRAPEKRLRKSIERLLKALEKELSNLNGDIDTAVRASPLWRANEELLTSVPGVGPTTARTLIAELPELWTLTRKEIAALAGLCPFTRQSGQWRGKSFIAGGRASVRAALFMAAMVAARFNPLLKTFYARLTAAGKPKKAALIAVARKLLTILNAILRDQKPWQPA

SEQ ID NO: 472373 - protein, 398 aa, unidentified
MKPVIGIDVAKGKSVVQCFLKRNRPVGRAETILHTPKGFERLKFLLTELEQQSGFKSQIILEPTGHYHRVLVQYLQREAFEVILVNPLQAQRARRTGLRKVKTDESDAWHLGDLYYQEENWLTHPIQKEAFTDLQFLTRQHEFVTSLYVQARLNMRSLIDQVIPGYENVFTDMFSKTSLNLLEACLSTQGIQEQGGNWYEIIAAATKASRSDAWMTKKVELMRAVCQMNPVTTMGFGLRQSLLAMLKVLRELQEQLMELEGVIYEVSQTIPQVQLLESIPGVGTKLATAIVAEIGDGSQFSHPKQVVAMAGLDPSVFSSGKFTASENKITKRGSKRLRRAAYLVVICGLRKGLNPRLRAYYDKKKSEGKPHKVAVIACANKVLHHVYAMLKKGQPFAL

SEQ ID NO: 472374 - protein, 435 aa, unidentified
MSYRIAGIDVHKKILAVVVSDVEVENEYQFERRMFGSSPDQLRSLAAWLVEQEVEEAVMESTAQYWKPVWEALEQYWKPLRQRREGASRRSGTLHLAQAQSNRGRRGRKRDFPDAERLLKRLVAQELTLSFVPNAEQRLWRTVTRRKYQLTRDRVRLQNQVESLLEEAHIKLSSLVSDLLGASARRMLKALAEGETNPAALAALADQKLRATPEQLCDALGACTDLKPVYRRLLKMALEQLQFLEQQIGQLDQELASLLHPHQDAVQRLAEVPGLGVDSAQQIIAEVGSTAATFPSEKQLSSWVGACPGDDESAGVNYSHRSPKGNRHMRRILNQSANAAVKAKGTIFEIVYRRTVPRLGHQQTIGAIAHRQCRLIWLILHQGARYEERGPAVTKQSKQRRTAKMIRQLRSLGYRIEPPNPQHPSPAQGQCFSTL

SEQ ID NO: 472375 - protein, 340 aa, unidentified
MQVIMIGLDIAKSVFQIHGEDASGKVVLVRRLGREATEAFFKKQPPAIVGIEACGSAHHWGRLLESMGHTVQLIPAAYVRPFVKRNKTDARDAEAICAAMRRPSMRFVPVKTVAQQAARGLETVRDLLVRQRTQLTNMVRGMLAEFGIVAARTLTGFAALRARIEANDAAIPEPLRVVFESVIEHWESLDKRVKSLEETIVARVKADATMRRLTTVPGIGPLSAHAIVAAIGDGRRFGSARDFAAWVGLTPRQHESGNKRHSGKISRQGDVGLRRLLTLGASAVMRQARVKPERASNWVSGILARRPVKVAVVAQAAKTARIAWAILRSGENFRTAGTPA

SEQ ID NO: 472376 - protein, 341 aa, unidentified
MKQATTIGLDIAKHVFQVHGADGAGHVLFRKRITRVKLLGFLAAQAPCVVAMEACAGAHYWAREIGKLGHHVRLIAPAYVKPFIKRQKNDAADAEAICEAAQRPSMRFVPVKTEEQQANGIVFRARDLLVRQRTQCVNALRGHLMEYGYVFPKGITHVETLAAVVEDLQSSLPDRVRVILQLLVDTFTALEAQITALDAEINQRSKSDPTARRLMTIPGVGPITSTAITALVPAAEGFPAGRDFAAWLGLTPLQKSTGGKQKLGAVSKRGERTIRRLLIIGASAVVQQASRRGAPKGSWLAQMLARKPKMLVTVALANKMARIIWALLVKGGTYRTPAAAA

SEQ ID NO: 472377 - protein, 407 aa, unidentified
MVDEGSVTLSAHAGFDIAKDFHWLAITDDRGRQLCSRRVDNDPEAIDQAISDLKAVAAEHGDVTVGVDVMGGVAALVTAMLLAAGLRVVHVPGLAVNRARRGTRGGENKSDPRDAKVIAEQVMLRDDLRAVQMPDEISVELRLLVGHRTVLVKEATARINRLRDLLASIHPGLEKVTDPTNKSSLILLARYVTPSEIRRAGASRIADYLRKRGVKRPTAEALAQAAVTSARAQSTAVAGERRTAELIRELAGDLLAGKNRLLALQAEIEELVGVHPDGALIRSLPGMGATLTAELIAAVGDIRRFSSGDALAAASGLAPVLTQSGKIRYSRSATGGDKALKRIFYQSAFCAMPNHPPSRAFYDRKRAEGKRHHQALIALARRRVNVLYAILRDRRPYQDRPQLSLVA

SEQ ID NO: 472378 - protein, 395 aa, unidentified
MFIVGIDIAKRSHEAIIIAEDGQVVRKAFSFRNNCTGYNLLLEQVRRLTLVKSQIVFAMESTAHYWLALYARLLKDGYTVMVLNPIQSHSLRELYIRKAKTDARDSLIIADLVRFGRCKASNVPQDKILALRELCRSRAYLVDMAADLKRKLIALLDRIFPEYESLFDSVFSKASIAVLRKYSTPQKVKNANLRKLTDILMESSNGHFGEWKAHQLKEAACSSFGIDDSGGVYSMLLGMFLEQILSLTAQADSLEKQISVFFQEFNNPLTSIPGVGTVLAATILSEIGDITRFSSADKLLAYAGLDPSVKQSGEFKSNQNRMSKRGSPYLRRAIWLASTVAVHRDPMFQTYYEKKISEGLHYMNVIGHVSRKMTAVIFAVLRDGQPYQPILQSAG

SEQ ID NO: 472379 - protein, 395 aa, unidentified
MKTDDRVAKVGLDGHRTFSTATARDAEGMVVWRKRLEHADRRPLREELRTWPKGTPVVLEGTFGWGWMSDELSAAGLEPHLASSKKVAAWRDARGLAKSNRTDADLLSELWSQQPRWWEVWLAPPEVRSQREWLRYRMTLVRLQTGLKNRIHAVLHRHGIVHGESDLFGASGRRFLNLLIAPNDATLPESARAMLKGYLQLLDQLRRQIANVTREIRGQITRTPAGERLRTMPGIDYILGYTILAEVGRIERFRSAKDLAAYSLLAPRAYDSGDDDGEAPKGRHVGHAGRRTLKWAWIEAAHGAVRKGGRFREIFDRRTNGGKRDRNRGYIAVGHELCRIAYILWKKEIDYTETPPPRPGRGKRRRGHRRAMNVTPGRSRPGTGQPEDPMVAVLT

SEQ ID NO: 472380 - protein, 318 aa, unidentified
MVTYVGVDVAKSTLEVAALSADGEILRVQFGNCENAHQALVTWLGKYDLCHVVCEATGSYHQRLVKHLQACSVRVSVVNPAQARDYAKSQRRRNKTDGVDALLLAQYGRERKPEQAPAPVGVQQSLARELEALSQDLTRLKNRLEAAEAGVTHSQVTTSLKRRIRALEEEKQALEDKLKGDLEQDKPQELRLLESIPGIGTRTACLLLAELGDPLRFSTARSLVAYAGLTPERCESGSSLHKQSHISRLGSAHLRRLLYMPALSGLRYNPLLKAFFERLVARGKARKAALVACMAKLLRIAYGVLRSRRPFDPAHSRT

SEQ ID NO: 472381 - protein, 315 aa, unidentified
MEAMIERCAGIDVHQKTVVACVLYGSLDKRPKKEIKTFSTTTRDLLSLNDWLASFQVTDVVMESTGVYWKPIWNILESDFHLVLANAKHVKNVPGRKTDVKDAEWLAKLLRSGLIESNFVPPEDIRDLRDLTRYRKKLIHTRTSERNRIHKVLQDANIKLTSYLEDIFGVTGRRILEALINGQKINLQDLKQMVDPRVKASIKNIAESLNGNVRRHHRDLLELHWDHMNYLEQQIDLIEKQIDQLLTPYRTQAELLETIPGVNKTSVATFIAEMGVDMSVFPSAKHLASWAGVCPGNYESAGKKKRVKSLTEIKR

SEQ ID NO: 472382 - protein, 310 aa, unidentified
MDAVFVGIDVSKDRLDVHVEPSGEAFAVARNGEGLAALNERLKPLGTTTVAVEATGGFETVVAASLAGAGLPVAVVNPAQVRAFAQALGKRAKTDPIDAAVIARFAAATRPAIRPLPDEQTQALADLVARRRQIVQMIVAERQRERRATARRLQRSIERLLAALQKELNEIDAALDEAVRGSPAWRQNEDLLRSVPGVGQIISRTLLAELPELGTLDRRQIAALAGLAPWTRQSGKWKGKSFIGGGRASVRAVLFIGALTTSRSNPVLKAFRQHLIEAGKPKIVAAIAVARKLLTILNAIIRDQKPWQPA

SEQ ID NO: 472383 - protein, 346 aa, unidentified
MKKIFIGIDFSKEKFDATLIKAEGLKECAPSAHEVFDNKTSGFRRLVKWVKAQSEGFPIDSWLFCGENTGGYSIGLSNYLYASAYDMWLECAYKIKHSVGLQRVKNDKADSRAIAEYAMRNHDKMIPYKPQSASLTCLREIFLYRHSLVRQRVSLQVRRDGKRLTQEKSDVRAFMSFTSKHLITEVNKAIAKCDQKIKDIIAADDELREIFDIITSMPGIGIQNATCLMVYTDNFQKFDMNARKIGCYYGIAPFGRQSGTSVNSRPQVSPFANRMIKSLLSQAALAAIRFDMNVYNYYQRLKERGKHPLLIHNNIKNKMLHALVAMVRDRVKYNPDYVYRTNKEIA

SEQ ID NO: 472384 - protein, 354 aa, unidentified
MNSVRYVGMDVHRDTISVAVLDESGRLMMQSVLATRAGAILDFIHGVRGTLHVTFEEGTHSAWLYDVLVRRVAKLVVCNPRKNALMKSGSKSDAIDARKLAELLRAGMLSPVYHGETSALEVQQVARSYSQLTEDTTRVMARLKAVFRGQAVSCAGKKLYGKRHRGEYLAQLGGGLRRRAEHLYQELDALQPLRHEVRRELIVECRKHAAARWLQSVPFLGPIRAALLIGRVQTPHRFRTKRQFWTYCGLGLETRDSGQYRMVNGQVERRRRPVLIRGLNWNHNHAMKNLFKSTATAASVREGVWREFYLGLLDKGMRPEMARLTLARKIAAVTLKIWKKGETFDAEHLKLQAA

SEQ ID NO: 472385 - protein, 377 aa, unidentified
MSKIRFVGLDVHAETIAVAVAEPGGELRSVGVIPNRLESIRKLVGKLGPVQDLKVCYEAGPTGYVLYWQLTQLGVACEVVAPTLVPTKAGDRVKTDRRDAEKLARCYRGGELTAVWIPDAAHEALRDLVRAREAAKKDQLRARHRLGKFLLRHGQRPTGAGTAWTKKYLEWIKTHVRFEQPALEATLSYYLHEVEHMAERILHLEKAIDEAVAQASPDIRAVIEALQALRGVAQMTAVTVVCELGSLARFPSPRQLMGYSGLVSREHSSGNRIQRGAITKTGNAHLRRVLVEASWAYQHRPNVTGFLLRRQKSLALSDEVKRIAWKAQYRLHKRYQAFTARGKNKNQIVTALGRELLGFVWAIAVHTETQMKSRQAT

SEQ ID NO: 472386 - protein, 449 aa, unidentified
MEQPQEVEDEEYERVYQRVAAVDVAKASGVVCTRVPDEDRPGRRKMHVWTVTATMGAVTELGDHLRCEGIEVVTLESTSDYWRIWYVVLEAAGLTVQLVNARAVKNVPGRAKTDKKDAAWLAKLTERGMLRPSFVPPCDIRRLRDYTRLRAGLVHDRTRQWARLEKLLERALIKISAVASTLDTQSVRAMLEALIAGQRNPTVLADLAIGRMRAKRKELAEALDGRFEDHHAELARILLDQIDALTRQVNALDERISELIAQIPAAWGVDADGTTGPEAGRGPDAAVLPAVARLDEITGCGITAAAAIIAEIGLDMTVFGTPGRLVSWAKRCPQTRQSGQKAGAGKAAKGNPWLNGILGEIAASASRTDTFLGERYRRLARRRGKRKALAAIARSILVIIFHLLAGPAARFRDLGPGYYDNRISRERKINNHVRQLQALGLNVTIEEAA

SEQ ID NO: 472387 - protein, 340 aa, unidentified
MDITTLGIDIAKSVFQLHGIDADGAVVVQKKLRRGAVLNFLGNVGPCLIGMEACATSHYWAREIAALGHEVRLIPPAYVKPYVKRQKNDAADAEAICEAVTRPNMRFVPIKTEEQQSVLVLHRARDLLMRQRTMILNAIRGHLAEFGIIAAQGPRQVMGMIARLRDDGDASLPEIARSALLALGAHLEALAGEIRALERQLIVWHRADPTSQRLETIPGVGLITATALAASVSDPSVFKSGREFAAFLGLVPRQNSSGGKDRLGRISKMGDRYLRKLLVVGATSVIRRAGSNPTKTGAWVRSLMERKPARVVTVAMANKTARIAWAVMTRGEAYRASPIA

SEQ ID NO: 472388 - protein, 400 aa, unidentified
MRAVFGIDVSKTSSEVAILVNGEKVHGYTILNDAIGFNRLLSDLKTVHNPEIIFEATGVYSRRLQAFLEEYSYAYTRLNPLEAKKQLDSLRVRKTDKIDAEKLAKSQLVHNRKPTYVQEEVYQHLRDLSRFYQNMTEDLVRTKNRLHKVLQVTFPELENLLSTPTGGQYWNLVMAFPCKEFVLSLSQSNLCEIIRQSTSKRISEKRVTYLVDKLTKLANQSYCAVKKTSPMLEEVRYYAQELLRLSERRQVVLSDMVALAQPLPEYDILRSIPGIAETTATSIIGELGNIRRFQSTNQINAFIGIDLKHYESGNFLAKEHITKRGNPYARKILFKCIHNIASASHTNPCHIADFYEKRKRQSTIASTKPHTIASIHRLIRTMYYLITHNKLYDYSLTQNR

SEQ ID NO: 472389 - protein, 332 aa, unidentified
MSDSNGSPVFVGADVSKERLDIHRSGGHEPLSLTNDSRGIRRLIGALRRSPPGLIVVEATGGYERPLVHGLVDAGLPVVRVNPLRVRRFAQSRGILAKTDRIDAAVLADFARLNADRLRPLQPIGDNARMLHELTARRRQLVEQCVANKSQREHAMFKSVRQSVDRTIKHLCREIQAIEADIQQIIDRDERLQSKQRKLLTVTGIGPRVSRILVSELPELGELDRRKIAALVGVAPFNDDSGSHNGPRHISGGRATVRAALYMATLVAIRHDPVIQNYYEHLLSNGKPKKVAIVACMRKRLNYLTSILSTPAAERNEAGVWGQSPRQHNKKS

SEQ ID NO: 472390 - protein, 405 aa, unidentified
MGIYVGIDWAEAHHDICVLDETGTVLTKRRIAEGLEGVGQLHALVADHAAEPNQVVIGIETDRGLLVGALLAAGYQVYAINPLAASRYRERHVTSGAKSDPGDAKVLADLVRTDRHNHRPVAGDSELAASLQVLARAHQNLIWSRQRLVNQLRNNLREYYPAALAAFGTELAHPVALGVLDAAPTPARGRTLSQSKLAAILRRAGRERGVAEKAAAIQAQLRAPQLAAPALIGEAYGQSVASTVSILREFNDQLASLEAEVGPSFEKHPDAEIYRSLPGLGIVLGARVLSEFGDDRTRFAHPKARKNYAGSSPITKASGKSRVVLARLARNRRLADACHWWAFCALTASAGARTYYHALRQRGKTHHQALRALANRLVGILHGCLDHRQTYREEIAWPRSLPVAA

SEQ ID NO: 472391 - protein, 412 aa, unidentified
METTAELPAPRYHVGLDWASDHHDVCVLDAAGARVAEFRVAHTAAGLAEARQRLARLGPAAAVRVALERPSGLLVDTLVEAGYSVVPIHPNALKASRPRYTSAGAKSDALDAYILADLLRTDGHRFRSLVAPSDATRALRAAVRTRDDLVATRVQLANQLRALLETFWAGAAAIFADVDSPIALAFLGQYPGPDHAQHLGEQRLARFLTRHHYCGRRSAAELLARLRAAPAGHAGPLELEAKGQLVRMLVGVLTPLVAQLKDLDALVAAQLGAHPDAALVQSFPRTGTVNAAQILAELGDDRARFASAEQFAAEAGVAPVTRASGKHRDVTCRFACNKRLRLALSTWADNSRHAHAWAAAHYRRARARGCDHPHAIRVLARAWTRVLWRCWRDRKPYDPAQHRTAGPLLAAA

SEQ ID NO: 472392 - protein, 392 aa, unidentified
MEVQNETGRRLAKARLPEGISGIARLHGLVGRFLPEDSDPAEVMIGIETDRGPWVAALVASGYQVYAVNPLQAARARQGNGVSGAKSDAGDAHVLADLVRTHAHQLRTVAGDSKQAGAVKVLTRMHQTLIWDRTRQVQRLRSSLREFFPAALQAYEDLDSPDVLELLTKGPEPASAARLTRAQISAALKRAHRRDREVKTTAIMAALRTEHLAQPPVIAAAYGVTVRALAALIATCNEQITALEGPVEACFGRHPDAEIYLSQPGLGPVLGARVLAEFGDDPTRYDGARARKNYAGTSPITRASGKKKVVLARYVRNKRLTNALHQQAFSALSGSPGARAYYDALRDRDVGYNAALRQLGNRLVGILHGCLKTRTRYDEATAWNQHTQPAAA

SEQ ID NO: 472393 - protein, 349 aa, unidentified
MTTMALTTRVVIGGVDTHADVHVAAACDGLGSVLGTASFPTSAAGYRRLLGWLRGFGEPDRVGVEGTGSYGTGLARHLADQGVEVIEVHRPNRQVRRRHGKTDVVDAIAAARAVINGDATGKPKSHDGAVEALRALKIVHRSAHKSRTQALNQIRDLITTAPDDLRAELRALRRRELLATCASFRPGDRDDLVTVTKLALRGLARRVTDLNEEIALLDARRRRITTTIAPQLCAAHGVGPDTATGLLLAAGDNPERLRDERSWAALLASNPIEASSGKVVRHRLNRGGDRQGNSALWRIVIVRMNSDPRTKHYVERRTKEGLSKTEIIRCLKRYVARETYDLLPKHLRV

SEQ ID NO: 472394 - protein, 371 aa, unidentified
MRVIGMDVHVRNSFLCVTEADGQLLGRRRVGNSLLEIAEFLGGLGGGDQAARVVLESTTNSRAIHRMMLEYGKQAGVELQAQVLNARKLRIIAESVTKCDKLDAAVLNELARSNLKLPACYVPDDEVFALREHLRARYDLVRTRTPLNNRVHAVLHRRGILCPFKDVFTKAGRQWLAELKLDEAGRAILDRYLATIDQLQETIEQSTAGLTQLARSQRWCKSVALLRTMPGIGPITSLMILAELGDLDRFKSRASVSNYAGLVPVVRDSNNKHYSGGITRRGSSHLRGALTEAAWMAVSRVPHYASIFSRIADRRTRQTAIIAVARRMLEDAWTMLTREEVFRLMSVKTDKRIGEPAEGNASTVAEPSAAG

SEQ ID NO: 472395 - protein, 464 aa, unidentified
MTRKRTGTRKRCAQSKLDLKTVEIVHPDAAGIDVGGSEHWVAISPDRDAEPVRRFGSFTADLRDMARWLVEKGVKSVAMQSTGVYWMPVFEVLEQHGLEVFLVNARHTKNVPGRKSDVQECQWLLKLHAFGLLNNSFQPTDEIRIARTLWRQRGNLVADASGTIQRMQKALIEMNVQLSSVLSDLSGISGMSIIGAILEGERDPWKLAALVQPEVKAAPQAIAKSLEGNWRKELLFVLRQEVELYRTYQEKIHDCDLQLREHLKSFGSVVNLAAQPIGPKPKGKSGSKNAPQFDLRTELYRITGIDWSQVNGIDVLTAQTVIAECGADLSAFPSEKQFTSWLGLVPTNEQSGGKILKRRTRKVVNRAATAFRNAATTLLRSQSYLGAQYRRLRTRLGAPKAITAAARKLACLFYRLIKNGQQYVDKGTEYYETKYREQQVRILAKKAQRLGFQLVTPTPLAPAL

SEQ ID NO: 472396 - protein, 343 aa, unidentified
MEGYAGKQFVGIDLHRRRSVIVRTTSGGEVLESVRISNDVERLASVMTRAGEKPEVVLEATYGWYWAVDALQADGARVHLAHPLGVKAFEYRRVKNDVRAAADLADLLRLGRLPEAWIAPPASRELRELVRHRAKLVGLRSHCKAEVHAVLAKCGIQVLMSDLFGVAGTDLLERLDLPAAYAARIASLRRVMDALDFEIDLFAGLVRGRLATEPGYTAAQNIPGIGPTLAAVFVAEIGEITRFPSASKLTCWAGLTPKHHESDTHVHRGRITKQGSRLVRWAAIESVKSVPAHSPAGALRERVASRRGRNIGAVAAARRQLEFVYYALRDGHVRALERPPRAA

SEQ ID NO: 472397 - protein, 432 aa, unidentified
MATEQERQLAAGNAEPAFAAFVAIDWADKVHYFSLRAAGADKAERGSLENSPEAVELWACGLERRFGGRPVAVALEQRRGAVVAMLGKYSHLCVFPVHPLTLSKYREAWYPSRSKDDVKDADLLLEILVQHRDRLRRIDPDTPSMRLLQFQVENRRKLVDERTALSNRLTDVVKICFPQVLKWFDDVSSALVGDLLEKWPTLEALQKARTSALEKFLREHNCRDEEKNRWRLEEIRHAVSATHDEAVMGSAKAMVPAWVGQIAVLRRAIGALDKEIAQLAKRQEDWAIFQSLPGAGDALAPRLMAAMGTRRERFGSAGELQSFVGIAPVKEASGNSEWIHIRWACPKFQRQTFHEWAACSIPHCDWAKTFYDQLRARGKDHHVAVRALAFKWMRILYRCWVNRTPYKEDVYLASLAKRSLPMRHLASSVQMP

SEQ ID NO: 472398 - protein, 413 aa, unidentified
MGYKIAGIDIHKKVLMVVVMGVQAGAGAEKTERRRFGTTTPELAQLAAWLQARGVAEAVMESTAQYWKPVWYELEGKIATLHLAQAFSNRARHGRKNDFRDAERLVRRLVADELVLSFVPPPEQRNWRTMTRMQVHLTYDRGRLHNQVECLLEEMRIKLSSVLSDLFGATGLRILNALAKGETDPRKLAALADGRLKCTPPQLLAALTGKVQPMHQRLLGLYLERLKLIDTQIDELKHMIADALQAHQDAVQRLAEVPGFGADSAQQIIAEVGPEAATFPSAGEMASWVGTCPGQNESAEENHSGRSAKGNRYARRVLTEAANAAIKTKGSHWQVVFRRLLPRLDYPQAVWAVAHRLCRLVWKILHDKVRYIEQGVNRDPKARANRARTLARALRQLGYKVELTPLTPTPAQA

SEQ ID NO: 472399 - protein, 425 aa, unidentified
MKTTSANTNTHRTSGTLERVSPAAADYFIGIDYHKRYSICAVLDAAGQERELCRIDHAVPEGFGHLLQRWPRARVAFECSMNWHWLYELLEEHIAATAISLANPHKTRIIAEAQVKTDKVDARILAHLLRADLLCLVHIPEKQTRQRKEVLRQRCFFVRQRTAVRNRIHRLLGGQHDLAVPQCSDLFGKRGMKFLEELELAAPEDLLLKQQLEMLRGLQQRIKEDEAWLAGHMPAARGYAHVLSLPGMGPILSSLVVSEIDDISRFASAQKLSGYCGLCPSTSSSGGKTYQGRLLRACNKWLRWAFVEASWLAIGLDGYFGNLYRCKRALGKKPNTAIVCVARRMARITWQLLTQKRPYDKVHCKPKTSEQAGAPLPKTRSALPVSQKPAAPEPAPPTVPRKPATNKPAPKSEKRRQKRFPQPLR

SEQ ID NO: 472400 - protein, 374 aa, unidentified
MENTITYAAMDTHKKQHKIALQYPGREEIVECTVENTAEAIRKMVSKIRKQAPGDIEFCYEAGVCGFALKRRIEQLGGRCRVIAPSLVPRKPGQRVKTDRRDAQKLLAMFKAGLLTEVQAPEEPQEAARELTRLRETAKDNLKRIRHQLLKFLTRHGYVYRPGRHWTQRHRAWLRSLEFTEPLLKEVFESYFNEMIYCAGRLESLDKEVALLADSKDYKEVVGLLCCYHGIDTLTAITIITEIFEFGRFESPRHLMSYLGLTPSEESSGDKERKGAITKTGNKRIRRLLNEASWHYRHRYVPTAALKKRRKGQPKWAVEIADAAGRRLSKRHRYLIAKGKMPCKATIAVARELAGFLWFTMTQYQARKDRVEAA

SEQ ID NO: 472401 - protein, 424 aa, unidentified
MKVTYQTCCGVDVHKSFLVATIVKTTGGIEPSYQKKRFSTFNNSILEFKQWLLDNHCHDVCMESTGKYWVPVFNLLEDKINVVIANPKWVKAVKGNKDDTKDSKWIGDLFRLGLVKGSYIPCKKVRILREYTRYRYKLVSCRSSEKNRYQNALTVCNVALDSIVSDIFGKSSTSIIDYLLEQSGTSINHEEIASKLLRRLKSKEDAVIESVEGYQMTDAQKYRMRLVRAHMDYITAEINDVDKMIENMISSNPDFENAVQFLCTIPGVKRDSAITIISETGTDMSQFSSSKRLCCWAGLTPGSNESAGKKKSVRITRAGVYLKPALVQCAHAAVKSDKSPYYKKKYESLVKRRGKKRAIIAIARMILTAIYQMLSTGEQWNPSDLYKIDMPVALVEKQKAKAIRQAKKLLQREGTLPPDKPLAS

SEQ ID NO: 472402 - protein, 368 aa, unidentified
MTTNQISPTSSAEDSSTLGEVIKLGIDVHIEKYVVVMKIDGSAPQRAKRFTPEQFIVWAEELTAKCEQLHSCYEAGPFGYSLHRRLAKMGVTNHVIRPINWDEHGKNVKTDARDATQMVLCLDGYLRGNHRSFSTVRIPSETEEQRRSTTRQRQSLIKERKRLSAKARGHVMYYGGRLQGEWWKPRRWLGLSEQLEPHLLELLSALRTIMVVVEEQIVRLEKCLEEMTEVALPKGMGSVIFQQMEREVCDWSRFETRKQVGGYTGLCPSEDTSDKRRFQGSITKHGNPRLRHMLIECVWLLIQWNPDYRGIVKWRDKLLEAKLTKASKKKIVVAIARQFAVDWWRIRTGKVTPDQLGLTMKPLPAMSA

SEQ ID NO: 472403 - protein, 454 aa, unidentified
MRKPQVVPDEDHEVVYERVAAVDVAKASGVVCMRTPDPERPGRYVNRIWDNVPATRARIAELGRELLRCQVQMVTLESTSDYWRIWYYVLESTGLAVQLVSASQARNLKGRPKTDKLDAMWLARLTQWGMLRPSFVPPAAIRALRDFTRARQDLIRERTRCLQRLEKLLEDAMVKITSVVSDGMKAKSSVAMVQALIAGERDPRTIADLAKGPLRGKRDQLAEALDGMFDSHHGVIAQMLLDQVAFLDQRITAMEDQAIAALAQVQESWGVDATGETGPGCGTGPDSQVLAAAYRLAEIPGISLLLAIVIIAEIGLNMAAFPTPAHLVSWMGLCRSASQSGTRHGKGKQKKGNSYARAAAGQAAIGASGTATFLGERYGRIARRRGKAIAQAAVARSIMIIIWHLLNDPTARYRDLGPDWHASHTSRDKRIRTHLRGLQALGLTVTITADEQAA

SEQ ID NO: 472404 - protein, 412 aa, unidentified
MVTELGRAIGLDVHRDFCEIAVCEHGKVRSAGRVASTPEALQALAESLLPSDTVAMEVTGGAWAIVRILEPHVKQVIVVSPGDTGITQARAKTDPLDARKLAKLLWAGELEAVWPPDELTRLLRRRLARREQLVRARSRSKNEIHAVLMRCLIGKPSVSDLFGVAGRKWLRGLELPVEEAETVEACMRHIEFLDAEIAEVERVVARYGMSCSEIRRLMSVPGVNVICAATFIAQVGEVRRFKTSRELVGYLGLDPRVRQSGSSPARSGRISKRGSGSVRWALVEAAWSVVHQPGPMRAFYERIRARRGHQVAVVAVARKLAVLFWCMLTREEQYAHQQPSLTAKKMRLLEIQSGTPTLKGKPTGVWATREKMREAEKALALQAEASYVRMVRDWQATAPGRGVGASVTPGRA

SEQ ID NO: 472405 - protein, 412 aa, unidentified
MSLFVGDDWAEDHHDVEVQDATGKRLGKARLPEGVAGIAGLHALIGKFADPDDPAGAGQVLVGIETDRGPWVAALITAGYQVFAINPMQVARYRERHTTSGAKSDAGDAHALADMVRTDAHQLRPVAGDSDLSEGIKVVARAHQSMIWDRQRHVLRLRSALREFFPAALEAFDDLNAADTLDLLAAAPDPDTAAGLSRQRIAAALTRARRRDVAGKAETIQAVLRAEALRQPAALAGAYAATVRSLVAVIGVLNTEIVVLQGQVEAHFGRHPAVEIYRSQPGLGEILGARALGEFGDDPHRYTDARARKNYAGNSPITRASGKKKIVLARYARNDRLADALHQQAFCALRASPGARAYYDTLRARGTGHHAALRQLSNRLVGILHGCLKTGRLYDEHIAWAHHNHQDQQAAA

SEQ ID NO: 472406 - protein, 325 aa, unidentified
MSSHEIVGIDVAARTLVAIGDEVVLQPAYANTPEGRRALVTALGRSKRPVRVVLEATGIYFLDLACELAAAGIEVMVLNPKAAHHFAEAILQRRKDDPVDAAMLREYGRRMAFVRWTPPRPELFAVRALAREAQAQTKAVTAAKNRLHALTAATLTPARLIRALERQIRASEALIDQLIAAARELIAGDGELQRLFERTDSVPGFAAKGAVMVMAELVILPPMGARQWVAQAGLDVREERSGTSLARKPRISRRGNKRLRQALFFPALTAARCCPEAGAFVDRLVARGKTKLQAIIALMRKLLHALHALWRNNEDFNAAKLFAKA

SEQ ID NO: 472407 - protein, 341 aa, unidentified
MNAIYYIGLDIHKKTIAYCIKRIDGTLVHQGTVSAERKALQKWLAELPGPWYGAMEATIFTGWVYDFLKPHAVELKVAHPAMLKAITAAKKKNDRADAEKIADLLRVNLLPECHMMPEELRELRRVLRYRNMIVRTAVKMKNKMSGLLMEVGAIYDKKKLHGKKYFSALLERVEDVPESVIGLLKLSRNGFEMFDDIQKKLVSALRKNKLIRERVERLMSIPGVGELMALTWVLEIGDVTRFSSSRQVISYCGLCSGQHESAGKEQRGPISKQRNKHLQTKLIEAAKLAPHWNEQLALLHEKESARGNKNRATLVVARKLVEFMLAVDRRETDFELLKEAA

SEQ ID NO: 472408 - protein, 364 aa, unidentified
MDNITHIGLDVHKETIAVATLYPGSTLCEERVIPNTPEAVRKLVRRPGDPAQLRACYEAGPTGYDTHRLLSSLGASCEVIAPALVPKKAGVRVKTDRSDARHLARLHRAGELTAIRVPTPAEEALRELIRAREDLKIDRRIARQRLRSFLLRHGRRYPQGAGRWSSVFEAWARSQVFAEPAAQVAFLHLLAAHSVRTAQLAAIDREISAAAELPELAPAVARLRSFRGIDTLSAVTLLAEVGDFRRFGSAASFMAFTGLVPSEHSSGLSVRHGSITKTGNAHLRRILVEAAWSYRHRPYVGQALAQRLEGQPPEVIAYAWAAQLRLCGKFRKLALTKGPNKAVVAVARELSGFVWGLMTDKIQV

SEQ ID NO: 472409 - protein, 309 aa, unidentified
MTTSSYVGIDVSKDKLDVAVLGEKQAWQVENTKEGIQKLVQQMQKACPELIVVEATGGYQRSAVEALFHAGLCVAVVNPARVRQFARACGLLAKTDKLDAFVLAEFGRKMQPKRYEGKSEAEKQLSALLVRRKQLEEMLKAEQNRLRTISPSLRGSVERIIAILKEEKKRLDEQIRELMNEQKAWQEQREILSSAPGVGMVTTATLLAELPELGKLDRKKIAALVGVAPMNYDSGRKRGYRKTKGGRGDVRSVLYMSTLVATRHNPLIQTQYQQLLKRGKLKKVALTACMRKFLTILNAMARDQQPFRG

SEQ ID NO: 472410 - protein, 312 aa, unidentified
MYYIGIDVSKKDLAVFDGKKDLIFINQEGLKSFKKYLKKKVNFSDLVIIFEPTGIYSLYLKEFCAENSIKAYIVNPKKSHNFTRALGKRSKTDKIDARTLYQFHKLIDAKDIKVPQIDQEAKALASYLVSYEFALKQRVSLSHHLESLRDKRLIDLMKKDLKRAKKLEDKIFNDIKEYLGKNQNLKEDYQRLSTIPGIGEKAAIALLTLFKTYQGTNRAQITALAGLDPVKRESGTSVKGKVKISKNGKGIYRKILYLPALCATVHHQKIRVFYQRLLAHHKPKKLAIIASMRKILLIAHAMYRDKTEYVTA

SEQ ID NO: 472411 - protein, 346 aa, unidentified
MTIVETRAITGGVDTHADVHVAAALDPVGGLLGVEEFPVSPAGYARLLGWLGGFGAVALVGIEGTGSYGAGLARHLASAGVRVVEVDRSDRQDRRRQGKSDPLDAVSAARAAQSGRARGAPKGRDGAVEAIRALMVAKRSAAGERTRTINQARALLLTGPDDLRARFAKHAPAALVTGIAALRPRPGAAAGYATRIALRELGRRAVFLDGQLERLDELIVPLVTARAPGLLAVYGVGPNTAALLLIAAGDHPGRLRSEAAWAHLCAAAPIPASSGKVTRHRLNPGGDRQANHALWRIVFTRMGSDPATRAYVERRTKEGKSKAEIIRCLKRYVARQVYPHLRPAGD

SEQ ID NO: 472412 - protein, 470 aa, unidentified
MADWVHAHYARVRSPYAAQDKPFASGFTNPYRNGGDIMLKINYMSTLFVGIDVSSKTNSVYAMDFEENKYLSTSFGNNQPGADELVNRIVACMQKHKHLDTLLIVLESTSVYSVHISNFLASSEVLMPYKPYVFCVNPKATANYRKSYIGMEKTDPTDAYLIADFGRVGRTKKLEPWRGGLFIALKRLTRHRMHLSECITREKTYMVSNLYLKFSELQLLEGDDKPFGNLYGATSSAILTEFLSPQEIINMPEEDLLAFLAQKSRNRISDLSKTSELLRKAARDSYRLDKCMYEPLSISLASSFNCIQAYQKEIRLIEQAIDKCIKGMNANALLILQSIPGIGPVWASGILSEIGDITAFHSSDALAKYAGLYWPKGDSGDFISEDNQMSKAGNPYLRYYLGEAANSVRKHIPEYADFYARKYAEVCKHQHKRALALTSRKLVRLVFGLLAKNQLYTGEKLDTEYNTWSN

SEQ ID NO: 472413 - protein, 454 aa, unidentified
MAKKRQPQVKVQRNVLEQINRNAAGIDIGAEEVWVAVPPERDEESVRVFPTFTADLMRLVEWLKACGIETVAMEATGVYWIPLFEILEAHGFAVCLVNARHLKNVSGRKSDVLDCQWIQQLHTYGLLTPSFRPPEEIVALRCLVRHREMLVQYRSAHIQHMQKALTQMNLRLTNVLSDISGVTGLKIIRAIVAGERDRYKLAEFRDERCKKSEAEIAKSLEGHYKREHLFALKQALELYDFYDRQLQACDAELEAMYQEFEPPTHALTPPPQPRTQKRRKNQAHFDLRQALYRLTGLDLTEIDGIDALTLQKVLSEIGTDMSKWPTVKHFTSWLHLCPNNKITGGKVKQRGVQPTQNRASTALRVAAASLKSSDSALGAYFRRMRARLGTPAAITATAHKLARIIYHLLKHRQPYQDFGADHYEQQYRDRVLRNLNRRAAKLGFRLEPLAQQVS

SEQ ID NO: 472414 - protein, 321 aa, unidentified
MAMPKTPIEAGVDTAKDELVIQGAPDTKPFAIPNTPKSIKAWLKTLPAGSALAIEATSTYHMEMAEQAHAAGFAVYVVDGFRLAKYRESIAVRAKTDAQDASLLARYLSNERSSLKVWTPPPSGHRQIQMLLRRRAKLVEVRGMLRESFSGDKMFAAELKKIERTLKRTELAIEKRLRKEVKDAGLNDQLRRVQQLPGVGFLTAVGLVMSFMRGEFANSDAFVAYLGMDVTVAQSGKWSGRGKLSKRGDSEVRRLLYNASMSGSRTATWKAFHAYHLGRGKKTTQAFVILARRLARLAFGLMRHETDWKPEIYTGGATLPS

SEQ ID NO: 472415 - protein, 347 aa, unidentified
MKVLIGVDPHKASVAVAAVDEAAGELLEHASFPQDRTGLRALERWAKRYPKRRWAMENARGLGRHLAGRLVAAGECVVDVPPKLSAKVRVLSSGNARKNDGLDALATALAASRNETLAAVDPEADSEVLRLLSERREDLVAERTRALNRLHGFLRDLVPGGVAGKLSADRAARILRSIRARGGASARLRRRLASEILRDVRTLDRKISDLNGRIEAEVEASGTTLTEIFGVGPILAATILGTVGDVSRFPTKAHFASYSGTAPVEASSGQVVRHRLSLAGNRKLNYALHMVATSQARSDAPGGTYYRKKMAEGKSSKEALRCLKRRVCDAVFRSLQADSQAPSRSAA

SEQ ID NO: 472416 - protein, 369 aa, unidentified
MSHITSTSWVAMDTAAEKIQVAIFRGSEATPSEEFEVSADSRGIGRLKKKLATEPGEVKCVYEAGPCGYGLYRSLKAAGYFCEVIAPSLIPRRPGERVKTNRLDAKRLGNYYRGGHLTPVRIPDEPQEALRDLLRARDDVRRNLLQARQRLNGCLLRHGYHFKDGNRWTRKHWAWIKAIQFSQEIVQMVVEEYVTAVETLMDQLNRFDQKIHEISQRPAYTRQVTAYSVLRGIQTLGAMTIIAEGGDLRQYAQARQFMGSIGIVPGEDSTGERQKRTPITKTGNAYLRRILIEAAWSYQRRTHAGATIRKRRQGQPETLLEIARRADHRLHGKFSKLQFRYNKKPAIANVAVARELAGFVWAIGQITEQ

SEQ ID NO: 472417 - protein, 431 aa, unidentified
MKKTTMAAKATTEPKFVAFVGIDWADQKHVWSLQAANSTQREQGELEHRPEVIEAWVSQLCRRFGPGPIAVAVEQVKGALVYMLRKYECLHLYPVPSTMSASMRKALYPSGAKDGPRDAELLLELLLLHRDKLRRLTPDNEATRLVQNLVEERRKLVDEKTAQWNRLIGYLKAYFPQMLEWFAKLDSKLVCDFLERWPSLEELQAVPAGEVKQFFHHRAGRHGELTGWRMKGMSQAMPAIGDRAVIEAKRTVVQVIAGLLRTLLEGIATLDCKIAEAAQAHPDFFIFQSLPGAGAALAPRLLAALGSQRDRYTSADEVQKYAGIAPVTETSGKKKWVHFRWAASKFLRQSFHEWAGHTIGHSIWARAYYQLQRERGKEHHAAIRSLAFKWIRIVFRCWQDRVAYDETRYLTVLAKRGSHLIPAFAAATGSK

SEQ ID NO: 472418 - protein, 342 aa, unidentified
MQVIIGVDPHKASHTAVAISTTEDELARKKVRATRTQVDQLLAWAEPFPTRLWAIEGADGMGYLLARQLVATGEHVLNVAATLAARTRLLGSGRSTKNDPNDALSVAVTALGTRDLRPVQPVGHSEVLRLLAKRNTDIGNQRTRLVCRMHALLLELAAGGIAKEINASDVDRSSPRSCPRRRPSSSATTSRSSSSPTSAASTISSRPPTSGSAPRSPHRARQSPTSSGSARSGRHAHRVTGDIRRFPNRDRYAAYNGTAPVEFSSGGRTVHRLSQRGNRNLNHALHMAVICQLRHPGSDGRVYFDRRLAEGRTKKEALRSLKRHVSNAVYRQLVADAARSRP

SEQ ID NO: 472419 - protein, 343 aa, unidentified
MKLHVLGIDLGKTVFHLVGLDSTGRVVIRKRCSRTQLLAFTANLQVQLIGMEACSGAHFLGRALREQGHEVRLMPAQYVKPYVQTNKSDYLDAEAIAEAVQRPRMRFVPIKTEEQLDLQALHRVRERWVMRRTAVVNQIRSLLLERGLTLPKGRSHLDEQLPRILEDAELHLSESFRVLLAQLQLELQQLAARIEEMDRVIQKSARENEACQRLTEIPGVGPVTATALIAAVGNASAFAKGRNLSAWMGIVPGEYSTGGKQKLLGISKRGNKYLRRLFVQGARSVLQQRHKQAPGLSHWLAQLLGHAHQNVVVVALANKLVRMAWAVLCKNERYRAPVFAGTT

SEQ ID NO: 472420 - protein, 319 aa, unidentified
MSTIINYVGIDMAKNDFYACLNDIEEPIKFNNDGKGIKSLLSHLKRHNFKKENTLLGVESTASYHLKLCINSTESGYKIKVINPLIVKKQNQTDLRRVKNDKKDSRLIRFCLIGGAGYLFDNNSEAMILKSLIRQRDSLAFAKLKFKRQQEDIRLKEKCLKQDISPVYTEIIDVLESKIDLLKTDLRTYRPKEQYLLESIPGVGPITAASFISEVGDINRFQKPEQLVAYAGIDPRVHQSGTSINGKGYISKRGNKILRTRLFNATSVAVLHDNIFKTFFKKKRDEGKPYRVALVATMRKMTHVIYAVWTRGTPFTKEA

SEQ ID NO: 472421 - protein, 426 aa, unidentified
MSVTQNEKIRQVTDTTMVIGVDIASEFHWARAFDWRLELGKTVKFENSAEGFNFFLRWVSELTVEQKKDSVMVGLEPTGHYWFTLAAHLQGGDFKLVLVNPYHVKRSKELDDGHPSKSDKKDPKTIAKLVLEGRYVYPYIPQGLYAELRVAMNCRWRIRKELASLQNQIQRWLKIYFPEHSKVFGRFTGAGSMALLHSAPFPSDLISLGVEGISGIWKQMKLRGIGRKRAQRIYEAAQTSVGCTTGMEAARMELQILLEDYDAKLQQYERVMQVVENLCSQIPAVAELLKIQGLGLVTVAGLFAEIGDIRRFESPRQIQKLAGLAITENSSGKHKGPTEISRRGRSRLRAILFRAAIPLLAKNREFQLLHRYYTTRQNNPLQKIQSVIAICCKLLRVFYALATKDCAYSPEKVLADIQRNQPLKAA

SEQ ID NO: 472422 - protein, 331 aa, unidentified
MNYSHFVGLDVGKKTFDASLMSADEKELSHKSFDNTPTGIQSLLDWIAGYHLSLSKLLFCAENMGSYVTELSVSSVSMGFSLALVCPLTIKKSIGLQRGKNDRIDAKRIANYAVLHYRKLELYKLPDKDLVRLRGWIIIRDNLVKQKVSSIKLLETFSWMAKLADVTESISFLEEQLKSIKERILEVEEDMEQLIAASTSLYTNYLLLRNIKGIGIINAIVLLCVTDNFQRFDNPRKFACYCGVAPFEHTSGISIRGKTQTSSLANKEVKVYLTRAAITAISWDPQMKAYYKRKIAEGKHKASVINAVRAKIIARSFAVIRRQTPFVTLAV

SEQ ID NO: 472423 - protein, 404 aa, unidentified
MIFVGIDWAEAHHDVCVLDETGTILTKRRIAEGLEGVGQLHALLADHAAESNQVVIGIETDRGLLVGALLAAGYQVYAINPLAASRYRDRHATSGAKSDPGDAKVLADLVRTDRHNHRPVAGDSELAASLQVLARAHQNLIWSRQRLVNQLRNNLREYYPAALAAFGTELAHPVALGVLDAAPTPAIGRTLSRAKLMAILRRAGRERGVEEKAAAIQTQLRAPQLAAPTLVAEAYGKSVASTVRILRDINAELASLETELAPSFEKHPDAEIYRSLPGLGIVLGARVLSEFGDDRTRFAHPKARKNYAGSSPITKASGTRRVVLARMARNRRLVDACHQWAFCALTRSAGARDYYRLLRQRGKTHHQALRALANRLVGILHGCLDHRQTYREDIAWPRSLPVAA

SEQ ID NO: 472424 - protein, 346 aa, unidentified
MMIIGCDFHPSWQQVSWLDTESGETGEGKLVQAAGDAERFYRQLPVPSLIGMEATGNSHWLVELLAEIGHELWVGDAAQIRASYVRQQKTDKRDAEHIRKLLVEGRFPRIWMPSSEVRDLRQLLLHRYKLVTIRARVKNELQHLCLNQGVQRKRKLWSKAGQQVLRELPLKPWAARRREDLLGLLAMLDQQIAPLDLAVKEEAQRDKMALLLQTQAGVGSVTALAYVLTMGDVSRFARGKQVASYLGLIPREHSSGGRQKLGAITKQGNRMLRMLLVEAAQIAVRYDPGLRKQYLHRCHSKPKAVAKVAAARKLAIRLYWMLRTEKPYPEVVRIESSPRVPLVGAS

SEQ ID NO: 472425 - protein, 392 aa, unidentified
MVVSVGIDVSKDKHDCFIVSSEGEVLADAFIIPNTMDGFHYLLQRIRHCTAPQDKIKVGLEATGHYSYNLLGFLLDNGLTTYVLNPLRTNLYRKSLSLRKTKIDRVDARTIASMLLSDAGLKPYTDTAYHNEELKSLTRYRFDKVKERAKLKSSIARLVCILFPELEKLVPSLHIASVYALLEEFPGAKQVANTHLTRLKALLETASNGHYKRDMALEIRNAAKNSIGSQMPAKSLELQHTIRLIRELDREIDEIEEQIQSIMDELHSPITTIPGLGFRMAAMILAEVGDFTRFDSPDKLLAYAGMSPSTYQSGQLKNCYPHMEKRGSRYLRYALYNATKYVCHWDPAFADYLAKKRAEGKHYNIAISHAAKKLVRLIFAMEKSRQPYCSAA

SEQ ID NO: 472426 - protein, 397 aa, unidentified
MKCPQGLHYRGSVAHSAVRRVCERQIQHKGGTNMISVHYVGMDVDKEKIVLARLAAGRTAEVQEHVIANTPSAVKKYFTALLAGAEVHASYEAGCFGFGLYRQLSAMGVTVVVAAPGLIPRKPSDHIKTDRRDARTLAMTLRAGQLTGIYVPTAQDESVRDYLRMYEDLRGDLRICKQRVLHFLLRRGIRYDQGGPWTVKHKNWLSSLEFSDPRDRKTLDMYLSTMQEIEGKCSEAAEEVEQIASQEPYRQQTKKLTAFKGIKTLIALSFVAEIGDFRRFPNARQFMAYLGLVPSERSSGNKRRQGAITKAGNSHLRRLLVEAAWHYRSYHPSSRVLTERRKGVDPQILTYANRAGRRLSRKYMHLLLRGKRSQVAVTAVSRELAGFLWGAMTGQVA

SEQ ID NO: 472427 - protein, 309 aa, unidentified
MLSSVGIDTAKATLEICIKPQKIRFEVANNSAGFEALLERLKDFKISRVLIEATGGYEKEVLIALRSAGFETICINPARARKFADAMGKKAKTDKIDAEVLADFAAHLSAPQGQPISPEREELRELVKQRAQFVQSRDDYKRRRLQCRSAMVMAHFDEHIEQLKVLIKRLDEEIDQAMVQLDDTRARQLLAVSGIGRVTAANLLASLPELGQLDRRQIAALVGVAPYNNDSGSHRGHRQIWGGRAHVRRVLYMSSWIIIRHNTEFKARYEALRERGKCAKVALVACMRVLIVRLNAMLRDNTPWRVQTA

SEQ ID NO: 472428 - protein, 451 aa, unidentified
MQKRNVKMEVVNPNAAGIDVGSRSHFAAVGQGSGDIKEFGVYNEDLQQLTKWFADNEIKTVAMESTSTYWQHLYITLQAAGFQVILCNGKFTKNIKGKKTDVKDAQWIQKLHTIGLLTGSFLPDEATEQLRTYCRHRTNLLQQAADTIRKMRKYLRLLNLRLDVVVKDIAGLRGLTIINAICKGEKSPEKLAGLKHGNCKKSEEEIAKALQSNGRKDYLFGLEQEYQLYVNFQEKIKECDIEIEKLLNEQINSDDEKRQHVIDKKVYKKVNKNTPKNLDINLLSYQYFGGVDLLAIEGVSHATVLALMSEVGNGIHKFETAKQFASWLRLAPNNRISGGKMLSSRIPKGSNRLKIALRNGANAIGNLKDTALSNFFKRIAFRKGRPAAISATARKLAVIIWNMIVKNIPYKPVTDYEFLDQKRKRKVQEMKKLIHKFDIKTDELGLQLSGL

SEQ ID NO: 472429 - protein, 360 aa, unidentified
MKIIGCDFHPSFQQIAMLDTVTGELVERKLQHPEQATRFYESLAGEEVLVGLESMGNTLWFERVLNRLGFTLWIGDALAIRVSNPRKQKTDKRDAGHILRLLQEGRFPRIWVPSLAERDLRQLLKHRHTLVQMRTRIKNQLQHIALNQGWQKKRRLWTQSGQEWLRQLELEPWTSRRRDDLLQMLEEMERRITQLNATVEQAAAQRPEAVLLMSHPGVGPILALATVLTLGDVSRFPRGKHVASYLGLIPKEASSGQRRRLGAISKQGNSFMRFLLVQAGMSAARGDAGLSRVYQRLLAQRKHHGVAKVAVARRLVVRLYWMLREKKQYPAVVRMQGSPSHPVVAVMTVALNGRSASQPK

SEQ ID NO: 472430 - protein, 339 aa, unidentified
MTSMVVGVDTHKASHSAALLNELGVVQGGLEVAASAAGYRQLLGWARSQSKARVWVVEGTGSYGAGLAKYLSEQDEVVYEGDHPKRSWRGPAGKSDQLDAIWVAKEALSGQRRSLPRARGERELLRVLLTARNGAVEAEKQGLNQLYALVVSAPEPLRQRLGKLRAAALVKACLGLRPHGDQEAAVTAETLRSVARRVSALATEAATYEHQIGKLVAARAPELLALKGVGPLSAAQFLVSWSHAGRLRDHNAFAKLAGVAPLPASSGRIQRHRLNRLGDRQLNRALHLVAITRSRCDAQTQAYIARRTSEGKSSREIRRCLKRYLARRVFKLLERLDKT

SEQ ID NO: 472431 - protein, 338 aa, unidentified
MTTKINMLAIDLAKGSFQVCAVGPEGTVLYNRALSRTRLARLLAEQPACIVAMEACATSHHWGRVAQRHGHEVRLVPAAYVKPFVKRQKNDRADAEAIAEAALRPTMRFVAVKSAETQGRAVAFRTHQCLVRQRTQLINALRGHLAEFGLVAPKGPASLKVLENALEDEATDLPSPVREMGTIYLDQIARLTEVIEHLADELEAASKTDAQLRRLCTIPGIGPVTAGAVSAFAPALDTFNSGRNFAAWLGLVPRQRSTGGKTKLGSVSKMGQTDIRRLLIVGAMSVIRWVVRKGGSSNRWLAALVARKPRMVAAVALANKMARMIWAMTTKQENYRMA

SEQ ID NO: 472432 - protein, 346 aa, unidentified
MTIVEDTRVITGGVDTHADMHVAAALDPVGGLLGVREFPATATGYADLLSWLSGFGTVALAGVEGTGSYGAGLARYLAAAGIRVVEVDRADRQDRHRQGKSDPLDAVSAARAAQSGRAAGAPKGRDGAVEAIRALMVAKRSARAERTQAINQARALLVTGPDDLRARFAGLTAAALAEAIAALRPRPGDAAEYAVRIALRELGRRVEFLDAQLDRLDDLIIPLVTARAPGLLSLYGVGPDTAAMLLVAAGDHPGRLRSEAAWAHLCGVAPIPASSGKVRRHRLNPGGNREANHALWRIVITRMSAHPATRAYVERRTKEGLSKKEIIRCLKRYVAREVYHHLRTGG

SEQ ID NO: 472433 - protein, 549 aa, unidentified
MKLCLSIVEEKSKLLCAAVVGREGRLIIGAFCPSRSLVSGVSVFNIGDVFILQSGYDPVKEMAAVSAPLRPQLLAQSPVDKTRKRDQIISHLQKQSQRIAQNSISNLPQHLQHININAAGIDIGSDRHLVAVPEGRDTVSVREFATFTADLHAIADWLEQCGITTVAMESTGVYWIPLYEILEQRGFEVYLVDARRVKNVSGRKSDVLDCQWVQELHTYGLLAKAFRPAEEVCVLRGYMRQKEMLVQTAAMHIQHMQKALQQMNLLLHNVVSDITGVTGMKILKAIISGERNPQVLAKERDPRCRNSTETIAKSLVGNYRPEHLFALRQAVELYEIYQTKIADCEAAIVAYLEQQEHHTEDEPPAPQKAVSARDRMRGGSDIRAKLYKMTGVDLFAVPGLAADTLLTLASEVGLNTSPWQSEKNFTSWLALCPGTKRSGRRVLSSKTRPSANRAAQAFRMAAATQARANTALGAFYRRIRARSGGREAITATAHKIARIFYAMLKNGTEYVEIGQAAYEQKFKERRLRSLKQQATAFGYQLTPIAAGSF

SEQ ID NO: 472434 - protein, 408 aa, unidentified
MQRYYLGVDWADEFHQVWVSDTEGKKVAEITIEQSVKGLSEFGRWLHERKAEGIELWASIEKPHGRIVDFLLDHGVVVYPVNPKALDRARDRFRMSQSKSDSFDAYVLAEFLRTDHVHLRALQPDSEQAQELKMLTRDHHRLGRHKTRLLNQIEVTLKEYYPRPLEVFSDLESKIALDFLTQYPTPRALSELTRRKWNRFAKREHHLGEERCKELWEKLSQPQLKIPEHVVRAKAQLLLVLVIQLKSLAEAVKNYSDKVESFFASMPAAEFVKTLPGGKSGTTVPMLWAELGDAKNRWESFRHLQAEAGGVPVTKASGKSRVVQFRFACNKLLRYASYWFSFNSLNRCEWANKYYRDQRAKGHSHHQALRALGAKWLKIIFVMWRDHKPYDENFHLANIARQQMRQAA

SEQ ID NO: 472435 - protein, 391 aa, unidentified
MIFVGIDVAKDTHYAAVSDDSGAVLVKPFAFQNNAEGFCLLLKKLSEFDRSKLLIGLESTGIYSENLICFLYESGFRLAVINPIQTATLRKTAIRKTKTDKVDTMLIIKSLMVNSYRLYSQRDADSLKLKTLCRFRQNLKKSKARLKIQLAGYVNLVFPEFGKFFKSGIHIAASYALLKKYSSPKEIAALRTSTLCTLLSKASHGRFGKDTAEALKSLALSSVGVKNPYISIQIAQTIAQIELLEQQINDLNSAIEEAMESINSVLMTVPGIGAVNAACILGEIGDIKRFSKPCKLLAYAGLDPTVRQSGQFTAKSTRMSKRGSALLRFALINSAWQLTLNDTTFKAYYDLKRSQGLNHYGALGHVAHKLTRVIFKLLTSDTPFIPAKLVA

SEQ ID NO: 472436 - protein, 431 aa, unidentified
MQIVYPNCAGIDVHKKFVTVCRLTVNEPNQTQAEVRTFSTMTADLEALSVWLSEGGVTHVAMESTGVYWQPVHNILEERFEVFLVNAQSVKRMPGRKTDVKDAEWIATLMQHGLLQRSFIPPRQQRELRDLTRYRQSLTEERGRVTNRLQKVLEGTNIKLSAVATDLQGVSAQAILRALLDGQTDPQALAEMARGRLRAKRNDLERALVGHITAHQRFLLSELLTHLDFVDEQIAQLEARTEEQLAQMPSFQEAITLLDTIPGVDRHLAITIVAEIGVEMGRFPSDRHITAWAGVAPGNNETGGKRRSGKARKGNKYLQRALVLAAHSAARTKHTYLRALYHRLASRRGKSRAAVAVGRTILQAAYHMIRRGQPYHELGNNYLDQLDRERTAKRLVKRLQALGFIVDVKEQETNVSGPPQVASSPPLPMAA

SEQ ID NO: 472437 - protein, 407 aa, unidentified
MGDQPTATDVDVFVGVDMAKEDHYAHAIGPDGNELYARTVRNDQADIEAAIDTASAAGRTVLVIDMTASSAHLLLATAAARQVPVAYVTGLQMRRAADLYAGSAKTDPRDAFILADYARRHVDRLAWLDIDDELLVRLRVLNGRDVDLAGDATRTINRCRDALVSISPALERVVGPKLGHGGVQDLMGRWATPTALRAAGKTRVRTLVSKRSPRLADKLTDQIWEALDAQTLTLPAEDTWGEVIADLAGDLTKIAARRDALKGDIEEAFLAHPLGKVLVTLCGFGPRTGARTLAEIGDPHRFATGGHLASYAALAPVNRQSGRTLDTATRQRRGNHRLKNALFLAAFVATQHDPDARAYYQRKRAEGKKHNAAVICVARRRCDLILAMLKNREPYRQPQPENLPQAA

SEQ ID NO: 472438 - protein, 355 aa, unidentified
MTIVANTFVYVIGADTHSRTHTLAVIDARTGARVDTSTFPTTPAGLSRAVAWIARRTGGLADVLVAIEGVGSYGARLARACQDAGYRVVESFPTPARQRRGLGKSDEIDAELIARSVLSVDTDKLRDPRQDAGTRAALRVLVAGRELLNSDRTRSINALTALLRTVDLGIDARRPLTKAQLVTIASWRHRQEDLATATARREAIRLARRITACDQDIADNRDEITALVTASGASGLLEQPGIGAINAAAIIVAWSHPGRVRSEAAFAVLAGVSPVPASSGNTTRHRLSRGGDRRLNRALSSIALTRMSHHPATRAYVERRRAQGRTTKEIRRSLKRYIARQLYRHLTAQNGLDRT

SEQ ID NO: 472439 - protein, 358 aa, unidentified
MTNLAEKLDFSGHTISIGLDVHLKSWTVCLYLGNQYLKTFSQSPPSAAGLSSFLSSNYPGAHYECAYESGFCGFWIQRSLAEYSIGCIAVNAADVPKTDKSTKNKTDKLDSRRIAQALQAGQLRGIYVPDGELEADRQLVRLNDRYSNDLTRTKNRIKGLIYLIGIETPERFEKANWSGAYIKWLKELECGQPSIRTVLDRQIFLLETIKGQKLAALKQIRQLMGRPRYSALASRLCSIPGIGLVTSAVLVTELVDMGRFKSFDQLNSFIGLCPMQHSSGEYDRRGKMTTRQNRRLRYMLVEAAWVAKRTDPALTLCYAKLLSKMSSKRAIIKITSKLLSRIRYVWMNHTDYVTGLVK

SEQ ID NO: 472440 - protein, 336 aa, unidentified
MTDLTLFIGLDVHKKTIAVAVVEGSAGAAVRFYGTVANTPDSLRTLCRKLSRSGQQLHFCYEAGPCGYGVQRQLTRLGYRCDVVAPALIPRKVGDKVKTDRRDAMMLAQTLRAGQLTAVWVPDEAHEAMRDLVRLRAQAVRDLRKTRQQLLSFLLRHGLISPYGHWTKMHRRWLGELVFAHPAQHLAHEEMLQRIERAEALCDRLRAAILELVPQWSLAPVVEAIQALRGVSLSVAATIVAEVGCFGRFESPRALMAYLGLNPSEHSSGATIRRGAITKTGNTLARTCLVEAAWTYRFPARVTQIIRNRLQGLPEPIRNVAEAAYYAQLEPTGIAA

SEQ ID NO: 472441 - protein, 352 aa, unidentified
MNTIDYVGVDYHTKFAVATRMNRDGDILATTKIDNTKDDIRAYLSSLPSGTKVALESTGNWYAFCEWAHDLPLDIVLSHPQKTRVIAESRIKTDAIDSKVLADLLRTNYLPQSYLAPPEVRDIRELIRFRTTIVRMKALFETKIYNAVYKNGEKIEATRSDGRKARVEISKMDLRPIYRDEIKSCLAICDYFKTQIKQYDEEVKRRANLDDDCKLLMTIPGISFFGALLITSELGDWRRFPSSRKLASYAGLVPSTYSSGGRTRHGAITKQGSKNLRFILLQAITHLARRDSRFGKMYTRIKIKHGSKTARIAVSRKLLCVIFAMLKSRQPFQVTKDRQHRSAAQSSGVTPR

SEQ ID NO: 472442 - protein, 409 aa, unidentified
MLKIVYPNCCGIDVHKTFVVAVIAITNNQGITEYHRKRFSTFTNGLTQLRDWLEYYSCFDVCMESTGKYWIPVFNILEEQTNVCLAHPKYVKAIRGKKTDKKDAQWIADLFKHDLVASSFIPPLKIRQLRDLFRYRMKLTQLQVGEKNRYQNCLTWSNLQIASVVSDVFGKSAQAIIKSILDNPQDKPNIEQLVHKRMKNKVQDLEIAMEGALTPEQAEKIRVIKAHYDALAICKEDLEQMIREMGQDYQHQVKLIQTVPGFKEDLSALRIISEIGCDMTVFDSAAKLCSWAGLVPANNESAGKKFSTRISKGGKYLKPFLVQVANAVVKSDKHPELRNKYLKLKKRRGHRKAIIAICRRLLVSVYQVLRKQEDYNPVLQGLTEIRNPDKTMSVQDAVRFAQQHGFNVA

SEQ ID NO: 472443 - protein, 350 aa, unidentified
MTMVGGLDVHRQQITFDYVDSDGLVRWGQIRPATRKTLRGWLAERCPDGDGEFALEGCTGWRYVCEELAAAGVVAHLGDPAEIAGLRGPKKRAKTDRADARLLRTLLLEGRFPESWIPPAHVVEMRTLGRLYCALMDERRAWQQRIHAQLFHQGCPPIKALLTEAGRGALAAAELSATGRQYVDTALRRIDELSTEIEPLRTQLISFARRQAGCQALQRQYGIGWLCAVIIWAEIGDARRFTSSDQLVRFAGMDVTVYSSDSKRSPGHLSRQGSPELRWAAFEAAKSAARRSSPDYGYYHKLAAKHYGHNGKNPTLAVERKILRRCYHRLRELGDGALAPPVAQAKEVAA

SEQ ID NO: 472444 - protein, 397 aa, unidentified
MDAAGRRLAAARLPEGVAGITRLHEMIGAQLGEDAGAGEDAGAGEVAIGIETDRGPWVSALVAAGYTVYAVNPLQAARYRERHGVSGAKSDKADAHTLADMVRTDAHQLRPVAADSPQAEAIKVVARAHKTLIWERTRHTLRLRYVLREYFPAALEAFDDLAAPDTLELLAKAPDPASAAKLNRSQIRAALKHARRRDIDMKTTRIQAALRSQQLGRAPVITAAYAATTRSIAAVLATLTEQINTLRGQVETHFGRHPDAEIILSQPGTGVLLGARVLAEFGDAPGRYADAKARKNYAGTSPITRQSGKRKITHARFVHNDRLVDALMSQAQSALLASPGARAYYDKQRARGLDHHAALRQLANRLVGILHGCLKTRTLYDEATAWSHHNQDQRRAA

SEQ ID NO: 472445 - protein, 396 aa, unidentified
MLYLAIDQHRKQLTVNLRNEAGDVILKRQVSTEWARVREFLEEVRNRSVPEGGFVAIVEVCGFNDWFLKLLADYGCKDIVLIQPEKRSKNKTDRRDANALGELLWTNRQRLLAGKKVQNVRQIVPPSPRDAEDRQLTALRQRVGRLRTRAINRVQHLLLKHNLQQECPTKGLQTQAAKRWLAKLPLGRIDRMELDQMLAQWQLLDQQLEELEAEIVPRQAESLTAPIIATIPGAGAYGSLALASRIGSIERFPSARSLANYFGLTPGCRNSGDATRRLGSITKEGSAIARFILAQMVLHVLRRDARMKEWFVRIKRRRGAKIARVAAMRRLATIIWHMLKQQQPYRPGGKREKGGGPEDACLLPDRRAFLEALQERARGGKQKGCPGLTTEAAARS

SEQ ID NO: 472446 - protein, 347 aa, unidentified
MKHYVGLDVSQKEVSICIVDGDGGVVSEGKVATDPSLILSWIDERLGTVERIVHESGPLSIWLTRELAALGAPVVCIDARAAHKALSARMNKSDRADAEALAQLARTGWYREVHIKSEASDRLRLLLGTRDRMISIRQDIEGQARGVLKTYGIRLGPVTQGRNRASFREQLRAAASGNPILEAVAASLIAVHEAACAERAMIEDKLLSIARGSDLAQRLMTVPGVGPIVALSFIATVDDASRFAKATDVGAYLGLTPRRYQSGEVDYSGRISKRGDSAMRALLYEAASSLITRVRRFSPLKSWAVRLAARKGFKKAAVATARKIAVVMLRLWRDQTTFAWTRKEMPA

SEQ ID NO: 472447 - protein, 408 aa, unidentified
MKTLHKRCAGLDVHKAEVVACVRLISKRKVEREVRRFPTTTQGLLALAEWLESAGCTDVAMEATGVYWKPVWHILEGRFALILANAAHVRNVPGRKSDVNDATWLGDLLAHGLIRSSFVPPPAIQELRDLTRTRRQLTREIVQHVQRIQAVLEEANIKLCSVITDIMGASGRRMLKAMIAGETDAEKLAALGHERLGCTRAELVEVLTGCVREHHRFLLGQHLRTIEQLEDSIAAFDARIEAALSPFHDIVERLEEVPGLAATSTETVIAEIGTDMSLFPTAGHLLSWAGFAPRLDESAGKHRSTRIRKGAPWLKPVLVQAAWGAARKKNSYFQAQFLRLKARHGAKKAAIAVAASILTTVYHMLRDGTCYQDLGPEYFTRRNPAQAAARLANRIRNLGYHVEIRAAA

SEQ ID NO: 472448 - protein, 338 aa, unidentified
MLDTETGEVVERRLEHENGEARAFYASLPRPVRVGIEATGYTQWFERLLQELRHELWVGDAAEIRARAVRKQKYDQRDAQHILGLMEQNNFPRIWMPSLSERDLRQLLIHRVRLVQWRTRIQNQLHAVAMGQGLCRKKKLWTTRGRQELESLPLDRWASRRRRELLELYDRLNQPIEELNQAVQREAHGNASAVRLMTHPGVGPMTSLAFVLTMGPASRFARGKKVASYLGLNPSENSSGGHRRTGAISKQGSSLLRWLLVEAGQTAARRDADLHRMYQRVKYRRGSQIAKVAVARKLAVRLYWMLRNQSDYAPGKSAAVPVPGSSGSAVMSGSASGR

SEQ ID NO: 472449 - protein, 351 aa, unidentified
MWIIGVDYHPSVQQIAFVNTDTGECGERRLNHSDGEAEKFYRELKAADCCVRVGMEATGHARWFERLLAELGFELWIGDPTKIKAKRVRKQKTDRLDAELLLQLLLEDRFPRVWVPSPENRDLRQLLWHRHRLVQMRTRIMNQLQAVAMNEGVRRKQALWSKSGRAQLESLPLAPWAARRRHDLLELLDRLSPTIEELSAVVEQEAKQRPEVLRLMTHPGVGPTTALAFVLIIDSAERFACGKQIASYVGLIPCEDSSAERRRLGHITKQGNSLLRFLLVEAAQAAVQRDPDWRRRYIHLAMRRERRIAKVAMARKLAVSLYWMWRTQRDYQQTVKFSSHAGESDYVHGVQ

SEQ ID NO: 472450 - protein, 442 aa, unidentified
MEINRSLTKGDFEIVHPNAAGIDVASQMHYVAVPASRDQPSVRKFGSFTQDLHDLAKWLKKCQIDTVAMESTGIYWIQLYLILEEYGFDVFLVNARHIKNVSGRKSDVQDCQWIQQLHSFGLLNASFQPDLYGRELRTYMRHRKNLTEQYSMQIQLMQKAFEQMNIKLSNVLSDITGKSGIAIIEAILRGERNASTLAMLADARVKASREDIVKSLQGCWRNEHLFELRQAYDLYLIFKQKIKECDHQIEHTLQQHNNSSSNDDQVKRKAQSNNKFDFNATSYLKKILGVDITEIFGISEISAMQIISEIGIDLTKWPTPKHFVSWLNLAPNNRVSGGKLLRPKKDRKKNKAGQSFLMAAYTLQRSSHWLGATYRRIAAKHGAPVAIKATARKIAIILYQMIKKQIEFNPLPIDAYNQLFKERKLKYIKNQASMLGFQLIPS

SEQ ID NO: 472451 - protein, 344 aa, unidentified
MTYYAGIDVSLRSVNICIVDDDGECVAESKLSSDVQEIIAYLDELERHIELVGLEAGTLSQYLTYGLQAADFNVVCMEAQQVKAALSAMRNKTDKHDARGIAQLLRSGWYRQVHVKSMESHHIRMLLTSRRTVLDKCIDIENEIRGLFKIFGIKLPPKLWHGSFDTAVRDIIEADEKLSHALLPMLDARLVLYKTFRVLENRTHRLAREDSVCELLMTAPGVGPITALTYKAGVDDPSRFKRSRTVAAHFGLTPKRQQSGEMDIEGHISKAGDAEVRRTLYVAANSVLTRSSRWSSLKAWGMKIKKNRGHKKAVVAVARKLAVILHRLWIDETQFQWDMQGVRS

SEQ ID NO: 472452 - protein, 385 aa, unidentified
MQDHKPEDQTAIRTDLGAIFVSLELSRSTWLVTSLSPGGGEKMSKHSVPGGDISGLLMLFSRLTERARKRAGEEFPIIAIQEAGLDGFWIHRALEQEGIESHIVDAASIMTSRRRRRAKTDRIDGEALLRALMAYKRGEPRVCAMVRVPMPEDEDRRRISRERNVLIAERVAHVNRIKGLLFSQGIRYEPLRRDRRARLEELRTGDGRVLPEHMKRQISRELDRLELLLAQIKAVEAERNTMLAKTNEANLAPAKMLMGFKGIGAEFAMALWSEGLFRHFDNRRQVGAYAGFAPTPWQSGMTDREQGIAKSGNPRLRTTMIQLAWLWLRHQPDSLLSHWFQERVAGKGRRIRKIMITALARKLLVALWKYVTAGVVIERAVMKTA

SEQ ID NO: 472453 - protein, 349 aa, unidentified
MTHVGIDLHKLESQICVIDETGEALAELRVTTRRDALAKALADWPGSQVLVEACNESEWVARHLERCGYTVVVADPNYTPMYGHRHKGYKTDRRDARALASASAQGLYRRAHRTSEPRRVVRAELVTRDALVRTRSRYISVIRSRLRAEGWRLRSGDASSFVARVSELPLEPELTAQLQPLLRVMGLVNQEIATADRALEQKAKAEPVVRQLQSVPQVGPITALAFVAALDDVRRFRNAHQVESYLGLVPRERSSGEHQVRGRITKTGDKRVRWLLVECAWGIRRSQKASVEALQMWTDKVGVRRGRTVAAVALARRLAGILYAMWRDGVPYDPNKLQHPHGLAELARS

SEQ ID NO: 472454 - protein, 344 aa, unidentified
MQHYVGLDVSVKETSVCIVDKAGKVIREVKVATKPAEILAVLTEEALAIERIGLEAGPLSQWLYSALAEAGLPVICVETRHMKAALSAQINKRGRNDARGIAQMMRVGLYRPVHVKTLASQKRRMLLTSRQLLQAKALDIENDLRGTLRNFGLKVGMVGTVKFEARIRELVADHPDLAAIVEPLLIARKVLREQLGVLHRQLLEIVRHDEVCRRLMTTPGVGPVVALTFRATVDVPSRFTSSKAVGAAFGLTPRRQQSGEIDRMGGISKCGDAMMRGMLFEAALVLMTHSRKWSWLKAWGVKIARHRGMKRAIVAVARRLAVIMHRMWVDGTEFRWSRKEAAAA

SEQ ID NO: 472455 - protein, 453 aa, unidentified
MKEEKQKNFLTETLKTKRFSQGLPVFNPYAAGIDIGDTMNDVAISDGATGHEVREYKTFTEDLTNLVEWLVSEGITTVAMESTGVYWLNLYLMLEEAGIEPYLVNAKHVKNVTGRKKDDTDAIWIQKLHSCGLLQKSFQPESEIRVLRTYVRQRKNLIHNGSDSVRRMQKALELMNIKLHTVISDILGKTGLQMVNAILQGERDQDELIKLKDPRIKASEEDIKKSLVGIWKDEYLFMLKQAYDEYIFYQSQIHACEEKIKEQLLNQATRILDGDLTDIYVKKKAKKNQFSVEIGPLLKIIAGVDLTKVEGISEISTLELLSEIGTDMSKWQNGKHFSAWLNVAPNTKITGGKIISSKMQRKKNQAGQTMRMSASCLSNSKSSMGDYARKMKSKLGKKGGVVATAHRLARIVYTMIKEKKEYDPQITATNNEIWKAKKIKYFEKQILQLRKTG

SEQ ID NO: 472456 - protein, 455 aa, unidentified
MTSYYLGVDASKGYADFVILDAHKKLVEANFQLDDTFAGHSHLYQRLNRFCSDHPKGLIHAAVESTGGYERNWYKALSGFRASLKIKVAHLNPLGVHHNSKADLKRNTTDAISACNVAEYLIAHPEKVSYQTADPLGGLRKHWSFIRMLTKQCTQLLNQLESLVYNANPELLAYCKDGVPQWVLKLLRRYPTAAKLCRAKNSAVARIPYVSLQRAAELIRAAKTSVASATDEVSAQVIIATVEQILHLKKRIAVQQQAMRQQCRLPQVELLESFSGIAEHSAVGLILRIQNIERFANCKKFVSFFGLHPTYRISGDGVGAFRMSKKGSKEVRQLLYMVAINAIQNNELISELYARKLQQGMERMAAVGVCMHKIARILYGMLKHNCPYDAQVDRRNRQNNSGQRKARMDRSRRYQDYDPAAPVSRRQKKKRMERERSHSDISTKCGIQSPVPLTT

SEQ ID NO: 472457 - protein, 482 aa, unidentified
MKKKNIFQNRSQQLLRLFEKAGNRLKMMCVPIDYAKKDHMVMFCNGYGDILRKPFSVKNTLEGVKYLIDQVMRSCRQRRIKKQHVFFGGEDVNSYAENFANALRAKGFLVANVNAHDAKKQRETLQASTDRIDLMGIATMLLNLRAKCSPAQEGIYRNLRTLVRHRKKLVVMKTEVKNRVHTLVDRLFPGFLNEKNTGINPFSESSLVLMEDRFSAQQIRRRQQRTLTKILKRCATPNAESLAAKLHSYAAQVITTPDEYAATLQLSLQHHIKHYRCLQENIDQLLTEIALVLAQTQAAFLTSIKGVGIVLAAGVSSEIGNPFEQKPLNNLTSYCGIIPRVKQSGGIEGHTHTGRVSKRSNHLLKDYVVQSAFHIGIRGPQPLLQDYKRREAAGQHADFGIARRFLRMAMCLMRSSQVYLPPKLRSPKTQMQERAGYYLTTWPLLRDKWKKAHANQVAFAKDQPLGQWRQMVQELYDIKLKL

SEQ ID NO: 472458 - protein, 337 aa, unidentified
MSVYVGIDVHRKRSQVAVVTEDGTVELNKNVVNGSEPMLRLIGDLPAGTPVAFEAAFGWGWLAGLLEDYGFEAHLVHPLRCKAIASARLKNDKVDAAILAQLLRADLLPEAWIAPPAVRQLRALLRHRTGLVRLRTQQQNRIHAVVADFGYDRSGSYLSRPGRGWLAGLELPAASREIVTDCLAVIDGLAPLTDRIDGELRQHAKADPRVKVLTTLPGVGQFTALVILAEIGDITRFGSARKLASWAGLTPTVRGSDLTVRHGHISKQGSAWLRWVLNQAAQTAKRSPEFAGTYATIAQRRGKKIATIAISRKLLTRAWHLLSQLEPAEASTPPRRP

SEQ ID NO: 472459 - protein, 330 aa, unidentified
MVTEYIGIDLHKAFFQACAIGATGDRHWEGRFPRSAAGIAQLVARGMGAEVAIAVEASGPTWAFVDALQPTGARVCVVDPRKTRLKAGFAAKTDRLDARRLADALRRESVVSIYVPAPAIRELREICRGRHQVVRLRTRLAQMIRALLLRCDAGEPPGTRLYAPAALTWLAQVQLPTAADRTLHRLERLYRAVHVDAQAADREVRDRATADPIAVRLDTLVGVGPIMALTIRAEIGDVARFRRGPALASYAGLVPRVDSSAGRVYHGRITREGSPWLRWALVQAARHAIRRDDARARWARRLAVRKGLNKARVALARVLCDEVIRTWTAN

SEQ ID NO: 472460 - protein, 377 aa, unidentified
MFQSTYIGLDVHAQTVVACALNPATGEIERAKMAMEPDVVLSWIQRFPSDAKAVYEAGPTGYALARHLLVHGVDCVIAAPSKLLRAPGDHIKTDQRDSLGLARMLSLGEVTEVRIPTEEQEALRDLSRTRLQAQKSLTLAKQRLNALLLRHGLRYPEPTRWNRPHLQWLHRQHFEQAGTEYSYQSDLELVELLDAHLKRLDARIAEVAATCEYADVINALMCLRGVALTTAFGLAVEVGDWTRFTGATIGSYLGLVPSEHSSGQKRSQGSITKAGNTYARRLLVEAAWHQKPEFKRPGVTLQRRLDLVDSQTRVTALKANHRSSDRWEGFEQRGKLRVKANTAVAREMAGWCWALAAPLQEARKQVPAFSSGNVRAA

SEQ ID NO: 472461 - protein, 422 aa, unidentified
MMGKERRWFVGVDWGSQEHVVSLYDDEGEKIAQRRFAHGGTGLTDMVAWLLKASGGRPGDIHVAIETPHGPIVEAVLERGFNAYSINPKQLDRFRDRFTVSGAKDDSRDADVLADSLRTDMRAFRKLSIADPIVVELREWSRIDEELKVEHVRLTNRLKHQLWRYYPQMLELADDVGANWFLDLFEVVPTPEKAANVREKTIARILKNHRIRRFDATHVLSELRKPALAVAPGTIEAATARIRGLIERIRMINNRIKDAGRQLDRLCKNLSEPIADKDEETSPGQKTEQRDAAILDSLPGVARTVLATLLAEASDTLQRRDYHALRALCGSAPVTRRSGKSCIVVRRYACNQRLRNATYHWAQNAIQRDATSRAKYDALRAKGHGHARALRSVIDRLLNVACAMLNSGTLFNPEFANKQTAG

SEQ ID NO: 472462 - protein, 367 aa, unidentified
MKKNNRAQTAMRTQLRNCPEGSTVGLDIGDRWTHAAVIAPDGELLLEDRVASREPEVRRWLSQLPAQKVVALEVGTHSRWMAKVGRECGHRVLVANPRQLRLIYGGDDKHDRLDANKLARLARADWRLLKPVEHRGDEEQADLARIAVRESFVHMRTKAVNLVRGMVKAAGGRVPACSPEAFPGKAQEEIPEGLRSTLAPVLELIEELNERIRESDQMIEHVARTRYPEVELLVKVNGVGWHTALLFRLTLGNIQRFERSRDVGCYVGLRPKRNQSGEFDPQLGITKAGNVRLRTALVNCAHYILGPFGEDSDLRRWGLKLAEQSRARGAKQRAVVAVARKLAVLLHRILATGEAYEPLHLARKRAA

SEQ ID NO: 472463 - protein, 356 aa, unidentified
MKKVTQNTKKVELKGADCYIGVDVHKLTYYAGILTSEGQRVEFSCPANPAGFIRQLKDMGIKVLGVAYESGPTGYELAWQCQEAGLPIMVAAASKIPRPIAAGGKTDRLDGRRLAEYLAKGMLKGITIPNREEFGLRELERGRQQLINSRKKLRQQIKSFLLKNHVEAPLGLTKWTKSGMEELKRLELGHRHLRLTLDSYLRQLEFTLKEIEEMKVVLSREMSSQGKDEQVKNLQTIPGVGETISHTFTAEIFRPERFDRAEEICAYVGLAPIVSQSGQSKGVARLHRVGQFYLRSVLVEAAWILVGKEGYYRQIYNKIRSKTNLPQKAITAVARRLLTIMWRVAVEKRAYQPKCI

SEQ ID NO: 472464 - protein, 364 aa, unidentified
MDNATHLGLDVHKDTIAVAILRPGEAEPDERTIANTPEALRALIRRGSFEHPVACYEAGPTGYETHRLLSSLDVPCDVVAPTMIPRRAGARVKTDRIDARNLARLHRAGELTPIRVPTPSEEAIRDLVRVREDIKDDRRKTQHRVKSFLLRQGRRYPGRDKGWSDKFDLWARSQRFEEPAADAAYRHYLAALDVRRSQLATITAEIEAAAELPPLAEPVAKLRCLRGIETLSAVSITAEVCDFRRFPGAPSFMAFTGLVPSEHSSGPSVRRGSITKTGNAHVRRVLVEAAWSYRHRPAIGINLRRRSDGQPPELLAYAWAAQCRLYSRFHSIAATKNRNVAVVAVARELAGFIWGLMTDHVEVA

SEQ ID NO: 472465 - protein, 507 aa, unidentified
MSRSVGRAIGLDVHRDFCEVAICEQGVVRSAGRITTSPDVLELFAVSLGRGDRVALEVTGGAWEIARILEPHVRRVIVVSPDDTGIRQARAKTDRLDARTLAKLLAAGELDAVWMPDERCRVMRRRLARREQLVRSRSRSKNEIHAVLMRRLKGRPPVSDLFGVEGRKWLRELELPVEEAESVASAMRHIEFLDAEIAEVERLIAREALRSAHARRLMTVPGVNVICAASFLAAIGDIRRFQTSRQLVAYLGLDPKVRQSGSEPARGGRISKRGSASARWALVEAAWSVVHQPGPLRAFYERIRARRGHGIAVVAVARKLAVLFWCLLTHGEDYAHGQPSLTAKKLRLLEIRAGAPTRKGKPTGTWATRQQMRTAERSPSRPRPPTSGRSQTGKPQRRKRARACHRGAHSIRPSKGSRAAGPRAPDACSSTRHRLAPTNTLTLAEPIGQHAGSRRRQPTHPPKPAESRRSTAAAPKSTPQEAICGPPRPHRDRSDSRNRAKNDARAP

SEQ ID NO: 472466 - protein, 388 aa, unidentified
MVSRKAHDSRILGIQFMHTCFRNTGLIINRKHMTTAQKHNCMFVGIDVHKDTHTAVGISPYGEKMFEITVGNYKDDFENLTSKVEEMKGILSPYIGIEDVRGYGERLSEYLYQKYPVYHVPSILVDRTRQNATHPEKSDSLDASGVAKVMMTSIDSLLEYTISEDSKKAKQLKEISLDREYLVTERTRLKNQVHTLLYRIYNTEYTQKFKDPFSLKALRFWRNARPKCDPFLLKTMKRKVRRLLDIHDEVTDLEKDMEQLLKDNYTIQTASGCGVVLASTIVGEIGDINRFTSPGSLAKYAGCAPRERSSGKKIRHVKSRSGNRRLNCAFHRMALSQISRMGNDKARTYFKRKISEGKSKSQALVCLRRQMVNIVWMMMKHKTIYRNA

SEQ ID NO: 472467 - protein, 352 aa, unidentified
MQTPQLFIGIDVHKKSWSVSIRTDLFEHKTFNMPSEPDKLISYVNQHFRDYPVECCYEASCCGFIPYRRLAEAGWQVKVLNPSDIPQSAKNKDQKNDKMDCRNLAKQLQSGHLTGIHVPDEQREQLRSLFRQKNNLTKVMRKLKSQIKAELLYYGIKFPSHFENANWTKEMTTWIQDIEWKYVTGHSSLQSKLRHLAFVRQEWLAINKDLRQYVTACFHDDYQLLMTIPGVGPVIAIGILSELGDIRRFQKFDQLSSYVGLIPSVYSTGETVQIRGLTYRTKSLVRSYLIESAWVSVRRDPTMQAYYRTHTGKQPNKIIIKVAHKLLRRMWHVIKTGDGYKTCLNDSSAEPG

SEQ ID NO: 472468 - protein, 395 aa, unidentified
MDSPQLQIAVDVGSTRHRVAVATADGQLLSEFDMQHDAVGFGHFFDCIEAHQRRTGASVVVAMEGYNGWARPLDREVLARGWKLFNVNNLKLARFKEIFPGPAKSDSIDARKILELMQLAGSLRLAKAALQSVAPVAAANDKLKRFTRRRRVLVEERSRVLARLYADLQAVSPGLLEITGKIENRWFLNLLTCREDLRKLASLRSAGMLAIRGVGKVYAAKIRAWQKNARFSSEAEWVSPMIQADARRVLALQQDIEALNELISRESTDSQIATRIDSIPGFGCTCSAELAGEIGTLDRFATEASLALYLGMAVLDEHSGKQQGVRRARNVNVRAKAAMMVAVARHIEQVPASRRYYEKKRAEGKTHNQAVRALGRHLVRVIWSMIRNDRDYQLR

SEQ ID NO: 472469 - protein, 363 aa, unidentified
MKHLTGGSMKNITRVGVDLAKNVLQVCGVDALGKVVFNKSLSREKFLPWCSAELEPGCVVAMEACSGSHFWARELIKRGFNAKIIAASHVSPYRMEGKGGKNDANDAAAICEAVNRPSMRFVPVKSSNQQGILCVHRLREGLKEERTSCINRIRGLMAEFGIVVSRSPDKLRENLQDLIEDAENGLDWLARLAIQEQYAHWDAIDQRIAWSDQRINAHIAEDAQAKVAKQLIGVGPLTASALVATVVDFKQFKNGAQFGAWLGLTPRQSSSGGKAKLGKITKKGDTYLRTMLIQGAKAAVMTAHKRDDPISKWLLNLKEKSGWQIAAVAMANKNARIVWALMTKGTSFDPRHISVQQFRVSEA

SEQ ID NO: 472470 - protein, 365 aa, unidentified
MGVPTMAQARTFVALDVHVSGTVAASIERESGELRRRRLSGRAAEVVEFVAGLPGPVRVTYEAGPTGFALARRLEAAGVSCVVCAPGLIPRGPADRVKTDRRDAERLVRLLIAGELHAVAVPSIEAESLRDLVRAREDLRGDLMSARHRVSKLLLRHDVRFEGTERNWTGAHLRWLAGVRFAQPGTQAAFDDYRGAVEALIVRRTELERLIAEQLPASPCAQTARRLMCLRGVDTLTAAGLCAEIGDFGRFAHPEQLMSYLGVVPSEHSSGTRRRQGSITKSGSRHARRLLVEAAWHYRQPPRVSEPLRRRQAGAEAMIVALSWKTQRRLHRVWSRMEQRGKRRTIIAVAAARELAGFCWAVATA

SEQ ID NO: 472471 - protein, 435 aa, unidentified
MEKIRTNVAGIDIGAKRVFTAVEGQPVVSHLTFTEDFMVLRDYLLKHKVKTVAMEATGVYWVILYEILEEARIDVWLVDGRQTKQVPGRKTDVKDCQWIQELHSYGLLSRCLVVDADIKELRSYLRLREDHINTSAMHINHMQKALTLMNIRLKEVLSQIHGASGLAIIEAILNGERDKYVLVNLCHQSVLKGKKELVLKALEGKYTEAHLFALQQAYDGYTFYLHQVEECDKRINTVINRLGSSGKEQDVKKKRKAIRHHKPVVEKLGPNLINIFEGKDATVVSGITDYTWMQLLAETGPDMKKWPTEKHFTSWLGLSPGQNNSGKMRRNAKKKGRPKAGQIFRVIAQGLINSKDIAIGSFGRRLRGRKGSSIAIKAMARKVAVLYWRVMAKGLDYAEQGIKRYDEQLLANKMKIFNKLAKELDIKVPVNVQVA

SEQ ID NO: 472472 - protein, 370 aa, unidentified
MLDTTTFIGLDVHARSIKAVSLDVMTGEVRAATFGYDAGAVAEWVRSVDPRARCVYESGVTGFDLQKRLSGLGVDCVVGAVSKMIKPSADRRRKNDRNDAEFLARMLSVGNVVEVWVPDDECEAARDLTRALEDARDDLSRSKQRLSKFLLRHGLVFDERTPTGRRKGNWTRAHWSRIESIRFAERADNDVLAYYVDAVRRAAEEKARLEGLVEAEARKPRWRKRVDSLRCLKGVDTASAADLVFEAGEFSRFRNARSFAAWVGLTPSEHSSGESDRRGAITKAGNKHLRKTLVEAAWHYLTCSGRPKDLAKGQAPDRGARRHAAKGVRRLVERREALLARGVHGNKANVATARELACWVWAVGLMAEEA

SEQ ID NO: 472473 - protein, 336 aa, unidentified
MNEITTLAIDVAKNVFQLHGVDTRAVCQLRRRLRRTQLLGFVARMPPCLVAMEACASAHYWGREFIKLGHRVKLIPPQYVKPFVRGNKTDGNDAEGICEAALRPRMPSVAVKTEEQQAVLTEHRVRQLLESQRKQLANHLRGLLAEFGVVIPKGSGSLRQGLAEAIERAPQRVRPALREAHQRLIELQRQSQEQTRRIEQLAKDSPLCRRLMKERGVGPIVASAYAATLGSPTHYHNGRQVSASLGLVPKQYSSGDEPQLLGISKRGDTYLRTQLIHGARAVISHIAGRSDPLSVWLQGLVARRGKNKAAVALANKTARRLWAIWREEAAELVALA

SEQ ID NO: 472474 - protein, 341 aa, unidentified
MKEKRFFIGIDIASDSFTACCINQDLEPIFPAENYSNTPEGFEKLTTAIDHHRLPTNRVLLSLEATGVYSETLCYLLGSKGYSITLVDPRKVKGATQDSPRKNDTLDAMRIAEYAARFTDKLVFWKPSNQILEQIKVLLSTREHLTQQKTANENALGTLKRKYYQTPLANKVYEETISRLKKDIKAIDKEISRLIDKDDSFKHYITLATSVPGVGLLLAANLLVLTHGFIEPLSYKKLSAHFGICPFEQESGSSVRKRPRSRRYGPVRVRKLLYLASLSVKTHRQEFRKYFYRKSLEGKPKKLILNNIANKILKILCAVINSKTAFIENYKSVNPNLLKSA

SEQ ID NO: 472475 - protein, 474 aa, unidentified
MIKSVGIDFHQGKHVVRCLDERAQLCDSFSFQTTPEGLDTFEEHIFHDGSNPVIVFEPAGLTWFIMAICIRARHPDCRLVRAKGQKVAALRRYLRGSSKSDRLDALTLAKMVFIDPEQLNEVYLPPAKIHALQRLARQRKRLESDIAARKTRIGAIVESYVPGVRKAFSNPWSAQARAFLRCQLNPLSVTCDGEKALHSFLTKTRHRNKTDKAESHRVFLVCKSAADLYQLSSRAEAVDNEFFSVFQEEIERELRLMELEEAESEAIAKRMEELYRELHPSDNLRSIPGVGRVTAPTFLATVGDPARFHNQSAFVNWTGVVPRTRQSSEVEAKGLRMTKAGPAIMKWALFQAGDIGRRFDPQLASLYYREMVHHGKNHKQAMGAVMSHLAARVLKVLQDGRPYELRDNEGKAISPAEAKKLILHNYQVPENIRRERRRRNPVKRGYLKSQGTALLRTNEAVVAPQPVKVTIPEN

SEQ ID NO: 472476 - protein, 350 aa, unidentified
MNKPEKFVGIDIGSETFFAAIGAMENTGWKIIVRPTEFQNTVDQLPQFVGWLNKQNLTPKDCILCMEATGVYGEALAYFLVSQNYQVVVEPPLKVKRAFKVAGHKSDPVDSCQIAEYAYRFCDQLRFWQPREEIYEQIKALLTLREQCVVQRTAHKNANHALKRKVVRTPLAERIHEQAIEELNHHIKEIEQEIEHLINQDPPSKGLLKNIKSIPGIGSILAVHFLVSMQTAPDPYCPKNLAAYIGICPYEDSSGTSRHRLDTSRHYGPSAMRRLLYLAAMSAREHQPKFRQYFLRKVAEGKPKQLVINNIANKLLRIVCAVARTGNPYIEEYRSIHPDLLRIDLPLTVS

SEQ ID NO: 472477 - protein, 354 aa, unidentified
MLAELVDHVIGVDPDRDSVTAAVLDAATAGVIATGRFAANTDGYRQVVAWADEYSTVTERAWAVEGTASYGRGLTAALSRDGEWVIEFDRATEKPAKDGSKTDELDAIRAGRETLGRTKLASPRTHRGFREALRVHMVARDSAVRARTAAINELKAFVVTADDTLRQELRGLRTARLVKRCCGFRHSPNRTVDETCTRVVMRAVARRIIHLNDEISLHTQALVGLVDQAAPQLVAEIGIGPISAAGFYIAWSHPGRCRNEAAYARLGGAAPIPVTSGQNQDRHRLSRRGDRQLNKALHQVAITRLRCHEPTQAYKARRSAEGKTDREIRRCIKRYIARRVFRLLEHHTPPQTTT

SEQ ID NO: 472478 - protein, 310 aa, unidentified
MTQGEVWVGIDVSKAQLDVCLWPTGETFECTNDRAGRARLVRRLRKLGPAAIGLEASGGYERAVLSALLDAGLPAHRLNALRVRRFAQGCGIMAKNDRIDAGVIARFVATVPQRPALSDPKAAALAELVTARRQLTGELTRCTNQAEHASQAVLRRLATRRAARIKADILLLDKTIAEAVAADGRMARRNALLRSVPGVGPVLAHSLLALMPELGSLTGRQAAALVGVAPFDCESGTFKGQRRILGGRKPLRDAAYMAALVAGQHNTVMAAFRQRLAAAGKKPKVILVAIMRKLVVTLNAMIRDNQPWAA

SEQ ID NO: 472479 - protein, 359 aa, unidentified
MQTQSNKIDFNGQNIYVGFDVHLKSWTVTVMTEKLIHKTFSQSPKPEALYHYLIKNFPGGTFHSAYEAGFCGYWIHNKLTKFGINSMVVNPADIPTTGKEIVMKDDTRDSIKIARSLRNGDLKPIYVPSLPTLEDRGLVRTRATLVKDLTRYKNRIKSFLYFHGIELPEAFNKPKTYWSNRFNKWLEDVQMTESSGKASLNVLLDQSRHLRASILQVTRQIRELAKTDRYKMQQELLHSIPGIGLLTAMVILTEIETINRFDSIDQLCGFIGLVPSTNTSGDHEIIGDITPRGHSVLRTAIIESAWMAARLDPALNKCYHDYCKRMEPNKAIIRIAKKLVSRIRFVLKNNQPYVCSVVK

SEQ ID NO: 472480 - protein, 345 aa, unidentified
MPIVGGLDIHRKQITFDYLDTATGEVGRGQIAPADRAHLRAWLARFAGRDDAAFALEGCTGWRYVAEELAAAGVTAHVAEPADTAFARGRKRHAKTDKTDSRHLRVLLEQGRLPECWIPPAQILECRALLEAYHDLRREHTAWIERIHAVFFHQGAPRLGEGALRTERSLAALREAAAVHLSPAGQLQVATALDMLAAIEARMDTLRQQLLHAARHLAGARALQARLYGVGPLAGLAMTCWLGGAGRFSSSRKAVRFAGLDVTVYSSDGKRSPGHLSRQGPEILRWVAYEAGKTHGRASAPGHDYYAAVKDRKDGKIAALSQARKLIRQACHILAELGDDALTAT

SEQ ID NO: 472481 - protein, 341 aa, unidentified
MSNTNTYIGADLHKKTCYVTVMNHLGTIKKQVEISTDKDKVSMFFKKYADVPVAVESTMNWIPFYENLESLGCKVLLSNPLQTKAIASARIKNDKVDSKVLADLLRTNLLPTSYIQPRDIRDLKEVVRERANFVEMRTKIKNKIHSVLFKTDNKHCFTDLYGKAGMEWLKELELRSVYRQELNRYLETLKHLNEQIDEISKIIEETAKEDYDCKLLMTIPGISFYSALMIKSEIGDISRFRNANKLCSYAGLIPATYASADKVRHGRITKRGSKWLRKTLVDAITSGSRNPNRISVFYQKLKKNKGTGKAKVAAARKLCSVIFAMLTDKQPFREFTPIKQR

SEQ ID NO: 472482 - protein, 370 aa, unidentified
MKHSTTLYVRLDVHKDMIAVAHVSNEPGAEVTYVGPIGTRQCDIDKLSRRLQSKAAHLVFVYEAGPCGYHLYRYLASKGLLCHVVAPSLIPRKAGDKVKNDRRDAALLARLARSGDLTPVYVPNVEDEAIRDLCRAREDALKDLKAAKLRLKSFLLRLNIRYEGRATWNDAHLRYLARVVCPTPAQQIVYQKSLRAVTDTVERIARLDEALHEQVASWRFADLVAALQALRGVQWTVAVTTVAELGDLSRFDQPRQLMAYLGLTPSEYSSGDRRQLGGITKAGNGHARRALIEGAWAYRYPAKVSPSIRKRQEGLATPIQDIVWKAQVRLCKRYRRLVARGKHPNVAVTAVARELAAFMWAIARHVRLAA

SEQ ID NO: 472483 - protein, 342 aa, unidentified
MQITTIGLDIAKNVFQVHGIDAAEKVVVRKQLRRSQVLAFFKALSPCLVGMEACATAHYWARELTKFDHQVRLMPAKDVKAYVKRNKNDAADAEAICEAVRRPTMRFVQVKSAEQQGRLMLHRTRDLLMRQRTQVINALRAHMAELGIVAAQGREGIKELLRIIASEEDARFPVDAHVSLVVLAAELQALQTMIGSIEKRLMAQHRSNEASKRLETIPGIGVIGATAIVATVPDPKVFRSGRDFAAWIGLVPRQDSTGGKHRLGPISKRGDRYLRRILVVGACAVLKLARQKPEKYPWLMQLLARKPFKVVAVALANKMARIAWALLAKGGTYRAPALAAAA

SEQ ID NO: 472484 - protein, 356 aa, unidentified
MKEQENKRNKITIGLDLGDRRHRFCVLGEKGEVLEEGSVGNNRAALSELVGRYPEALVVMEAGCHSPWVSRHLEQAGCEVVVSNPRKTRAIYQHERKSDRRDALMLARIARMEPALLYPVRHGSEEAQQDLLRIKLRDSLVRARVALINSLRFTLKSLGYSIANPSTERFHKVIQSALPQSVAQVIAPSVQALEELTLRIKLLEREISDQARSKYPDTAWLEQIPGVGPITALYFVLKIEDPARFKRARDVGAFLGLCPRRDQSGENDPQLRISKRGDAYLRRLLVSSAQYILGPFAPPSALRQYGLALASGATARAKKRAVVAVARKLAVLLLTLWKNKSSYEAFPQRERLRCIA

SEQ ID NO: 472485 - protein, 351 aa, unidentified
MPVIGVDCHKTVHAAVAIDAQGQDLGQWRGPNTVAGWQDLVAWATEHGADPVWGIEGSGQYGRGLAQVVVQTGHAVHEVNPRLTAAMRRSSRARGKSDRLDARAIARVVQQDPSLPVVRAEDATAVLAVQVSARDGLVGEITALRNRLAQHLVQLAPVHDLPWPPLTKRTAVATLVDLRVPDADALMQAHASQVRLLVARILLAMDQVAALTAEITRLSAGWTAPLLAIVGVGPLTAGMVAAHLGGKTFATDAQLAMYAGVAPLDASSGHQTRHRLNRTGNRHLNAILHRIALTQSRTSPQATAYLAKKQAEGKTRTEAFRCLKRFLARAVLTAWNHCPVPSLKEIEAALT

SEQ ID NO: 472486 - protein, 317 aa, unidentified
MNHTEIQTPVNIGVDVGKANLDIALHPSGQFHTIPNTEAHIRHFVKILKDYNVERIVVEASGRYEHALVQACDQAGLPIIVVNPISVRRYAQAIGVLAKTDRIDAQVIARYAATLKPEIKPIPDKTSQKIKDLLIRRSQLLEMSTMEKNRLQILPKYLHRSIKSLLRMLQSQIETVTRQIEQEVAKVDQWRTKMEIMTSVPGVGKVLAYTFLSELPELGSLNRKEIAALVGVAPINRDSGKLNGKRRIRGGRHRVRTVMFMAILSSIQCNPVFKRFYERLKAQGKIPKVALIACMRKMIVVLNTMVKNQEPWRENMA

SEQ ID NO: 472487 - protein, 346 aa, unidentified
MRHIGVDLHTNQMTICYLEDGKYRFETLTVEEIDTFKERLLKTDELAIEATGNSSYVYRHCVDLVSKLVVVNTMQFKVITKSCKKTDKNDAKLLAEFLSKDMLPAARVKSVLDDRLHSLVDSRNKFIELRTQLKNKIHNLLNRCGIKIKKTSLTSVKGLNRVLAHEVDELVKFELGQMVAEIKNLNERVEQFDDKIAEFGSKLPGFENVSSIKGIGTNTAVTLLSAIGDINDFEDEKKLAAYFGLVPRVNNSNETMNHGRITKRGDSLVRKSLLQCALIAIKYNQKLFGFYDKIKTKRGFGKAIVATARKLLTIVYYTLKNGWYFTDFVKNIREIRPIGKRILGAI

SEQ ID NO: 472488 - protein, 409 aa, unidentified
MQVMHERCAGLDVHKKTVVPCVILTLPDGRVEKHTVTFSTMTSQILAMADWLKSCGVTHVAMESTGVYWRPIYQLLEGQFTLLVANAQKIHRMPGRKTDLTDAEWLADLLRHGLIAPSFVPPQAQRQLRELTRHRSNVTGRRTQCINELHKTLEGTNIKLSSVATDITGVSAMDMLQHLLAGQTDPNFLAELARGVLRKKIPELRQALQGVVGEHQKLILNQLLGDIERFDQQIEDLNAEIARRLAQEQSVIQRLDQIPGVDRKVAEVMVAELGTDMSRFGSAQRAAAWSGMCPANRQSGGRRYAARSRFGNKHLKGTLAEAGWAAGRSKQTYLGAQFRRLAARKGSRRAALAVGHSILTISYHMMDRGTPFTELGADYFDRRNPERVKDRLVSRLEKLGYRVSLEKAA

SEQ ID NO: 472489 - protein, 435 aa, unidentified
MRYVDDIRLEQFRQLKKEIRSSEEYMIVGIDVAKEKHRAFFGTAQGKTLLRNVIFDNTIEGFEKLDAYVERVKVQYSLPKIVFGIEPTADYHKPLAEHLLKCGLMVVFVGGMAVKNNRQLLNGRWDKNDDKDSANIADLIAQGKCMFYEYPLMTLQNVRVLNALKRRLKKREHGISAYIRNHILAQYFPELDKYYGSLETLAVVRECLDPSAIAGMEYDDFCRTVAPGKMTLARERRVGAIWKTAVNSVGCTMGEAAFQEAQIAVDSLKQVRQEIKGVEDKLEDACLEFPEYTYLLSIPGFGPDVSAKVLGAIGDPHRFTSGKQVLRLAGLDLCAKRSGKTSNTATPIISKQGKADLRCALYQAAFSASIKSKDFIPYFTNKLVGRAKEKGIGTKMRVKLAAKLLIIAWTLMKKKEFFDPKYLKLEKRVEQKIAA

SEQ ID NO: 472490 - protein, 359 aa, unidentified
MTSMTQQHRRRRVIIGLDTHKFIHVAVALNADGAVLDSRSVTADSAGYDELIDWAAKLGQEVIFAVEGTGSYGAGVTVAIRGRDLEVVEVSRTDRRDRRLRGKSDTLDAENAARAVLAGRATSVPKAADGIVEMIRQVKVAKDVAVKARTAAMVTLKSVLINAPAELREALQPLTKMALIHRCAALRPGEVTTVGAASKHALRAIARRWLALDAEIKDHSAVLTELTARIAPQLVAAVGLGPDTASDLLIAAGDNPGRIRSEAAWARLCGVAPIPASSGKTTRHRLHRGGHRQANAALYRVVVVRMQYHEPTKAYVARRTTEGKAKTEIIRCLKRLLAREVWALLRPLRTAHVQIPVAA

SEQ ID NO: 472491 - protein, 457 aa, unidentified
MKNFYLGADVSKGYSDFMLLDAKKRRIEEDFQMDDTFDGHQKLYHILSALCDQHPDAQIYASVESTGGYENNWFGALVKFQSSLPLKIARLNPCGVHNNSKAGLERNITDPISAENVAKYMIEHPENVTYQQQDPLASLRKQWSFVKMLLKQKTQLLNQLESNLYGANPEILAYCKNGVPKWVFSVLARFPTAAKLAKAKKSLLVSIPYVTEQKAKELIQTAKKTVASANDQITAQIIKATVKQIQQLAKAIEAQEKILIETCSIPEVQLLKTFAGISDISAIGLILEIGSVERFATAKKLASFFGLHPRYKQSGDGNWGFHMSKMGRIVPRQILYMVAMSAVQCNPLIAEIYLKHTEKGMKKKAALGVCMHKICRIIYGMLKHNSAFDANIDRNNRKKSLKANTVKTRKDKRRRYQSFDAKAPISGRHNKKRKERKQSQSDNIAHNGIIKASVPIS

SEQ ID NO: 472492 - protein, 404 aa, unidentified
MIFVGIDWSERHHDVCVFDTDGMQLARARVPEGIEGVATLHGILAEHAEEPEEVVVGIETDRGLLVGALVAAGYRVFAINPMSVDRYRDRHTTSGAKSDPGDAKVLADIVRTDRERHRPVAGDSELAEGIKLLARTHQNFIWERQRHVNRLRSALREFYPQALEAFGTDLASSDAVAVLQLAPTPELGRRLSRSKIAAVLRRAGRQRNVEVRASRIQAALRSEQLRASGTLERTYGVITSSLVGLISGLNDQIAGLEQDLHGAFEQHPDAGIILSQPGLGSTLGARVLGEFGDDPTRYRDARARRNYAGTSPITRASGTRRVVLARFARNERLADACHRWAFSSLTTSAGARRYYDLQRDRGKTHNQALRALGNRLVGVLHGCLTSGDCYREDVAWPVLEAQAA

SEQ ID NO: 472493 - protein, 357 aa, unidentified
MGTISLGVDLAKCTFSVCEMEGDTGRVLRRREFRRDAFAAWLAQLPAGTVVAMEACSGAHHWARRCREYGLVPRLMAAQFVRPFRKNPLAKNDPNDAEAIATAARQGNMRFVPVKDIDQQARLSWHRVREGYKAEHLAIGNRLRGLLAEFGVVVPHRDAALHRVLGDLDAYVELPGEFKELLRSLAEHWGQVRAAMAACDARIERHACQDDRCFRLRAVVGVGPLTADAMVASIGNAREFKNGRQLAAWLGLVPTQHSSGGHARLGAISCRGDGYLRTLLILGARSSLERAKRVGVDKATPEQAWIRSLACRMAFGKVIVAIANKHARQLWAMLAHDLDYDPQVGLKHPMQQQRTAA

SEQ ID NO: 472494 - protein, 324 aa, unidentified
MSLPSPSTNVGIDVSKETLDIAVHETAAHWTSKHEFTEFPQVLKSLRAVAPTRIILEASGGVENLLVSYLAMAGLPVIVINPRQVRDFARATGQLAKTDRLDAFVLARFGATLEPAVRQLKSAETQELEALVARRAQLVNMLTAERIRLQQAQQQRRQSIVSDLKAHISWLQKRLDKCERDLSQLLGSSPIWRATDERLQSVPGVGPITSLVLIAELPELGQLPDKQIVALCGLAPHARDSGKWHGKRTTRGGRARVRTALYMAALVATKHNLVIKSFYRRLLSAGKQKKVALTACMRKLLVILNAMFRNQTSWQPPRLAQELN

SEQ ID NO: 472495 - protein, 336 aa, unidentified
MAKWKYFIGIDVASRSFTATIGGSPWQVLAKPEEFENTLDGFRAFLDWLTEQRVDQRRAVVCLEATGVYGEALAHFLVAQKLAVAIEPPLKVKRAFETSGPKTDAVDSMQIAEYAYRFADELRLWQPRGEILEQIQVLLAAREQFVRQRSMHKNALTALKRKVVQTPAANQAHQQSIEFLTKEIKSLESELRKLIDQDPDLRQRLMLLLSVPGVGLLLGAHLLLLTQHSQNPRKLAAHLGKAPHPHRSGTSVHGKTQSRHYGPSTPRKLLYLAACSLRQHHPMFEEYYLRKIAQGKAPRLVLNNIENRLLRIACAVLRDQRPFIPGYRPLSPLTGS

SEQ ID NO: 472496 - protein, 322 aa, unidentified
MENIYIGCDVAKSKIDYCVLSDDKNKNNSFYGQFKNSLDGYEKFLKTIAVNYPFKNPIVGFESTGAYTFQFQKYLSDNAILHKMFNAKKVSKYLKSMDIQGKTDKSDSYAIAHFCSIQDINIFSSSYSVNKEKYIQYSSSLRLLMKMKVQINNSIKSLKNGNENSFLILELEKTKNDLKKREKNIKDNAIESLKVDYPVSNFLVEKYAGIGYSLLLLLVPRIYDNIENFTVNQTVAFLGLNPVSFQSGQLKYTDKLNIFGDKELKRLLYLSALTSSQFNPILKEKYQNYISNGKSKKLALTIISRKIISLLVKDIKKYKAGL

SEQ ID NO: 472497 - protein, 412 aa, unidentified
MQTLIERGCGMDVHQATVVACLLMVRRDGKVQKQMRTFGTTTRELVGLREWLLSEGCTHVAMESTGVYWKPIYAILEGACEIVVANAQHIKKVPGRKTDVKDAEWIADLLCHGLLRSSFVPPKPIRELRDLMRYRRKLVESQAAERNRLLKVLETANIKLANVATDVFGMSGRLMLRALIAGKATPQEMAELAKGLLRKKIPELELALEGKLEQHHRFLLELQLQRLEAAEKDLAVLEQRIRQMLEPYAAQLALLDEIPGVDWTLAAVIIAELGVDMSVFGSVSQLASWAGVCPGNNESAGKRKSSRIPSGNVYLKSGLVEAANAAARAKGTYLRDKFFRLKARRGYKRAVVAIAHKILVAIDHMLSQQVSYNDLGDLYLDKLNKHHLTRNLVHRLERLGYTVTLTLEQKAA

SEQ ID NO: 472498 - protein, 428 aa, unidentified
MTEDTTLTSQTWLVAIDIGKSFHAVLVEAADGRRQHFRMANSVEDYDRLVAFLRALLGTVRIALEPTGDFHRTLAHRLLREGFPVVSVSSVAGARYREAMFNSWDKNDPKDATVILHLLKQGIVQHYHDPLLAGDHDLQELAKTYHQIVLARKRLADSLLNHYLPLYFPEMGRYWESTRVEWFVDYLEKFPTPAAVCALPKEEFVKAAWSVIGRKVNKRAKLEELYELAHHSIALPVSIDSVAIETFRLQLGQLRRLAELRQALEVRAHALLKDRADFQHLCSLPGVAAVLAMVILAEGGDLRRFPHHRQFLKYCGLDLAKCQSGQFRGRETLSKRGNARLRMAFWMAAQRAVRMNENSFRDKYERYTKQDPGNPDVRRKALTAVAAKMARVAYAVVKRNQPYRGYHEHALPSGSIPLMRAVGASATP

SEQ ID NO: 472499 - protein, 400 aa, unidentified
MVVGVDVAKGELIACLVGDDRSFDRPWRVKSPGQVGVLVSKLLELRAQCPLVVAMESSGTYGDPFRQACSDAGIAVVRVSAKAVKDYSETFDGVPSQHDGKDAAIIGTLAQGGHGKAWEWDDSDELSQALRYWIRRLDTAQRVKQVYCGKLESLLARHWPEAGGLLEQSGATLVRAMAHWGDPRALAADGMAAALLKRFGGHYLGEAKVALVIESARTTIGVRMDRWSRREMRNVGAAILKRRRCIQRCRRELRKLTKHHRVIQSQAPAVGLVTACVLWMCLGDPRDYGSAGAYRKAMGLNLKERSSGKHKGQLSLSKRGQRLTRKWLYFSALRWMKEPSVKRWMVRKKERDGGRGSKAVVGVMRKLALAAWHAGQGEVFEAWRLFPGSQRVSCREEVSR

SEQ ID NO: 472500 - protein, 372 aa, unidentified
MEQLSKTYLGLDVHKDSITVARADPGREPARVVGKVPHDLSKLLKLLAKQGPAQQLHLVYEAGPTGFGLQRRLTELGYGCEVIAPSKAPRKPGERIKTDGRDAIGLAQSSRSGDLCAVWVPNEADEAIRDLSRVREDAVRACTQAKQQLGGLLLRRGLRYAGKTAWTKAHFGWLADLKLEAAAAQLALTEYLLAVQAAIARVQRLDKALAQSIVGWRFEPVVAALQALRGVASVTAIGLIAEIGDLSRFAHPRQLMAYLGLVPSEHSSGERVRRGSITKTGNSHARRLLTEAAWSYRHPARIGRDALQRQDKLSQPVREMAWKAQLRLTKRMASLTARGLQPNKACVAIARELAGFVWAVGMQALREQPATP

SEQ ID NO: 472501 - protein, 345 aa, unidentified
MGEVSTIGLDIAKSVFQVHGVDCDGAIVVRKRVSRAKVLEFFAALPSCLVGIEACPSAHYWSRQLQALGHTVKLMPPSYVKAYLKRSKNDANDAAAICEAVTRPSMRFVPTKSEQQQSGLMLHSSRQLLVRQRTMLSNAIRGHMAELGLIAAKGRNGTAELLKIIAHAEDGRIPAAARFSLDVLARQYAAIAAEIGAIEKRIHAWHRSCEESRRLEEIPGIGPIVATALVAEVGDWTAFSSGRSLAAWIGLVPKQHSTGGKERLGGISKQGNSLSAMAARCRGYGCHPICTAARHEAALASPSHGSPADQGRRGCARQQNRTHGLGHDGTRGALQGAEVAAGGII

SEQ ID NO: 472502 - protein, 344 aa, unidentified
MGEVSTIGLDIAKNLFQIHGVDADGTVVIRKRIGRARVLEFFADLPPCRVGMEACATAHQWARELRKLGHDTRLMPPTYVKAYVKRGKNDAADAAAICEAVTRPSMRFVPIKEVEQQSVLMLHRARDLLIRQRTQLINALRAHLAELGFVTNQGRDGVTKLIAIVIAENNLPALPAMMREALRVVVAQLASLQQQIRELERSIHAQHRASDVSQRLESIPGIGVIGATAIAATITDPNVFTSGRDLAAWIGLVPRQSSTGGKERLGGISKQGDRYLRRLLVVGATAVVRHARRHPDKHPWITKLLAKKPAKLVAIAVANKTARIAWAIMNKGGIYRTPALAAAA

SEQ ID NO: 472503 - protein, 352 aa, unidentified
MVVVGADVHKFKHTFVAVDEVGRKLGEKTVKATTDGHITAIMWAREQFGAELLWGIEDCRNMSARLERDLLAAGQKVVRVPTKLMAQVRKSSRTRGKSDPIDAEAVARAVLREPALPAASHDEVSRQLKLLTDRRDVLVAQRTSAINRLRWHVHEIDPERSPAARSLRTAKQQQALADWLNTQPGLLIVELARAELTDIIRLTADVNALEKRLSDQARALAPRLLELPGCAELTAAKILGEAAGISRFNSEAAFACHAGVAPIPVWSGNTEGQVRLSRSGNRQLNAAIHRIAVTQIRMQDSQGHAYYQKLTTAGKTKAAARRCLKRRLARIVYQALHADHQTRSEHPQPAAA

SEQ ID NO: 472504 - protein, 322 aa, unidentified
MAKSITYVGLDVHKDTIVVALAETGLRGEVREHGKIANTPTALKALSAKLAPGRELRFCYEAGPCGYTIQRQLAGTGHDCAVVAPSLIPRKPGERIKTDRRDAINLAKMHRAGELTPVWVPDPAHEALRDLVRARQAAVRTLRQARQQLSGFLLRQGQHYHRPGWTQLHRRWLASLKFEQAVHHIVLEDCIAAVEAATARRDCLEAHIEAALPEWSLAAVMQALQALRGVSVVAAATLVAELGDITRFTNPRQLMAYLGLVPAEHSSGRTRRQGGITKAGNGAARRMLIDGFLREAVETVEDLAIRTHLLRHLARRLADLEG

SEQ ID NO: 472505 - protein, 338 aa, unidentified
MKAVARIGLDIAKNTFQVHGVNAHGAVVMRKQLSRGEVLRFFANVPACVVGIEACAGSHYWARELKGLGHDARLMAGQFVAPYRKSGKNDANDAEAICEAVGRPNMRFVPIKNEEAQAVLTVHRARQLLVSERTALANQIRGLLGEFGIVIAAGLAPLRRRLAQIGAGQQTLPVLARETVGELHDRLRLFDACISQYDRKIEVIARGSEPARRLMRVEGIGPVTSTALVASIGDARAFTKGRQFAAWLGLTPSQHSSGGKSRLGHISKRGNVDLRTLLIHGARSVLQFTSKKTDRKSVWVEALKARSGTNVATVALAAKQARIIWALLARGTEYQPAT

SEQ ID NO: 472506 - protein, 355 aa, unidentified
MNTLNADSIVVGVDVHKYSHTAVAMNAWGEEKGMLNFTNNTLNMYGEWLERMGLKENIIVGLEDVNSYGIHLVENLRTKNYHIRYVPAILTERERKISTKRHKSDAVDAKRVGKVILTKYEDTLPAKESIADARELDTAKSLDLLLMERRDLTKQKTITKNQLHCLIHQHYTESYRLHCPRSFSKKAIKWFQNDLKENKTILAASIVRRLNRLLFVEEQIYTISKEISIIGETSKEAQALSAIHGCGMVTACSIMAEVITVKRFKDKHHFSMYAGIAPTPHESGRKHKMHTNPFGNRQLNRAIHSIALSQIAIKGDPTGKQYYQRKLKEGKTKLWALRCLKHQLAKVVFQKLKYA

SEQ ID NO: 472507 - protein, 351 aa, unidentified
MSRSSFSAAIATLGIDLGKNSFHLVGQDQRGAIVLRIKLSRPQLTQRLANIPPCLIGMEACAGAHHIGRQLQALGHDVRLIPAQYVKPFLKGHKNDYRDAEAIAEAVQRPTMSFVAIKTPEQMDLLALHRVRSRLVSQRTGVTNQIRGFLLERGITVRQGLAPLRQALPEILGSSSDALSPRIVRLIADLAEDWRGLDERIAAVSAEIEALAAQDEHCQRLMSVPGVGPIISSAVVAAIGTGAGFRQGRDFGTWLGLVPKQESTGDRTILGKISKRGNKYLRTLFVQAAHIVLVRRPHGARVGLWPWIETAGRRLHRNMLVIALANKLARIAWAVLARGHAYQPRSASHAM

SEQ ID NO: 472508 - protein, 458 aa, unidentified
MVFAKKGAPRYDGGVHRVKALKTHQGGALTMKFKQSHGQNQRIERITTSHLIIGIDMAKERHVAQATNFRGIVLSNRHLTFTNEQEGFIKLERWMNGLQQKHRLKNLIIGMEPTGHYWFNLANWLLDLGINVVLVNPATTKRNKENRDNTPSKSDPKDALVIADVVSRGYYSDYKRQGHVFQRLKTIMSDREFWITNSVRLQNRIIRWLDIRFPEYPSVFKDWTCPRSMATLKEFPTPLDLQSLTVEEVIQRWKKHMKRPGGVTGIQRASYLLHEAKQSIGDTTALEEAKQDLQRLLEQFERIDEILDKIENEIITLLGEIPLAEQIRSIKGLGPIFTAAILAGAGDLKQYAHGRQLLRRAGLNLAESTSGKRKGQIILSKRGDATLRKYMYLATTQLVANNPAFKQWHEHNVQNKHMKKQRSIFKLLGKLARILIGIVHHGENFSPEKAASVYDQAA

SEQ ID NO: 472509 - protein, 355 aa, unidentified
MTSTKYIGMDVHKESISIAVRNDAGKIVMECVIETKASTILQFIEGLRGDLQVTFEEGTWAAWLCDLLKPHVRKVVVCDPRRNALLQEGNQNDRVDARKLAELMHNDQLRSVYHGDHGLRTLKELVRSYLTITQDLSRVMTRVKAIYRSWAIPCTGKQVYAPRHRAEWLAKINEPGVRRRAEFYYQQLDALRCLRQEVRRDLLTESKKHQAWKQLCGIPSIGPIRAAELLGILQTPHRFRTKRQLWTYGGVGIETSSSADHHVVKGQLERKKKPVEIRGLNRNYNHDLKNLFKGAAIVAATKPGPFAEFYAELLAKGMRPEMARLTLARKIATIVLIVWKRGVCFDAQHLKPQTA

SEQ ID NO: 472510 - protein, 462 aa, unidentified
MIIRLGVDVACRAAHQASLADEQGRFLFVGHRFRTDPDELDTLWARLPKDAERIEVVMEPTRNAWVALAAWFRRHGATVVMVPPEQSADLRDYYNKHTKTDRLDSKVLARLPLLHPEGLHREDSLGPGDELKRAVKIRSGLVHRRTACMARLDALLEILGPAWIAALGSDMTLTALRFLARYANPVQVKRLGKARLAAFFRRSSRQAWADERAEAVIEAAATTLRLWGADGGELDFDALAADIAAEARLALTLTDEINGFDKRIGALYDKADPAGIVRSVPGAGRVCAPQILGRLGDPTRFANLAAVRCFAGLVPAADSSGQADGHRGPTKAGDCCLREALFIAADHARKVDPTLAVRYQRLMLAGKHHDSAVCTLAAVLLTRIAACLRAGTHYLLRDTDGRVITEAQGRAIVAERYTVPPEVRAARRKVTPHRHPRRNERNERAKTGVATRSKASPVPQPA

SEQ ID NO: 472511 - protein, 360 aa, unidentified
MNGHKYVALDVDSANIVAGVHDCKGEQVMQAHIRTNSSDIRQFFKAVNGTVHVTFEEGTQAAWLYDVIRPLVAEVVVCNPRYNKLLQAGSKADKIDVAKLAKLLLLGELQPVYHGDQTMEGLKHLARAYQNLVADKTRVTNRLKAIFRGRAVGCRGSVVFNEEQQEEWLGKLDIEGLQTRGSYLYEALKCLVKLKEKARKAMCLEASRHPAFKLISSKVPGLGPIRTAQIIAIVGSPYRFRTKRQFWSYCGLAVVTRSSADYEWVEGRTRRRKKAVQTRGLNKNFNRPLKAIFKGAAVSAIQKDEFKQYHQRMIDKKIRPEMALLTTARKIAAITLAIWKKGETFDPKRLNQAGQSTDNQ

SEQ ID NO: 472512 - protein, 449 aa, unidentified
MAKKKRKYRKLERSLPVMRPNAGGIDIGATEIFVAVPADRDTESVRSFPTFTQDLHALADWLQQCRVDTVAMESTGVYWIPLFQILEARGIEVHLVNAQHVHHVPGRKSDVLDCQWLQYLHSVGLLRASFRPEHAVCEIRSLMRHRENLVQMACVHVQHMQKSLDQMNLQIHHVISDITGVTGLAIVDAIVAGNTNPKELAKLRDHRIKASIDTVTKSLVGDYRREHIFTLKQSLTAYRHYQKLIADCDQEVQQRVEAFQSNDDGPTAAADSSSATSPTAPSFDLHSHLERIFGVDLTAIPGFDVLRIQTIFSELGADMSPFPTDDTFCSWLNVCPKDGTSAGRRIRTPKVKTKNRVTQAFRMAALSLHNNKSYLGDYYRSQRARHGALKATKNAAHKLARIFYHLVKTRQPYDETVFAKLEARNQKHRLHKLQTLARQMGYSLVQANA

SEQ ID NO: 472513 - protein, 418 aa, unidentified
MNESEQWRQYRAFGAVDWASEKHSVIVVDQAGRVIEDFEIEHSALGWKKFREKLQPYGSIPFAIETSRGAAVEQLLEADMIVYPLNPKSAQAYRERKAPSGVKDDRLDAWSFADALRVDGQNWKALRPEEPLIKELRLLCRDEVSLIEQRSALISQLRHALAEYYPAALEAFKDWTSVSAWMFLQRFPTPELLARAGKRQWQKFLHARRLWGSDQGPRRMEIFAHATELSGSAPTANAKSLLALSLVQMLFVIEKQLAVYRQRIEELFARHPDHDLFGSLPGAGPKIAPRLMAEMGDDRERFDGDAQNLQCLGGTAPVTRRSGKYRHCHRRWACDKHLRHAMHLFAEQSLSRCAWAQIYYQHHRQKDRSHADALRRLAHRWLNIIYKMWVDRTPYDPELHQRNQIQHGSWILQLKKCE

SEQ ID NO: 472514 - protein, 342 aa, unidentified
MYYIGLDVHKKTISYCVKDASGQVHREGTIGANRNELDWWMKTLPQPWTVAMEATIFTGWIYDHVLPHAAQVKVAHPVMLRAIALAKKKNDRIDAGKIADCLRCDFLPECHMASTEIRDRRRSLRYRHLLVRQMVQMKNRVSGLLLETGVSHNKQRLHKVRYFQELISNQEEVPESIRPLLKLSRETIVRCQKTEYALVSSLQRDPLLAERIKRLRTVPGVGPITALTWALEIGDVSRFRSIKQAISYCGLCGDEKSSADKILRTPLSKQRNKHIQSVLIEAAKLAPRQNHELAVIHEREKQKGNANRATLAVARKMVAYLLAVDRREKDFVPSEERSTAAA

SEQ ID NO: 472515 - protein, 417 aa, unidentified
MSEYAALVALDWADKKHAVCLFAETTGQREQRSLNHTPAALQEWALGLRQRFPAAPIAVGLEQSRGPLIYALLKYDFFVLYPINPKTLARYREAFSPAKGKDDPADADYLLDLLQHHRERLRPWRPDDQKTRTLQLLVEQRRRLVNDATRTTNRLTALLKSYFPQVLDWFSDLRRLIVCDFLDRWPTLDAVQRARPATVHKFLRAHHSVHRLTNERRLQEIKTAIPLTNDPAVLNSSQLIVKVLTAQLRTTILALRELDRHLEALCLTHEDYELFAALPGSGTVYAARLTAAMGSDRTRWRTVDDLLRFSGVAPVIERSGKQHWIRWRYFCPRFFRQSFVEYAEQSIQHSFWARAYYSMQRAKGKGHYASVRALAFKWIRVIWKCWQTRTPYNEVIYLERLRKTGSPLLKWAADHQQ

SEQ ID NO: 472516 - protein, 334 aa, unidentified
MNFVGIDLHKHYSQFVVLDQNGKVVTQAKLPTEREAVSKFLSGLKGPAKAAVEATRNWYWFYDLVESLTEEAELVCPSKMRVIAESTVKTDRIDARVIAELLRVNYLPTCYVPPQEVRQVRELLRERAFVVRLRTMVKNRIHGLLDKLGVEHPFDNLFTGRGLQFLKSLELEGVYQLELEECLGMVEKLDEMEKKSNQLIRQLARDSEECRLLMTIPGIGYHNALLIIAEIGDINRFATAEKYASYCGLVPTVHISERTVHYGHLTPKGNPWLRWVYVEAAHLARRKSTRLANLYSRVAAKKGAQKAIGAVARELAVISFAVLRDRTEFKDRRW

SEQ ID NO: 472517 - protein, 338 aa, unidentified
MIAVGVDTHKLEHAVCALDPVGQTLAQCSISASSQGYAELVRWLGELPDDVIVGIEGAGSYGAGLCAYLQDAGIRVVEVERPRRATRRSRGKSDQIDARLAAQKVLAQDGLSTPRCGGRRQAMSALLVGYRSCVQERTRVLNELLALHTTAPIALREQLGTGTGKQIATRLLKLRRNPHARASDQIILDVMRDLAQRVGDLTRRADTHKASLDALIRELDPTLLDERGIGPISAAKLLICDVRRLSGEAAFARCNGTAPLPASSGQTIRHRLSRGGDRQANSALHTIALTRARCDPATRAYIERRLAEGKTRREAMRSLKRHLSRKLYNRLLQIPLTT

SEQ ID NO: 472518 - protein, 443 aa, unidentified
MDQCAPYPLRGRAARDGVCVSVRVLRGVLRKADDMNHNVAGIDVHKKVLAVAVGKATDDALVFQRKLFGTVGRSLAELAEWLKERGVKEVVMESTAQYWKPVWLALEGSFDLHLAQARSNLAPRGRKTDFRDAERMVRRLLSGDLTLSFVPSAEQRQWRLLARSKYQLRRDRVRLQNQLEGLLEEGRIKLSSVVTDLLGLSSLRILRALAAGENDAVKLAALADKRLRVSGEDLAEALRGSLTRIQRLLLNQFLTRLDVIDGQIRELDRTLAEEMEQYSDAIHRLSQIPGVGPDAAAQIIAEIGPKAAAFAAPEKLASWVGVCPGRQESAGESTSDRSPKGNRPMRRILTEVAFAAVKTKDSHFQEVFRRLVPRLGIKKAIWAIAHRICRLIWKLLHEGAVYIEQGARGQDPQAIRKRARKLVGDLRRLGYKVLIEEPTPKAA

SEQ ID NO: 472519 - protein, 349 aa, unidentified
MLADEVDYVVGVDTHRDQHVLAVVVAGTGVVVARRSVRSSARGYAEALRFAQAAADGARVWAVEGAGHYGAGLARHLSGRGETVLEAGRGPRDQRRLQGKDDSLDAVRAARTALASETPALPRTGQQREALRLLLLARRSAVDVRRLALVQLRSVIVTCPDQLREELRGLPAGRLVERCSRLRRSPSRTPDELAATLVLRSLARRIQAATVEAAELEREILAHVRALAPQLLDEPGIGPIVAAQLIVSWSHHGRVRSEAAFARLAGVAPVPASSGQTTRHRLSRGGDRQLNRALHTVILHRRQHDPATKDYIARRVAEGKTRRDAVRLLKRYLARHLYRLLDNQGPLMT

SEQ ID NO: 472520 - protein, 348 aa, unidentified
MKIVGCDLHARQQSIAMLDTETGELTEKVIRHEGNGVREFYAALGNSVVVGIEATGSMQWFLELLEELGIESRVGDPAKIRAAETRKQKHDRRDARLILDLLERDRFPAIWMPTRGQRDLRSFLRDRHQWVQMRARLQHTLQAIALNHALRKGPALGSGRGQEALRKLPLPPYASQRRNELMSLYAQLQRRIQELDKQVEEQAQQRPQARRLLTHPGVGPVTALATDVFLGDPSRFTTANQVASYIGMIPSEHSSGKRQRLGKMSKQGNSLLRYLWTEAGMHATGKDPELKRFYRRKLIQKGMGKARVAAARKLGIRLWIMMRDEIDYEEFCRRGKLRQIGESPCGNA

SEQ ID NO: 472521 - protein, 466 aa, unidentified
MEPFYMGIDVSKGYADFMIINSKKHPVVQGFQLDDTFDGHRSLYNILGQFLADHSDSTLFAGMESTGGYENNWYNSLIEFQGSLNIQTARLNPLGVMHNSKADLKKNTTDNISAQNIAEYLIAHPEKVVYQQHDQLFSLRKQWGFIKMLIKQSTQFLNQLNTLLYTANPELLRYCQGGVPRWVLNLLVKYPGAARLKKAHVKTVAKIPYVSPKLAQHLIANAKHSVASSTEYTTEKLIKATARQILHLKKTIAEQTKCMVNECSIPEIELLKTFPGINDSSAIGLIIEIQTIKRFADAKKLASFFGVHPVYKISGDGVGGFKMSKQGRKEPRHILYMVALSAIRCNPLIREIYEKHQQQGKHNMAAMGVCMHKILRILYGMLKHNKPFNPQIDIANRLRSARIKKETPVKNTNRRFQDYDQKAPVTRRQRKKRLERELSHSVNHTKCGIIAPVPLANIIADTVPKL

SEQ ID NO: 472522 - protein, 436 aa, unidentified
MMNKETTKTWGRVIGFDSHPDSFTAAVLRGPTPAAAVVEKTFNKVPIGQLCSWAKKHTTAEDLVVLEASGNSFQVVRTLAACGRQAKVLESCHLGKLKEAHANNDKISAVRIGKAYLAGTAKEVWVPDERTQERRDWFHAHRKTVKRLTQVQARLRSYLSDNGVRLEQHTKLTEVGEVEEQIRQARLWSERQWSVIDILLQEIRHADQQRRHWRRLIAQEVLADPQLLALVRLCGVREMVAFALGAFVGNIQRFDHPKKLVKYVGLNPALDESGNNQWTGGIGGHGNKYLRCLLVEGAQAILRCSRTPLALWGKRLLARKGQINLVVAAMARKLTVAAWYLMMGRWTPLEEIDDRLCVKVGKIIGQVGAEALKRSGKNSKILRQEVYEALKAAPRTKLPEATVYVLGPEATPSPQEKNRRHLIVTQARALARATSL

SEQ ID NO: 472523 - protein, 407 aa, unidentified
MDPTQHVPAFAGVDWGGHEHQLCVVDGQGHKRLELRVTHDVGGLAELVMQLAKHGDRVPVAIERAEGLLVEHLQARGHPVFPVSPRIAARARERYRVAPVKDDRFDAFVLADTLRHEHGHWRALAAPSPLLSELRALTRDRDRLLETQQGTEAQLRAILESYHPAPARLFSSLDRQIALAFIADYPTPQVASRVRTARMAGFLRRNGYTGRVPAQVLAERMRANLLSGSAGTVAGKSHSAKTFAHLLGVMNEALAEFDDAIASVVAEHPDAKIFASFPGVGPILTAVLLAEIGEDRGRYTTTQALLAESGLAPVTRSSGRSHSVRFRYAANTRLREAAMWWAFNSLKTSPWAAARFRQARDERGQRYHRALRGLAARWMRVAWRCWQDGTTYDPTLHGGAAIAERSG

SEQ ID NO: 472524 - protein, 424 aa, unidentified
MTKDPTELDHLLADIRWWVGIDWASQAHRACLLDARGRILGQESFAHSGDGLAALRLWILEKTDATPAQIAVAIEVPHGPVVETLLEHGFAVFAINPKQLDRFRDRFTPAGAKDDARDAQALGDSLRTDAHCFRHLRRDEPLVIELREASRLAWELRQERVRLANRLRDQLLRYYPQALGLTDDLGAEWFLALWSMAPTPAKARRLRASSVARLLKTHRIRRHDAQSALALLRQTPLPVAPGVTEAAGAHIRSLIPRLRLVNQQIGETDRQLEALCTRLDQEPLPGQTGEQRDVAILRSSPGIGRIVIAALLGEAYQAWQRRDYHALRLMSGAAPVTKQSGKHKLVVMRHACVPRLRWAVYHWARVAIQQDPHSRSRYHQLRSRGHSHGRALRTIADRLLKVACAMLITQTPYDPNRHATHPAA

SEQ ID NO: 472525 - protein, 356 aa, unidentified
MTNTIPMDVIIGVDTHKNVHAAAAISGAGVHLATTTIPTSNKGYGALEAWAKSMGAIQAFGIEGTGSYGAGLSRFLRERGHTVVEVNRPNRQLRYQQGKSDAVDAESAARAVLAGQAAGQPKSGTGAVEMIRHLKIARDTAVKARTQAMQTLKAIIVCSPDALREQLDQVSGKMTLLRRLVALRPGPLTSTLASAKASLRAIARRWLLLDAEIKQHDAHLETLTAARAPELMKAHGMASGTAAEMLLLVGDNPERINSEAAFAKLCGACPIPASSGKTIRHRLNRGGNRQANAALYRVVIIRMRGHQPTLDYVRRRTAEGKSKSEIIRCLKRYVAREIFGYLCPRPALAGAAATSS

SEQ ID NO: 472526 - protein, 323 aa, unidentified
MDTLNCLGIDIAKKTFDVGLLRNDKFRNKKFPNNSEGFNQLDAWLLKQGAIRVHACLEATGSYSEALAIHLHQVGHMVSLVNPARIKAFGQTELQRNKTDRADAMLIARFCSKHHPAFWTPAPPEIRELQALVRHLDDLIGTRSQLANRLSDGLQIESVLESLRALTKALDAEIKLTKKKIRELLDRHPGLKADRDLLVTIPGIAEQTAIKLLAEIQHLRDYKHARQAAAYAGLSPQLIDSGTSLKRTRLSKTGNGRVRKALYMPAIVASRYNPVLREFSNRLSQRGKSKMVIIGAVMRKLLHLAFGVLKTRKPFDPNHAIAA

SEQ ID NO: 472527 - protein, 344 aa, unidentified
MEIRTVGIDLGKSVFHLVGLDERGNVVAKKRFSRSQLLSYTANLPSCLIGMEACCGAHFLGAKLARQGHQVRLIPAQFVKPFVKSNKNDYIDAEAIAEAVQRPTMRFVPIKSDEQLDLQALHRVRDRLISRRTGVINQLRALLLERGTTFRKGRRYLLRQLPLILEDAEQNLSSRMRRLLEQLWQEWKSLEEQIQRSNDEIESIARQDDACQRLLAVPGIGPLVATALIAAVGNGTAFRKGREFAAWLGLVPRQYSTGGKPKLLGISKRGNPYLRRLFIHGARSVAMHLNRDEHALGTWMNRLESRAHHNVFVVALANKLARIAWAVLAKEKTYCPLPVQLSSV

SEQ ID NO: 472528 - protein, 397 aa, unidentified
MYLNIGIDVSKNKHDACILNENGEQIGKFMKLTNTKTSLDKFLEQIKVISEKHGAEVRIGLEATGIYWYSLFSKISEDHKISIYNPIQIHAFANVNVRGSKTDKIDAKTIANMLRFGNSPQTDYSDKQRLELREYVRFHWKLTNKKTNLKKRFKRNLHLVFPGYDQVFKDVFTKTSREILSQSPTPDDILEMGEEKLLKLMKTASKNHIDKNKARDLIAKAEDTVPSEILKESSLFELQIMMEMIENIEKHLDSLENRIFAIWDKVKDKHYIQTIPGISEFRAAMIWAEIGDIENFKHPDQIVAFAGLDPKVRKSANKEVIGGPNKRGSSTLRWALGWAVQESKNVNPVIAPYFEKKIAEGKHYNTARCAASKKLIRIIWSVEKNKKPFQIPSNLKS

SEQ ID NO: 472529 - protein, 345 aa, unidentified
MYATQPREPSYDDYQNWSGYRLFQVHGVDENEQTVVRRQLRRSEIAKFFNRLPPTRIGLEACGASHYWARLLRGLGHEVVLLPPQYIKPYLKRGKNDANDAEAICEAMSRPGMRFVPIKSAERQAELMPLGVRDLLIKQRTAVINAIRGYAAEFGVIAAKGPVKVAELLQQAHAEEASVPAVALDMLRLLAAQLDALDVKLKQIETRLVAVHRENPLSQCLASQPGIGPIGAVSFALKVTDPKSFRSGRHFAAWLGLTPKDNSSGGRRRQGRISRQGNETLRKLLVLGATAVIRFARPGHASPWLLNLLARKPRKLAAIALANKMARTLWAMMVSGEVYRRPLPT

SEQ ID NO: 472530 - protein, 433 aa, unidentified
MNTPHPYDLVIGLDRSDKKADLHLITTGTGQRRSVTIDTAPEALWEWLLELRQQHPQARVALCLEQPAVHLIAFLEAYEWITLYPINPITLQKFREAFVTSRAKDDAKDALYLAELLLTHHHQLQPWAPEASATRAVQQLVFHRRAVVDERTGLTNRLIALLKQYFPQALVLCGEDLWRPLATRFLLKWSSLQAVQKAKTATLTQFYYLNGSRSAKLLEQRLALIQKAVPVTDETALIESFALRVQLIGRQLQLVQQTIRHYDQQIAQAYAAHPDREIFASLPGAGPVLGPRLLASMGSQRERFGTAADLQHYTGVAPVTKRSGGSCYIHRRYLCPKFHKQSFHEYAKESILWSRWAAAYYLQQRTKGCPHHTAVRALAFKWQRVIWRCWQSRTVYREETYEGALRKSGSPLVALFDRVELGKSPFKKPVKKS

SEQ ID NO: 472531 - protein, 423 aa, unidentified
MSEPQSVFSQLTHFGGFDWAQCVHQLVVVDPQGNIVLSLRFANDAAGWALFREKIAAFPRLGVAIETNCGPAVERVLDTGLSVFPINPKAAERYRDRKAPSGAKDDERDAWSQADALRTDGHGWRPLLAQDPLTTELRLLCRDEIALIEQRTALVNHLKATLHEYYPAALEAFDDWTSTGAWQFVITFSDPHRLASAGKRKWERFLHAHKLYRPQTIQKRLETFAAAAKFANPNAAVTKAKTLLAVSLAKQLCLLESQLEEYRRRIIALFNDHPDNGCFGSLPGAGEKIAPRLLSELGSNREVFASAEALQSYAGTTPVTKKSGKSRIVSMRRACNKTLRATVHLWADLSRKSCVWAQTYYEKKKTDGMSHAAALRCLGQRWMKVLWKMWQTKTPYNEALHMKNQVKHGSWVIKLLPSTTAST

SEQ ID NO: 472532 - protein, 316 aa, unidentified
MDGTNQVSIGIDVAKATLDLHLLPSGQIQTLPNTKAGCEQLKQELPDPATCLIVLEATGGFEREVVAELIDAGYRVAVINPKRARDFAKALGLLAKTDRIDARVLAVYAEKVQPAPIEKTPEKQVEIQQLVARRRQLIDIRTQESNRWDVTQVKAARKSIQAVINTLEAEIRGINKLIEALLESDDDWQNKIRLIQSVPGLGNVTAATVVADVPEIGKLNRQQISALIGLAPFNRDSGAMKGKRSIGGGRKSVRCVLYMAAMTAKRFNPVIKAFAARLAQHGKPHKVIITACMRKLLVILNSIIKSGRPWMAQTTS

SEQ ID NO: 472533 - protein, 336 aa, unidentified
MAIQMGLDIHRDQMTYELIDTDTGELRRGRVIPGTRAGLRRLLGELPPGPVDVALEATTGWRFVVEELQATGMSAHLAEPAETRALRGPKRRAKTDRADARHLRELLGQGRIPEAWIPPAFIQDLRGRVRLRQALVEERTAWQQRIHALLFHHGHPRPAGPLSDAVGLDLPPAAAETLQVALGMIEELTARLRPLDAELRRFARAHPACRALMGQYGVAEIISCALLAELGDTRRFSSARHAVRFAGLDITVHASDGRRSPGRLSRQGSPLLRWAAYEAAQSAARAGSPDRPYYESLAGRLGKARAKLALARKIVRRSHHILRELGEDAMATPAAA

SEQ ID NO: 472534 - protein, 342 aa, unidentified
MKLFIGLDVSLAKTSICVLSEYGKILKEAEVESEPEGLARWLNDLDGCIAAIGLEAGPLSQWLHRRLTEAGLDAVLMETRQVKGALKAMPIKTGRRDAEGIARLLHLGWFRPVHCKSLSAQETRAVLGARKAIQQNMIALEMSLRGLLRNFGLKVGAISRGRFETRIQELADGNPMLETATAPMLRARASLRQELAGLEKCVRQLAWDDPVCQRLMSMPGIGAVVGLTFRAAIDDPRRFRSSKRVGPWVGLTPSRNQSGERDVSGGITKAGDVKLRRALCQAATVMMNRGRSTWLRTWGAQLAQRRGRKIAMVALARRIAVILHRIWVDGTTFRSDATTKPV

SEQ ID NO: 472535 - protein, 335 aa, unidentified
MNSAKKIVGIDVGKEKLDICYPNGNKETIRNIKSCRTKVIKKAAQLGAFIAFEATGPYEEPLADECLARGVKAVRLDAWGTRKFAESQGRIEKTDAIDCEMIRDYAASLKDEKLHFIKQRSEAQKRLKKSVRTRKNLLKARAIIANQFEDDLDPETARHLKSALNSLDKNIAKVEAECDAAIASDERLKELDRRFREVKGVGPCLSRTVLAQCPDIGDFNSKSIAKMCGNAPLDHESCTIKGKAKPRRGRSDLKKALYMAAVSASRNNHILREFYQRLVANGKVRKVALTAVARRIAILLNTIAKHPDFAPEKDPKDIAKATGKTQGRGRPRKAV

SEQ ID NO: 472536 - protein, 284 aa, unidentified
MRFYTQQHPHYCGIDLHARTMYLCILNQAGAIVLHRNMKADPDSFLSAIAPFRDQIVVTVECIFTWYWLADLCAREGITFVLGHALYMKAIHGGKAKNDKIDAHKIAVLLRGGMIPQAYVYPADMRSTRDLLRRRMHLMHQRSQLLAHIQNTNSQYNLPEIGKKIAYKSNREGVAERFADVSVRSSITFDLRRIDFYDGLLNEVELEILRHAKLHNPNTLHLLDSVPGVGKILSLVLLYEIHDICRFPRVQDFVSYCRLVKPKKESAGKTYGFIGAKIGNAHLK

SEQ ID NO: 472537 - protein, 347 aa, unidentified
MRFYTKQHQFYCGIDLHARSMYVCIVHQEGDILVHRNMKAAPEPFLKAVAPYRDGLVVAVECIFTWYWLADLCAQEGISFVLGHALYMKAIHGGKAKNDKIDSQKIAALLRGGMLPQAYVYPAKMRATRDLLRRRTHLMRKRAELLAHVQNTNSQYNLPEIGKKIAYKANRTGVAERFDDAAVQKTIEVDLALITYDDELLKDLELYILKTAKHHDANTLSLLQTIPGVGKILSLVLLYEIHQIDRFPSVQDFASYCRLVKCSKESGGKRLGTSGKKIGNAHLKWAFSEAAALFLRNNPPGQKLLARLEKKHDTGKALSILAHKLGRAVYFMLKRKVAFDLEMFLQT

SEQ ID NO: 472538 - protein, 370 aa, unidentified
MDHTTFIGLDVHKATVAVAVADDERRGEVRDLGIFANRPDVIAKHARRLSSGGRRLSFADEAGPCGYGLHRQLAGLGHQCQVVAPSLIPIRAGDRVKTDRRDAAMLARLHRAGELTNVWVPDPAHEAMRDLVRLRADAMHDVTRSRQQLQGFLLRHGRVYAGKKGWTLAYRRWLTTVRFEHPAQQIVLQDYIHAVRDAEARVSRIMDHIETSLPDWSLSPIVEALQAMRGVGLIVAVTLASEVGDFNRFANPRQLMAYLGLVPSEHSSGASIRRGGITKAGNALARRVLIEGAWTYHMQARVSRKLHDRIDELPSAIRDIAWKAQVRLCARYRRLVVTGKQKVIVVTAIAREMVEFIWAIAREVKISAAS

SEQ ID NO: 472539 - protein, 340 aa, unidentified
MKLTAVGVDVAKRVFQLHWVEAETGEIISKQIKRAAFLEHFVNRAPCLIGMEACGGAQHWARRLIEMGHQVRLMPGKAVKAFVSGNKNDVADARAIWTAVQQSSVKSVAVKSEAQQAVLALHRMRQQLIKFRTMQSNGLRGLLTEYGEVMAVGRAALNKAMTDVLARLSERLPAALVDTLREQWSRLGDLDEQIAEIERRLSAWMKQDRSCRKIAEIPGVGLLTATAAVATMGDAKAFKSGREFAAWLGLVPGQVGTGGKVRLLGISKRGDTYLRTLLIHGARAVLTHAKEPGPWVEQISKRRPPNVVTVALANKMARTIWALLAHDRSYERSYVSVKPA

SEQ ID NO: 472540 - protein, 389 aa, unidentified
MKIFVGIDIAKLNHFAAAISSDGEIIIEPFKFTNDADGFQLLVSKLESFDKNSLIIGLESTAHYGDNLVRYLVTELYQVCVLNPIKTCQMRKNNVRKTKTDKVDTYVIAKTLMMQDNLRFVSFFDLDMMDLKALGRFRQKTIKQRTRLKIQLTTYVDQVFPEIQYFFKSGLHQHAVYALLKEAPSPKEIASMHMTHLANLLKVNSHGHFTKEQAKELRVLAQKSVGANDSAISIQITQTIQQIELLDSQLEKIEAEMTDIMKFNDSVIMTIPGIGYINGGMILGEIGDIHRFSNPNKLLAFAGLDPSVYQSGNFQAKTTRMSKRGSRVLRYALVNAAWNVVRNNATFKAYYDATRSEGRSHYNALEHCAGKLVRVIWKMLTDEVEFNLE

SEQ ID NO: 472541 - protein, 409 aa, unidentified
MGASGGQPRVSAGKQSPGVPVMTQAPVPDSVPTAPDYDRTLVLAIELSNKSWVLAAQVPGLPHVKAKRTIEPTVEALLAAIQGYREWAQAAGRQVERVVATYEAGWSGFWLARWLATHGIETHVVQPSSVPVDRRARRAKSDGIDAGLLLRTLLAWLRGEPRVCSMVPVPAEADEDARRCVREREELVAERVALVNRIGAVLATLGVGEYNPLLRNRRERLDTLRTALGTPLPPHAHGKISRMLDRLDLVRAQIANLEQERDAVLENEAPDRVGGMIQQLATLRGIGVQSATVLVREAFVREFANGKALGSYAGLCATPYSSGGTEREQGISKAGNRRLRTVMVELAWLWQRYQPSSAPVSWFRERVGGTGARMRKVMVVALARKLLIALWRFAAQGVVPEGAVMKPAT

SEQ ID NO: 472542 - protein, 298 aa, unidentified
MREIIRIGVDTSKYIFQLHGVDGAEQPVLRKRLSRKQMLEFFAKLPPTVIGMEACGAAHYWARELGKLGHQVKLMAPQHVKPYVKRNKNDGRDAEGLCEAMSRPTMRFVPAKTAEQQAALMLTGLREQMVARRTQLGNMIRGYAAEFGITAAKGLDKIELLLAQLAQDENVPPPARDLFALQASQYAQLQTELKAIEARLKAWHRANADSRRLAEIPGIGPVGAPELIMKTPDPAAFTSARHYAAWIGLTPKDHSTAGKTRLGKITRAGDERLCSILVAGATAVIRQAMSGRGGGARQ

SEQ ID NO: 472543 - protein, 425 aa, unidentified
MLYLAIDQHRKQLTVNLRNEAGDVLLRRQVSTQWPRVREFLAEVQKQALPEEGFVVILEVCGFNDWLLKLLVEYGCRETILIQPEKQSKKKTDRRDANTLGEILWVNRQRLLAGKTVQGIRHVQPASEQDAADRQITALRKRLGQLRTRTINKVKHILRKHNLEQGCPTKGIDTIKAKKWLGELALAAIDRLEMDQLLAQWKLWDEQIKKVETEIVNRHAESKTAALLVTIPGAGAYGSLALASRIGPIERFPRPGSLPNYWGLTPGCRNSGDTTDRLGSITKQGSTMAPDHAAPRLENCPSGSDAPFGDDHLAHGEAPTTLRDRWPTPEETDGTSGVRQDLGSGSTEGGRPFAPSPSLGPKWLRQRVRAEATAKAEGARGNPQENEIKEQRLHRPFFVQKKRSSRTQGQSESVNGLGLPGGASI

SEQ ID NO: 472544 - protein, 412 aa, unidentified
MDRLYECCCGLDVHKQTVVACLIRPAHGVGQTKTIRTFGTMTQDLDALAEWLAEAGCTHVAMESTGVYWKPVYNRLEGRFTQIVANAQHIKAMPGRKTDVKDCEWIADLLQHRLLTPSFIPSQAQRELRDLTRTRTTLIDERSRVVLRLQKVLEDANIKLAGVASDIMGVSARLMLEALVAGMTDPALVADLAKGRLREKREALEQALAGRVTDHHRLMMSSHLTHIDFLDEQIEQLNQAIAERLRPFEAELTRLETVPGIGRRTAEVLAAEIGLDMSHFPSAAHLASWAGMCPGNQESAGKRKTGKTRKGSKWLRRALVQAAQAAARKKGCYPATQFRRLIVRGGAKKALVAVGHTLLVTVYYLLTRHEEYHDLSPVHLDAELQARETKRAIRQLEAKGYTVTRSSDPAAA

SEQ ID NO: 472545 - protein, 317 aa, unidentified
MSLALFASFSGVDVSEGRLDVHLLPDGSSTSFAHSAAGIGRLVAWLASRERPLVVVEATGGLERALVAALGRAGVPVAVVNPRQIRDFARAAGLLAKTDRLDARVLALFAERLRPPPRPPGTEADALLVGLVLRRRQLVVLRDAERNRRRRAAEPALRRSLEDHLTWLTSEIATIEAALAARLEALAATRDRAALLLSVPGIGVLTAASLLALLPELGRLDGKAVASLAGVAPFARDSGLMKGRRTIWGGRKTVRTALYMATLVATRHNRTIKAFYERLRAGGKAKKLALTACMRKLLVILNALLASGTSWRAGQPA

SEQ ID NO: 472546 - protein, 354 aa, unidentified
MSIIGGLDVHRGQITFDWIDRDSGEARRGRITPATRDRLRRWLQALPCREGAFAVEACTGWRFVAEELRAAGLVAQLAEPAETSSLRGPKRRAKTDRTDARLLRELLEQGRLPACWIPPAWLLDLRTTVRLRKTLVDERTTWQQRIHAVLYHHGVHGVPRPEQQLLTRATRDWLAGVALAPAGRHALVVALRQIDAVDAELDPIDRWLRGVARRQAGCRALIAAHYGIGPITAPTILAELGDVRRFAGGDQVVRATGLDITVWSSDGKRSPGRLSRQGPEVLRWALFEAAKAAARPTSPDYPFYQQVKDRQGGNRATLAVARKLARRMRHTLLGLGDAALVPVDQLPPPLAEAA

SEQ ID NO: 472547 - protein, 516 aa, unidentified
MSVTTSCVCLELRPLPSPGVTRLQRYYGPLRHPSAPDLSLTGVRLIIPDHALGLPVLRALSLCACCRHYPGAAARRSPRSSHPAVSAFPDSAVGSACTSTFSRSHDVLWVAIDSASSEDRYRPFLELIMNVEADKSEPLTAIHTDLGAIFVSLELSRSSWLITSLSPGGGEKMSKHSVPGGDFAGLMERFAQLQEKARLRTGQSFRIIVVQEAGLDGFWIHRALQNEGIESHVVDAASIATSRRRRRAKTDKIDGETLVRVLLAYKRGEPRVCAMLKVPTPGEEDRRHLCRERKALTAERVRHVNRIKGFLFSQGISGYQPLRRDRRQRLEELQTGDGRAFPQHLKALINRELDRLELLLKHIKTVEAARDALLAEEQTAKPGPAAMLLDIRGIGPEFAAILWSEGLFRHFENRRQIAAYAGLAPTPWQSGAVDREQGVSKAGNPRLRTTLIQLAWLWLRNQPRSALSVWFHERVSRNGGRLRKTTIVALARKLLVALWKYVTTGVVIEGVTMKVA

SEQ ID NO: 472548 - protein, 317 aa, unidentified
MVYLGIDVGKADFHCALLSDGRSKPNSFPNSQKGFERLRSWLRNRGVERVHACLEATGGWSEEVALFLQEQGYAVSLVNPMAIKSFGQSELSRTKTDKADAALIARYCSAMQPRLWEPPSPSQRRLQRLGRRRTALVEMRTQEHNRLEGPGIVEVRDSLEKSIAFLERQIADIDREIASAIYDDPDLRNKRDLLESIPGIGERVASTLLGELPQITEFRNGKALAAFVGLCPREFRSGSSVSTSWLSKVGNPHVRRVLYMPAITAMRCNPILVDFSARLRARGKRPKQIIAAVMRRMLVIAYGVLKSGRPFNAVPSS

SEQ ID NO: 472549 - protein, 386 aa, unidentified
MTQHPHITASNGLNYDCTLILAVEISNRSWVVAAQVPGLRQKGAKQQLAPRADALMAAIEGYKRRAAAAGMAVDRVIVAYESGGSGFWLARWLQQRGVEVHVMQPSSVPVDRRMRRAKSDRIDADMLLRTLLAWLRGEPRVCSMVPVPDEATEDARRPIREREELIRARVALVNRIEAVLTVLGAGEYNPLRRDCRERLGQLRTALDQPLPPHARAQIERLLDRLDLIRQQVADLEAQRDQAVEGEAAGRTEQMIQRLARLRGIGVQTATVLVHEAFVRRFRNARALGSYAGLTGTPYSSGGTQREQGISKDGNRRLRATLVELAWMWLRYQPGCALSRWFHDRLGGSRGRLRKVMIVALARKLLIALWRYLQDGAVPQGMELKPA

SEQ ID NO: 472550 - protein, 354 aa, unidentified
MDKTTSRTVSALSSLGVDIGKDVFHVVGFDLEGEVVLRRKIKRLGLERAFKKLPRCIVGMEACLSAHFVSRTLRELGFEPRIIPAIYVKPFAKGQKNDYNDAEAIAEAALRPNLKLVQEKTQDQLDLQACHRVRARLVSRRTATINQIRAFLIEQGITVRRGAQALRKSLFAILRNREDEMSPRMSDLIVGLYEDWLWLDERIETVTREIEEIGHSEANCQRLMSIPGVGPMISTAMVAAVGTGEAFARGRDFGAWLGLVPRQYSTGGRPILGRISKRGSKYLRTLFIQAAHIILMRPNNWPRFSFGAWLQQAATRLHRNKLATALANKLARIAWSVLRNRKRFDAHRIEVAAI

SEQ ID NO: 472551 - protein, 355 aa, unidentified
MQFYCGIDLGARKTHVCLIDEDDHKLLDMKMYNDFESIEAALRPYKSSLEVVVESTINWEWLVYGLQKYDYEMKLAHTLGLKAITWSKKKTDTWDAFTLAKLLRGRLIPQAYIYPYELRPVRDLVRERIRLVTKRATEYGAMNRMLLKYNIQGFDRNSVKQLGEKDMHELYHHPFVRVKATMELQRIKLLTEQIRHIEKALFERARQDSMFTLLQTIPGIGDILSLTILYEVGDINRFAHSRGFCSYCRVVPGIHQSSGKTYRSPNSKQGNRYLKWAFSQAAIMAIRYYPEIRRLYERLAAKRRKAARLVARSIIAHKLAQAAFHVMKHNEPYKEELLFQFSKDNAEGKTVTPVA

SEQ ID NO: 472552 - protein, 344 aa, unidentified
MIYYAGVDVSLRTVNICVIDDQGELVAETKLASDVQDIVAYLDDLEFDVESVGLEAGTLMQYLTYGLQAAGFEVVCMEARQVKGALSAMRNKTDKHDARGIAQILRSGWYSRVHVKSMESHHIRMLLSSRKAVLSKCVDLENEVRGLFKIFGIKLPPKLGHGAFDVAVRDIIETDERLSQALLPLLDARLFLYQTFRILDNRTRKMAHADTVCVRLMTVPGVGFITALTFKSGVDDPSRFKRSRTVGAYFGLTARRFQSGEMDIDGHISKCGDADVRGTLYTAANALLTRSSRWSPLKAWGMKLAKTRGHRRAVIAVARKLAVILHRVWIDDTQFRWGTEGARS

SEQ ID NO: 472553 - protein, 339 aa, unidentified
MELYAGLDLHSRNTYIGIMDETFNRVFKKRVSNDLDQILQTLKPFKKRLKGFVVESTYNWYWLVDGLMDAGYGSAHLANPAAIKQYEGLKYSDDQHDAFFLAKLLILGILPEGYIYPKQHRPVRDLARKRMFLVQHKTAHILSLQSFIQRCCCVKISTGDIRNLTVEALQEWLKEEYLLLSAQASLDTINFLKQKIKRLEKAIIQRVKLKKEFGQLLTIPGVGNILAMTIMLEVGDIERFPKVGNFTSYCRCVPSKRLSDGKSKGYGNRKNGNRYLSWALTEAAQLGRRYNEQFRRYYNRKVAQANTSLATKALGNKLARICYYIIRDQVPFREELIVH

SEQ ID NO: 472554 - protein, 369 aa, unidentified
MARNGTLAKSQELQPSFQTTTEQITIGIDLGDRFSHCCVLGPDGKILTEGRLRSTPETMARHFRDLPPSRIAIEVGTHSRWLSQLLAEWGHEVIVANPRNLRMIADSIRKSDQVDAHMLARLARVDPKLLSPIAHRKQEIYPDIIQLKARDLLVKNRTRLMNAVRGVLKSAGLRVPNCGTSCFPSKAAQCIPDELKPGLTPLLETISHLNQQIYSFDKAIESTAQNRYPETIRLRQISGVGSITALQYVLTIGDPGRFAHSRDVPAYLGLTPRRHQSGSVEQQLRISKAGNKQLRCLLVQCAQYLLGRFGPDSDLKRWGTRMFERGGKNSKKRAIVAVARKLAVLLHRLWVTGDTYHPLYNVATSSGTP

SEQ ID NO: 472555 - protein, 422 aa, unidentified
MQEGVLPESRGEAVMDVVHGRCCGIDVHQASLAVCVSIKEEGVSEKHKLLCGTTTAELLRLLDWLREQAVTHVAMEATGVYWKPVWHVLEGQFELLLANPLQVKALRGRKTDLKDGERIADFLQHGLLQGSFVPPRAIQELRDLTRSRTQLKQEQVRISNRILKVLEDANIKLNTVMSDVMGVSGREMLRAIIEGQTDAGELAKLARGRLRGKIPLLQQAARGSLNEHHRFLIEQWMALWDEQAVRIAKFEERIEEKMRPFEPVVKTWASLPGIERVTAWTVVAEMGVDMTQFPTAAHAASWAALCPGQEESAGKRQSGRTRGGNVWLRRALTQAAWGASVTKGSYFKAFYHRLAARKGKKRAIVAVAHALLVTGYLLVATGRKYEDLGVDYFDRLDQERLTKRLVKRLERLGHRVSLQPAA

SEQ ID NO: 472556 - protein, 358 aa, unidentified
MVSIIVGIDPHRKVFTASVLDESGRDLDHHHFANTGKGHADALVWAQSIGSIDKIGIEGASGLGRPLAEFLVGRGLDVRDVPPHKTALRQRGRHEGKSDRLDAHRVAAETQANDRLAHAFKNSTTAAPDAVRDQIALWHNARTSLRKVRVQLIGELDALIQELPEETRARLPERTTARARITAVAALGRVRSTDPVQQLRLEMIRHRIKMLKDVLAQDKAAEAELSKLVGASGSSLPSIPGIAALAAAEILLEVGDPRRFTEAGFARFNGTAPIPASSGEAGGRPRRHRLSRGGNRRLNAAIHRAAVTQLRCEPRARELYQAAISRGHTRREAMRILKRHLSNTIHRTMIRDSIRANS

SEQ ID NO: 472557 - protein, 363 aa, unidentified
MKKGSKVAQQMETTKDKPAITVGLDLGDRYSHYCLLNEEGEVVEQGRIQSTEIAFRRHFENESRQRVALECGTHSPWVSRLLKTLGHQVIVANARKIPAITASKSKNDRNDAELLARFAAHDPKLLSPVQHRSLERQQDLNLIQARSTLVRARTMIVNALRGLVKSAGSRLPACSTESLPIRVRASIPHGFKAIAFPLLSQIDLLNRQIRSMDKQIEKLAAKYPEIGVLRTAPGVGPVVAAAYVLTLDRPDAAANRSAGAFLGLRPGQSQSGESDPQRRISKTGDSYLRSLLVQSAQYILGRFGPDSALRRWGLKLASSGGKRGKKRAIVAVARKLAVLLHSMWRSSEHFQPFPQPITNPTMV

SEQ ID NO: 472558 - protein, 366 aa, unidentified
MKKISTVQVFGNEIFREQKLTIGLDLGDRWSFYCVLDEAGKIILEQNVPTTREAMKQVFGKMPRSLIALETGTHSPWVSRLLTELGHEVIVAHAQKVELITKSNRKDDRHDARTLARLARFDPALLGPVRHRSAQAQIHLTVIRARAELVSARTALVNAARGLVKSYGQRLPKCGTQQVSRKLADGLSAELREVLEPLLQEVESLNARIQEYDQRMEKIAKEEYPQVSLLQQVKGVGTQIALTYVLTIEDPYRFLKSREVGCFLGLKPGRRNSGESEPQKGISKEGDRYLRTMMVQGAHYILGPFGEDSDLRRWGRKLAERGGKNAKKRAVVAVARKLAILLHRLWVSGEVYEPLRNSQRAIQAVA

SEQ ID NO: 472559 - protein, 438 aa, unidentified
MISIGEGHCVAVLFNNILPVPLRFTQIQQQAKIGDIMEATAGYKQSMSNYKLSIQLRSAVAMFNTTFVGLDVHKETITIARAKGYTGNIKVYGSIKNDIKLLMKVLLKFNQVENLIVCYEASSCGYTIYRLLIDAGIECKVVALSLIPRKPGERVKNDRRDTKKLTNLLRSNELTFIWIPDRENEALRDLLRAREKVVSDFTRAKNRIKQFLLRNNIMPPEGINSWTVAYRQWLDRIQINNEAQSFVLQEYLQNYDQVRLQVKRFDKNIEKYVPTCSQKDFIKALKGFRGIDTVTSASIACEIGDIRQFQQPRKLMSYLGVIPSEHSSGNSRHQGNITKEGNTHLRRVIIEACQHYKLKPKVSYTLSKRQKGLSPVLKNISWRAQRRLHNKYWRLSGRGKPYQVVIIAIARELMGFIWETGMQIVNENEKSRKNGHVA

SEQ ID NO: 472560 - protein, 346 aa, unidentified
MVTLGADSHKATHTVVAVDETGRKLSQVTVKATSDGHLQALSWASQWSERRWALEDCRHVSGRLERDLLGAGETVVRVPPRLTAGVRESARTTGKSDPIDALAAARAALREPDLPTATLDGPSREVRLLVAHREDLVGERTRIQNRLRWHLHELAPGGDHENHSLNGRKALQALENQLANLDGLVAALALEQVKSIRALTQRINELEQEITARTTTLAPSLLALPGCGSLTAAKLVGEVGGVLRFKSRAAFAMHNGTAPIPVSSGRTDRFRLNRGGNRQVNTALHRIAITQLRIDGAGKDYIAKRISLGNTKKEAIRALRRRISDEVFRRMWLDESVAASRQHLAA

SEQ ID NO: 472561 - protein, 347 aa, unidentified
MRFFTDPHQNYCGIDLHARSMYVCIQNSEGKVVLHQNMRAQPGPFLKAIEPFREGIVVGVECIFTWYWLADLCAEHEIPFILGHALYMKAIHGGKAKNDRIDSRKIAALMRGGTFPMAYVYPSKMRATRDLLRRRNHLNRRRAELLGHIQNTNSQYNMEPFAANISYKQNRVGVVEQFLDPDVRMSMQANFELIALLDELKRRLELHITRNAKHHDPQALYRLRSVHGVGPVLSLVMLYEIGDINRFARVQDFASYSRLVKCARESAGKRHGTSGGKIGNVHLKWAFSEAAVLFLKGNPEGMKFKKRLERKHGKGKALSILAHKLGRAVYYILKQDRAFDMNRFLKN

SEQ ID NO: 472562 - protein, 362 aa, unidentified
MRIIGCDLHARQQTLAMLDTATGEVVNETLAHEGDRVREFYSRLPSPVRVGIEATGSMKWFLNLMEELGIDCQVGHPATIRAAEPRRQKHDQRDAELLLKLLAENRFPSIWQPSKELLDLRALLLHRHQWVRLRTRIQNALQAIALANGLRRGSSLWSQRGQQAITSLPLATHTAHRRSELQTMYERFEAEIEQLNERVLEQANQRTTAGLLMTHPGVGPITALATDVFLGDPKRFRDGKALASYIGIIPRENSSGGRQRLGGLTKQGNPLLRFLWCEAAVHAVRRDPELRQFYRRKLVQKGLGKARVAAARKLGIRLWIMLRDRIDYQEFCRRGQKQQRSGDACAGMPGMRYGAKSHRLID

SEQ ID NO: 472563 - protein, 352 aa, unidentified
MKKVFIGIDFSKLKFDATVIRAEGIAESSARAHSSFQNDVKGYREFLRWVKGNSSGTDISEWLFCGEDTGLYSVPLSKHLYGKGYDIWIEDAYRIRHSIGIQRSKSDKADSANIAEYAMRHQDKAKMYVPLSPALEGLREIFLFRHKLVQEKCSLQTRTEEKREMLGTSRELSFMARKAGHLIAEIEKAIEECDKEMRRLIMEDEELKENFEIITSVKGVALQNATGLIVYTNNFRKFDFDARKIACYYGVAPFGKTSGTSVKSQPHVSKLANRMLKSLLSEAAKCAIRFCDEIRDYYTRMIANGKKHGVAINNVRNKMIRIIVAMVRDKQKYNPCYRLQTIYAGQSQNRVN

SEQ ID NO: 472564 - protein, 323 aa, unidentified
MAGSTVYAGVDVSKAHLDLALTTSDGITRFDNSEKGIVELVAQLREAAAELVVLEATGGFEVPAAGALAAVEIPVVVANPRHVRDFAKATGQLAKTDEIDARILALFAERVRPQVRPLPDDETRALDAIVGRRRQIIDMITAEKNRLGFALPLVQKGIRKHIRWLEGQLSDVDRDLDDLIRKSPIWQAKNDLLREVPGVGPNLARTLIAELPELGTLSNKEIAALVGVAPFPRDSGLMRGKRMIWGGRAPVRAALYLSIWSASKWNPVIRVFYQRLRGKGKPPKVAQVACMRKLLTILNAMVRDGRRWDPQLPLQQLQIQHSC

SEQ ID NO: 472565 - protein, 449 aa, unidentified
MHIRWGVAPRAPVQGTIRHRGGLAAKGSEGVVTEDVEWFAGIDWASQTHQVCLVDAGGKIVGEHGFAHGGAGLAELCSWLLTMTRAAPTAIAVAIEVPHGPIVEVLLERGFQVYAINPKQLDRFRDRFTVAGAKDDRRDAHVLGDSLRTDRHCFRRLSAENANVIELREWSRMSEDLQQERNRLANRVREQLWRYYPQALAISDDLAADWFLQLWAAAPTPATARRLRESTVEGILKRHRIRRITAAEVLASLRQKPLTVALGTAEAASAHIRTVAHRLRLVNRQIKQAHQRLDALSDRIAENEGDSDATGQKSEQRDVAILRSLPGVGRIVLATLLAEASEPLRRRDYHALRTLSGVAPVTRRSGKYCIVVRRQACHMRLRSAVYHWARVATQHDQRSRHRYAELRKRGHSHGRALRSVGDRLLAVACAMLTRRTPFDPDYPVKQMAA

SEQ ID NO: 472566 - protein, 398 aa, unidentified
MTESSDYESVQVFIGIDVGKDTHHAVAINRSGKRLFDKALPNDENKLRSLISDLKQHGQILLVVDQPATIGALPVAVARSEGVLVGYLPGLAMRRIADLHAGEAKTDARDAAIIAEAARTLPHALRTLKLADEQIAELSMLCGFDDDLAAQTTQASNRIRGLLTQIHPALERVLGPRLDHPAVLDLLQRYPSPEKLASLGEKKLAAQLCKLAPRLGKRLAADIAQALAEQTVVVPGTNAAAVVLPRLALQLITLRKQRDEVALEVEQRVLAHPLYPVLTSMPGVGVRTAARLLTEVACRAFASAAHLAAYAGLAPVTRRSGSSIRGEHPSRRGNKALKRALFLSAFAALRDPLSRAYYTRKMSQGKRHNQALIALARRRCDVLFAMMRDGTFYTPQAS

SEQ ID NO: 472567 - protein, 409 aa, unidentified
MEHNSEAFIGIDTSKLKNAIAIAEGGRDGEVRYLGEIETTDAATRKLVGKLATKYRKVTFCYEAGPTGYGLYRLITSLGHECSVVAPSLVPKKPGDRVKTNRRDAVGLAKNLRAGELTAVWVPDTRHEAMRDLSRARETAVDDLKSKRQQISSLLLRLGLHYPGEKTWGKSHRNWLASLKLDQREQRIVLEELFGAERQAQERVDRLVSAIIDAVPEWSLAKIVTALMAVRGIDLVAAVTIMAELGDLSRFASPRELMAFLGLVPSESSTGDSVKRGGITKAGNRRARRILVESAWSYRYPPRISRDKLAKVAAAPEPVRAIAWKAQTRLSSRYRALIKRGKRPTIVATAIARELCGSSFLDNVGGSVPRDARSCRRARGRQGRFAPLKRWPEGGPSWTAAARASISRV

SEQ ID NO: 472568 - protein, 407 aa, unidentified
MFCGIDWASQRHAVCVLDDAGKTITAFQIAHSADGFDQLVSRLRRLGDPAGLPVAIERPDGRLVDRLLEAGHPVVPVQSNAIKAWRDAEVVSGAKSDPGDAAVIAEYLRLRHHRLRPLQPFSPQTRALRTVVRTRDDLIAARVAASNQLLACLEAFWPGAKAVFADVCSPIALDFLTRYPTPESAQQLGERRMTAFCVKHGYSGRRPAAELLARLRAAPAGLAGTVEVDARRDAVLALVGVLRALNTSIKDLDRSVVAHLGEHPDAEIFTSLPRSGRISAAQVLAEWGDCRQAYDGPDAVAALSGIVPVTKASGKHRVVSFRWACNKRFRQAICTLADNSRHASPWAAKVYADAIARGCDHPHAIRVLARAWVRVIWRCWIDQVPYDPAKHGATRKLTEMAASAGQG

SEQ ID NO: 472569 - protein, 348 aa, unidentified
MSITMIGLDTAKSVFQIHAVDAAGKPQLKRKLRREEVIPFFEQQERCTVVLEACGAGHHWARVLTQLGHEAKLLAPEAARPFVKKGKKNDAADAAALCPAASRPEATFVPVKSPEQQGVLALHSVRTLLVKQQTMLANAMRGLATEFGLVVAKGIHKLDELEAQVQAEASMPATAKQAFAELHGQSQATATRIAGLEVQIVAHARQDATARRLATIPGIGPITASLITATVGDAIGSFKSARHFAAWLGLVPRQHSTGGKTRLGRITKAGNSEIRRMLVLGATSMVHRAAQWNSAVGAWLRGVLERRPVRLATVALANKMARIAWAVMTRGETYQAKGRAPAAAAAEA

SEQ ID NO: 472570 - protein, 346 aa, unidentified
MWIIGCDFHPSWQQVGWCNTETGETGEQRLEHSNGEAERWYRQLPVGSRIGLEAAGNSQWFAELLQRLGHEVWIGDAAQIRASYVRKQKTDKRDAAHILRLLLEDRFPRLWRPSPEQRDIRQLLIHRHKLVEIRTRVKNGLQHLAMNRGMQKKRQLWSEAGQRALRELAMPGWAGCRRQDLLETLAYLDRKIAPLDRAAEETAQRDKMALLLKTQPGVGPITALAFAVTIGEASRFPRGKQVASYLGLIPCEHSSGGKQRLGGISKQGNRFLRQLLVEAAQSAVRYDESLRRPYLHRCHRKPKGVAKVAAARQLAVRLYWMLRTQTPYPKIVRIESSPRVALVGRS

SEQ ID NO: 472571 - protein, 349 aa, unidentified
MGEVSTIGVDIAKSVFQIHGVDAEGAVVIRRRIGRAKVLEFFSDLPPCLVGMEACATAHQWARELKKLGHDTRLMPPTYVKAYVKRGKNDANDAAAICEAVTRPSMRFVPIKSVEQQSALMLHRTRDLLIRQRTQLINALRAHLAELGLVAAKGHEGLHQQVMAVAESSDEQLPSNARFACQAIVAQLSAVQTQISKLDKHITQAHRANADSKRLEAIPGFGVILSTAVVATMTDPKAFKTGREFAAWIGLVPRQNSSGGKERLGSISKQGDRYLRRLLVLGAISIVGSARARPAKYPWVTELLGRRPAKVVAVALANKMARIAWAVLAKGETYRAPTHSSAAAIAAAA

SEQ ID NO: 472572 - protein, 377 aa, unidentified
MSNVRFIGLDVHAETIAVAVAEPRGEVRSLGTIPNRPESVARLIKKLGKPEQLRACYEAGPTGYVLYWQLSELGVKCEVVAPTLIPVKAGDRVKTDRRDAEKLARCYRGGDLTAVWVPDAAHEALRDLVRARLAAKRDQLRARNRLGKFLLRHGRRAPEGTKAWTAKHLLWVKTQRFEQAAQQMTLEDYRHEVEHAAQRLARLEHSIEAAIETLPVKMRAVVEALQSLRGVAQVSAVSIVAELGEVSRFARARQLMGYSGAVPWEDSSGQRVHRGSISKAGNAHLRRIVVEAAWSYRHRPAIGHSLKVRQRHCSGRVCELAWKAQHRLHQRYARLTARGKSKQHAVTAVARELLGFIWAIGVEVERSQEVKPMRRAA

SEQ ID NO: 472573 - protein, 313 aa, unidentified
MTDLCEYVGIDVSKAMLDVACFHNQAFQQFKNTAKGINKLVIWLKEIQPKLVVLEATGGLELACVAELMQAGLPVAVVNPGRIRGFARSIGQLAKTDKLDAMVIAHFAQATHPKPRKAPTPQEEQLSALLTRRRQLIEMLTAEKNRRHSARFGMQDHIQEHIDWLEQKLDELDQKIDVHIDQYPGWKEKAELLSSVPGVGWVTTVTVLALLPELGTINRQQIAALVGVAPVNKDSGKRQRKRRVFGGRANVRCVLFMAALSASKHNPQIRDFYDRLLKNGKEKKVALTACMRKLLVILNAIARSNQIIETSMA

SEQ ID NO: 472574 - protein, 387 aa, unidentified
MIAHYIDEKFQKEFTIQNNKNGYNYLLNYLNRVNQPKLIFESTGIYSRAMVRFCRVNHINYIELNPLEAKFKTSSLRSWKTDQSDAHKLAQIAPFLNDSDSLNNTNDDIYFELRERARFHLEFENEQNRLKVEIIEILHQTFPGLEKLFKNRYSMIALNIAEIFTHPDFVQQNDMESIISTILKSTDKGLSQRKAESYGETLFKLANDSYPNVNSSSFLVKKAQLLIQKLKKSIGQLSQLDKEMIQLAQELDCFEIIYSIPGIGDLTAAMIIGELGDISRFKSNKQLNAFVGIDIKRYQSGGTHYRDTINKRGNKKARRLLFLVIMNIIRGQHRYNNHIVDYYYKLRKQPNEKSHKTAVVACINRLLKTFHYLIMKHKLYDYEMSPH

SEQ ID NO: 472575 - protein, 390 aa, unidentified
MFYLGIDVGKHSHSLCLLQEDGQRSIWQIDNSKEGFNSLATRLKDIDHSMFLVGMEATGHYFLNLYQFFLEKGFDSEQLALLNPLQVKAFRNTNLRGAKSDNIDAERIATLLRFGDFQRCNVSINKMMDLRQLTRLRYGLVSSSSDLKRRIIAVLDRIFPEFGKIFENKLGKTALALIEEYPFPENLASLSLNKLKAIVKSLSKRGISDKKIEALHYSASNSIGIGFGKYGFRVELDVLLVHFSVLQQQINVVEKKIKSIMEDIDTQLLTIPGLGLITGATILSEIGNIDNFSSAVKLIAFAGLDPKLKESGSYQGRTPISKRGSKYLRSAIWYSAMVACRVEPSFKQKYQERKDNGKSHRYCITAAANKLTKVIYHVLKNNCSFQTDLL

SEQ ID NO: 472576 - protein, 343 aa, unidentified
MTIARIGIDLAKTVFEIHGVDARDKAVIRKTLRRDEVSRFFANLPPCLIAMEACSGAHYWARSLMEFGHEVRLISPQFVKPYVKTNKSDLNDAEAICEAASRPSMRFVPIKSGEQLSIQASHRIRSRLVGNRTALANQIRGLLAEFGIVVARSLATLRRRLPEILGSDKVALDPLIRSLILDLRDELVVADDRVRAYDRQIKQLCKESEACRRLERIEGIGPLTATALVAAAGNAASFRNGRQFAAWLGLVPRHQSSGGRTRLLGISKRGDRYIRTLLIHGARSALGRIGHKNDPRSRWLQKLCGRRPYNTAAVALANKNARIAWALLRHGEAYDQRRTVAAA

SEQ ID NO: 472577 - protein, 425 aa, unidentified
MRKIGLDVHRDFCEVAIAEGGRVRLAGRVATDPAALTLFAESLVSSDEVVLEATANAVAIARLIEPHVGRVVLANPKAVKAATGLRAKTDKIDAMTLAQLLSGGFLARVWTPNEPTVVRRRLVARRAQLVRHRVREKNQVHAILQRNLVPRPPMTDLFGVKGRRWLAEQLECLPEAERTMASACLRQIDFLGREIDLVDRDIARQALDSPEIRRLMTLPGVSAVTATALMAAVGDISRFPTPRELVGYLGLDPRVRQSGTEPARHGRISKQGPGNSRGLLVEAAWHAARTTGPLRAFHQRIAARRGANVATVAVARKLALIAWHMLSRDEDYAFARPSLVREKLRRLELMLGASRQQGKKLTGAGRSFATVEGRRLEKELATQQEAAYLRLVSDWKANRPKAGAGATPGRASQKPSKGKAARQTH

SEQ ID NO: 472578 - protein, 344 aa, unidentified
MDITTIGLDLAKSIFQVHGVDVNGRVVIRKSLRRAQMLPFFARLPSCLVGVEACGTSHYWARELIKLGHEVRLMPPAYVKPYVKRSKTDAADAEAVCEAVTRPTMRFVPVKSPEQQAALSMHRARDLLVKQRTQLVNMIRGLLAEFGINIPKGLERALLMARRIVDDEAPDVPIEAAKIVGTLSQQALDIHVRLRQIDRDLLVWQRGNDVARRLMTIPGIGPVGATALAASVTDPHQFRSGRQFAAWLGLTPLQKSSGGKERLGRITKMGDKYLRKLLIVGMTSLVRRAKDNPPTIDPRLANLLVRKPVRVATVAMANKTARIIWAIMTRGETYRASHQPALAA

SEQ ID NO: 472579 - protein, 416 aa, unidentified
MKKTQNTRGYERYFAIDTHREYHLVGGQNEDQEWVVNPRRVSIEKFPEWAQKNFQVGDIVVLETTTNVWDTYDIVAPLVSRVLVANAAAVGEIAGARVKTDKEDIKRLLKLLVGGIVPEVWVPPAHVRELRAFISYRNRLVKMATMIRNRLQSLLHKHSLMLPEEGILNQAWWDAQISISALEKMQIRQELHLLDEIKKLQAAVNEELEKQSIGEQWGKQALQLMQLPGVGVVVAMTVLSAIGDITRFEDAKHLVGYSGLGAGVHDSGKTHRDKHITKKGRKELRWIMVEAAWRAVRMSPFWKEQYEKYLRRMRKPNQAIVVIARKLLVAIWHVLSKEELDVHASEEDLAYKMMLLSWSLNENVRMGLTYKQFAKYALMKLGVENDITRFVRKDIPRRLAAKEEVLARMEELGITQ

SEQ ID NO: 472580 - protein, 333 aa, unidentified
MQDLSTKQHFVGCDVSKDTLDLALYQPKTDYRKFEHVQISNDTEGFKQLLQWLKARKIKKNEVAIAFEHTGAYSIALAEWLHKKKITFNMLHPLDVKNACSRGRNKTDEVDAKFIADYAYTMREKLAPSGPEPKNIKHLRELRNERDLCVRCRASYLCQIKVQTEAQTIARMHKMVDFMTVQIHQIEEGIKKIIAADETIATNYHLLISIPGIGMVNAVNTIVATGNFTRFQTSRQYAKFCSVSPMAVQSGTSVHSGNHVCKKGHNELKATLSEAARSAIIHDPQLRHYYQRKRSQGKSHGCVMNAVKFKLICRMFAVIKRQQPYVNTECYRG

SEQ ID NO: 472581 - protein, 362 aa, unidentified
MPIPTDKQADQRIDVVGGVDTHKDMHMAAVITAAGVVLGTEAFSTTRAGYRAMLHWMRSHGEVLRVGVEQTGSFGAGLSRHLALAGVPVLEVTGPEPAGRRSKGKDDELDAVAAARAALTGQRVQVAKDRSGAVEALRVLRTTRSSAVKCRRAALQQLRNTVLAAPDEVREPLRYLTRMQLIRTCAGSRPDMMAWRDAAVASRIALKALARRILSLGDEIAALDAMIKPLVGELGPGLIDLEGIGVENAGAFIVAAGDNPERLKSEASFAMMCGASPIPASSGKTQRHRLNRGGNRQLNSALHMVVVCRMRTDQRTKSYIVRRTREGLSTREIMRCLKRYVAREVYNTLAGKPPYRQRQAGP

SEQ ID NO: 472582 - protein, 412 aa, unidentified
METIVERPAALDVHKAQVTACARVPDQRGRREQHVAEFPSTVRGLLELRDWLAGHGVTQVVMEATGVYWKAPWAILEDEFECMLVNARHVKQVPGRKTDVSDAAWLCQLAEAGLLKANFVPPKPIRQLRNLTRYRKTQIQERAREVNRLHKALEDAGIKLDTVAADIMGKSGRDMLDALVAGETDPEVLADLARRQMRKKIPALREALEGHFDSHHRMWIGAILRHIDFLDEQIEQLTAMIEEHIRPFAPAVELLCTVVGIQRRGAQCVLAEVGADMTRFATSRHLASWAGQCPGNDKSAGKRRSGKTRDGSKWLDFALEEAAMAAIRVKGHYFEAQYRRLKPRRGHKKALGAIKHSMITAIWHMLATGETYHDLGGDYFTNRDPERQTRRLLAQLERLGHHVTLTEGAAAA

SEQ ID NO: 472583 - protein, 423 aa, unidentified
MEIIYKRVAGLDVHKEMIVACVRLTGKGKVKRECRTFGTTTAALVELLAWLRESGCTHVAMEATGVYWKPVWNILSEGDFELIVANAAHIKNVPGRKTDVNDATWIADLLACGLIKASFVPDEGFQELRSLTRTRKQLTSEQTRHVQRIQKTLEEANIKLDSVISDILGVSGRRMIEAMIEGVRNPAKLAALADRRLKASPKALYDALHGRLTDHHRFILQLHLDQYDALAATLGRIDQKIEEALDRIDEEVAPGRPTFRALSGLLHTIPGVADRSGTTILAEIGMDMSRFFTDGHLLAWAGLCPGQNESAGKRKSSRMRKGAPWLKTTLVQCAWSAVRKKDSYYRAQFHRLRAKHGSKKAICAVAASILKAIYHMIKNGVEHHDLGPNHFDRRPSDIKAKRLVAQLGNLGFQVQLQPLAQAA

SEQ ID NO: 472584 - protein, 411 aa, unidentified
MPKIVYPICCGIDVHKSFVVACIATTNEQLVTTYKSKRFSTFTGDLRRLAAWLAENNCRDVCMESTGKYWIPVWNILESTCTLVLAHPKYLKAIKGKKTDKRDAKWIANIFKHDLLNGSFIPPADIRQLRDLVRYHFKLTCVTTGEKNRAQNCLTVSNIKLDDVFSDVFGKSASAITARLLENNEPFDVAPFVDRRCKKSIGEIQAAVDGIMCAQQAEKLRIIRSHMDSLELCKMSLESEILTIAEKFLPQTNLVLTVPGIQTFSAVAIIGEIGVDMSVFETSRHLCSWAGLTPQNDQSAGKKKTTRISRAGVYLKPLLVQCALNAVRCKDNPEITNRYNAIKKRRGHKKAIIAVARMLLTAIYNILKKSEPYNAELYRVADKPPVQREVTVEQAIYILQRQGYLVTASTT

SEQ ID NO: 472585 - protein, 346 aa, unidentified
MTVKCMAGIDLHSNNLFCAIADMDGKRVFERRLPCDLESVLQALKPFKKRLEKIVVESTYNWYWLVDGLQDHGYTVVLANPAAMEQYNGLKHADDKSDGFFLAEMARLNILPTGNICDRAIRPVRDLLRRRMGLVHQRTSLILSLKSLHTRMTGRDLETGRLKALEPQDAEKLFEHPADQLITRLDLHLVKQLGRSIREIETRILGEAKRMPRYQVLQTMPGVGKILGLTIMLETVDPQRFAGPGHYASYCRCVDSRRLSNGKKKGENNSKCGNKYLAWAFVEAAQYARRHDLACRKFHDRKSAQANGIVATKALACKLAKAAWHMMSHNTHYDGGRMFPNVKMNK

SEQ ID NO: 472586 - protein, 360 aa, unidentified
MTATMTWVGLDVHARSTHAAAIDRDSGELTRARFGVGADPVVEWLRGLPQPVYACYEAGPTGYALYRAAVAAGLRVDVVAPSKTPRAAADRVKTDRKDAELLVRLLLAGSLASVAVPSAESEAARDLARAREQVRADLARLRHRVSKLLLRYGRVYDGGGTWTLAHRRWLAAQRFEHVATELAYLDALAAIDGLLARRAALDERLSLLAAEPQHWPTVARLRCFRGIETLSALVLHLEVGDFARFQRPGQLAAWLGLVPSLHQSGESETRGSITKTGSGFARRILVEAAWHYLREPRIGATLRDRHAGQPDHILQIAWRAQHRLYRLQRRLRARGKPGNVAVVAAARELACFLWAAAVAD

SEQ ID NO: 472587 - protein, 352 aa, unidentified
MDTIGLDLHKRESQLCILSQTGEIEERRMATTRERLIAVLGNRPPARILLEASTESEWVARHLESLGHTVIVADPNFAPMYATRSRRVKTDRRDARTLMDALRLGAYRAIHRASAAQRHVRAQLAVRDALIRTRTRYVNVVRALTRREGLRLAAGGPEHLERKLATLPLAPELVEELAPLRVVLEPVNVQIDLADQQLAATAGADPLFARLRTAPTIGPVTAVAFVATLDEVSRFRTAHQVEGYLGLTPREHSSGERQRRGRISKTGNPRMRALLVEAGWRILRSNDPAAAPLRAWAERIAARRGTNVAAVALARRLAGVLYAMWRGGAPEPPPRRDGTTSRAPVVKDVAVA

SEQ ID NO: 472588 - protein, 331 aa, unidentified
MKFKEFIGIDISKLSFDVRIHSSQQKSVFNNNTAGYTELMNWVNKNVCYKKEEILFAMEHTGIYSLPICIFLSENQSNFVLLPGLEIKRSLGIQRGKNDNIDSRRIADYAYQKRDKIAPTQLPCKNILKIRRLLSIRDRLVKHRKGFLKDKGENKKFLKKSENKILFEVVEKSICDINKQIKKVEKEIDNIVKSDELINKQFNLIISIKGVGKQTALFVITYTNCFTRFDNWRKFASYSGTAPFPYSSGTSIHGRAKVSNLANKKIKVLLNLCARSAIEFNPEMKSYFQKRRAEGKNGMSTMNIIRNKLLARIFAVIQRGTPYVDTHKFAA

SEQ ID NO: 472589 - protein, 411 aa, unidentified
MQVVHERCCGLDVHKKTVVACILITLANGEVQRHIRTFSTMTAGLLALSDWLESLAVTVITMESTGIYWRPVFNLLEEGRSVILVNAQHMKAIPGRKTDIKDSEWLADLLRHGLLKASFIPPAPVRELRDLTRYRKTLVQERAQEVNRLHKVLETANVKLTAVATDVLGKSGRAMLEALVKGATDPEILAELARGRLRQKLPQLQEALDGRVEPHHRLLLKHILAHIAFLEETLEQLQRDIEERLHPFEEAMTLLMSIPGIQALAAATIVGEIGDDMTRFPSAKHLVSWAGVCPGNKQSGGKRLSGKTTRGNTTLRAILAEVVWVLSHMKDNYLSAQYHRLARRLGKKKAVMAVSHSLLVIIYQILSTKQPYSDLGADYFEQRDSARLTQRSVRQLEALGYAVTLVPKEVA

SEQ ID NO: 472590 - protein, 392 aa, unidentified
MALYIGFDVHTQQTTFYAINEEKEFFRKGQIDTTEEAYRVFAKSMLLQDPEVSVAMETGTQCRWAAQRLLENGIDAKVYHATEVANLRPKKKQKNDMNDAMELAFGLRNGIYRSEMYMPTDTEYQMRRLCEERLWYVDLATASINKTKNKLRSLGMEIPTTLRTEKAWKSLLEKHRDTELIFYIQLHYKTFCHARETILELEKQMAQLGQERQEELDLLQTIPCVGERTAFAMVAAVGDIKRFPSSSQMASYFGAIPASYDSGARKISGHITRTGPSYLRRLLCECAWHAIKHTNPLSAYYYSIFARTGNRKKAIVAVMHHIVRIAYQILKTREPFNAKKLRIYQEKQPNIDKWYWRRGVPPQPGPDGSAVNPNPPEPPAKRLKIQKIASEG

SEQ ID NO: 472591 - protein, 418 aa, unidentified
MSFKILKNNCCGLDIHKTWIYACIGITDSFKRTEYKEARFSSFSKGLLELCDWLSKYNCTDVCMESTGKYWIPVFNILEKNNIWVTLSHPKYTKPQKGNKTDRKDAKWICDLYMCGMVKPSFIPPADIRELRDLVRYRFKLTCMITGEKNRAHNCLTVSNLKLDDVFSDIFGKSSRSITEQILQHPGETFDVSPFVDGRCKTPIEEIQAAVDGAISKEQAAKLRQCLNHIDELEIHKAEIEREIFRLSDKYECVLNLVRTVPGFDKNPLTAIQVLSEIGGDMSVFPTAKNLVSWAGCCPRNDQSNQKIKSTRISRAGSYFKPVLVQVANALIKSKKHPEFTTRYRRIKARRGHKKAIIAICRMILTAIWHILTDLKPYTSDGFLEARSVNKEKILTTSQALNLLKQQGYIIKDVVPVT

SEQ ID NO: 472592 - protein, 351 aa, unidentified
MNTQIIVPSKLYIGIDIHKRSWKVHCSTDLFSGKSFSMSPDPEQLLHYVSKHYSDYVVSVAYEAGCCGYYAHRCFESYGWTSFVVNPADIHRKGKERHTKTDKIDAQLISRELKDGRLESIFVPDIKREELRSLFRRRNDLVKDFRRIKSYIKMQLLYFGIKEPLEFDNDHWSHKYRSWLDGIVFEYPTAKSTLDSRMRFFRFVDQELRDISTELRRYCKVHYKKDYLLLRSIPGIGGIVACGILCELGDLRRFSSVKHLAGYVGLAPGIHQSGANYKVMGITPRAHRLIRSYFVEASWQAIRADPVMQAYYRKHTGKNVKSIIIKVARKLLSRTLAVIKTETPYTIGVVS

SEQ ID NO: 472593 - protein, 411 aa, unidentified
MKALYERCCGIDVHKRIVVACLKCGKKQEIREFGTTTEELRSLTEWLSDSKCQMIAMESTGSYWKPLYNIFELSSLAAIVVNARDMRNVPGRKTDIKDAEWIADLLQHGLLRASYIPNREQRELRELSRYRKSLIEERARELNRLQKMLEGGNIKLASVVSDINGRSARNLLTHMLKRDTSLTKEEVSSLVRGRLRHKVESIMKALDGFLTPLQKQLMLKVVDHIDDMTKRIGEMDDLMNQYLTEYHEAIQKLDEIPGIGRQSAETILAETGLDMSRFPTAKHFSSWAGLAPGNNESAGKRRYGRTTKGNITLKTTLIQCAKAAVKKTDSFLSAQYQRLVVRRGANRATVAVAHTMLISIYHMLKNNVPFTDLGADYYNRFNTQSKIQHYLKKLKQLGWELDSATIPTAAV

SEQ ID NO: 472594 - protein, 343 aa, unidentified
MAIVILGIDLGKNSCSVAGQDESGAVVLRRRMRRQTILGFAAKLPACIIAMEACCGAHYLGRLLMAQGHSVRLMTPEYVRPYVKAQKNDERDAEAIAEAASRPTMRFVELKSEEQLDIQTLHRVRSRLIAARRTLLNQLRAILLERGHTFPKGRRMLERAVDALGDDPAFTVSGRMRQLIIDMRTEWQELDRRIAALNAEFVALTHSDAVARRLTAIPGIGVLNATALMAAVGDASAFRRGRDLGAWLGLVPRQHTTGGRPKLLGISKRGNKYLRMLFIHGARAALPTLAKGATPLGAWLRGLLARTHRNIVIVALANKLARIAWAMLRRDRDFELNHIAVAG

SEQ ID NO: 472595 - protein, 412 aa, unidentified
MTATNQFAAHVGLDWADKKHDVCVQFKNGERTFHVIEHTPEALDVWLTELHQKVKGRIAIAVELKKGPVVYALQKYPFITVFPVHALSLARYRQAFSPSGAKDDQQDAELALELMLRYPQKIKAIEPDNADIRLLQQLVEQRRQLVEDKRRFVNRIINTLKQYYPQPLEWFSHRGSLLLCELIIRWPSLQQLKRARRDTIRNFLNAKGGRAMALTEQRVASIDNAIPLTTDPSVIEANALMATALATQIKVVSEIIKTYDERIEALFDTLPDAELFKSLPGMGPCMGPRMLAALGDNRDRFNSAEEIQNYAGIAPVTERSGQKSWVHWRWQCAKFVRQTFVEWAAKTVNSSYWARLYYQGLREKGKSHQSAIRALAFKWIRIIYRCWKARTQYDEAKYLLALEARHSPLLKP

SEQ ID NO: 472596 - protein, 413 aa, unidentified
MENSVFVGIDWANDNHQVCVVDAVGNKMAEFSVEHSASGMEQLAVRLLELAHEPQRCSVAIELNRGAIVEGLLERGFKVFGINPKQTDRFRDRHGPAGAKDDRRDAYVLGDALRTDRHRFRQLELGEPLIIQLREASRTHDELRDDLAALANRLREQLHRYFPQLLKLSPAANEPWLWALLLKAPTPHKARRLRKGQLAKILKVHRIRRFSAAELHQALALPALKLAAGSVEAASEHVLSLIPRLRTNHEQLRLCDRRLEEILNQLTQNEPSSDSEPIEHRDAAILLSLPGVGKLNGAAMLAEAFQPLRDRDYYTLRNLSGVAPVTRQTGKRRVVLMRRACNPRLRDAIHTWAACSIQNDESSKLFYRACRARGLKHAHALRSLGDHLLRILFAMLRDRTLYDASRSHASNAA

SEQ ID NO: 472597 - protein, 314 aa, unidentified
MITSYQNFIGIDIGKFKNVAAAYNQRSAIKFDNDATGWQQLFQKFSDILPNSLVTLENTGKYELGLAHFLVDKNVAVHRANTRKVKSFIISHGTLAKTDQSDARALAQYGFERYSALSLFVPMSKEQTALVALCQRRDDITQMRTQEKCRLAAPENDYIKESCQKTIDFFTSQINEFNDAIQRIIDKNPELQKRQKILRTVPGIGLKLSQVFVCLMPELGHLNKKEVASLAGVAPHPKESGKTIGYRRITGGRSNVRAKLFTAAMAAARSKSALGAFYSDLIGRGKKKMVAITALMRKIIVIANARLKEAINMK

SEQ ID NO: 472598 - protein, 368 aa, unidentified
MSEYIWVGLDVHLESITAAILERDAVEPEVLKLSGDLMNVRRLFRRLSKKGPVRACYEASGAGFVLHRVLARDGFSCEVIAPSLIPRKPGEHRKTDHLDAVMLVKLYRSGHLTPIHVPTEDQEALRRLLRLRFTYQSQCKSTKHRISGTLLNHGLVYREGRSTWTKGHRRWLAEQRRTLSGPLQIALAAELEHLEYLEMQRDAFDDQIQRYAQTPPYRIPVEALCCLRGVKTLTAFTLLCEIDDIRRFRSPRALMAYFGLVPSEHSSGERERRGPITKAGNAHARRVLVEAAWNNRHNAGADLVLKRRRQGQSPEIVAIALKAQHRLVHKFWRLDQRKHRHVAITAVARELCGFVWAILNAAPQSQTN

SEQ ID NO: 472599 - protein, 340 aa, unidentified
MIKNPMINNPLYFLGIDIGKDTFTASLYHVPTNTHQTFSGQMRSASRKILRWLKQQKVDAAQTIMALEATGVYGERLCYELAASECTLYVLHPTEVRRFMRHPERKSDTDDSRQIAELIAERYRRLTVWTPNLEAVDRIKTLMAERRQLVKMTVQTKNADHAAKFKRNRVKELEDRDRERLDFLKAQKTAVEKQIEQIIESDPIVREAATVLRSTPTVGPLLAACLIVVTNAGLNSFTSRKIGSLVGVAPQPYQSGHMEYRRHSSGHGDPEFRRILHMAARSGANHYGPFREYRRKKLEEGKPAMLIYNNISNRILHLACAVLESKKPFDPNFATNQRGG

SEQ ID NO: 472600 - protein, 445 aa, unidentified
MSELMPPAKSEPEWAAFAAIDWADQKHFWRLVPAGSSQQEQGELENTPEAVEAWAAALQQRFGGRPIAVCLEQVRGALVYMLSKYAHLVLFPVHPTMAARYRETFCTSGAKDDPGDTASLLDLLMRHRERLRPLQPDTVETRLMQFLVEERRRTVNEKTRQSNRLTDCLKLYFPQVLRWFDGVDTALVGDLLERWPSLEELRRAHPGTLRKFFHEHNCRSEERNQERIDAIYQAVPASHDAAVLEAGALTARGLVALLRTLRDHIDKLDRRIAELVATHPEGALFASLPGAGSVLVPRLIVAFGTRRERYESAYEMQCYSGIAPVKEASGKTSWVHFRRACPKFLRQTFHEFALHSIGQSEWAKAYYQHLREDKNKSHQAAVRSLAYKWIRIIFRCWKDGKPYDEEVYLNSLRRRGSQLGAALAPATGLGWQTVAGFQKLSENKA

SEQ ID NO: 472601 - protein, 404 aa, unidentified
MVFVGIDWSERHHDVCVMDVEGRVLAKGRVPDGVQGLAKLHEMVAAHAEEPSEVLVAIEIDRGLLVGALVASGYAVHAVNPLSVDRYRDRHRTSGAKSDPGDAKVLADLVRTDRHLHRKVAGDSELAEAVKVLARAHQSLIWSRQRHANQLRNVLREFYPAALAAFGTDLASSDALAVLGVAPTPARGRSLPAPRIAATLTRAGRRRGAAERAKEIKAALHSPQLEAPEVVSKAYGEVVRSTVAILAEMTSQIEALAQELQSRFEEHPDAEILRSLPGLGSVLGARVLAEFGDDPTRYADPRGRKNYAGTSPITKASGRSRVALARFARNRRLADALEMWAFCSLTSSEGARRYYDAHRAKGQTHRRALRSLANRWVGILHGCLQHRSCYSELLAWPATEKEAA

SEQ ID NO: 472602 - protein, 337 aa, unidentified
MDITTIGIDLAKSVFQLHGIDANENVVLQKTLRRGRVLAFLTKIPPCLIGMEACATAHYWAREITSLGHKVRLIPPAYVKPYVKRQKNDAADAEAICEAVTRPNMHFVPVKTTEQQGVLVLHRSRDLLMRQRTMLLNAVRAHLSEFGYIAAQGPQKTLDLLRRLEEGDGIELPDTVITALLSLGEQLSTLQRAIRGIEKRLLIWHRQNTASQRLETIPGIGLITATALAASVPDPAVFKSARQFSAWLGLVPKQNSSGGKTRLGRISKMGNGYLRKLLVVGATSVTRRAANNETRTGAWVRSLLERKPTRLVTVAIANKTARTAWALMIKGEVYKAY

SEQ ID NO: 472603 - protein, 315 aa, unidentified
MGGVNAAIEVGKQQLVVRLGSDGEQFCEPNEVRAIKRIAKRLLQAGCARVLIEGGSYQSALIAGLRAAELPVVVVNPRRVREFAKSIGQLAKTDEIDARVLALYGERTQPPLRELPDEQSQALRALWVRREQLIEMLVMEENRLEHVPEKAKAVRDNLRAHIDYLRKQIKQADNDLDREVRNSALWDKYEMLSSVPGVGPVLSVALLSDLPELGRLSRGEIAALAGVAPFNCDSGTLRGQRRIEGGRPRLRRVLYVATLAAVRCNPVLKPFYLRLRAAGKPAKVALVAAARKLLTILNLMLKTKTVWRPPCQAAT

SEQ ID NO: 472604 - protein, 460 aa, unidentified
MKNPRKSKKQDLDANFSLINPNAAGIDIGADRHWVSVPMGRDAENVRSFACFTADLYAMADWLKQCGIETVAMESTGVYWIPVFQVLESRGFQVKLVNAHYVKTVPGRKTDVLDCQWLQQLHTYGLLSGSFRPEDQICMLRSYIRQRDNLIKSSCVHVQRMQKALTQMNLQLHRVISDITGTTGLSIIRAIIGGERNPLKLAALKDGRIKATIEEIAASLTGDYRPELVFILEQELQLYDFYQTQILKCDNQVEQCLASFTDKVDISEKPLGKPKRRGTKQPGNAPQFDLRTHLYRIYGVDFTQIPGFGALTILILLSEVGLDPSQFPTVKHFASWLGLCPGSRITGGKVKSSKTRPVANRAANAFRMAAQTLCRSDSALGAYYRRMHSRLGAPKAITAIAHKLARIFYHLWTSGEAFVAPSIDAYEQQYHDRMLKNLKKKAQALGLELIPIPTPLECVS

SEQ ID NO: 472605 - protein, 418 aa, unidentified
MSEERNARAMCRYVALDIHKHYCVIAAVDREGRVVLQPVRVEHADLEEWAKKNLHTTDQVVIESTTNAWHVYDLLSPLVERVVVANSFKVKQIANARVKTDVRDTLILARLLAANLVPGVWVPPMHVRELRQLLSQRRELVETHTQIVNRMHSVAHRHHLTHERGKRFNEKNTGWQKDKRLSKMEQFQLELEMENRSYLEKQIERIGKAVAKLSHQKPWAESMTYLMQLPGFGVITAMTVLAAIGEIQRFETAQHLASYSGLIPGLEQSGTKKRGKGITKEGRKELRWALVEVAQRTVKSDPYWKKRFEAMQKRMHRNQAIVAIARQILEVVWNVLTRRQPYRHFSQERIAYKYLTWGWQMDEEARDGLTRQQFTRYYLMRLGIGQDLTRIVLDPKHPRRIASEAEVLALRPELQRIE

SEQ ID NO: 472606 - protein, 393 aa, unidentified
MQTAADRPEAPTTIRTDLGAIFVSLELSRSTWVITSLSPGGGEKMSKHSVAGGDIAGLLERFAQLREKARARTGKSFPILVIQEAGLDGFWIHRTLQKEGIESYVVDPASIATSRRRRRAKTDRLDGEALVRALLAYKRGEPRVCAMVRAPTPQEEDRRHTCRERKELIAERVKHVNRIKGLLFSQGVSGYEPLRRGRRAQLDELKTGDGRILPEYLKARICRELDRLELLLAQIKAVDGERDALLGAEEVTALAPAVSTPAAMLRDIKGIGPEFAAVLWSEGLYRHFDNRRQVAAYAGLAPTPWQSGSVSHEQGVSKSGNPRLRTTLIQLAWLWLRHQPQSALSLWFKERVERNGGRFKKTTIVALARKLLVALWKYVTAGVVIEGVVMKTA

SEQ ID NO: 472607 - protein, 362 aa, unidentified
MNNHIFVGIDLGDKNSVARIAEDLEKGERFGFVNTRAGRCRLFDEVKRRAERAGGATIVMAYEASSCGFVLCDQARSAGIDCRVLAPTKMEKSVEQKRNKNDDRDADDVLEKLRGHVLAGNRLPTIWVPDLEIRDDREVLRTRLALSERRTQVKTQIQMLLKRHGLEKPSDLGSTGSKQYRVWLESLCEWETIGWGTRQSLASLLRQLKGIEGEMENLDKLVGQLGSQARHQPIVAALMKEKGVGLLTALVYRTEIGKADRFHRGRHVGKFVGLTPTSHESGQQSDRKGHISRQGPPRLRKVLCQASWVHVRHDPDSRQMYQKLVAKNPKKKKIALVAVMRRLAVRLWHRMREAESVQQTQS

SEQ ID NO: 472608 - protein, 387 aa, unidentified
MTQVDDLSRSLAVFDQNTSLVVVVELSEASWLIAGLVPGVDRQPLKKLAPDPDALLRLLERWQAEAVKKDQTIERVTLAYEAGRDGFWLARWLQARGIEVHVIHSTSVAVSREHRRAKTDRLDTAMLMRVFLGWLRGERGHCGMVAIPTLEAEDAKRPSRERESLVGERTRIANRMKSALARLGIRGFKPELRRAPLRLAALRTPEDLAIPPNTLDEIRRDMARLAVVRGQIEEIERVRLERLEQAPEEGSNAMVRLLARIVGVGVETADMLVREVLSRNLRDRRAVARYAGLTGAPDESGSKKREKGLAKAGNARVRRGLIQLAWRFLMFQKGSALAQWYRARTEGAQAKRKTTMIVALARKLLIELWRMVTIGSVPEGVVLRQAA

SEQ ID NO: 472609 - protein, 333 aa, unidentified
MQFTNILGIDISKRTIDVALSENKVNSKMINNQFSNNLKGFNELLKWLKTEKINMKELLVCMENTGVYHRCLVVFLQSKEIYTWVETPVEIKWSMGLQRGKNDAVDAQRIALYAFRNQDKAKNYSVLDKSLQQLSDLMATRERLKRARKMLLIPIKEMKQSGLKNEAVVMEKACCKSVKALEKEIESIEKQLEKVIETEAELSKNYKIVRSVRCVGLVCSLQLMIYTHNFTRFDNAKQIASYCGIAPFEYSSGTSVRGRTKVSNMANKTLKTSLHMCSVSSVRHNLEMKKYMERKVSEGKNKMLILNAIRNKILQRVFACVRDKREYEYKNAV

SEQ ID NO: 472610 - protein, 360 aa, unidentified
MATVQIKSEQETKPVYQQMVGVDIAAQTFTASRLVLAKPGTSKTKPEAALSYQQTPVGFEKFEQLLLAKGFAPPATLIVMEATSTYWIGLAIFLHTQGFAVSVINPNQAHHFARAQLRRPKTDALDAQMLVQLAEALVPQTWSPPPQIYHELQQRLQHRHSLLELRKTVKNQLHALLASTVIVEAVQEKMQALIDTFSQQLTVVDKEIEEVVKQDKAWSSSINLLQTIPGVGPLTACWLVVATLNFSTCAKAEQLVQYAGLAPTERSSGTSIRSHAQIGHSGHPLLRGALYMAAMSASRWNAVVKAFYDKLRAAGKPMKVARIAAARKLVHLAFAVVKSGKAFDLEYATKKQTEPLAKAS

SEQ ID NO: 472611 - protein, 354 aa, unidentified
MTASYDYHIGVDYHKSYSHLVVQDSSGKTLRSGRVKNDRQSLGGFLERYRENSHAVIEATRNWMVMYDWLDDICDDVVLAHPMKVKAIADAKIKTDKIDATVLAHLLRADLVPEAWAPSEKSRELRVALRERMFYVRLRTMTKNRIVTVFDRYPEQTAQLKKLGDLFGKAGRIQLAEVNVSDIDRIQIDRGLAFIGDINERIKQSETTIRAMTKANANVKLLKTIPGIGEFFARLIDAEIDDVSRFRNAKKFAAYAGLVPSTYSSGGKTYHGKIIKQGNKWLRWAFVEAVAPAIASDAQLRAQYEQLKIRGTNKARVAIARKLLTIAFQILRDQRAYEPRGTTTEGASTISRLS

SEQ ID NO: 472612 - protein, 341 aa, unidentified
MSGAYEGKQIVGMDLHRRRSVVVRMTETGDHLETVRISNDPGYLAQVMARAGEAPEVVLEATYGWYWAADALAELGANVHLAHPLGVKMFSYRRVKNDERDASDLADLLRMGRLPEAWIAPPATRELRGWVRHRAKLVGLRSNLKCQVHGVLAGAGVGVPMSDLFGVGGQKMLATTRLATESRARVDSAMRLIEQLDFEVELFAKLVAGRLRTDPGYQAIQAIPGIGPVLAGVFVAEIGDITRFPGRAQLASWAGLTPKHRESDTTVHRGRITKQGSRLVRWAAVEAVQRVPAHTRLGQLRERVGQRRGRNIGVIAAARELTGMVFYGLRDHQIRCLSQPA

SEQ ID NO: 472613 - protein, 352 aa, unidentified
MRTSHQNAPETISTIGIDVGKNTFHLVGLDKRGVIVLQQKVTRHQLGRRLSNIPRCLIGMEACSGTHYLARQLTALGHDVRLIPAQYVKPFLKGHKNDYRDAEAIAEAVQRPTMHFVSIKTPEQMDLLALHRVRSRLVGQRTGVINQIRGFLLERGITVRQGPMPLRKALPEILSASSDALSPRMINLIGELIQDWRRLDERIAAVSSEIEALAKQDASCQRLMSVPGIGPIISSAVVAAIGNGAGFKQGRDFAAWLGLIPKQESTGDRTILGKISKRGNKYVRTLFVQAAHVVLERRPRTARQGLWPWIEQASKRLHRNMLAIALANKLARIAWAVLARGQAYQPRITANA

SEQ ID NO: 472614 - protein, 355 aa, unidentified
MDNVKYIGMDVHKEAISIAVLNSSGKLAMECTIETKASTILQFFEGLSGSLHVTFEEGTWAAWLYDLLKPHVAKLVVCNPRRNALLKEGSKSDRIDARKLAELLRSNLLRPVYHGEHGVRTLKELARSYLTISKDVERVMSRLKAIYRSWGIPCTGKQVYAPRYRAEWLGKISEAGVRRRAEFYYQQFDALRSLRQELRRDLLVEANKHSATKLLREIPFIGPIRATLIVAILQTPHRFRTKRQLWAYSGFGIETHGSAEHRYVEGELQRSRKPVSIRGLNRNHNHDLKNLFKSAATVAAAKPGPFREFYDSLVAKGIKPEMARLTLARKIAVITLTVWKKGVRFDAKYLKPQTA

SEQ ID NO: 472615 - protein, 340 aa, unidentified
MEKRYIGIDLHRNQFTCCVRLNNGRSYLSQWRLEDLPRFVKKLRPSDELAVEITGNTRLFVDAVASQVGRIAVVDTNQFRVISRSVKKTDANDARLLALYLSKDLLPEVRMKDKQHGQLASLTQTRETLVKLRTALKNKVNNILSARGINLPKEALLSEKKLNEILALPFDELVQIELRIIVEQIRSLNKSIVELEKIIAEEASKLEGHKSLISIKGIGKITSAILLSVIGDISDFPDESRLASYFGIVPRVANSNETERSGHIHKRGTKLGRTALIQSALIAANYSPYLKNFYVRVKVRRGAGKAIIALARKFLGIIYRTLKNKWVFEDFTNFTLAEAA

SEQ ID NO: 472616 - protein, 362 aa, unidentified
MLYVGIDQHKRHLTVCVRNEQGDMVLSRQVSTVWQEVDRFLESLGERGKPEGGYVAVLEVCGFNHWLLKRLVQWGCTRTYVIAAPPRLRNKTDRRDASKLSELLWINRERIAAGRRLVEIHAVYQATEAEEEGRRLTHMRYRLGRDRTRIKNRIAGLLRRHNLEHECPTKGLFTGQGLRWLAEVVLPELDRITLDMELAGYRMCSEHLQRVEVLIHQRARRHPVVQRLRTLPKIGEYTGLALWAHIGSIGRFPHARSLANYFGLTPGCRNSGNTDRPGSITKAGHPFVRFLLGQAVLHALRSDPGLRSWYRQVKRRRGAKVARVAVMRRLCEALWHMLSKQESYRPVGSEKAKTRSPAAHVA

SEQ ID NO: 472617 - protein, 352 aa, unidentified
MDKTNKLDFTGQPIYVGMDVHKKSWSISIHTEHFEHKTFSQPPEVEKLVNYLHRTFPGATYNSVYEAGFSGFWIHDQLREEGIQCMVVNPADVPTKDKERAGKADRVDCRKLARNLRNGDLKGIYVPSRVKVEDRNLVRTRQSMVRKQTRCKNQIKAILLFYGILIPEDSHWSKRFINWIETIRMEKTSGDIALKAHLEELKHLRQIIADLNRAILALSRTEEYQNDVLLLKTVPGISTLTAVTLLTEIYDISRFPSLDKLASYAGLTPDIRSSGETEHTMGITYRRNAILRTLLIEASWVAVRKDPALMIAFNKFALRMKKTNAIVHIARKLLNRIRYVLKNRQRYVPAVV

SEQ ID NO: 472618 - protein, 478 aa, unidentified
MARKEQTQPHLKAVPMLLHESLYVGVDVGKQRHVAGFVSKTLLQRYERFEACPALAFEQSREGFRTLIDRIRELVPLEQAYLLLESTGHYHRALVQYLQELDIPVYIMPVQKRPVGLIKTDKRDALGLANQLYNQLELGVQLADKTHLVRRLLPASETALQLKGWIRHRYELMHESTQRKNKLTAICDELFPEFTWVLKDPNGTAALKLREHFPTPHAIATTPLTALAQHRVSSHPSMEQLVELQRLASQTIGTKDVVRQRGLVLEQQQLIRELRMLQEHVQQLDVEIVKLVEQSREGQILTSMPGIGPIQAAAIMAAIGNVLNFENGATLKAYFGWAPKREQSGSTLDRDQLAHTGTRTMKQTMFLVVANAIQRKECEWAKLYERLVPRMCSYDERKRTYRGKLKVLVRIAGQMTEMIYALLKQDAEVLSKTPPGETPPDPILYDPELHQRHRNGEYRPLKNTPPHRKVLQLPERTS

SEQ ID NO: 472619 - protein, 387 aa, unidentified
MQEVKSRPELAAIRTDLAAIFVSMELSRSTWVITSLAPGAGETMSKHSLPSGDVAKLLQRFSLLKQKARTRTGADFPIIVIQEAGLDGFWIHRVLESEGIESQVVDPASILTSRRRRRAKTDTIDGETLVRTLLAHKRGEPRVCAMVRPPTRQEEDRRRICRERRTVLAERIEHVNRIKGLLFAQGVFDYEPLHRNCRARLDALKTGDGCVLPDHLKAQIGRELDRLELVVTQLKAVEAERDALLEQTREIVTVPARALANLKGVGAEHAAVIWSEGFFRTFANRRQVAAYAGLAPTPWQSGSVDREQGVSKAGNPRLRTAMIQLAWLWLRHQPGSALSRWFHERVRRHGGRSRKTTIVALARKLLIALWKYATAGVVIDGAVMKAS

SEQ ID NO: 472620 - protein, 399 aa, unidentified
MISVGIDVSKGKSTVCILKEYGEVISEPHEINHTEADLKALVESISELNEETRVVMEATGAYHLPLLTYLKNHGIFVAVINPLIMKKYSAIGLRKGKTDKLDSIKIANYGIDNWFKLTDYEATDEVYSELKLLGRQYSHYIAMRIESKLVLSNLLDRTMPGIKNLLKNRSDKPEKDKLNDFVKEYWHYDNITKKNEKQFINSYFKWAKNKGYHQSETKAKQIYALAQEGIPTLSSSTPSTKMLVLEAVRVLSEIDRTLSMILSQMQELASSLKEYNVVRNMPGVGDTLAPRLIAEIGDLKRFYNKKALIAYTGIDSPPFESGQFVANKRRISKRGSALLRKTGYEIMKCIKSAKPKDDPIFLYMLKKEAEGKPKKVAKIAALNKFLRIYYARVKEVYNT

SEQ ID NO: 472621 - protein, 318 aa, unidentified
MTPLVFVGLDVAKATLDVALRPSGEQWSVPNDEAGVAALLERLRPQSPALVVCEATGGFERAAIAMLAAAGLPVVVANPRQVRDFARATGQLAKTDELDAGILALFAERVRPTPRPLPDAAAQLLDAVLTRRRQLLEMLVAEKNRLGFAPKPLQRGIQAHIRWLERQLDDVTKELAGLIEASPVWRAKDDLLQSVPGVGPIVSYTLLGELPELGTLTHKQIAALVGVAPLARDSGTLRGKRMVWGGRASVRTALFMAALCGRRWNPALKAFYERLKAAGKPTKVALIACARKLLTILNAMVRDDKRWAVPTPSVQYSC

SEQ ID NO: 472622 - protein, 341 aa, unidentified
MRKTLFCGVDLHSNNAMYVITDERDRQLLHKRLPNELPLVLKSLAPFRPRLKIVAVESTYNWYWLVDGLLDHKYPVVLAHPSAMEQYHGIKEADDLTDAAFLARLARLEILPTGYIYPKEDRPVRDLLRRRMLVVQHRTGVILSLQNMAERQTGRSVGWRALRKLSDQERRGLLGEHDCLAFVTAEQVDLIKLLSKTIRRFEKKVLEHAQLRPAYACLQTLPGVGPILALTIMLETGDIGRFATVGDYTSYCRCVRATHTSNGKKKGHNNGKNGNPYLAWAFVEAVHHALRTCPRAKAFYDRKRAKRNGALATKALAAKWSKAAYYMMKRQEVFDLTRVFG

SEQ ID NO: 472623 - protein, 343 aa, unidentified
MQTITTIGLDIAKTVFQVHGVDAGGQVIVRRQLKRRYVVPFFQKLSPCLVGIEACASAHHWSRELQALGHTVRLMPPAYVKPYVKRQKNDATDAEAICEAVTRASMRFVPTKTPEQQSGLVLHRTRHLFIRQRTSVINAIRAHLAEFGIVAPVGRHGVEELLTVVADPSDKRVPDIARACLLALGDQLQSIKKQILEFDRLIRAWHRSNEMSMRLEAAPGVGPVLATALVAAVADPKSFRSGRNFSAWIGMVPKQHSSGGKNRLGNISKQGDRYLRGLFVAGALAVIRYAKIHGTKHRPWLTALLARRPTKVAAIALANKIARMVWAMMARGERYKEPVALAR

SEQ ID NO: 472624 - protein, 332 aa, unidentified
MDFFYFIGVDVSKKKLDFCVMFEGKVVHEEKTANHQGAIMSLLRNLEEDYGITSGQMLVCAEHTGQYTFPLACACKSVECKLWLENPAEIKYSSGVQRGKNDKVDAKRIAIYANRFQDKVQYYERPTEDIERLKQLESERTLYVTDLAKYKGQMKDQKDYMPKALYERKMKRLQALMDDLEEAIQAITDEMDEVIASCPVLSRQRELLMSIDGVGRVVATNMIIATEAFTRFVDPRKFNCYAGIAPFYYSSGSSQHSKAKVSHRADKVMKRLLHLAAVAVTHRVGGELKMYYERKVAEGKNRMSVINALRAKIVARMFAVIKKNEKYKPILS

SEQ ID NO: 472625 - protein, 364 aa, unidentified
MKKIIDYILKGQKIYVGLEDSKKSWKIVVRSGRIVVKKISIEADYKILQSFFRNNFPECSITVMYEAGFRGFGLHDKLKADGWDCIVTPPHTVTQEKCSRQKNDHIDADRLAKNLENGDYKGCHIPSEKMREDRQLSRLYEQLKKDCTRISNRIRRAIEFHGLEASFPQKSAWTAKTYREAALLVPDLEVGESLKFCLQMLFNELQLLRDQQAAVITKMKEIAKSDDYEKPVRLLASAPGIGQLTAIRLALEWGDISRFRRKEEFAAFLGLIPSEYSTGESERFGHITKQGSRIVRSLLIEAAWIAVRYDPVLLGKYNRIANNSLGEFKYKKIAIVAVARKLAMRLRALLLKGEEYQCGLLECA

SEQ ID NO: 472626 - protein, 365 aa, unidentified
MRRISTIETGGNSVLQQQLTIGVDLGDRSSACCVLNDAGEIVLERKLATSPEAMKETLGKMARCRIAMETGTHSPWVSRLLTGLGHEVIVGHAQRVRLITKSRRKDDRLDARRLARLARIDPELLSPVKHRSVQAQLHLTEIRARAGLVGARTALVNAARGLVKSYGERLRKCGTRKFRREAAGGLSTGLREALEPLLQEIESLNDRIQEYDRRIEKMAKETYPETSLLKQVQGVGSLIATTYVLTIEDPHRFRKSRDAGCFVGLQPGRRDSGDSEPQMHISKEGDEYLRTLLVQGAHYILGRFGEDSDLRRWGQKLSERGGKNAKKRAVVAVARKLAVLLHRLWVSGEVYEPLHNTQKAMTAAA

SEQ ID NO: 472627 - protein, 366 aa, unidentified
MKKTSTVRVNGNMIFKGHKLTIGLDLGDRWSFYCVLDEAGEVLLEQKVPTTPEAMKQIFSRISQSRIALETGTHSPWVSRLLTELGHEVIVAHAQKVQLITKSNRKDDRHDARTLARLARIDPELLGPVRHRSVQAQIHLTVIRARAELVSARTALVNAARGLVKSYGQRLPKCGTQQVSRELAAELSTELREVLEPLLQEVESLNERIKEYDERMEKIAKQVYPEVSLLKQVKGVGTQIALTYVLTLEDPHRFPKSREVGCFLGLRPGRRNSGESEPEKRISKEGDRYLRTMMVQGAHYILGPFGQDSDLRRWGLKLAERGGKNAKKRAVVAVARKLAVLLHRLWVSGEVYEPLRNSHKAMRAVA

SEQ ID NO: 472628 - protein, 326 aa, unidentified
MRQLSLGIDVAKETLDVVLLDRDVSHYQQVPNTPAGHAQLAQWLQRKAQGERVHACLEATGQYGDGIATYLCELGHPVSVVNPARIKAYAASRLRRFKHDKGDAELIATYCQREQPELWTPPGESFSELRAMTRHLEDLKKMRQQESNRLKSGMTSPRVLAALQEHLAFLDAQIKELSDDIDRHSNEDRELKAQKDLLTSIPGIGSLTAAKLLSEVRDFGAFLNAPQLAAYAGLVPEQYRSGTSVWSKARLSRKGNAHLRKALYMPALVALRHNPLIVALKARMEKTGHRPMEIVGAAMRKLLHLAYGVIKTGKPFDPNHAQTATG

SEQ ID NO: 472629 - protein, 455 aa, unidentified
MTVTKSAKMDALAMVNPGAAAIDIGSTMHMAAVSPDADENPVRAFGTFTGDLHDMARWFKACRVTSVAMESTGVYWIPAYEVLEAHGFHVILVNARYAKNVPGRKTDVNDASWLQRLHSYGLLRGSFRPEAGVATLRAYLRQRERLIEYCASHIQHMQKALMEMNVQLHHVVSDITGVTGMRIIRAIAAGERTPSTLAEMRDSRCHASAEKICAALSGNWRDEHIFALCQSLALYDFYQTKILECDRKLETALRALEGGKGHDVSCLPKVRTKTKQVNTPDFEVRTALYRVLGVDLTQIHGIGPSLALKLVGECGTDLAGWPSSKHFTSWLCLAPGNKISCGKLLSSKTRRSSSRAAALLRLAATTIGRSDTALGAFYRRLSARAGKAKAVTATARKIAVLFYNSLRYGMAYHDPGASRYEEQYRSRVIGNLQRRAKAFGFSLLEMPQEPDMSVS

SEQ ID NO: 472630 - protein, 391 aa, unidentified
MVCVGIDVAKDKHDCCILDSEGTTLVDCFTIPNNMDGFKSLLQTIQDCSQKSDKIKVGLEATGHYSYNILGFLLDNDLPVYVMNPLHTNLYRKSLSLRKTKTDRVDAKTIATMLLSDIDLKSYTDTAYHNEELKSLTRYRFDKVQERAKLKQSVSRLVTILFPELEQLVSSIHGTSIYALLSEYPGAKQISEAHLTRLANILVKTSRGHYRKDKATHIRDAARTSIGSVMPAKSLELKHTIKLIQELTSEINEIEDAIRKIMDELKPPILSIPGMGFHSAAMILAEVGDFSNFNSPDKVLAYAGCSPSTYQSGKLTNCYAHMEKRGSRYLRYALYTATKYVCYWNPVFTEYLTKKQAEGKHYNVALSHATKKLVRLIYALQKSGKAYLAVT

SEQ ID NO: 472631 - protein, 318 aa, unidentified
MICVVDVSLKSLEVRIGRDGLTASFPNTVEGIASLADFCQAHDVDLVAMEATGGYEKKSFLLLWARGIPVAILNPRSVRHFAEAMGLLEKTDGIDCGVIAWFAETKRCVGCPPASAQQQRLKALVNRLRQLTDLRAMQTNQRALVTDTVVLASFTKMFRVLNAQIRLLEVTIARLIDADPLWRQLDTAFRTIKGVADRTVARLMAELPEIGTLSNKAIAKLVGLAPLAHDSGNTQGKRPVRGGRRSIRDILYWVAGGVARHHPDFLAFRQRLAAAGKPKKVIRVALAHKLLVRLNAKAREVRSQFVSVPDAGGQKAMG

SEQ ID NO: 472632 - protein, 352 aa, unidentified
MKTSTTTANAGLYGGLDLHSDNVFCALLDAERNVVFEKRLPNDIDTVRLALEPYKERIRELAVESTYNWYWLVDGLKRLGYAVRLANPARMQENIGLKHANDKTDARYIARQLTFGCLPEGYIYPEETRGVRDLLRHRMHMVRHRTAESNRLAALAARQTGRKPRIAKTAPKELLGLFDGHAPSVAVAEASLRHIGYLGGEIKALEKSVASQIPDKAAYENLTTVPGIGPVLASCILLETGPIARFRSAGHYASYCRAVPSEHTSNGRKKGEGNGKCGNKYLAWAFVEAANFAVRFDPAINVWFQRKQARSRGLRVVAVKALANKLAKACFFILRDNTPFDAARLAGRPDPA

SEQ ID NO: 472633 - protein, 345 aa, unidentified
MKTTTIGIDLAKSVFQVHGVDERGRARLRKQLKRKDVLSFFANLEPCLIGMEACGSAHYWARKLSELGHTVRLMAPQFVKPYVKTNKSDRNDAEAICEAVGRPNMRFVPVKTAPMQAVLALHRARQGFVKARTAQANQIRGLLAEFGIVIPKGIGHIAKRLPEILGDGKNELPGMTRELLQRLRTNLKDLDQQVGELERQITLWHRENEPSRRLEAVVGIGPLTASALVATIGDAKSFKNARQVPAWLGMVPRHEGTGGNVKLGGISKRGDAYLRTLLIHGARAVIRHSEHKPDQADAWLKKLLVRRNKNVATVALAAKNARIAWALLAHGRSYQHDYVATPMAA

SEQ ID NO: 472634 - protein, 355 aa, unidentified
MSDINYIGLDVHKETISIAVLNGRGKLIMESIIETEAATILRFIQSLRGQLHLTFEEGTWAAWLYDLLKHHVHKLVVCNPRRNALLKEGSKSDKVDARKLAELLRAGLLRPVYHGEDSLRTLRELARSYYTLGKDTTRVMNRLKALYRGLGVRCGGVQVYDPRYRQQWLEKISEAGVRRRAEIFYEHLDAVRPVRQKARRELLNESRKHQAATLLRNVPCIGPIRAALLVALVQTPHRFRSKRQLWGYSGLGIKTHDSAQYRYIDGQLRRSKKPQQLRGLNSNHNHQMKELFKSTATNAIRCAGPFQDFYANLLAKGMEPEMARLTLARKIATITLTIWRKGARFDPDQLKAQAA

SEQ ID NO: 472635 - protein, 312 aa, unidentified
MSSSVYVGIDISKHRLDVATEPATPSAPFPQTEAGVGALVTHLQALGPALIVLEGTGGFETAVVTALAAADLPVVIINPRQVRAFAQAIGRLAKTDAIDAAVLALLAARLQPPRRPLPDAAQQELKARVARRRQIREMITAEQQRLPQTRGRIRADIEAHIAYLKDRSDEIDTDLRTLIAESPHWRATDDLLQSVPGIGPTTAAALIADLPELGRLAARPLAALVGVAPLNHDSGTLAARRITWGGRAPVRSALYMATLTATRYNPVIKAFYQRLLAAGKPRKLALIAAMHKLLTILNAIVKTQKPWATLDV

SEQ ID NO: 472636 - protein, 341 aa, unidentified
MDHHPTEKPLYTLGIDLAKASLVACLLDPAGKEIKPPTEFDNAPAGLRKLLAWMTDAQATRVVFESTGVYGKKLILALDGSVASLHQLNPKVISRRAATSIQTKTDQADARAIAKVGFDLALTEPKTLQNAAIRFDPAIEDLALWLSEFHRVTLNAAALANQIKTAECNPAPAAKRLCKDLHRELKRVRERKAEVAKIMDEAARKADAQSMDLLTSIPGIGDATAATLVCRIINIKRFASPDALKGYLGMYPRRRQSGKYEAPSRMATHGCALVRHMLWNCAKVATRFNPACMETYERLKKNGKHAASCYGAVARKLLHIVYGVLANQKPFSHQLSSPQPA

SEQ ID NO: 472637 - protein, 355 aa, unidentified
MNSIKYIGMDVHAATISVAVLDAAGKVIMESIIETKSTTILQFIRGFRGDIHLTFEEGTWAAWLFDLLKPCVTKIVVCNPHRNALLREGNKSDRIDARKLADLLRTNMLRPVYHGEKGPRTLKELARGYITIGKDLTRVMNRVKAIYRGWGIPCHGQSVYSPRRREEWLSKIAHHGVRCRAELYYQQLDMLVLLRQQLRQQLLAEGKKQKGWKLLRSIPALGPIRVALLMAILETPHRFRNKRVLWKYSGFAVVTQTSADHRYVQGRLERSKKPVSVRGLDPDHNHQLKELFKSAAIQASAREGPFREFYQARVAKGMRPEMAHLTLARKIAVITLTVWKKGVAFDAEYLKAQTV

SEQ ID NO: 472638 - protein, 383 aa, unidentified
MSATTRFTDPVLPDPPALYLALELSSRSWKLAFSTGPGQSPRLRTVPARDLDALGREMSAARTRFSLSESVPVICCYEAGRDGFWLDRFLNSDPHTVNLVVDSASIEVNRRKRRLKTDRIDALKLLAMIIRYHNGERTVYSVVHVPSREAEDARHLHRELLTVKADRTRVTNRIKGLLAAQGLCAPPLGRNFTHALLDLRLFDGAALYPQLTERLEREWQHRSQLSERIGFIERRQLTLLRTQPDEPALELVRQLMTLKGIGLQSAWLFTFEFFAWRNIQNRRQLAALAGLTPTPYQSGGQARDQGISKAGNSLVRAMTVQIAWGWLRFQPDSALTLFYERRFAHAGRRMRAVGIVAVARRLLIELWRFLDTGTIPEGAVTSS

SEQ ID NO: 472639 - protein, 375 aa, unidentified
MQKKVRFLGLDVHAETIAVAVAEQDGEVRSLGVIPNRAESVRKLIRKLGVGEHLRACYEAGPTGYVLYWQLTELGVECTVVAPTLVPVKAGDRVKTDRRDAAKLARCHRAGDLTGVWVPDCSAEALRDLVRTREAAKQDQLRARHRLSKFLLRTGRRPVIGVKAWSQPHIAWVRQLSYEQAAQEWTRLDLLHEVEHMSERVKRLEEAIREAVKLAPAGMQEVIRGLQALRGIAEISAVTVVAELGQISRFESARQLMGYSGAVPSENSSGRRQQRGAITKTGNAHLRRIAIEAAWSYRRRPAVGPALRKRQEGVPEEIKEMAWKAQLRLHKRYAKLAAAGKEQCKITTAVGRELLGFIWAIGVKTEAAAKRAMAA

SEQ ID NO: 472640 - protein, 413 aa, unidentified
MTVFCAIDWAERHHDVALVDDTGTLLAKARISDDAAGYSKLLDLLAEHGDSPESPIPVALETSHGLLIAVLHTGSRKVFAINPLAAARYRDRHSVSRKKSDPGDALVLANILRTDMHAHRPLPDDSEQAQAIAVLARAQQDAVWSRQQLANQVRSLLHEYYPAALLAFQSKQGGLTRPDTRIMLTLAPTPSKAARLTLSQLRAALKRSGRSRGLDAEAERLRAVLRAEHAHHLPAVEDAFGRQLLALLGQLDAACQAAAELAEAAEAAFREHADSEILLSFPGLGPMLGARVLAEVGDDRSRFVDARALKSYAGSAPITRASGKKRFVGRRFVKNNRLMNAGFLWAFAALTASPGANAHYRRRREHGDWHNAAQRHLLNRFLGQLHHCLQTRQLFDEQRAFAPLLSPPTGHAA

SEQ ID NO: 472641 - protein, 408 aa, unidentified
MNAVGIDVSKGKSMVAALRPMGEVALLPQEFLHTEVGLEQMAYAILALGENTRVIMEATGRYHEPVAAALHAYGIYVCVLNPLFIKQSGGGSIRKVKTDKADAMKIAKYGLDNWVDLREYTPMDTVRQQLKLCSRQYNLYMKTVVSLQNNLISLTDKTFPSVNELFSSPERADGHQKWVDFVMTFYHCDCICRVSEKAFTERYQKWCKRKGYHFSAEKALDVYAGSCGHITTLPKNDNTKLLIATAAQQLLSGKMTLAALRAEMTRLAKQLPEYDTVRAMYGVGETTATQLMAEIGDVRRFPRRSSIVGFAGVDPAVDQSGKHSAKSVPTTKRGSPHLRKTLYQIICTYLRKAPADEPVYQFLDKKRSEGKAYFVYMTAAQNKFLRIYYARVKECLEAFDAQQDTSQR

SEQ ID NO: 472642 - protein, 337 aa, unidentified
MNNKVVGLDISKNVFHLYSQTADGKAVKKKLKRGELLAYIANMPVSLIGMEACGGAHYWAREFTKLGHEVVLLNARFVKGFVVGNKNDFNDAEAIFTAVTRPNKRVIAVKNEAQQDIQMLHRLRQQRIDQRTALVNQIRGLLSERGIVLSQGINQVRKQLPLILEDAENGLTPLSRELFAEQYEQLKALDDDIKTRDSRINRLCQQNALSRRFLEVPGIGPIIATIMASDIGNGKGYTKSRDYAASLGVVPRQHSSGDKQVLLGISKRGNAYLRTLLIHGARSVIKCCHGKSDPLSRWLQALVERRGFNKAAVALANKNARILWAMARQDQPYQAAA

SEQ ID NO: 472643 - protein, 343 aa, unidentified
MNVYIGLDVSLASTAICVLGPQGKIVEELDAASEPEALVRAMASLPYAVDAIGLEAGPLSQWLSKGIEEAGFDVVLMETRLVKAALKAMPIKTDRRDAQGIARLLQMGWYRPVHRKSVSSQEIRALLTARKSVLQAIINIELSMRGVLRNFGLKLGHVTRIRYEARVKELVAQNDILSASALSLLRAREQLRAELASLDTTIAGLAKLDDVCRLMMTMPGVGPIVALTVRSAIDDPTRFARSKDIGPWVGLTPRRTQSGEMDIVGQITRAGDRGLRSALYQAAMILMHRGAPNWLQAWALRVAHRRGKKRALIALARRIGVILHRMWVDGSPFRFTQSSGPAA

SEQ ID NO: 472644 - protein, 432 aa, unidentified
MTERGELCRILYMEGKTMEKVYDKCCGIDVHKKLIVACLLSGRKSEIREFGATTDELLELSDWLVSAGCEMVAMESTASYWKPLYNVLEYSGLNAMVVNAQHMKAVPGRKTDVKDAEWIADLLQHGLLKASYIPSKDQRELRELVRYRKSLIEDKGRELNRLQKMLEGANIKLSGTVSSIDGKSARKILDFIVNGEKFTEEKYDEMYGKNEISHNLKASKEQILADLKGFLSPLQRRMMKELLAHLDELNEHIKNLNDEIDNFMKEDEVEASKLIQQIPGIGNTSAQAIISVIGADMSRFPTDKHISKWAGLCPGDNESARKRKSGRTTKGNVVLKTTLITCAHSAVKNKNSYFSAQYARVSAHRGKKRAIVAVAHSMLIAIYHMLSEKADFQDLGAGYYNQFNKERKANAMIKKLKELGYEVTVATPVLTA

SEQ ID NO: 472645 - protein, 501 aa, unidentified
MKTKRRKAKVQAGIRSISVTSNEAEQKLEILRPDAAGIDCGAQEHYVAVPVDRVSAGQPTVRCFSAFTEGLDAAVDWLKECRVTTVAMESTGVYWIPLHQKLEAAGIEVYLVNARHVRCVPGRKTDVKDSQWLRQLHRFGLLNASFRPEDITCRLRSLHRHRDNLVSSSSSEIQHMQKALQQMNLHLHHVVSDITGLTGLRIIDAILSGQRDPQELVKLRDKRVFKSTPQQMQAALVGDYRAEHLFVLSQSLQAYRFHQARIEECDRQTEPLLQKLAQQVEAASAQLKPLKGAQQEETLPVPGDEPKTGTGASSPLNKAKRKHKPVANEPKIELAGLLERICGIDLTQVVGLNVLSVLLIVSEIGIDMNKWRSAKAFCSWLGLCPGNKISGGKVLDSRTRQVVNRVADALRLAAQSAGRTETCLGIFYRRKHAHLGAPKATTATARKLACLIYHLLKYKEPYQRRDPAIYQLRLQKSALLKLQNQATTLGYKLVPTAPVPV

SEQ ID NO: 472646 - protein, 436 aa, unidentified
MNTSESKRTSLTEGIAAWVGLDWADQQHVICVYEVESGKSEMLRLEQKPEAFESWLTPLRQRFGGAKVAIVLEQARGAVIYALLGVDFVVLYPVNPQALANYRKVYTSSGAKSDPADAVLLIEMVRQRPECFRPWKPDDADTRSLQLLTENRRQLVNQKTAFTNQLTSVLKSYYPQALELAGDLDSDQACDFLTRWPRLGALQQARPSQIRKLYQDYGRPRPERLEQRLEQIRQARPLTQDPAAVLSGSMMVEALVPQVRSLLRAIEQFDRQISVLFQRHPDRFLFESFPGAGAALAPRLLAAFGTDRDRFQSAQEIQQLSGIAPVTEQSGRQHWVHWRWACSKFLRQSFHEFADHSRKWCRWAKAVYQQLRRRGQGHHAAVRRLAFKWIRILFHCWKTRSCYDESIYLKSLQKRNPVLWAEIEALPPRVRRQPAA

SEQ ID NO: 472647 - protein, 429 aa, unidentified
MNSSSQFAAYVGLDWEDEAHSVCLLPADSGAAQQYDLKHDPVAIATWAADLRQRFDGRHVAVCVEQSRGGLIYALMEYEFLVLYPINPKQLADYRKALYPSGAKNDPNDAALLARFLREHHDRLRARNPEDVVTRGLRLMTEQRRKLVEDRVAKTNELQQRLKESYRLALDFCDGDLWTESFLDLLERFPSQQELQRASPRQLEKWLPKKRRRADDPPAEELQRERIAALRKARPLTSDRAVLEHARIAITHLVVMIRALNRAIAEAEAKIAELFAEHPDALVFSSFPGAGKALAPRLAAAYGTDRDKFQGAEDMQQLSGIAPVTKASGKTRVVQMRWACPKFLRQTFHEFALASAKYSSWAKAYVTMRKAAGHRYQEIIRGLAFKWQRVLTRCWKDRQPYDELRYQRSLRESGSKLAAYLPPEPALTI

SEQ ID NO: 472648 - protein, 359 aa, unidentified
MDAQEGAVRRIIGGVDTHKDLHVAAVVDEQDRVLGTQSFASTRQGYRQMLAWMRCFGEVERVGVESTGSYGAGLLRFLQQAGITVLEVTTPDRQDRRRRGKNDDFDAQNAAHAAFAGIRTVTPKSRDGMIEALRVLSACRKTAVTARRIALQMIQNTIVCAPESLREMLRRMTRMQLVRTLAAWRPDLTAYRDVEAAYRISLKSLARRYLELHDEIADLDAMIAAIVDELAPNLVARNSIGHRGAAQLLLTAGDNPERLRSEAGFAALCGVSPVPASSGKTARHRLNRGGDRAANSALHIIAIGRLRTDARTQAYVAKRIGEGHSKLEAIRCLKRYIAREVFTLIKQRQREINQTRIAA

SEQ ID NO: 472649 - protein, 453 aa, unidentified
MRVRACAAQAERLLAWPQRTWAVEGAGGLGHLLAQQLVAAGERVLDVQPKLAARVRLLAAGDVNKNDPNDARSVAVAALRPAACLPVRADDHAAVLKVWAKRYRDLSRARNQVVCRMHAVLCQLIPGGVSTRITAGQAARILDQAEPRGAAGMARWVLAAQLLTGLRRIDVQRRDVQRKLAVAVRASGTTVTGIFGVGPAVAAAVIGDAGDISRFASRDHFAAYNGTAPVEVSSGGRVIYRLSLRGNRRMNHAIHMAAVTQIRYRHSKGRAYYDKKIAEGKTSKEALRALKRQVSDAVYQRMKADGRRAAAGPGGHPGNGSEASVAGLHPADRLFGQATPGPTPPCDPGPAAPRPRQPAAPGGPGQRCPRTLPPDPVRLMPRARLRAARRRGRPWPARFPAQQGPSRLRCQRAAAGRCAPARCAAPLTPEKRPRTLRGTRTQQRRSRYLPQSS

SEQ ID NO: 472650 - protein, 316 aa, unidentified
MEHGGKKVTVGIDTAKETLEVAVRPLGMSRTVPNTPEGHEALLALVEPLAPAFVVFESTGGFELGAVEYLLVHGVPVAVVNPRQVRDFARAMGRLAKTDKIDADTIAWFGETATLEAMPLKEEQARKLDALVGRRRQLIDMLTAEKNRLTTAREWIKADIQRHVHWLEQCLDDIDKEVGTLIKESPVWRAKEDLIRRIRGIGRVTSSLLIAQLPELGYLNRKKIAALVGLAPFSRDSGPFKGKRTIGGGRSGIRSGLYMAALSAIRFNPVIKAFYHSLITRGKPFKVAITACMRKLLVILNAVVKAHVNSLAEERA

SEQ ID NO: 472651 - protein, 321 aa, unidentified
MNKNTEFFGIDISKDVFDVFSLEMGHNQFSNNEKGFKQFIKKLSKGSLVVMEATGYYHYCLAQYLYEKGYAVSVVNPLSVKRFIQMKLSKVKTDKSDAKSICEYARNNEVPLYTAKDKSQAECLQLLRLMDTYVKHRTAMKNKLDGEKVLGIPSKAVYRSLSRTVKHLNKELVLLEARLIALVKEEQQEQLRLLKTIPGIGEKAAILLVVFTDGFSKFENSKQLCCYAGITPTIRQSGSSVRGRSRISKIGNKKLRNQLFLSSFTACQYNKACRELYERIVDQGKSKKLALLAVCNKLLKQSFAIAKSGMPYNENFVSKLV

SEQ ID NO: 472652 - protein, 347 aa, unidentified
MGYFAGLDVSLEETAVCVVDEAGRIVREARIASEPEALVAFFRASGMAMERVGLEACSLTAWLQPGLSDKGIPAICIESRQAKAAMGAMPNKTDRNDARGIAQITRTGWYRAVHVKSPACRCWRALLTARRLVLNKRRDVENELRALLREVGLKVGTPSRKDFAARVRELAADDPVLASLAESLLAVVEVMTREVERLTKRVLDEVRVEPTCRRLMTVPGVGPLTALAFRATIDQPNRFRKSRDVGAHLGLTPRRYQSGETDVQGRISRCGDELARTALYEAAHSLLIRSTKWSALRAWGMNIAKRRGMARARVAVARKLAVILHRMWADGSEFRWGKKAATTTAAA

SEQ ID NO: 472653 - protein, 348 aa, unidentified
MPSGKEPFNGEFCRSRFTQKSNAVGYFEGWAVAVAVSFSQRSEDRSRVLKKLPRGTKIAVEATGSWWWFVEKARELGHEVCLSHPKQTKAIAHARLKSDKVDAVMLARLLKADFLPTVWIPGEKERYVRELLAHRMRLVRNRTAVINELHALYAKRNVEAPGMIWHRLRPMPWRAEELSGYAPRIVSENVELLKVINRQIQDLDKEVGKAGQEDPQAKRLMTIPGVGATTAVAVSSWVGDIGRFPNGKKLVSYFGIAPRVRQSADKQRHGHITKEGSRMARWLLLQAALVSIRMAKQPARSHYLGVSKRRGKQIARVAATRKLVGVMYHLMREQIDYEEFLRRGGNAQ

SEQ ID NO: 472654 - protein, 400 aa, unidentified
MFSFFVGIDVGKWNHHAAFLDSSGIHAAPDLAFTNTSEGFQLLLSSLNSFDKTNTVIGLEATGHYWLALFSFLVDNFWTVKVINPIQSDALRNINIRKTKTDRKDSALIADVLRFGRYTETVLPDEPILQLREISRCRTGLVESSGNLKRKILGILDRIFPEFASCFSTIFGTAPTELLQEFADPEELANCDIEKLIKLLEKESRGRHSNLKAEELKTKAAQSIGIRMGLDALKFELRLLLQQLDFIKKQVKDIDKFLKKLMKQHEILLSIPGISFVLGAAILGEIGDVKRFATPQQLQAFAGMDPSVTQSGNFTGTQGKISKRGSPHLRRALYLAASAARRFDPVFKEHYDKLVARGKHPKQAMGAVATKLLRVIHAVLSSQKSYNPLKLAFSSSKSSF

SEQ ID NO: 472655 - protein, 436 aa, unidentified
MTLINFVAANQKYYAFNLLSVFIMVFWSVQYLLQHLLVQTQVSHQLLQPLILILQLPQTPQFRHARPGKFFLPVNGMDYFLPLRLTVRNVLTRRITMNIVFLGIDLAKNVFQLCGLNQAGKPVYTKRTGRKELLQTLANIPACLIGIEASTGAFYWQREFEKLGHKVKVISPQYVRPFVRGQKNDGNDAQAIAVALMQPTMQFVPPKSPEQQDIQALHRARQRIVNHRTATVCQIRGLLLDRGIPIGSAVSRARRAIPLILEDAENGLTSRMRRTIAELYDLFNDLGRRIHFFDKEIETVFRQSEACPRIAKVKGIGPKTATAVVAAIGKGTEFKNGRHFAAWLGLVPRQHSSGDRQVLMNMTKKGDKHLRTLFIHGARAVVRVATNNNDGHMNQWVNQLKERRGFNKTTVAVANKNARIIWSMLRNDTGYQVVCN

SEQ ID NO: 472656 - protein, 481 aa, unidentified
MSAMRSPCTITMRYADTHRGPVNVGDAWDCESAMSLTWELPAPRLVALSTQSRGVRTRLLRATAIPNPKEGAREQLIARCAGLDVHKETVVVCVRRPGPGQDRLQPARTVGTMTADLLAVRDWLIAQAVTQVAMESTGVYWKPVDYVLEEAVTCVLVNAAHMRNVPGRKTDAQDCVWIAQLLEHGLLRGSFVPPVPIRELRDLTRYRKVLIPERVRETQRLQKVLEDAGVKLASVATDILGAAGRAMLEALVAGTTDPEVLAELARGRLRAKLPALRAARAGCFRGHHGFLVGELLAHLDYLEEAIERLSRPLEDHRRPFAPLVQPLDAIPGINQRAIEGIVAEIGVDLRPVPAAAHLVSWAGICPGHHESAGKHTSGKTRKGTRWLRTALIEAAVGAIRTHDGRLAARYRRIMRHRGHKKAVVAVAHTILVIIYHMLTHQVPYQEVGAAYLDQRDREQATRRYVKQLERLGHRVVLEPAA

SEQ ID NO: 472657 - protein, 451 aa, unidentified
MDVWLGSQTVRVQEVIPVRRKNPYSLVDVNQISIAVLTEHRGGQAATVGVDVGKKEVVACLVWPDRSFERPWRVKSPSELRLLVQKLLELKSRCPLTAAMESSGTYGDSLRQLLSDASVEVRRVSAKAVKDHSETFDGVPSQHDGKDAAIIGTLCVSGHAKSWDWADRPDQDQAIRYWVRKLDTAQRIKQVWSGKLESLLARHWPEAGRLLRQSGATLPLALAHWGDPAVLAKDPQASERLAKFGGHYLTPQKIAQVIESARESVGVRMSAWAVREMKEVTSAIIEQRQKIQDCRQQLKKLTADHPVIQAQAPAVGLITACVLWMCLGDPRNYGSAAAYRKAMGLNLKERSSGMHIGKLALSKRGQRLTRKWIYFSALRWMREPSVKRWIQSKKQRDGGRGDKAAVGVMRRLALAAWHTGQGEVFDVGRLFPGAQRQPQLPNASKEVTNMK

SEQ ID NO: 472658 - protein, 402 aa, unidentified
MTTDQLWAGVDVGKEHHWICVVDATGAVVLSRKLVNDEQAIRAVIAEIDTLGKEAVWTVDLTMAYAALLLTVLADAGKPVRYLAGRAVWQASAIYRGGEAKTDAKDARVIADQSRLRGAELPVLHPDDDLIAELRMLTARRADLVADRTRTINRLRQQLVALCPALERAAKLSSDRGWVVLLARYQRPKAIRQSGITRLAKTLTDAGVRNAPTIAAAALAAAKSQTVRLPGEEVAAGLVAALAQEVIALDDRIKQTDADIEGRFRRHPLAEVITSLPGFGFRLGAEFLSAVGDPTRIGSADQLAAWAGLAPVPRDSGKRTGRLHTPKRYSRRLRRVMYMSALTAIRCNPQSRAYYQSKRAEGKQSIQATICLARRRTNVLYALIRDNRTWQPDSPPITESAA

SEQ ID NO: 472659 - protein, 335 aa, unidentified
MEFEFFIGIDVSKNELDFSVQRGKEFLFHQEIANTPDAVKAFLKEVSKLPGYAPGRAVFCLEHTGIYSNHLLSCLYHQQANICLEAATTIKKSLGNLRGKNDKIDSQRIAHYAFKNRDELRLWEPRREEVQQLAGLSSTRSRLIKAKKMLKTPLKEYGTFVKKKVSKQSNDACNPALKGIESSLENVEKAIMDIINADPELKRLFGLVTSVVGIGKVTAVQLLITTNEFKNIDNARSYACYAGLVPYVQESGIFKGKGRISHMADKKVKTLFHMAALVAIQYNEELKLYYERKVNIEKKNKMSVINAVRNKLVQRIFSCVNQNRKYEKNYLRLVA

SEQ ID NO: 472660 - protein, 242 aa, unidentified
MSGAVVGIDIAKRKFDVALFLKGKFKHKACMNNKQGFEDLSRWLKKQGVEHVRVCMEATGTYGDELATYLYDAGHLVSIVNPVRIKGFAQSELLRTKNDKVDAGLIARFCVAMNPGTWTPPPPEIRRLQSLVRRADALIDMRTQEQNRLGTTHETIEPSIKEHIGYLDQEIEKLKRQIAEVIDHDPNLRGKRDLLDSIPGIGETTIAVILSALHVFEGVKCVQKTVAFIGLAPKETLSGSSI

SEQ ID NO: 472661 - protein, 414 aa, unidentified
MESLDRCIAGIDVHKKMLAVVVRKPSERGVEYVQRKFGTTKKEINHLAAWLQHCKVTEVVMESTANYWRPVWYGLERHFKLHLTHPLKTRAPRGRKRDYMDAARLANRWHSGDLEESYVPGAEQRAWRWLTRTRVQLKRKLAVVRGQMEGILEQGGIKLTAVVTDLFGVSAWAMLCKIAEGETDIDELMGEARGKLKKKHAQLKEALVGVLEPIYRFLLKQHMEQVQLIWRQVEELNQALIESMKDHVAVLVRLAKIPGVDLYAAQELLAEIGAGAIAFPSGDQFASWAGVCPGSQESAGINHSRRSAKGNRYLRRLLCQIAWAAVHTKNTFFGSLFARLKPRLEAKGAAWAVAHRMSYVIWLIMHNEVEYKERGIVPLKPKTLKRKLKRILQELTRQGVDAKSFLEQELTAIA

SEQ ID NO: 472662 - protein, 351 aa, unidentified
MTNATRWVGIDLHRRRSQIAIIDEHGELTLSRRIVNDPDTFKELLGDPEGTHVALEATYGWEWLADLLEQAGYEVHLAHPLRVRAIAAARVKTDAVDAPTLAHLLRTGLLPEAYIAPPELRDLRDLLRHRATLVHLRTSIKNRVHALLARQGILPEHADLFGTAGREFLAGLELPEGSRRRLDSLMSLIGDFDREITTTTREIDTRAKADERVKLLCQIRGIGRYTAMLIIAEVGEVKRFPSARHLCAWAGLTPTVRSSDGKARLGHISHQGSTILRWALTEAAQHTPTGGGPLRASFERIAKRRGRKIAKVAVARQILTLCYYGLRDGEIRCLKHQPTDDHHDDQLAEAA

SEQ ID NO: 472663 - protein, 335 aa, unidentified
MAKNVIQVHGVDERGKTVLKRQLKRDQVASFFANMPACLVGMEACGSAHHWARKLQSLGHEVKLMAPQFVKPYVKTNKNDVADAEAICEAVARPNMRFVPIKTAEQQSVLCLHRARQAFVKARTAQGNQIRGLLNEYGIVIPQGIGHVTRRLAEIVEDGENELPGRFRRLLQRLADNLKEMDRQVGELEREIKTWHRESEASRKLEKIPGIGALTASALTASIGDASCFTSGRQMAAWLGLVPRQRSTGGKATLLGISKRGDTYLRMLLIHGARAVIRVCERKPDPDRWLKGLMGRRNKNVAAVALANKNARIAWALLRYDKEYASDYAPAFAAE

SEQ ID NO: 472664 - protein, 399 aa, unidentified
MPQLWAGVDAGKAHHHCVVINAEGDKILSRRVPNNEAELLELIADVRALSPDVLWAIDLNAGGGALLIALLVNHDQALLYIPGRTVHHASAGYRGSGKSDAKDAFIIADQARMRRDLHPMTAGDEIAVDLRILTARRYDLTADRTRAINRLRAQILEYFPALERAFDYSSFKAALVLLTGFQTPAALRECGQAELATWLRARKVRNGAAIAATAIAAARAQLTAVPGQSTAAAMTARLAKGVMALDEEIAETDALIEGRFRQHRHAAVILSMPGIGPLLGAEIIALTGGDPAAFGSVDRLAGVAGLAPVPRDSGRVQGNLRRPRRYNRRLLRAFYLSAQYAIVRCPESKAFYERKRHEGKVHKQAVLALARRRLNVVWALVRDERTFQPHVPRPGSAAA

SEQ ID NO: 472665 - protein, 370 aa, unidentified
MKPNFEPGKWFMQCVGIDIAKGTFTACLCMYEFDQGCSTAPVVFNNDKTGFNQFVKWSRKEALKGYPLRYVMEPTGVYYEQLASHLNKLSLNVCVVLPNKAREFAKYEGILTKTDDMDAYTLGMLGCLDKRLKPWTPPSPIYRELRQMTRFVADINKVKTELRNHLEALAHSETAEKSIVKHYNKLIDEIDKQLVSNQKAIREKIKQEPGLPERIDRITTIKGVGFMTVVTILAETNGFALITNRKQLTRYAGLDVPAHQSGPVDPKRHISKQGNVHIRTALYFPAIVSTQCNPQMKDFYRRLCARNTQSKMIGVTATMRKLLLLIYSLWKSGEKYDPTRDKPACNRQKKEAETTEGQPHGIDVGTLAEE

SEQ ID NO: 472666 - protein, 419 aa, unidentified
MTSDFEWYAGIDWASEQHRVCLLDGGSRRAGEREFAHSGDGLAELCAWLIAMSGCEPQKIAVAIETPHGPVVEMLIDHGFAVHSINPKQLDRFRDRFTVAGAKDDSRDAQVLGHSLKTDAHAFRRLVVDDPMIIELREWSRLGDDLKQERNRLANRLRQQLWRYYPQMLELGGDDIAADWLLALWDEAPTPAKAAEISTQVIAPLLKAHRIRRFEAADVLRILRQTPLTVAPGTIAAASAHIRILAERLRLVNRQVKEANRKLDRLCRKLGQAPESEAGNRPEQRDVAILRSLPGVGRINLAALLAEASEPLKRRDYHALRLMSGVAPVTRRSGKACLVIRRLACNARLARAVYHWTRVASQCDPISHKRYAALRQRGHSHGRALRTIGDRLLGLACTLLRRQVLFDPDYHCKEVAAAA

SEQ ID NO: 472667 - protein, 315 aa, unidentified
MNPTLLFVGIDVAKAECVVAVRPSGATWTIPQTEAGWAALAVRLQTLAPTLVLCEATGGLELPLASVLAAAGLPLAIVNPRQVRDFAKAKSLRAKTDALDAAVLAHFAEAIRPVPRPVPDATTQTLAALVTRRRQLVEMRTAEENRLGSAPPPLRAGLRAHIRWLQRQLATLDTDLDQVIRTHPGWRVQDDLLRSAPGVGPILSVTLLGGLPELGTLSRHAIAALVGVAPWNRDSGRRRGPRRCGGGRADVRAVLYMATLAAVRCNPALRAFYQRLLAVGKLKKVALVACMRKLLTILNAMVKTQTSWMPRPAGI

SEQ ID NO: 472668 - protein, 377 aa, unidentified
MKKDSSRTQSSKPRAKRAARCKRFITIGMDLGDKTSRCCAIDESGEVLFERSIATTKKGMTQLFGAMGRCRVALEVGSHSPWVSRLLASFGHEVIVANARQVKLISQSTRKDDKLDARTLARLARIDPELLRPIRHRSERAQLDLTEIRVRASLVEARTSLVNAARGLAKALGERLPKCDADNLDVERMESLPGTIQAALKPLLEEAASLTEKIHTCDERIEQIARTEYPETELLKQVSGVGTLIALTFVLTVEDAARFQKSRDLGCYVGLRPQRSESGESRPQLGISKEGDIYLRKLLVQGAHCIVSRRGPDTDLKRWGLKLAERGGQNAKKRALVAVARKLAILLHRLWVTGEVYEPLRNSQLRGAANKAKRQAA

SEQ ID NO: 472669 - protein, 333 aa, unidentified
MVEGTEGSHHKEGSTKMSEYTTVCAGIDTGKHKLDVAIDGGAERVQVDNNSEGHRSLLAWLRKREVERIGIEASGGYEQAVVLSLRADGFVVIVFQPVQVRAYARFVLQHAKNDTIDAVLIARCTAAATDIREPPDARLALLAQHLTMIEQLTEDVGQLKTRREACREERIREFWKREIDRLKVLLNSELKQLVAAIREHRDLSHRLDLIASVDGVGLRTAVAILVRMPEIGRVTRGQAAAIAGVAPYDDDSGLRRGSRHIKGGRQRLRQSLYAAALPAVFYWNPQLKAFYRRLLAAGKPHTLALVACARKLLIFVNTVVARGTSWRSSAVTT

SEQ ID NO: 472670 - protein, 424 aa, unidentified
MNFKMQNKQNQLIERITDQHLVVGVDIAQHVHVARAVNYRGIVIGKPLSFENNEEGFTRLLNWIKELKHMKNLDTTIVGMEPTGHYWINLSKWLVKQNIDVVTVNPYHVKRNKENRDNTQSKSDKKDALVIADMVKNGYYAFVRSTSESFEKLRVLMANRDVIVKRLVSSINQINRWVDVVFPELRQVFKDVSCKGAIATLRLFPTPAEICSLQPQDIVTGWKSCMKRHSGHKKARSLITLAKRSIGTKQALDAYKLHLEQLLEEYDLASSQLERVTQEVTNVLEQIPFVKQILAIKGISEISLAGILGEAGDLSGFAHGNALLRHAGLHLAEASSGKWKGQIVLSKRGRSRLRRYLFLATMSLVMNNPEFKALHSNNVKVKKIKKMKSIMKLCGKLARVLVGIARNGSVYKPEMVFPLEQLAA

SEQ ID NO: 472671 - protein, 368 aa, unidentified
MDVHSTNYTLCVVEPKLEGDPELLYEVQVEPDYLNILKVISSLKKKYKEDNLHITCGYEAGCLGYTLYHELNKANIKCVILAPSTMEMPGGKRIKTDKRDAWLIAKCLANGGYSAVHIPTPQDEDIRDYLRMRDDIKELQKEIKQRINAFCLRHGYKYEGTKWTGNHLKWLKELPFSELQRETLNEYLLTYENLTEKIERMDIRIEELSAKEEYHDKVSKLRCFIGIKTREALSLVVETGDFSRFAKGNTFSAYIGLTPGEDSSSTDINRLGITKAGNKHIRTILVEAAQGICKGRIGFKSKDLAARQRGNDPAVIAYADKANERMRRKFYRMLYKGKQRNTAVTAVARELACFIWGMMTGHIGAETT

SEQ ID NO: 472672 - protein, 355 aa, unidentified
MSQEKYIGMDVHQATISAAVMDVEGKLLMECVLETKASTIVGFIEGLRGSLYLTFEEGTSAAWLHDLLQPHVSRLVVCDPRKAALLKDGNKSDRIDARKLAELLRTNQLKAVYHGEHGMRSLKELGRSYLTITQDTTRVMNRIKALYRSWAIPCSGTTVYAARHRQAWLAKIVEPGVRVRAEHLYQQLDSLQPLRLEARRQLLRESHKHAAVKLLRQIPSIGPIRAALLVALLQTPHRFRTKRQLWAYSGFAVETHDSGEYRYVRGKLQRNRERITVRGLNNNHNKDLKSLFKSAAISASTRPGPLRDFYTARVESGMRPTMARLTLARKIASITLTLWKKGASFDPEQLQRQAA

SEQ ID NO: 472673 - protein, 391 aa, unidentified
MSMYFVGIDISKYKHDCCIISAADQQIISKFTITNDKDGFEQLLTALNSLSNPEDIKIGFESTAHYALNLELFLENANHSFMEVNPVLIKEYKKSTTLRRTKTDSVDCESIARWLMTVEYKPHSKGFYHAYSLKSLTRLRDRLIRQRSFYLVKITNVLDHTFPEFKPFFNERLSKTAIYLLENYGSAEKMAHMNSASYDKLRCISRGKFSIQQFLHLKELAANTVGVNNSIFDIELNSLLTLYNSLCKEIKNLEAEITRLIEEVHPHYMSIPGIGPISAAVIYAEYGDISNFSNPSQMLAFAGIEPGINDSGTESHGGRMVKHGSSQLRYVLLNACLPLIRFDLTFATYYAKKRAEGKKHRVAITHVAKKLIRVIYALERQDVDFNAQKIR

SEQ ID NO: 472674 - protein, 385 aa, unidentified
MSQFSGSSQAAIDYNSTIIGALELSEKKWVLAVQLPGVGRHSRHALDACGDGLVSFVERLKAKCAAAGRKIARVILTHEAGRDGFWLARFLARRGIEVHVMQPSSLPVDRRARRAKTDMIDVEMLLRTLMAWLRGEPRVCSMVPIPSEADEEARRANREREDLTRERRSIVNKIDGILATLGIKGYKALRRDRREQLNCARQPDGDPIPQKAKARIERLLDRLDLVLKLIDQVESARDAILKKDAPADEAERMIRSLTDLRSIGPDIATLLVREAFVRQFRNRRALGGYVGLGGTPFSSGGSEREQGIGKDGNRRVRAAMVELAWMWLRWQPDSALSVWFRARVGAMGGRIRKIMIVALARKLLVALWRYVNDGVVPDGAKLKAA

SEQ ID NO: 472675 - protein, 423 aa, unidentified
MMKLKYSICCGLDVHKNVIVATIVTTNKDGISEYKQKSFSTINSDIQKFHNWLIENNCYHVCMESTGKYWIPIFNYLENDIDVCLTHPKYVKAIKGKKTDKKDSKWIADLYKFNLVRCSFIPPKDFRQLRELSRYRFKLVCMKSSEKNRIQNCMTVSNVGIASVLSDPFGKTATEIISYLLEHTADSMDEKAVRKLIKKGAKSKSDEIIEAIKGYTIETDQAKKLELARGHLEYLDDMITQTEVELYVRIKPYYEFVEFVSTMPGMTELSSTIVLAETGVDMDIFDDAKHLCSWCGLSPANNESAGKKKSVRIAKAGDYLKPMMVQCALAAIKSKKQPYFAIKYGRIKKRRGHKKAIIAIARMMMVCIYHMVSEKKPFTPTDYEELINPQNHVERVVLNENNVFAYLESLGYDSSKLVKRNDN

SEQ ID NO: 472676 - protein, 345 aa, unidentified
MKVSTIGVDIAKSVFQVHGEDAEGKASVQKRLGRQGMVGFFSKLPPCLVALEACGTSHDWGRALRAMGHEVRLIPAAYVKPFVKRNKTDARDAAAICVAARRPDMRPVAIKSEEQQASRALERSRELLIKQRTQLMNSLRAMLAEFGIVAAQGGRGFAELTARLRSENPGLPETLVAALRLVAAQLDNLTPAIEAMEDRIKTIAKADPTMRRLSAIPGVGFITAHAVVAAIGEGRQFGCGRDFAAWAGMTPREASSAGKRRTKGVSRQGESRLRKLFALGAATLMRNARSRDDRATQWQRGILARRPMKVAVMAQAAKTARIAWAVLTSGRGYVPPSAAAFSAQP

SEQ ID NO: 472677 - protein, 366 aa, unidentified
MRIVGLDVSRSVAEIAYLEGGVLHAGGRAGLKRDELERFATKLRSTDHVVLEATGNTAAIVNVLRPHVARVAIANPILVLLIAEARVKTDKIDAAVLAQLYASNFLPEVWMLDENTLALRRQVSRRSQLVRQRTRLKNEVHAVLAAHLIERCPATDLFGKKGRVWLSAQPLPMDERLGVEQRLRELDRLGEDLHDVDKALALASIGDERLRKLLTITGVNTTVAIGLLSAIGTVERFPNPEKLVSYFSLNPSVYQSGPTPARHGHITKRGRSYARALLLEAARGAAQAPGPLRAFFLRLRDRRGQQVAIVATARKLAVIVWYVLTRNEPFAWDRPALTAHKLRAWNCNPGCQRNTARAKAWLRLTA

SEQ ID NO: 472678 - protein, 416 aa, unidentified
MDAIVERCAGLDVHLDTVVACVLYGKLDIKPKKEVKTFSTTTKGLLELLDFINQKECTHVAMESTGIYWKPVWNILESGAFDLIVANAKKIKNVPGRKTDVKDAEWIASLLRCGLIEKSFVPPERIRDLRDLTRLRKELLGEVNRNKNRIHKVLQDANIKISSVLSDVFGETGKSILNQIIGNQCITEEFIYSLYEGRGKSKLKSTLMEMYEALNGKIRGHHVILLGMHNSNIVFLEKQINELEKEIDILLQKERDSLELLETIPGISKISASSIIAEIGTSMDVFKTEKHISSWAGLCPKNNESAGKKKRSGTKSGNNWLRSMLCECAWSATKKKDSRFKNKYWSMVPRMGRKKALIAIANMMLRLIYHLLKTKSTYKELEIQYFIDKDKRREDRIIKELKSKGYLVEKDSLQMA

SEQ ID NO: 472679 - protein, 344 aa, unidentified
MTFVGCDLHTRTQQVAVLDTDTGEVSEHPLVHEGTAVEEFYAALPRPVTVGIESTGYAIWFHTLMQRLGHALLVGDAAKIRAMVVRKTKTDRRDALHILDLLSHERFPTIWVPDPATRDLRALLTHRMRLVRIRTMVKNGLHAIALNYRLVRGSKLLRRAGLAQLHALALPPHTAQRRDQSLELLASLNAQIHELDDAITAAALAHPDAPRLITHPGVGALTALATIVVLGPVARFHDSKHVVSYVGLAPAVNASADKYHLGHIPKQGSTLLRFALSQAASHAARMDVDLQRTYFTLVHRRGRPKAKVAVARKLLVRLFIMLRDQIDYDEFRRRGRRMSAIASA

SEQ ID NO: 472680 - protein, 395 aa, unidentified
MFIVGIDVAKRNHEVTVITSEGQVVCKAFRISNTCTGYNRMMERLGKLTNLKSQFIFAMESTAHYWLALYTRLKKDGYQVVILNPIQTHTMREMFLRKSKTDAKDSLVIAEVIRFGRYAASDVPQEKLLALKELCRNRSYLMDLASDLKRKTVALLDRVFPEYETQFDSIFCKSSLAVLNKYPTPQKLANANLSKLTEILWTSSNGHFGEWKAQEMKALARNSFGIADCEGAYSTLILVMLEQIHTLQEKCSALEVQIGALLQQFDTTLTTIPGIGAILAATILSEIGDISRFSSADKLAAYIGVDPTVNQSGEFVGAHVHMSKRGSPYLRRAVWMASVGAVQRDPMFKAYYEKKAAEGLRYMSIIGHVTKKMTAVIYAIMRDNKSYVPVMPVVA

SEQ ID NO: 472681 - protein, 353 aa, unidentified
MRRPKEKLIAGIDLHSNNVMIGVINQDGKRITHRKLGCDLKQVTQFLQPFKPQLQSMAVESTFNWYWLLDGLRDEGYPIDLANPAKIEQYNGIKHADDKDDAFHLADLQRLNILPKAHVYDPELRPVRDLLRRRAGLVHQRTALLLSFKSLYTRTTGKALDLADAKKMEPKEAPKLYEHPANQLIAQVQAEHIQALDKSISRLEKAVLSCAREIPMYEKLLTIPGVGKILGMTITMEVGDIKRFKTDGDFASYCRMVDARRLSNGKCKADNNQKCGNKYLSWAFVEAANFSRRYNEQCRRWYDRKAAKTSKVLATKALGCKLAKAAWHVMAGQCDYDEKRMFPELATKTMKKS

SEQ ID NO: 472682 - protein, 425 aa, unidentified
MNYKQNEKINQVKESTLVVGIDIGSTTQYARAFDWRGIELGKVFPFSNSREGFESFKAWMQHLQDKYKKLDAIVGIEPTGHYWFDLGAYLEDEGILLVMVNPYAVKQTKELDDNSQSKNDRKDPKVIAKLVTEGRYSAPYTPDGVYADLRIMVANRKRLIREMTQIKNRFARWFAIYFPEYTDVFGDYEAQSSMLLLKKVCTPEAIVELGAEKINQIWRDAKLRAVGMKRATTLCETAKRSIGLKKGSSAARYEMKLLLEDYEYKKAQLDAVMEEIEKLCRKIPESEQMLAIKGIGVITVAGFLAEVGDVRRFESPRQIQKLAGLSLRENSSGKHKGQTTISKRGRSNLRAVLFNAAIPLIATNPEFKSLHEYYTTRANNPLKKKQSVIAISCKLIRVFYAILANGVTYDAQKMLSDIHRQPQAA

SEQ ID NO: 472683 - protein, 351 aa, unidentified
MPSKKDVAVVRAIGIDTGKNTLHMIGLDEKGTIVLREKVSRGRITARLVNVPPCLIGIEAGMATHYMSRELLALGHQVKQVPPAYAKPFRQGHKNDFRDAHAVAEAVQRPSTRCVPIKTDDQLDLQALHRVRSRLIGDRTAVINQLRGFLLEHGIPVRQGPRFLRQQLPQILATRTDALSSRMLRIIGDIVDDWEYLDERIERVTDEIEGLARADVNCGQLMTVPGIGPIIASATVAAIGNGTAFAKGRDFAAWLGLVPKQMSTGDRTILGRITKRGNRYLRMLFVQGARAILLRPTSWAKHSFGPWLTAAARRLHRNVLVIALANKLARIALTVLVQGRSYETRIEPAAA

SEQ ID NO: 472684 - protein, 383 aa, unidentified
MTTSIDARDVCCVALELSKTSWVCAFAIPGESKVAIHKIKAGDTDRLLAVLTSSKAKAEQQLGRPLQIVLCYEVGYDGFWLARYLIARAIHTIVFDPASFLMPRRSRVAKTDRLDAEGMTRILRRWLSGDREMARAVQIPSVDQEDAKRIERERKYLVEERISIIGRIKGLLALHGIWLDKKNIGKGLRQRLDAMKTGDGRLLAPFLRSEIERMLTRHDLISRQIADVEADRKAALNNEKGVFPHADKVRRLTTLGAVGETTATVLVAEIYHRTFLTRRQVASFVGLAPSPYKSGEVDRDRGINKAGSKLARHMLVELAWFWLRYQSNSQLSQWWHSRFGNQGMRGRKVGIVALARKLAIALWRFVEDGIVPEGATLKVRHTS

SEQ ID NO: 472685 - protein, 316 aa, unidentified
MNKTVVQNINVGVDTGKDSLDIHIRPLDEYFKVSNDKKGIGEAIKRLRKLDIERVVIESTGRYEAEFVAACAKADIPFSVVNPVHVKRFAGAIGRRAKTDKLDAALIAQFGEVIQPKLSRLKPENMQKMADIVRRRNQLIEMQTKEKNRLQIMSKAIQPNIKAMLVLLKKQISKMNDELAKLIESCPDYRAKSELVQSMPGIGKISAAALISYLPELGLMNSKQVASLVGVAPMNKESGKYKGKQVTQGGRHQVRTVLFMAMMSAMQCNQKFKVFYERLVGAGKPKKVAIIACVRKMVIILNSMVRDGVMWEEKTV

SEQ ID NO: 472686 - protein, 313 aa, unidentified
MPQETVFVGIDVSKDRLDVKIPGAAVFQVANDAAGRRELVERLRAPGGSVTVGLEATGGYEREALAELSAAGLTVRRLDPRRVRRFAEACGTLAKNDRIDAETIARFTALVDGRASEPDPRAERLAELVDARRRLCQEQTRLSNAARLLRDPVLKRLSARRLARAKAEVLLIDRRLAELVAADPELARKDALLRSVPGVGPVLSRTLLGRLPELGRLDAKAAAALVGVAPYDRDSGDRRGRRSIRGGRAAVRNVLYMAALAGARRNPALAAMHARLTAAGKPAKVVLVALMRKLITVLNAVLRDQQEWRHAPA

SEQ ID NO: 472687 - protein, 312 aa, unidentified
MPIRDDFLGIDVAQETLDIAGHQDPTPWQVPNDEAGIATLVARLRADAPALIVLEATGGYEQAVVWALGSAGLPVVVVNPRQVRDFAKATGQLAKTDRLDAQVLAHFAATIRPPIRPLADEAQRALEALLARRRQLRDMLIAEQTRQKRAHSQYVKASLKKHIAYLKRELQETERDLEALIKASPVWREADDLLQSVPGIGPITAHTLITALPELGTLGRRAIAKLVGVAPLNRDSGQYAGHRWIGGGRAHVRHTLYMAALVAAKHNPVIRAFYARLLAAGKPKKLALVACMRKLLTILNAIARDQKPWQSA

SEQ ID NO: 472688 - protein, 353 aa, unidentified
MKSRMESKMSSPMVIGVDIGKEVFHLVGFTADGKIAFRRRIRRLGLKDVFEKLPPCIVAMEACLSAHFVSRTLRALGHEPRIIPAIYVKPFVKGQKNDYNDAEAIAEAALRPNLRFVQEKSQDQLDLQACHRVRSRLVSRRTATINQIRAFLIEQGIAVRTGPRALRKSLFSILENRKEEISPRTAKLIRGLYEDWCCLDERIETVTGETEILSRSEAKCRQLMSVPGVGPLISTAMVAAIGSGEAFERGRDFAAWLGLVPRQYSTGGRSILGRISKRGSKYLRTLLIQAAKVLLMRPHNWARYSFGPWLNAASERLHRNKLAVALANKLARIAWSVLRNDKAFDTHIEVAAI

SEQ ID NO: 472689 - protein, 332 aa, unidentified
MKLKRIGVDLAKQVFQVHGVDSHEQVKCRKQLKRHQMQDFFRQLEPCVVAMEACGSAHYWARELGKLGHEVRLIAPQFVKPYVKSGKNDANDAEAICEAASRPTMRYVEVKTVEQQASQSVHRIRSRLIKSRTALVNEVRGLLAEFGLIESRKGVAATRELLCHAIDTPDNGLPGSMRELLRGLSEELHGYDERLKRLEQLIQREAREDERVKRLMKIEGLGPITATAIVSAVGDARQFASGRQFAAWLGLVPSQYSTGGKERLGGISKRGDKYLRTLLIHGSRSVLKHCQSKTDKRSDWLSQLMCRRNKNIATVALANKNARIIWGDSQQG

SEQ ID NO: 472690 - protein, 348 aa, unidentified
MEHVAIDLGRPNSVLCELGPEGKKVLRRFRLDRPNLTRLFSGRPACRVLIESSTESEWVARHLESLGHEVVVADPNYAAMYGERNRRVKTDGRDADALFEANRLGVFRRAHRRSDPQRRVIAQHGVRGALVRTRTRWINVARALLRREGYQVPSGSAESFGDRVGDLDLPRELRGLIAPLLALIDPLNEQITQLDRTTESLGKEDPRVRLLQTAPMIGVQTSTAFVALIDDVARFPKAHKVESYLGLVPSEWSSSERRIKEGITKRGDSRVRWLLVEAGWSILNRPRVDTGELRNWALNIAGRRGKKIAVVALARRLGGILYAMLRDNKPYDPTRLTAAPLRSRKAAA

SEQ ID NO: 472691 - protein, 423 aa, unidentified
MISFPKRERAQRAAACVGVDAGKFAHTLVVRPTGQPDSKPLSFPTTRAGFEQAVAFIRQQVPGARTGAVLVGIEFAGNYGFTFAHYLRELGFAVVSVLPAHTKRWKDVAHNQPLKTDAKDAGTITDLLAQGHFVGFPFLEPAYADLRYLVTARERLAVLRRGAITQLRALLQVVFPEYETIFPLVSQRTAVMLLRAFPGPQQLLAAPKAKVLRVLRAGSRGHLGAEIYERLVVAARASLGLPGAQVRLRQEIVLTLDRLALFEQQIRALEVELVAALEAVPETPYLLSIPKVAAVTAAVFLGSIGDPRAYDAGAQILRVAGLSLVERSSGVLHGTKRISKRGRPLLRAAAYLFAVRSITKGGLFRADYEGLCARNGGQKLKAIVAVMRSGLQLLYSIARDRRRFTVEPPPRRRARPTLEVTPA

SEQ ID NO: 472692 - protein, 288 aa, unidentified
MNTYIGIDVAKQFFDLYDLAKEKHQRFDHTPAGIKSCMAFLSSRHPALIVMESTGGYEMDLAVAFSDVGLPVAVINPKRIRDFARATGKLAKTDKIDAQIIARYAATLQPPPQGVLDEHTRTLKDLVARRNQLVELRTAESNRREHLRNRTIARSIAVMIKTIDRELAKIEQEMRQHIIRTPEFKLKVDQLTSAPAIGETTAMMLIANVPELGRLNRRQISALVGVAPINRDSGTFRGKRMTGGGRRDVRAKLFMPTIVATKHNPVIYAPRASFPSSTIACSQPAKTK

SEQ ID NO: 472693 - protein, 365 aa, unidentified
MSKDTNKPAGETRRYVGIDLGDKKSRVCIVGEQGEMVSQEWVVTTPEAFFKRFHGQPGMRIAMEVGTHSRWASELLGKCGHDVRVADARQLALITNSNAKSDKRDARTLAQLLRADPRLLSPIEHRAESLQMDLTVIRMRDNLIETRTRMVSSVRGVVKATGARLPSCETAGFPQQVADVIPEPLRPALAPMLEVIDQLNEEIYDYDCLLEHWSRTRYEESSRLTQVKGVGTLTALTFMLTVGDKGRFSRTRDIGSFLGLRPRLDQSGDSHPQLRITKAGDGLLRKTLVECGQYMLGPFGQDSDLRRWGLKMIEGGNGSKRARQRAVVGVARRLAVLLMSLWKSGQTYDPLRHSRSAESRKEVAA

SEQ ID NO: 472694 - protein, 392 aa, unidentified
MVVSVGIDVSKDKHDCFIVSSDGEVLADVFTIPNTLDGFTCLLQRIREGTTPQDKIKVGLEATGHYSYNLLGFLLDNGLATYVLNPLRTNLYRKSLSLRKTKTDRVDARTIAFMLLSDAGLKPYTDTAYHNEELKSLTRYRFDKVKERAKLKSSISRLVCILFPELEKLVPTLHIASAYALLEEFPGAKQIASAHLTRLKALLESASKGHYKRDMALEIRDAARNSIGSRMPAKSLELQHTIRLIRELDVEIAEIEEQIQSIMDELHSPITTIPGLGFRMAAMILAEVGDFTRFDSPDKLLAYAGMSPSTYQSGQLKNCYPHMEKRGSRYLRYALYNATKYVCHWDPTFAAYLAKKRNGGKHYNIALSHAAKKLVRLIFAMEKSRAAYRLTA

SEQ ID NO: 472695 - protein, 356 aa, unidentified
MKKNTLVDWSEQTLYVGIDLHKKKWVATVRTDELVLKTFATDGKKESFVKAVLRNWPGARIKAVYEAGYFGYHIAAYLNGHGIETMIASPQRIPKEPGYFVKTDKIDSRKLAEFLSKGLLRGIWQWDTETLQDRGLVRKRGQMVKRRVQIQLQIKADLAFYGIEIKTTKWGYWSKRYIAQLKQIGKECSHDYYGTVFRMMIEEYEQLRIRIREVTKLIIQLSKTDKYRENVALLRRIPGISVLSAMILLTEIGNIGRFPSEEKFVSYIGFTPSEYSSGEKVRKGSLTGMGNGTLRKMFIEIAWIAVRKDPALLEKFDRVRKGKSKTKAIVAVARSMANRVRRVVITGEPYVIGVVA

SEQ ID NO: 472696 - protein, 344 aa, unidentified
MNKYAGLDVSLEETAIAVVDESGRVVREGKVASEIEAIDGWLRASGAVIVRLGLEAGPLSSWLYAGLRACGWPVVCIETRRLRAVTQAMPVKSDRKDAEAIAQVMRTSWYRPVHVKSDDSQRLRVLLRHRQILQAKRQDIDNELRGTLKAFGLKLGKVGQAGFAARVMELVAGEPWLERLTQPMLAARAALRQSFAELHKLLLTIVREDTVCRRLMTAPGIGAVNALAYKTAIDDPTRFRHSADVGPHFGLTPRLYQSGETEYSGRISKCGDAMVRSLLFEAATALLHRVKAASPLKLWARRLAKKIGVRKATVALARRLAVIMHRMWVDGTDFNPELGRAAAQ

SEQ ID NO: 472697 - protein, 364 aa, unidentified
MKKISTTTAKAFRKMEKLTIGLDLGDRSSYYCVLDERGELVLEQKVSTTPKAMEEVFGGMPRSRIALETGTHSPWVSRLLSELGHEVIVAHARNVRLIGESRRKDDRLDAKTLARLARIDPQLLCPVKHRSAKAQAHLTVIRARAGLVRARTALINVARGLTKSYGERLRGCSPRNLNKRAEGLSVELRTALGPLLEEIESLSERIREYNQRIEGIAQEHYPETALLKQVKGVGTLVALTYMLTLEDPHRFSKSRDAGCYAGLQPGRRNSGQSQPQMRISKEGDAYLRGLLVQSAHHILGPFGADSDLRRWGLKLAERGGKNGKKRAIVATARKLAVLLHRLWVSGEVYEPFYSSSRRVLVAAA

SEQ ID NO: 472698 - protein, 349 aa, unidentified
MRHVGVDLHKTNFVACFLAPDETQRLETYPLTTEGIARFKRKLRGTDEVAVEVTQHVYYFFDQIKNCVSRGALVDTYRFAVIAQSKKQTDKADAAALARFLKLGWLPEVPVPSEQVRRLRHLLQARETLVGMTTKLKNMAHAALTRNGVALTRSAFASEAGRRRVARHEGLADTDRAVIEACLRQMAALEAEVTRLEAEIVRLGKGLPGVKRLLQVHGLNLLSAIALLAEVGDIALFDRSKQLVAYAGLATSVRQSNETTRYGAITKRGRRRLRTIAIRAVLAMVNKTETPLMEFYQKKKREKGAGKAICATARKLLTIIFVLLKKELDYWYLEDRLYNRKLRALNAAA

SEQ ID NO: 472699 - protein, 338 aa, unidentified
MTQLGNERIVGVDVSKDRLDLYDWDSKCPDSMANDIDAIDRWLDRFNLPVRFAMEPTNQYHIALAERAHARGHAVYLVDPHRLSHYRCGVGQRVKADPQDAQLLARYLAREGDDLAPWKPLSQGQQRFWRLLRRRATVVRARIQLQQSLAGLEALNSEVDALLERFNTLIRKMERALLSEARRLGWERDLDHAQRLHSGAFCFVGKPPLRSRLRCQAIPGIGPLSALALTAIFHQGTYRNADAFIAFMGMDVRVRQSGRWKGKSKLTKKGDPEVRRLLFNAAMQARRNPLWEPYYLALRERGFSTTAAFVALGRKLARVAFALLQKNADFDPKLHTAG

SEQ ID NO: 472700 - protein, 329 aa, unidentified
MQSEVHVGIDVSKFTLDVFILEVRSHRRFKNDSNDFPAILQWIEKCTKYQSAFICFEHTGVYSMALAAFLESQHIVFAMVSPLEIKRSMGIVRGKNDVVDSKRIAEYASRFRDKIVMTKLPAKDITRLHFLLTLRDKTARTLTGYIAAVNEVQRGIGHEELPELFASYDAVITALKSEIKKIEAAIKHIINTNPDLKTSFKLITSLKGVSLIVGTYMIVYTCNFTKFATWRKFACYCGIVPFSHQSGTSVKGPAQVSPIANKQLKRLLHLAAVSAASHDPELREYYIRRQSEGKSKMSTLNIIRNKVVARAFAIVKRGTPYVNIRQYAT

SEQ ID NO: 472701 - protein, 448 aa, unidentified
MSKRKSRKRQGSKEMPVVHPRAAGIDIGSEEHWVAVPEDACEQSTRSFSAFTGDLHAIADWLEEVEVTTVAMESTGVYWIPLFQILERRGFEVRLVNARHAKSVPGRKSDVQDCRWLQRLHTFGLLQGSFRPNDAICVLRSYLRHRETLVQEATAHVQRMQKALTQMNILLHKVISDITGTTGLRIIDAIIAGERDASELASLRDPRTMRTADEIAKALLGDWRDEHLFVLAQERQTYAFLQERIAECEERITTTLETFETRASAEDVAASPKRKKRKHDDLRQLLHRIVGIDLAQVPGLEAITVLIFISEVGLDLGRFPTVKHFTSWLGLCPRNDITGGKVIRRGTNPGANRATQALRMAAQAAGRSRTAIGAFYRRKRAQSGARIANKATAHKLARILYLMLTRGDAYAEAGIDAYEERYRQRALKNLKRRAQTMGFDLVEREAAA

SEQ ID NO: 472702 - protein, 344 aa, unidentified
MVYVGMDVSSKSFVVHAVNERKRVVWRGEVAATPSGLKRAMAALGEHTKLVVFEAGNQMKWIARELGRLKGVRLHIVHPNEVKWISQSSGKTDKVDARKLAELARGDLLPRKVHVVEGPVRELRELVGARHTLQSKRVALMNTLRGYLKQEGQRLPEKFFGRTDWQAALAKLEVGASTQQIVASFKGGIEALAHAEGELTRRIVAIKDRRIELLESIPSIGELSARVLLGALDEAKRFDNKKCVAKYGALSPRIYQSGDVVHLGRINRDGRQEVRRVLLQCAHTLTRMRSPGARPLRAFFERVLKRRGKKIAIVALARKLLTTAYGVLKAGAFYDPDKLLPVAA

SEQ ID NO: 472703 - protein, 355 aa, unidentified
MTSTKYIGMDVHTESISIAVRSSAGKVVMESVIETKASVILQFLNGMSGELHVTFEEGTAAAWLYDLLKPHVARLVVCNPRRNALLKVGNKDDRIDARKLSELLRRNQLQSVYHGEHGLRALKELVRSYLAISKDTARVMTRVKALYRSWGIPCSGTQVYSRLYRVSWLSKITEPGVRLRAAFYFQQLDALRSLRQEVRRELLAESKKHKVWKRLCQIPAIGPIRASVALGILQTPHRFCTKRQLWSISGFAIETRSSADHRKVNGQLRKVKKRVSIRGLNQNHNHDLKNLFKGAAVIASTKPGPFQEFYSALLAKGMRPEMARLTLARKIATIVLVVWKKGVNFDAQYLKPQTV

SEQ ID NO: 472704 - protein, 350 aa, unidentified
MLMIAFDSHKRYSQVCVENKEGKRLAEERVQHKRGNVKEFLGRWEQGTPVAIETIGNWYWLVDEIEAAGMEPRLVHAHKAKLMIGSVNKTDKLDARGLNMLQRCGTLPVVWIPPGELRDKREIARTRMVFAVQRTKLKNRIHSVLAKYGLQDEFEDISDIFGGRGRQRLASAKELLPHETRFTLEQLLETLDHIEIQIKELEKRMHAVFKETEEVRILQTLPGVGFILAVVIWQEVGDIERFASSGQLTSYGGTCPRIHSSGDKSRFGPLRNDVNHYLKWAFSEAGNSVAVNRNRMGNSKIAQLYNRIRARRGHAKAVGAVARQLAEASYWMLKKKEAYREPGAGVSMAV

SEQ ID NO: 472705 - protein, 343 aa, unidentified
MKITTVGVDIAKTVFQVHGVDEQGTPVIRRQLRRGQVLRLFANLTPCVIGMEACRGAHHWARQLQKLGHTVRLIAPQFVKPYVKTNKNDMADAEAICEAVSRPTMRFVPMKNGEQQAVLALHRARQGFVRARTAQANQIRGLLEEYGIVIPQGICHISKRLPGILEDGESDLPGLFRRLLQRLGEHLKQLDLQVRELDSQILLWHRQHEGSCRLAQIPGIGPLTASALVASIGDAKSFENSRQLAAWMGLVPRQHSSGGKTLLLGISKRGDGYLRMLLVHGARSVLRVAERKADYGTSWIAGLVKRRHPNIAAVALANKNARIVWAMLKHERNYDARYRATAA

SEQ ID NO: 472706 - protein, 374 aa, unidentified
MEWSGRAPAPPAREAGKGTKDEEHAMSAKFNSEIAVIGIDIGKNSFHVVGLDRRGAIVLRQKWSRGQVEARFSNLPPCLIGMEACVGAHHLSRKLTSLGHDARLMPAKYVRPYSRGQKNDFRDAEAIAEAVQRPTMKFVATKTAEQLDLQALHRVRERLVSQRTGIINQIRAFLLERGVAVRQGLRFLRAELPRILARPCDALSPRMLRVIEDLAGDWRRLDERIEGLSNEIEVLARQDAGCERLMSVPGIGPIISSAIVAAIGGGDVFSKGRDFAAWLGLVPKQISTGDRTILGKISKRGNRYLRVLFVQAAWAVLIKPKSWARHGLKPWLEAAKKRLHHNVLAVALANKLARIAWSVLAHGRVFEATKIQAA

SEQ ID NO: 472707 - protein, 436 aa, unidentified
MTNRLQVGIDFSQKKADFCLLLPDGQLLESHASFANSCSGYSAAKQLLLDTLDSYDFDGVDISGEATGYLWLPFFLQLSADPDLSLRDMDLFLLNPRWVKWFKKCFADDHKCDERDAYYIAKRTHSDRPKVVWSQPECLPLRFYTRLRFHIVQNLAREKCYFSAFLFLRASSYRCIKPFSDVFGVTSRLVLTQEPTWEELAQLPVEDLASHLHKLSGHHLPDPLKNARKLQRVAEESFHLDDSLSLPVQRILDVTLDHIRFLEGQLEQVDNWIAEALEAHPVIAQLATIPGIGPVFSSGIGAEIGGVNRFLQGQKWDKKRKRYRSRNLRDAEDAVAKIAGLWWPRADSGEFEAQDRRLAKSGNRYLRYYLVQAANKMRQHAPEYAKFYARKYRESSKHHHKRALVMTARKSVGLVVGLLHRDEPYRSQEEREKLKR

SEQ ID NO: 472708 - protein, 443 aa, unidentified
MAKTLYLGIDVAMAENVCCPLLEDGTEARRRFTVSNNLPGAEQLVKEILTLMGRYHLDHLLIGLEATNLYWWHLACFLNSCPQLAVFHHSVYAFNPRLVRGFKKALPKTGKSDINDAYAVAERLRFGRLPSPFMPNELYQPLQRLTRFRCHLMHQITREKNYFLTFLFLKFSEYQNLDPLSNTFGAASQAILTDYLTVDEIVAAPMDELVSLLMKAGNNHFPAPEAVAAAIKRAARDSYRPHPSLKEPLNLILSATLENIRTFSQQVKKLDPAVEREVRKFSNPLSSIPGLGPVFAAGIMAEIQDIHRFPDQAATAKFAGLFWRTSESGSFQAEETSLGKSGNDYLRYYLIEGANSVRMHAAEYGCYYRTKYDESTKHKHKRAVVLTARKLVRMVDAMLRHNQLYIPQPLNSTEEVIPAPTRPRPAKQHHYRQLGPPVPTLSN

SEQ ID NO: 472709 - protein, 326 aa, unidentified
MEHELHYIGIDTAKEKLDVDVLRPDGRHRTKKFANTTKGHDELVRWLKGHKIDHAHICIEATGTYMEPVAECLYDAGYIVSVINPALGKAFAQSEGLRNKTDTVDARMLAEFCRQKRPAAWEAPHPLERALRALVVRHQALTDMHTQELNRTETAREVQRPSIDAHLLWLEAELKRLEKQIKDLTDDDPDMKHRRKLLESIPGIGEKTSAVLLAYIGLKDRFAHARQFAAFAGLTPRRYESGSSVRGASRLSKAGHVSLRRALYMPAMVATSKTEWGRMFRDRLTANGKKGKVILGAMMRKLAQVAYGVLKSGVPFDASRHNPVAA

SEQ ID NO: 472710 - protein, 309 aa, unidentified
MATSSYVGIDVSKDRLDVAVLGEERVWQVDNTSDGIAKLVQQMENLQPELIVVEATGGYQRSVVETLFHAGLCVAVVNPARVRQFARACGLLAKTDKLDAQVLAVFGQRVQPKPYAGKSEAEKQLSALLVRRKQLEEMLKAEQNRLRTISPSLRGSVERIIAILKEEKKHLEEQIQQLLKEQKAWREQTQILGSAPGVGPVTTATLLADLPELGKMDRKKIAALVGVAPMNYDSGRKRGYRKTKGGRTDVRSVLYMSTLVATRYNPLIQAQYQHLLKRGKEKKVALTACMRKFLTILNAMMRDQQPFRV

SEQ ID NO: 472711 - protein, 445 aa, unidentified
MPVIHPNAAGIDIGSQFHVVAVPPERTDKPVRTFKSFTGELHAMAKWLKKCRVDTIAMESTGIYWIPAFEILESYGFKVFLVNARAAKTVPGRKTDVNDAQWLQKLHQFGLLQASFQPSQKIAGLRAYLRQREKLLEYKSAHIQHMQKAMMQMNIQLQHVVTDVTGKTGLAIIRAIVQGQNDPNELVKLRDPHCKNSLEVMTAALTGSYKPEHLFALTQALELIDIYMEKIEACDRVIESALKQLEQENDSTPPTLPKAKGKDSSKNTPSFDVRQALFSFIGIDLTQIHGIGSSVALKLIAECGTDMTKWPTSKHFTSWLCLAPANKISGGKILSSRTRRSSSKVATMLRLASVVVGKTNTALGAAYRRYAARIGKAKAVTAIARKLAVLFYNALRYGMEYVDKGANYYEEQYQKKIINNLQRKADALGFTLQKKALSIAAGGVS

SEQ ID NO: 472712 - protein, 346 aa, unidentified
METIVRIGLDTSKSVFQLHGVDETEQPVLRRKLRRGQVLEFFSRLPPALVALEACGASHYWARELQSLGHEVAMIPPQYVKPYVQRGKSDAADAEAICEAASRPKLRKNFVPIKSPEQQGAQMLARVRNQLIGRRTQLANSIRGYAAEFGFTAPKGLSRLQQLLIDIQADATVPDLTKELVDALAAELARVDDQIAKLDKKLIQLHRSNEMSRRLATIPGVGPIGATLLSIKVVDARGFKSARNFAAWLGLTPKNHSTAGKNRLGVITRAGDAMLRTVLVAGATAVIADMRRRETRSWPWLKDIIARKPPKLVAIALANKLARIAWKLMVSGERYRPASSVMPVPT

SEQ ID NO: 472713 - protein, 351 aa, unidentified
MKIIRVGLDLAKQSIQVHGVDRDDRVVLKRSIKRDAVLKLFATLPPCVIGMEACSGAHEWARQLSRLGHQPKLMAAKHVKPYTQGQKNDANDAAAICEAVSRPTMRFVAVKSVEQHDLQALHRIRSQCVEQRTAKVNLIRGLLAEYGIVVAQQISQLRNALGVLLEDAENGLTGDFRELLVGLQQDLYFLDDRITELTQRIERHVKVHDTTRRLLAIPGIGPISASALFAAVGDGRAFANGRHLAAFLGLTPKQYSTGGKNTLLGIHKQGDSYLRGLLVHGARSVQRMAVKKTDPRSVWLNALGKRRHKNIATVAQANKTARIAWAVLQGATYRAEPIRRLTPDAPTELAA

SEQ ID NO: 472714 - protein, 347 aa, unidentified
MRFYQRQHQFYCGIDLHARTMCVCVVDQAGKVLVNDDGPCEPERFLRLIEPYRADLVVACECTFHWYWVADLCDQQKIKFVLGHALYMKAIHGGKKKNDQIDAHKIALLLKGGMLPQAYVYPRGMRETRDLLRRRTYLVRRRAELLTHIENTNSQYNLPPFGKKLSYKANRSGVAERFSDECVRQSIAIDLELVEHYDRLITELELYLVRHAKVDDAYRFHLLRSVPGIGKVLALVLLYEMHRVERFESAGEFLSYARLVAGRGSSAGKPKGVMGRKIGNAHLKWAFSEAICCFIRECPEAKRFVARQEKKHGKARARAILAARLGRAVFLMLKRKEPFDVQRFFAS

SEQ ID NO: 472715 - protein, 354 aa, unidentified
MKRTAKYVGLDVHQATTVISVRDTSGRVIARDVVATDEASLIGFLGRMRGPVQVALEEGTQAQWLHDLLEPVADRVVVCDRRGKRKAGNKGDQVDADEVSRLLREGSLRAVYHGNADSAALRELTRTYQTIVLDTTRVMQRLKALFRARGIKTPDTKVYRPAHREQWLAKLPAGGARVRAEMLYAQLDLLQDLRPKAKARMVREAQRHPAWLVLNTVPQFGHVRVAQLLAILRTPWRFRSKRSLWAYAGLAVTTATSSEYVLEHGRPIRRRRAPLTRGLNRNHHPVLKQILKGAASGATARPGPLRDLFLALLDRGVRPELARLTLARKLAAVALRTWKTGEPYDPTYLTVNTR

SEQ ID NO: 472716 - protein, 362 aa, unidentified
MQSTPLIAFDQHAATTVAAVLLPGQQTPGLHTLTSDSLTILRFVQRVQQRMGAVRCCYEAGPCGFELQRALTHHGIRCDVIAPALIPRRAGDRIKTDRRDAGQLAVLYRAGALTAIHIPTEHEEAARDLLRCREDVRADLLRARHRLSKFLLRHGRRFTATKKAWSKRHAAWLRAQTWPLPALDQTHRAYLRAVDETVARLQSLEQDLRVLLDLEPLRPRVARLRCFRGIDDLTALTIAAELGDARRFAKAPSLMAFVGLIPSEHSSGTKHARGAITKTGNAHLRRVLVEAAWHYRHHPFVGDTLRARQRGAPATVIAQAWTAQQRLHRRYARLAARGKPKQHVVTAVARELTGFVWAALTQ

SEQ ID NO: 472717 - protein, 343 aa, unidentified
MSISMIGLDTAKSVFQIHGVNEAGKVELKRKVRRSDLITFFEKQERCTVVMEACGAAHHWARILTGLGHTVKLLAPEAVKPFVKKGKKNDAADAAAICEAASRPDVKFVPVKTVEQQGILALHTVRSLLVKQQTMLANAIRGLASEFGHVVPKGLNNLEPLVDLVDADEDMPKQARQAIAELHERFGELAKGIQSCEAEIVKHARNDVTARRLATIPGIGPITASLIAATVVDISLFNTARQFAAWLGLVPRQSSTAGKARLGRITKAGNKEIRKLLVLGATSMVGRAEGWHSALGAWLRDILQRRPVRLVTVALANKMARIAWAVMTRDEVYRPQGGVAAKA

SEQ ID NO: 472718 - protein, 366 aa, unidentified
MKKISTVVVEGMQIFKENQLTIGLDLGDRISRYCILDEAGQIILEQELPTTAKGIEQVFSKIPRSRIALETGTHSPWLSRQLGQYGHEVIVAHARNVRLISESSRKDDRLDARTLGRRARIDPALLSPVRHRSAKAQMHLTIIRARAVLVSARTALVNAARGLTKSNGQRLPQCGTEQINREIAQGLSQELRDALDPLRREIESLNERIAEYDTRIEQIAREMYPEVARLRQVKGVGPLIALTYVLTLDDPFRFRSSRDVGCFLGLRPGRRNSGRSEPQLHISKEGDRYLRTLLVQGAHYVMGPFGQDSDLRRWGLKLAERGGKNAKKRAVVAVARKLAVLLHKLWVSKEVYEPLRNNRKGMAQVA

SEQ ID NO: 472719 - protein, 361 aa, unidentified
MSSAFQSFVGVDLHKCTVTLTAVEAAGEITRLKISTKSTGKIEAWLRALAGPVHLAVEACPFVEWFIDRFRDCVARIDIADATELASRRGKRRKTDWNDSLDIAVRLARGECPLGFIADEELMQLRKRGRHWRHLSRLLSRSKHSMKSMLNAANIRGPKFDGAAAQRWLLANRDLLKPVQQQTFADFIDVLMLTERHRERLRREIIFATRSARFAPIVSLLTSVPGIGEIWAAIIAAEIGPFERFPNADTLEFWAGLTADMKESAGRTQSGNITKAGSVTLRWALCQAAMTLCQCDARQEAIRQRLVRRIGKPRANVAMGRRLLRTLYAMIRDGKTFDRGPARDRTAAANRIRLGSKKRVA

SEQ ID NO: 472720 - protein, 315 aa, unidentified
MDEPRRVTTCVGIDVSKDRLDVHALPSGEAFAVARDGKGLENLVERLSALDVSLIVLEATGGFETIVVAALAGAGLPLAVVNPRQIRSFAKALGKLAKTDALDAEVIALFADKIRPQVRPVASAHAKALGELVARRRQVVEMIGMEANRRRHATDKRLVKTIDRHVAFLEKELDAIDADIDTDVRASPAWREAEDLLSSVPGVGPVTARTLIAELPELGVLDRRKLAALVGVAPFNRDSGSWRGHRMIGGGRTSVRNALYMAALVATRYNPVIKATYTRLTDRGSPKKVAIIACLRQLLTILNAILRTKTPWQNA

SEQ ID NO: 472721 - protein, 344 aa, unidentified
MITFGVDAHKRTHTIVAVDDRGTPLGQTTVGTTSKDHLGLLRWAARFGAERRWAVEDCRHLSRRLERDLLSAGECIVRVPPKLMAHVRDSARTYGKSDPIDALAVARAAQREPDLPMARLDGPDRELRLLVDHRESLVAERTRLICRLRWHLHELDPAWEPKARSLDAQRTLDEVQARLQEQAGVVARLARELASRCAELTAAINALEKEIAQLVEQLAPALLALPACGPLTAAKIIGETAGVDRFKSRNAYARYNGTAPLPVWSSNKARHRLSRTGNRQLNAALHRIALTQARWHPPAKAMIDRRKKGGNSGREAIRILKRRLSDAVFQALLHDQTDALTPAA

SEQ ID NO: 472722 - protein, 315 aa, unidentified
MNDSRVFIGIDVSKNRLDVAARPTGDVWQVPNDAGGIGELTEGLVGMGPSLVVLEATGGLERALAAELASAGLPVAVVNPRHVRDFARAAGNLAKTDTLDAQVLARFGQAMEPEPRPIPDADAQELQALVGRRRQLVEMITAEKNRRRTVIARIRPQLEEHIQWLEKNLNDLDQDLDGFIRSSPMWRTKERIIRSVPGVGPVLSATLLASLPELGALSRGQIAALAGVAPFNRDSGTLRGKRTVWGGRRRVRAVLYMAALVAARYNPVIKDFYQRLCSTSKPKKVALTACMRKLLVILNSMVKHGRDWQPSLQTP

SEQ ID NO: 472723 - protein, 311 aa, unidentified
MATSSGTYVGIDVSKDRLDVAVLGEKQEQQVSNSKDGIAQLVDQMLDLQPDLIVVEATGGYQRNIVDALFHAGLSVAVVNPARVRQFARACGLLVKTDKLDAFVLAEFGQRVQPKRYEGKSEAEKQLSALLVRRKQLEEMLKAEQNRLHTISPALCGSVERIIAILKEEKKRLEEQIRELMKEQKAWQEQTEILGSAPGVGPVTTATLLADLPELGKMDRKKIAALVGVAPMNYDSGRKRGYRKTKGGRGDVRSVLYMSTLVATRYNPLIQSQYQQMLKRGKLKKVALTACMRKFLTILNAMMRDQKPFRV

SEQ ID NO: 472724 - protein, 340 aa, unidentified
MEQYVGLDVSQKETVICVIDGNGKQVWEGVCSSTPGAMAAVLHRKAPLAVKIGMETGPLAVWHWHELRRAGLPIVCLHARHAKAALSVQLNKTDANDAFGLAQIVRTGWYREVEVKSLESHALRLLLAGRARLVSMRTTLYSQIRGLLKTFGVVLQAGKGGTFERLVIKGVPADRHVKLVIESLMATWRHLTLELRKFDREISKISSTNPTCRRLMTLPGVGPITALAYLTTVDEPRRFARSKDVGAYLGLTPRRYQSGEVDHSGRISKCGDRMTRSLLVEAAGVLLCRNKRASVLKSWGLKLRRRVGFSKARVAVARKLAVLMHRMWIHEMVFQSNPAT

SEQ ID NO: 472725 - protein, 416 aa, unidentified
MNAVGIDVSSRKSTVAVLRPLGEVVCLPFDVSHDADGLASLAEKLKALDGETRVVMEHTGRYYEAVAKALHEAGFFVCAVNPLLIKEYGANSLRRVKTDKADAIKIARYALDNWADLRDFTPMDAIRYDLKTLNRQFQLASKQRTASANNLIALLEQSFPGIRKCFDSPVRSDGTQKWVDFAHSFWHVDCVRKQPFAAFCERYRKWCKLHAYFFKLRNAEKVYALAKSAVVLTPKAKVVKVLVQEAANQLISISRSVEVYRAEMDRLAAMLPEYPVVMAMYGVGKSYGPQLMAEIGDVRRFERKQALVAFAGIDPMPNQSGDKNVRSNKSSKRGSPYLRKTLFNVIRTYLQCAPQDEPVFQFLNRKRAEGKPFYVYMLAAANKFLRRYYAKLRDYFASLDTLQPAAPIPTILKAAL

SEQ ID NO: 472726 - protein, 427 aa, unidentified
MSVTQNEKIRQVTDTTMVIGVDIASELHWARAFDWRGLELGKTVKFENSAEGFNFFLRWVSELTVEQKKDSVMVGLEPTGHYWFTLAAHLQGGDFKLVLVNPYHVKRSKELDDGHPSKSDKKDPKTIAKLVLEGRYVYPYIPQGLYAELRVTMNCRWRIRKELASLQNQIQRWLKIYFPEHSKVFGRFTGAGSMALLHSAPFPSDLISLGVEGISGIWKQMKLRGIGRKRAQRIYEAAQTSVGCTTGMEAARMELQILLEDYDAKLQQYERVMQVVENLCSQIPAVAELLKIQGLGLVTVAGLFAEIGDIRRFESPRQIQKLAGLAITENSSGKHKGPTEISRRGRSRLRAILFRAAIPLLAKNREFQLLHRYYTTRQNNPLQKIQSVIAICCKLLRVFYALATKDCAYSPEKVLADIQRNQPLKAA

SEQ ID NO: 472727 - protein, 342 aa, unidentified
MEIAVLGIDLGKTTCSVAGLDEGGAVVLRKRFQRHRLLAFLSGLSPCIVAMEACGGAHYVGHFCVEQGHEPRLMSPLYVRPYVKVYKTDDRDAEAIAEAATRPAMSFVTLKAPEQLDLQAIHRARERLVQNRTRLVNQARGFLMERGIRIGAGRHVFQRELTRQLEEDDVSLMPGMVRILSDMAAELAETNDRVAGLDAEIRAHARHDADMQRLMEIPGVGPTIATALVAAIGDGSSFNRARDLSAWLGLVPRQITTGGKARLIGISKHGNSYLRKLFIHGARTVLHLVRDRSTPLARWVDALKDRAHANVAGVAMANKLARIAWAVLTKGERYRPSALETA

SEQ ID NO: 472728 - protein, 371 aa, unidentified
MSQPIRYVGLDVSKETIAVAVAEPDGSVVEYGDIPHDPSSVRRLIERLSRDVLVKTAYEAGPTGYPLHRQLTGLGIENKVVAPSLIPRRPGDRVKTDQRDAVQLARLLRSGDLTPVWVPDEAHEALRDLVRARDDARTEGLRAKHHLGKFLLRQGAIAPARVGRAWSARHLAWLNTLTFRDRASQITFDDYLACVRASTERIRRLEAALLECGASGPHVELLRALQAVRGIGFLTAVTIVAEAGDLHRFRSAPAFMAFVGLVPSEHSSGGSRRRGHITKTGNRLLRHVLGEAAHHARLQPGVSDALRQRQQGVPREVVEISWRCQQRLHHKYRHLGGRIGRQRAISAVARELAGFVWAIGQAAQPIAVAAA

SEQ ID NO: 472729 - protein, 335 aa, unidentified
MTKVMGAVFVGIDVSACMLVVALESDHQPGRQRREFPNTAAGHQVLIQWLSKSATAVQVCLEATGLYSLDLALALDRAEGIEVMVANPRAIADFAKALLQRSKTDKLDAEVMLEFVRRMPFVPWQPPKPHRLDLRALMRRITGLKLASQQEKNRLHSVSQSAEITPLVRKDIQSHLVQLERHVEKLEQQAEAIVQVDPELAQQFRHLVSVRGIARVSALHILAELVILPPDMTARQWVAHAGLDPRHHDSGTSIHKPARISRAGNRYLRAALFMPALVATQHDPNIRAFYQKLVDRGKTKMQAIVAVMRKLLHALHGMLRTGSDFVGEKFYVIPS

SEQ ID NO: 472730 - protein, 476 aa, unidentified
MSKKLFAGIDVSLENNQLCLMDGNGNSIGKTLSFTNNLPGTLAMVEHINGILKGNEFEKLTIGMEATALYWFPLFNFLSSKATFVETQAQVLPLNPKVISNFRNSYPDMDKTDAKDSFVIADRLRFGRIPKGQIPNVDFLALQRLTRFRYHLVQCASQLKNYAKSFLFLTFSEWNRDKPFSNLFGATPSKLLKKFHSAHELADVSTEDLKELLVKFSKGHFKDVDAKTEEVKQSAKDSFPIPKELAEQVHLLLKQTLQQLELLDKHIYRLDKKISKKLKIFNNVLESIPGIGPVLAAGILAEVGDISRFPGQAQLAKYAGLTWRKNQSGNFSGDVTPLTKTGNSFLRYYLIQAAQCMLKYNAEYREYYNRKFKESTRHAHKRALSLTARKLVRLVYALLSMNQLYMAPEERQRRELASKEVSMTHVPRMQSEDSNASQKPETCASKKVKNLTVAARPKGTLPLQQEHVQGQKAVNT

SEQ ID NO: 472731 - protein, 410 aa, unidentified
MKMAGIDVHKKVLMVVVIDATRPEEKPERRRFTTLPGDLGRLSSWLRAQDVQEAVMESTAQYWRSVWLELEPHMLLHLAHAFSNRAPRGRKHDFRDAERLVRRLFADELILSFVPNGEQRIWRNLTRMKTQLRRDRVRLQSQMECLLEEMRIKLSSVVSDLLGASGLRILRALAAGETEPKKLVALGDDRLKCTEEQLLDALTGSSQPMHREMLALQLERLQLIDTQIAKLNNLIAQAMKPHQEAVMRLAEVPGLGVDSAQQIIAEVGVEASTFSSAAELTSWVGTCPGKDESAEENHNSRSAKGNKYLRRVLNQAAHAAVKKKGSHFQAVFRRLLPRLGYQAAIWAIAHRLCRVVWKILHERARFIEQSSEPDAQAKKKRARMLVQALRRLGYDVAITTHLATQNAVQV

SEQ ID NO: 472732 - protein, 429 aa, unidentified
MQNESTPGARGPVFCGVDTHADSHWLCVLDWRGRKVLSRQFPADAAGYEALAGAIAAAGEPACVAMEGTSSYGAGLTRHLASLGMPVREALSPARTQRRRPGQGKCDEADAERAARAAMSGSKLGTPKSQDGWVDGVRCMLAARSGAVKARTSAINTARSLLTTAPEGLRSRFRGMGGPRLMEELPSVRAEGALGAALGALADLWAAARDAALDMERAIEASLEENCPALLAMYGCGPVSAAKLAVAAGDNPGRLRSEASFAAICGACPIPASSGKTVRHRLNRGGDRQANSALHEIARQRVMRDPETAEYAERARARGKSDREVMRCLKRYVAREAYRALMRPHEVRRPEDASGLVAARRAARVSQVRAASILGTSEKYISMLERGQRELKPIRRAYEAWVEAGLPLDWDRQAFEAERKMDSKKHLAK

SEQ ID NO: 472733 - protein, 360 aa, unidentified
MNEITRVGVDLAKRLIQAHAVNATGRVVVAKALPADKFAAWCVQLPAGCIVAMEACGGAHHWARKLRSFGLDARLIAGHFVTPYRMAGKGGKNDAADAAAICEAAGRPHMRFVPVKTPAQQALLAIHRLREGYKEDRTACINRIRGLLTEFGIVFAQSPDALRLGLADVLEDASNELPGIARLALQEARLQWIELECHIASCDERIAAHVRSDAQAKAAAQLSGIGPVTASALVATVGDFKQFKTGAQFGSWLGLVPRQNSSGGKTVLGRITKRGDDYLRTLLIQGAKSAVMTAHKRSDKISQWLVQLLARVGWQKAVVALANKNARIVWALLAKGREFDPNFVSVKPGEVPPIPAVMPA

SEQ ID NO: 472734 - protein, 423 aa, unidentified
MNKQMEKIDYAAWIGIDWATDRHAICLQAADSNRIEHCVLEQKPEALNAWFMELQLRFGGRKLAVAIEQSKGAVINFLLGLSFVDIFRVHPKSLKNYREALHPSGAKDDPTDAELILQFARLHQDKIRPWVPEGVDSRLLLRLVEGRRKTVNKRVRLTNEITQLLKEYFPQALDWAGQLSSVMACDFLMKWPTLQKLQKSKPGAVRQFYRAHGCRSRERIDSRIADMRRAYPLTTDPAIIQSSVLMLKALVPQLRAAIEAIAAFDQSIEQVYRNQPDAEIFDSFPGAGAALAPRLQAAMGADRDRFHNAQQVAEYSGIAPVTERSGKTKSVHRRLACSRFVKQSFHEFAGQSILRCAWARAFYDSKRAAGMHHHAALRALACKWIRIIFRCWKDHVPYDERIYMTALRRRQPPWLTFLPAAAK

SEQ ID NO: 472735 - protein, 389 aa, unidentified
MYLIGIDISKYKHDCFIATEAGEIIKDSFSFDNCSKGFSQLLDVLKSLDPSQTKRIGLEATGHYGYNLKVFLDHHGFDYMEFNPYLVRKLATGLSLRKTKTDKADSKLLSMILLSVDYKVYPVKSYHIQELKSLTRYYKTLVKKHSKELVALTNVLDLVFPEFKSFFGNRFSKTAYYLLDHYPTPKKISRISQSGYKKIYSLSRGRFSYARLMKLKDLARNTVGHSSQLLILQLKSYLNLISSIDSEINSVKSALLDCAVKLDSPIFSINGVGPISALSIIAEYGNFISFDSPAAMLSFAGLEPSVIQSGTIDKQGHMVKRGSGYLRETLMNVSMFFMINNPTIYEYYLKKRNEGKTHRVALSHVAKKLIRIIFHLVKCNTQFNYLKLR

SEQ ID NO: 472736 - protein, 335 aa, unidentified
MEFTYFIGCDVSKNELDFAVMRGKEFLFHKEIANEPNAIKDFVNELKKQPEFDLAKAVFCMEHTGIYNNHLLVYLHKKKANSCLEAATHIKNSLGNIRGKNDKVDAMRIAEYANKNREELRLWQPKREVIQKLAYLAATRSRLLEAQKQLKTPLKESNGFVSRSIANEAQTICQRTLNSIEADLKKVNDAIDALIESDEELKRLFGLITSVNGVGTVTATQILITTNEFKDIKDPKKFACYAGVAPFTKESGLFKGKARVSHMANKKVKTLLHMSALTAITYNPDMKKYYDRKVNEEKKNKMLVINAVRNKLILHIFACVNQNRKYEKNYTRLVA

SEQ ID NO: 472737 - protein, 416 aa, unidentified
MEVLHQRCCGVDVHKASVVACLLVAEQGGAPRKEVRTFGTMTEDLLGLVDWLAGAGCTHVAMESTGSFWKLLYNLLEGVVAQVLVVNAAHIKAAPGRKTDVKDAEWIADLLRHGLLRASFIPDRPQRELRELTRYRTSLIRERAAEVNRLQKVLEGANIKLSVVATDITGVSGRAILAALLEGSTDAAALAQLACGKLRAKIPQLEKALVGRFGAHQRFMITEQLVHIDALDEIIARVSAEVAERVRPYAQQIEQLDTITGVGQRTAEALVAEVGVDMSRFPTADHLTSWAGLVPGNNESAGKRTSGQRRQGTVALRRALTEAAQAAARTKKKDKTYLRGPYGRLVARCGKKKAIVAVGHTILRIAHHLLSTHTTYQEHELTRLDERRRARRQQRALDQLRALGYEVTLTPKESAA

SEQ ID NO: 472738 - protein, 408 aa, unidentified
MAFDLRSFALFIGLDVGKSEHHATALTRDGEKVYDKPLPNDETRLRELFAGLTGEHGAALVIVDQPATIGALPVAVAQAVPGIEIAYLPGLTMRRMADLHAGSAKTDARDAFIIAETARTMPAALRSITVSDEQVAELAVLAGFDDDLLSQMTAARNRLRGLLTQIHPALERAVGPHLHQIGVLDALGTWPTPQRLKTAGRGHVRNRIKKHNPRLAERVTEEIFSALEAQTVVVAGTGAAATIVPILASQLQDLTRQRAGVLAQVEALVEAHPLYRVLTSMPGIGVRTAARILTKVVGKDFKTAGHLASYAGIAPTTRRSGTSIRGEFANRGGNKRLKSSLYNSAFAALHHPPSRAYYDRKIAEGKRHKQAIIALARRRLDTLYAMLRDGTLYQDPAAPIASEHSLAA

SEQ ID NO: 472739 - protein, 429 aa, unidentified
MQNESTPGARGPVFCGVDTHADSHWLCVLDWRGRRVLSRRFPADAAGYEALAGAIAAAGEPACVAMEGTSSYGAGLTRHLASLGMPVREALSPARTQRRRPGQGKCDEADAERAARAAMSGSKLGTPKSQDGWVDGVRCMLAARSGAVKARTSAINTARSLLTTAPEGLRSRFRGMGGPRLMEELPSVRAEGALGAALGALADLWAAARDAALDMELAIEASLEENCPALLAMYGCGPVSAAKLAVAAGDNPGRLRSEASFAAICGACPIPASSGKTVRHRLNRGGDRQANSALHEIARQRVMRDPETAEYAERARGRGKSDREVMRCLKRYVAREAYRALMHPHEIRRPEDASELVAARRAAKVSQVRAASILGTSEKYISMLERGQRELKPIRRAYEAWVEAGLPLDWDRQAFEAERKMDSKKHLAK

SEQ ID NO: 472740 - protein, 424 aa, unidentified
MKVIYQTCCGVDVHKSFLVATIIKTTSGVEPTYQKKRFSTFNNSILEFKQWLIENECRDICMESTGKYWVPVFNLLEEDINVTIANPKWVKAVKGNKDDSKDSKWIGDLFRLGLVPGSYIPCKSIRILREYTRYRYKLVSCRSSEKNRYQNALTVCNVALDSVVSDIFGKSSTSIIDSLLEQSGNSINHEEIASKLLRKLKEKESAVIESIEGYQMTDAQKYRMRLIRAHMDYITAEIQDIDTQIESLISSNTAFENAIQFLCTIPGVKHDSAITIISEIGIDMSQFSSSKRLCCWAGLTPSSNESAGKKKSVRITRAGVYLKPALVQCAHAAVKSDKSPYYKKKYESLVKRRGKKRAIIAIARMILTAIYQMLSTGETWNPSDLYKIDMPEALVEKQKAKAIKHAKKLLQREGLLPPDEPLAS

SEQ ID NO: 472741 - protein, 344 aa, unidentified
MHTTEAQEKLYCGADLHGNNVFLTLCDSQGKRVMERRVKANLVAVNAALDEYWERIERVAVESTYNWYWFVDGLRAQGRDVRLANPAKMDQYEGLKASDDANDAGWIAEQMRLGILPESYVYPVEVRPIRDALRRRMLIVRQRTQSLLSLEGLFARHGLECPAVAKLKSGAAEEIEAMKLDGFTRLQVDSLLELVRKQDGLARWIEGAVLKAVKAKPEFERIQKVPGIGPILGMVVVLESGQFERFASAGDYASYCRTVKSERRSNGKKKGENNRKNGNRYLAWAFAEAAVYAVRYYPRIAAWYERKKHRRNVPVAMNALACKLAKAAWHVMSGKEFDEGMLFG

SEQ ID NO: 472742 - protein, 434 aa, unidentified
MPPHGCDQQQPAPEREDLNHTMKVFCGIDWASDHHDIALVDHEGTLLGRARIDDDATGLQQLLDLLTAHGDTADTPIPVAIETSRGLLVACLRATGRPVYAINPMAAARYRERHAVARKKSDHLDAMVLANILRTDMAVHRQLPADSELVQAIAVLARAQQDAVWDRTQAGNKLRSHLREYFPGFLGAFQDTREGLCLPAARVILAAAPTPAQAARLTRPQLRSLLRKAGRKRGIEEAADRLREAFRLPQMRHLPQVEQAMGRKTLALLRQLAAVCESVEDLTTATVESFDMHPDAEIITSFPGLGSLTGARVLAEIGDDRSRFSDAKGLKAFAGAAPVTRASGRSLAVMARRVKNQRLAAAGYLWAFSALSASPGARAHYDRRREAGDRHAAAQRNLFNRLLGCLHHCLTKRVRYNEATAFPPPETAGLPVAA

SEQ ID NO: 472743 - protein, 317 aa, unidentified
MSIPTASFVGIDVSKQQLDVAVRPSGETWSVAHDEAGLSALVAQLRALAPALIVLEATGGWEVALASALAAGPLPVVVINPRQVRDFARSTGTLAKTDRLDAQILAQFAEVIRPQPRALPDAQAQELAALLQRRRQLVEMLTAEKNRLTLASRRIRPQLQAHIEWLHQQIAQFDEDLRQLIRASPLWREKDDLLRSAPGVGPVLATTLVAALPELGTLTRRQIAALVGVAPLNRDSGTLRGRRSIWGGRAQVRAVLYMSTVVAMRHNPVVAAFYQRLRAAGKAPKLALTACMRKLLTILNAMLKHHTRWAPGLAQHA

SEQ ID NO: 472744 - protein, 477 aa, unidentified
MSHDGQKQSKPDQGRQKKKRRKGMRIEDRPILEKNAAGIDVGAREMFVAVPPDRDEHPVQIFDTFTEDLQRLADWLVSCGVTTVAMESTGVYWIPLYDILEARGLKPCLVNARHMKNVPGRRTDWHECQWLQYLHSVGLLRGAFRPEADVCAVRVLIRHRAELVQSASQHVQHMHKALTQMNLQIHHVISDITGLTGLAIVDAILEGQRDAAALAKLRDPRVKANEETIRKSLVGNWKPEHLFTLRQSRELFRTYQEQVVKCDREIEQRLGDFKPWADPKQKPLPPDRKRNRSSQKRRKKTGHEGTGFDLRTEAYKLFGVDVTQIPGIETIALPLFSEVGRDLSKWPSTGHFASWLGLCPDNDISGGRVLWKGVRNIKNRAGQLFRLAAHSLHRSLTPMGSYLRRMKAKLGPAAATTATAHKIAIIFYTLVRHQLEYDETIWAARNAERQKRLEQNLKRQAERLGYKLVPVADTATL

SEQ ID NO: 472745 - protein, 401 aa, unidentified
MNAVGIDVSKGKSMVCVMRPFGEVVLEPFEVLHTAQNLRDLAEKLKALDGETRVVLESTGNYHKPVAFVLHDAGLFVSVVNPVLIHDYDNNSLRRVKTDRKDAVKIANYTLDKWTRLRQYLPEDDTRLALKNCYRQYQQAVAIRTMLKNNLISSLDLTFPDANKLFASPPKSNGCEKWVDFIGDFWHSECVSSLSEEVFAKKYLKWCQKHGYIFTRSKSDEIYACALNSASLPKSPTSKLLIQQQVAQLKAVSQSVAAFQQEMLRLSQQLPEFDTVMEMYGVGPSLGPQLMAEIGDVRRFSSKKSLIAFAGIEPLPNDSGKVVGNDKGISKVGSAVLRRTLFLIMSVILQTQPQDEPVFQFMNKKRSEGKPYKVYMMASANKFLRIYYARVKAVMDSERSQ

SEQ ID NO: 472746 - protein, 345 aa, unidentified
MPIVGGLDIHRKQITFDYLDTATGEVKRGQIAPADRKHVRAWLARFAGRGEVAFAIEGCTGWRYIAEELAAGGLEAHLGEPADTAAARGRKRHAKTDKTDARHLRTLLAEGRLPECWIPPEQILEYRALLETYHDLRAEHTAWVQRIHAVFFHQGAPRLGEGVLRTEQGRAGLRAAAAAHLSPAGQLQVATALDMLAAVEARLGPLRQQLRDAARHLVGAKVLAARLYGAGPVTALALTCWLGGADRFSSSRKAVRFTGLDVTVHSSDRKGPPGRLSRQGPPVLRWAVYEAGKTHARTSAPDHGYYAAVKDRKNGKRAALSEARKIVRQACHILAELGDDALTAT

SEQ ID NO: 472747 - protein, 405 aa, unidentified
MRYYLGVDWADQTHAVWVVDESGTKIAARAVSHTAEGLGEWGRELDEWRAQGIALWAAIERPDGRVVDCLLDHGVVVYPVNPKALDRARDRFRQSGAKSDPFDARVLADFLRTDHAHLRALQPSSEAAQELKLLTEDCQRHIRQQTRLVNQLTATLKAYYPRALEVAEVTSALAREFLPAYPTPEALTALTERQWQRWARAHRLPEARAGELWAVLRQPQLPVPAHVVRAKARLMQTLMEQLRPVVAAVAQYRKAIDDFFASMPAAQWARTLPIGKHGITAPTLWARLGDAPGRWESFRHLQAHAGTVPVTKRSGKQQRVVQFRFACDKALRYVVDQVAYLSLLSSAWARPYYDPQRARGHSHRQALRALGAKWLKIIFIMWQRQVPYDEQYHLATMTRQQLGRR

SEQ ID NO: 472748 - protein, 380 aa, unidentified
MWLALSLTGFDVVDSVRSRHRSAIGCFVGNESHEGAVHMQITTIGLDIAKNVFQVHGIDGNETVVVRKQLRRGKLIAFFESLAPCLVGIEACATAHHWARELTRLGHQVRLMPAKDVKAYVKRNKNDAADAAAICEAVRRPTMRFVRIKSTEQQCQLMQHRTRDLMMRQRTQLINALRAHLAELGIVAAMGDKGIAELLMIVADEDDGRLPVEARASLALLAAQLNALQMLIGSLEKQIKMQHRANPASQRLETIPGIGIIGATAIAATVADPTVFRSGRDFAAWIGLVPRQESSGGKHKLGSISKRGDRYLRRILVVGAHSVLRRAMEKPGKYPWLTQLMARRPFKVVAVALANKMARMAWALLTYGGTYRAPRLSIVP

SEQ ID NO: 472749 - protein, 346 aa, unidentified
MEHYVGIDVSLELSSVCVVDGRGKIVKEAKVASEPEALVCFFKELGVPMNRIGLEAGPLSQWLHAGLTQAGFETVLLETRHVKAALSAMSVKTDRKDACGLAQLLRMGWFQPVHAKSIGSQEIRALLVARKQLLGRLLDVELSIRGILRGFGLKVGQVTRKTFEARIRELVTGQATLGRIAEAMLSARATLQAEYEKLHKAVLAIVGEDAVCRRLMTVPGVGPVVAVTFKSAVDDPSRITKSKAVGALFGLTPKKYQSGEKDVTGGITRTGDEIVRTALYEAANVLLSRITRFSKLKRWGMDVAKRRGSKRAKVALARKIGIILHRMWIDGTTYRWAEAKPIAAQA

SEQ ID NO: 472750 - protein, 343 aa, unidentified
MKVIIGIDPHKASHTAVVIDKTESVLDEFRVRACTKQTEQLRSWAVPFPERVWAIESARGLGYLLAQQLVAAGEVVVDVPAVLSTRTRLLGSGRAQKNDPNDARSVAITALRNTELRRVTIDDHAQVLKLLAKRHRDLGRLKNKAACRLHSLLMELFPGGMAAEMTVNRANEILKRVEVAGQTVEHKVAVAHEFVADIAHYEQLRKASLKRLRVAVSATGTSLIDIRGIGVVNAAIIIGHTGDVSRFKSAAHFASYNATAPIEASSGENRRHRLNQRGNRQLNYAIHIAAITQLRQPCPGREYFDRKRSEGKNTKEAIRALKRQISNTVYRSLVADARRSQNA

SEQ ID NO: 472751 - protein, 350 aa, unidentified
MEEVSVIGIDLAKNVFVLCAQTASGEIAWRKRLKRRAFKQFMAATAPRCLVAFEACGGAHYWGRFLTALGFEIKMMAPRAVKAYRQGPHKNDWRDAEAAAEAGSRHPVRAVRVKSEAAQAVQVLVRLRALQIRQLVQTGNHLRGILNEFGIVLPKGHKRLREAIARLRQEDPASAALPASVRRTADRLCLQLAEQARRVTEATSELEAAIKDEEDCRQLRTVPGIGPINAAALSVALEAPQAFPNARAFAASLRLVPRQHQSADKQIMLGIGPLSANETRRHLVLAGQSLITMVRRFQQPPADKFLLWVYRLDRRKHRNVAAVAVAAKLARIAWALMAKDQIYQPRRATA

SEQ ID NO: 472752 - protein, 428 aa, unidentified
MNPSPVKYAAFIGIDWADQKHDLWLQPADGSTSEHSTLEQTPAAIQNWISQLRQRFGGQPLAIGIELSRGPLIYALMHCEFLIIYPINPKSLARYRQAFRPSGAKDDRSDAYLLCLFVQTHHRELTAWKPDDVQTRTLAGLVERRRHWVDQATGLQLRLRAVLKAYYPVMLELFGDHLATAMACHFLQKWPDPQSLQKARPASLRQFFHLHHSRSEQRIQDRLQTIQQAQPLTQDAGVIVPHRMDALIAVKLLLTLHHQIGELEQQIAQVFAAHPDAFIFEGLPGAGPTLAPRLLAAFGSDREKFPDAKAVQQLSGIAPITVKSGQSECQFFRLSAPKFLHQTFWEFAKCSLVSCPWAQAVVTHLMKEKGLSFNAAVRALAFKWIRILWRLWKSRQTYQEDIYLDSLRRKKSRHLPTPSSGNNFSPAT

SEQ ID NO: 472753 - protein, 343 aa, unidentified
MQAVTTIGLDIAKSVFQIHGVDAAGNVIVRRQLKRRYVLPFFQRLPPCLIGIEACASSHHWSRELKALGHTVRLMPAAYVKPYVKRQKNDAADAEAICEAVTRANMRFVATKTLEQQSCLMLHRTRHLFIRQQTAVINAIRAHLAEFGIVAPVGRNGVEDLLNIVADCGDKRLPDVARACVAALGAQLRMLKARILEFDRLIVAWHRSNEASKRLDDIPGVGPALATALVASVADPKAFRSGRDFSAWIGLVPKQHSSGGKDKLGSISKQGDRYLRSLFTAGALAVIRYAKIHGTKHRPWLTALLARRPTKVAAIALANKIARMAWAMMARGDRYKEPVALAA

SEQ ID NO: 472754 - protein, 412 aa, unidentified
MEVIYECCCGLDVHAKTVVACVVKKGRKEIRTFGTMTEELLHLGDWLTTEGCTHVAIESTGVYWKPVFNLLEGVVEVILVNARHIKAVPGRKTDVRDCEWLADLLRHGLLKASFIPPREIRELRELTRYRQTLLREHTAVANRIQKLLESGNIKLGQVASDVLGQSGRLMLHALAEGEQDARKLAELAQGKLKSKKDALRQALVGRLTQVQRWVLGELLARVEELDSALQRVETRIGEEVEHCPDPFVQEAVVLLDSMPGIGEHVARTIVAEIGVDMARFPSAEHLASWAGLCPGNNESAGKRKSGQTTKGSQYLRTALVEAAWAATRAKGTFLAAKYYRLVKRMGKKKALVAVAHGMLRVVYYLLCRRVGYTDLGSEYVTQHHVNQQRQRLVKKLEALGVKVTLEEVGQAA

SEQ ID NO: 472755 - protein, 370 aa, unidentified
MGEYIVCGVDAHERTLECRIGVGREAPSRLRFENTRGGRQDLFGELERMRQRTGSEKVLLGYEASPLGYGLYDESVEAGMECVVLAPTKIARSVEDRKRKYDDRDATRILEALRGHVLAGNELPAIWIPEVQTRDDREVSRCRLDLTEKLTAVKAQVRMLLKRNHIEKPEGVGTSWTLSDRAWLEGLRLAPGAQVWLSSLLRQVDALEEEIGKLDRELLRLAEQDRYRGSAQALCGMGGIGVLTALVFLTEMGDLRRFSNRKQIGAYLGLVPSSHESGDGADRKGHITREGPARVRKVLCQAVWARLRTDPTEADAYRRVVERNPKHKKIAVVAGMRRLAILMWHRAKEAQESTGAWAVRAEGAGSATAG

SEQ ID NO: 472756 - protein, 343 aa, unidentified
MEAITTIGLDIAKSVFQVHGIDAEGNVIFRRQLKRRYVLTFFQKLPPCLVGIEACASSHHWSRELQALGYTVRLMPPAYVKPYVKRHKNDATDAEAICEAVTRPNMRFVATKTPEQQSCLTLHRTRHLFIRQQTSVINAIRAHLAEFGIVAPVGRQGVEQLLGVAADTNDKRLPEVARACVAALGAQLRMLKAQILQFDRMIRAWHRSNEESRRLDDIPGVGPALATALVASVADPNVFRSGRDFSAWIGLVPKQNSSGGKDRLGNISKRGDRYLRSLFTTGALAVIRYAKIHGVKHRPWLTALLTRRPTKVAAIALANKIARMAWAMMAKGERYKEPAALAA

SEQ ID NO: 472757 - protein, 343 aa, unidentified
MQTVTTIGLDIAKSVFQVHGQDDAGQVVIRRQLKRRSVLAFFQKLPPCLVGIEACASAHHWSRELQTLGHNVRLIPPAYVKPYVKRQKNDATDAEAICEAVARANMRFVPTKTPEQQSCLMLHRTRHLFIRQQTAVINSIRAHLAEFGIVAPVGRKGVTELLHIVADPSDKRVPEVARACLAALGNQLLSLKEQIVEFDRMIMVWHRSNETSKRLHYIPGVGPMLATALVASVADPRTFRSGRNFSAWIGLVPKQHSSGGKDRLGSISKQGDRYLRSLFVAGALAVIRYAKIHGTKHRPWLTALLTRRPTKVAAIALANKLARMAWAMMAKGERYRQPVALAA

SEQ ID NO: 472758 - protein, 354 aa, unidentified
MNTYIGVDLHKDYSFFTAINRDGKIMAPQRRIVNREGDILEYLSHFKNPKLTLEATLNWYWLVDLLQDYNYDVTLAHPKKAKAIASAKIKSDKISSKILADLLRSDLIPACYIPDREKRTLRDFLRHRAVLVSIRTSLKNRIHAVLRNFNFHCPYSDLFGKSGRAWLKQVPLQTYYKTITDNFLSLINAVEPKISEVTKIIKELAEDNPQARLVDEIPGIDYYSALLIVLEIGDIKRFPDHRHFCSYIGIVPSSHRSGDIDYTGKITKEGNSWLRWIIIEAAQTSQSFLNNPYHSLFLKISNKKGAAIAKVAVARKIATAIYYMLSKNQHFKLPKSLRSQVSGVSPVLAIAQRG

SEQ ID NO: 472759 - protein, 388 aa, unidentified
MQDVAHRPAAPTTIGSDLCAIFISLELSRSTWLVTSLSPGHGEKMSKHSVKAGDIAALLARFSKLRTKACARTGKSLPIVVIQEAGLDGFWIHRVLLSEGIESHVVDAASVATSRRRRRAKTDRIDGETLLRALLAYKRGEPRVCSMVRAPTPEDEDRRRICRERKVLIMERVQHVNRIKGLLFSQGVSGYEPLHRDRRAQLDALQTGDGRRLPQHLKAQICRELDRLELVLEQIKAVEAERDALLNAEQTKVAAPPPMLLALHGVGPEFASVLWSEGLSRHFDNRRQVAAYAGLAPTPWQSGSINREQGISQSGNPRLRTTMIQLAWLWIRHQPVSALTLWFKDRNERTGGRRRKTTIVALARKLLVALWKFVSAGVVIEGAMMRPA

SEQ ID NO: 472760 - protein, 315 aa, unidentified
MTTSSGKFVGIDVAKDKLDIAVLGEKKASQVGNDEVGIAKLIKKMQTLNPELIVVEATGGYQRAVVLGLYEAGLPVAVVNPTRVRQYARASGLFAKTDKLDAFNLAEFGKQMKPRRFEAKSEAGRDISALLVRRRQLEEMLKAEKSRLRTVPPKMRGSVERMIETLKEEIKRLEKELDQFMKENEDWQAQEQILTSAKGVGRITATTLLAELPELGKLDRKKIAALVGLAPMNADSGKKRGYRKTKGGRMEVRNVLYMSTLVATRYNPLIQAQYQQLLKRGKVKKVALTACMRKFLTILNAMMRDKVPFRQTAIV

SEQ ID NO: 472761 - protein, 392 aa, unidentified
MLFVGIDVSKSKHSCYIIDFEGTIYEDDLQISNNIHGFKMLSETINSICKIHDLQNVKIGLESTGHYSTNITNYLHSKRFKVILFNPMITNSKRKSNTLRKTKTDKSDAKVIAMMLFTDNSKSYSPISYQIIELKSLTRFRHRIVSQRSKLKQSFTRLITIVFPELSDFVWSLHQKSIQNLLLKFPTANDIANCHLTKLTNLLIRHSQGKYRKDKAIELKQLASKSIGSSNRATAFEIQTTINLIHVLDKEIKDIDQKIKTIVDEINTPLITIPGISYTLAAIIIAEIGDIHRFANPSKLLAYSGLDPSVYQSGQYNAAHTRMVKRGSKYLRWAIIQAVKTVAMRDKTFKDYLNKKLAEGKHYFVALSHAGKKLIRVIFYLLKNNTSFVPQN

SEQ ID NO: 472762 - protein, 373 aa, unidentified
MKNSITDVAMDTHKKQHRVALVYPNDEQIIEFSVKNTPAEIRKMVRRIKRNAPGEVKFCYEAGVCGFTLQRRIEALGCKCSVIAPSLVPRKLGERKKTNRRDAKKLLGLFMADMLTEVYPPDEQQEAARELTRCREAAQENLKRIRHQLQKMLVRHGYVFIDGQHWTQKHLRWLEAVEFDRPLLQEVFDCYFTEMRHCLQRVKTLDRELEKLAQSEAYREVVGILRCFYGIETLTAISIIAEVFDFGRFASARAFMSYLGLTPSESSSGEKEHKGPITKTGNKRARRLLTEAAWHHRHAYTVSKAFSKRREGQPQWAIDIADRAGVRLRKRYHRLVNRGKLPCKATTAVARELAGFIWLALIEYEARKKRKVA

SEQ ID NO: 472763 - protein, 341 aa, unidentified
MEITTVGLDIAKRVFQLHGVDAAGKAVLRRKLQRSEVLAFFKALPPCLVGIEACGTAHYWAREIRELGHEVRLMPPSYVAPYVKRGKTDAADAAAICEAVTRPTMRFVPIKTAEQQAVLMLHRTRDLLVRQRTMLVNALRGHMAELGIIAPQGIARVADLMAVLLGEDTTNVPALARQALRGLAAELEALDRRVKEIEGAIVRWHKDNEASRRLAAIPGVGPITASAIVATITDPFQFHSARHLAAWIGLVPRQHSSGGKPRQGGISKQGDRYLRRLLVLGATAVIRYSRSKSTAEAGWLKSLLERRPARLVSVAQANKTARIVWALLVRGEAYRMPSGVA

SEQ ID NO: 472764 - protein, 414 aa, unidentified
MDILVERCAGLDVHRDTVVATVRVPPDSSGRKRRAQYTQTFATTTAGITKLGDWLAELRVTRAGIESTGVYWKPVYYLLEDQLEVWLINAEHLHNVPGRKTDVADSAWIAQMVEHGLVRPSFVPPPPIRALRDLTRHRRTLVEERTRVVQRLEKVMQDAGIKLTSVASALLTKSGRAMLEGLLAGQSDPEHLAELARGRLRSKIPALREALAGRFRVEHHGLLVAQMLAHIDFLEAAIAELDKSLDTAAAPFAATVKRVCTIPGVSVRTAIMLLAECGADMSVFRTAAHLASWAGICPGNNISGGKSRTGRTRHGSTALRTALTEAAHAAARTKGTYLAAHHAHIRGRRGRLKAIGATRHDLLIAYWHIVHDHVDYTDLGPDWAQRRRSTEQRTRRLIHQLEQLGHTVTIAAAT

SEQ ID NO: 472765 - protein, 313 aa, unidentified
MRNAHGTIYVGIDVSKDKLAVAIAGGERGDEVLSLGTFENTPAAVDKLLKKLAGRGDILACYEAGPTGYGLYRQIRASGCSCCVVAPSLIPVRAGERVKTDRLDALRLARLLRAGELTPVWVTDETHEAMRDLVRARESAAEDQRHKRQLVSAFVLRHGRIYPRTKPWTMRYRRWLQTLAFDHPAHQIALQEMLQAERNASERLERLTKHIEALVPEWKLAPAVNALQALRGVALISAVTFMAEIGDVRRFETPVKLMAYLGLVPSEYSTGKTTRRGGTTRARGSSISSRNNARGSGHCVESAIPPHGQISQA

SEQ ID NO: 472766 - protein, 313 aa, unidentified
MNKTVCGVDVSKGKLDAWIEPTGAFASFDNDSAGIAKLATFCREHGVELVAMEASGGYERRAFLELWQAGLSCALINPRNVRRYAEAMGYLEKTDRIDAAVIARFAITKNLSPTPLPSKAQQRLKALVTRLRQVTDDLIVQKQRRSALLDNSEMLASIDEVIALLKRQSRSLEGEIASMIDDDPLWALLAQSWRSVKGVAGRTVARLHAELPEIGTYNNKSIAKLVGLAPLADDSGQHKGKRHIRGGRAGVRAILFLIARTAARYDKSLADFHARLVAAGKEKMVIRIALARKLLVRLNAKAREARAAYSNAT

SEQ ID NO: 472767 - protein, 416 aa, unidentified
MTFKIVRFICGGMDVHKNLIVATIGTTDKQTLTTEYIQQSFSTFYSDLIRLKEWFISHDCYDVCMESTGKYWIPIYNVLETELNICLTHPKYVKAIKGKKTDKRDSKWICDLYKCDLVKHSFIPEKEIREMREIARYRCKLVYMRSSERNRYQNCLTVSNISLASAVSDPFGKTATNIMKELMQSEVIEDDKILKLIHKNCKDKDKILDSLHGYHIESDQRFKMDTVMNHIEYLDKQIQACKAELIKRAYPLRDYFQHITHIKGISALSAILIVSEIGTDMNQFESDKQLVNWAGLSPANNESANKKKSVRISKAGQYLKPLLVQCALSSIKDKNSYFGIKYCRIKKRRGHKKAIIAIARMMLVCIYHMILTGEEFNPCDYESLTNPKPKKEPIMTVESALQFLKDSNFDFSSIQL

SEQ ID NO: 472768 - protein, 354 aa, unidentified
MIVIGADVHKRTHTFVAVDAVGKQLGSTVVPATTIGHRKAMQWAHTRFGTTVLWAIEDCRNMSAWLERDLLGAAQKVVRVAPRLMAEHRRTGRERGKSDPIDALAVARAAAREPDLPVASHDALSYDVKALVDYRDSLVRERTSNINRVLWRVHQLDPEHHIAKGGLTMKKHQEALQVWLKTQGTSVDARLAGKEITAIYELTVEIAEVAKEITTLVSAAVPTLLAMPGCGVLSAAKLLGESADITRFPGEAQFARHAGIAPVPVWSANPGRHRLTRSGNRQINAAIHRIALTQARMPDTLGYAYYEKKQADGKSPREAMRCLKRRLARVVYNNLTTDHHARTHEAENPTPAAA

SEQ ID NO: 472769 - protein, 347 aa, unidentified
MNFYTQQHKQYCGIDLHARAMYVCILDQHGEKLVHKNLPTTPEAFLRLIAPYREDLVVGVECMFTWYWLADLCAKEGIAFVLGHALYMKAIHGGKAKNDKIDAHKIAVLLRGGMFPQAYVYPSEMRATRDLLRRRCHLARKRAELLAHIHNTNSQYNLPEIGKRLANQANREDVAEHFPDPSVRKAIAVDVSLIDHYDQLLGEVELYLTRSAKTDDVQTFARLQSVPGIGQILALVILYEIQDIRRFPRVQDFVSYCRLVKCAKESSGKKLGTSGKKIGNVHLRWAFAEAAVLFIRQSQPGKVYFAKLEHKHGKAKALTVLAHKLGRAVYDMLTREQAFDLQRFVAA

SEQ ID NO: 472770 - protein, 415 aa, unidentified
MPNPLFVGIDVSSKDNVVCCLTNADEKRSLSRFTVLNNRPGIMELKERISYLVKKDNFDEIRFGLEHTGCYSTHAAMYLQRHLDFGCPNVNVYMFNPSLIKEFKKAHFLDAPKNDRVDAWYIAARLKSGHLPCPFTWSEPMMALQRLTRARYHLMQALVRESNFLMTNLYLKWSDYTLVFENKLSATSLAVMEEFESTEALAEISLDKLVDFLVQHGKNRFDDPQAVAEDLKKAARSSYRLPKAVNDSVNLAMASSIRVIRTIQEQLKSLKKAIKDHLDAIPQTLVSVPGIGPIYASGILAEIGDIKQFESHKQLAKFAGLAWTEHQSGKFTASQTRLIHSGNRFLRYYLLEAANSVRVHDPVFAEYYAKKKAEPKQFAHKRALALTARKLVRLVFFLLKTNQLYQPKGGNRQNN

SEQ ID NO: 472771 - protein, 346 aa, unidentified
MTTPIVGVDLSKSVFQLSVADVKHRVIEPKRLSRAQFHRFLARTTSAHLVMEARGTSHYWARTAHLHGHEVKLLHAKYVKAYVRRTKTDAADADALVLADRDDSLHPIPIKPEELQALQGLHRIREQWKRARVSRICEARVLLAEFGISAPLGARGIGKKLTLATEQTPVLLQPALLDLIQEIGDLEQRLKRVDHTLAAYADTNSDVQALLGIQGIGVTVATAFVARVPSIHMFKRGRSFASWLGLTCREYSSGQTRRLSRITKQGDRYLRMMLIHGARAALMAARRKAANGRRLTRLETWAVNTQARIGHNKATVALANKMARIMWAVWTRHELFNGDDALRFAA

SEQ ID NO: 472772 - protein, 373 aa, unidentified
MKYSTVYVGMDVHKESFSLCCYTNEKEQAEYPQKVDGHYSKVINYIEAMRFHYGDDALFICGYEAGCLGFTLYRQLTDHNVKCVILAPTTMLQQKGKKKVKTDKRDAALIARCLAHHDYSPVHIPTEQDEQTKEYIRMRDDHKLALKKVKQQILSFCLRHNYRFDGTANHWTQAHLRWLKSLEPKGLYAEILQEYLLTYDNLTDKLERFDNRIEELASNETYQENVHKLSCFIGVRTVTALAVLTEIGDFKRFASAQHFASYIGLTPGEDSSGNDQHRLGITKAGNRHVRSLLVEAAQSYSRGQIGFKSKALKTRQNGNPPEAIAYADKANERLRRKYYRMVLKNNKKTNVAKTAVARELACFMWGMITGNVA

SEQ ID NO: 472773 - protein, 409 aa, unidentified
MRLFIGDDWAEDHHDVELMDERGKRLAKARVAEGVAGIAKLHAMVAEQLGERPEDDDTEVVVGIETDRGPWVGALLAAGYTVLAVNPLVAARYRERRAVSGAKSDAADAHMLADMVRTDGHQLRPVAGDSDLAEAVKVVSRAHKTLIWERTRHTQRLRHALRDYFPAALAAFGDLDAPDSLELLAKAPDPASAARLSRSQIAAALKRARRRDVEAKAERIQAALRAPYLGQPQAVTAAYAASVRALTAVLTVVDAQVNALQYEVGAHFGQHPAAKIVISQPGLGPIVGARVLAEFGDDPHRYASAKARKDYAATSPITIASGKKKVVIARHVHNDRLIDALMFQASKAINVSPGARAYYDKQRARGAGYNAALRQVANRLVGILHGCLKTCTLYDETTAWANHPKPATT

SEQ ID NO: 472774 - protein, 414 aa, unidentified
MDVVHPRCAGLDVSKRDAKVCVRIQAEGRTRATSKVTTWGAVTSQILALRDHLIAEGVTLVVMEATSDYWKAFYYVLDDGPFEVMLVNARHVKNLPGRKSDVSDAAWLAQLGAHGLVRGSFVPPEPIRQLRDLTRTRTTITRERSREIQRLEKLLEDTGIKLAAVASDLVGVSGRAMLEALVAGERDPAVLAEMAKRRMRSKIPELTEALTGRFGDHHAFLVQLHLDLIDQHTRAIDELTTRIEVVLTPFRGARDLMVTIPGISTAVADVIIAETGADMSQFPTAGHLASWAGTCPGSNESAGRVKSTRTRPGNPYLKGALGVAALSASRSKDTYFSAKYRRIASRRGPMKAIVALEHAMLIAIWNMLQTGALYTDPGGDFYARRNPDQAKHRAVDQLRRMGYAVTLEPMAEAG

SEQ ID NO: 472775 - protein, 348 aa, unidentified
MMVFLGVDAHKRTHTVVACDEAGASLGEVTVAATTAGHLRALRWAARWDERRWALEDCRHLSRRLEAELLGAGEVVVRVPPKMMAGVQRSARTRGKSDPIDALAVARAAIREPGLPVARLEGPAREIRLLVDYREGLVRERTGLQNRLRWRLHELDPELNPAPGSLDRYVVLDEVLARLEAFAGMVADLARREITRIRDLTAEINQLERHIAGRVGEVAPSLLEVPGCGALTAAKLVGEAADITRFHSRDAYAMWAGVAPIPVWPSNTERFRLNRGGNRQTNAALHRIAITQMRIHPGARKLITKHLSAGKTKTEALRILKRRLADVVYRTMIKDTQQPCQAAPARAT

SEQ ID NO: 472776 - protein, 347 aa, unidentified
MTIVGNPDAVVGGVDTHADVHVAAVVNHLGGVLGVESFSTTSHGYRQLVSWLRSHGELVLVGVEGTGSYGVGVSRYLQREGVTVVEVDRPNRQTRHRKGKSDPVDALAAARAALSGSATGSPKSRGGNVEAIRVLMIARRSAVDTRIETINQLRHVVFTATPEIRAKFSGLSAVALVNKASTLRPREGDDPVRYTTYMTIRALGHRVQYLREETKRLNRMLRPLIRQTAPTLLEVYGVGYDTAAKLLVAAGDNPERIRTEAAWANLCGAAPIPASSGKTKRHRLNRGGNRQANSALYHVVITRMRHDQKTRDYVARRLTEGKTMGEIARILKRYVAREVFKHLPHPA

SEQ ID NO: 472777 - protein, 343 aa, unidentified
MQTVTTIGLDIAKSVFQVHGQDDAGQVVIRRQLKRRSVLAFFQKLPPCLVGIEACASAHHWSRELQALGHNVRLIPPAYVKPYVKRQKNDAADAEAICEAVTRANMRFVPTKTAEQQSGLVLHRTRHLFIRQQTAVINAIRGHLAEFGIVAPVGRHGVEELLNVLADPNDKRVPEIARACLSAFGAQLRRIKEQVLEFDRLIRAWHRSDEMSMRLDEAPGVGPVLATAVVATVADPKSFRSGRNFSAWIGIVPKQHSSGGKNRLGNISKQGDRYLRGLFVAGALAVIRYAKIHGTRHRPWLTALLARRPTKVAAIALANKLARMVWAMMVKGERYKEPVALAA

SEQ ID NO: 472778 - protein, 344 aa, unidentified
MKVTTIGLDIAKRVFQAHGVDGAGRAVLRRKLGRSEVLDFFRALPPCFVGIEACGTAHHWAREIGALGHQVRLIPAAYVKPYVKRGKTDAADAEAICEAVTRPTMRFVPVKTPEQQAVLVLHRTRDLLVRQRTMLVNALRGHMGEFGIVARQGAGGVSELLAVLQAEAVAGLPSLAKEALLGLANEIEALGTRVDETEAAILTWHKSNEASRRLATVPGIGPITATALVATVGEVSNFASARHFAAWIGLVPKQNSSGGKRRQGGISKAGDRYLRRLLVLGASAVIRHNKAPAGASWLASVIARRPKMVAAVAQANKAARIAWALLARGGTYDPHRSAPQPAAA

SEQ ID NO: 472779 - protein, 457 aa, unidentified
MLSTPLYLGVDIGKTSHAVAFLSEALLGASKQHYEKCPLKKIGNSRAEFERLLALIRTYTEPKQCHVLLEKTGHYGAALEQFLREHGISLYRIRAQGRYGDNKTDELDARALAVRLYTQAHLHAPVVNERDRVSRLIPPTPTAIMLRGLVRHHYALTRNATRNKNKLRALMDEQFPEFMEVIRDPNCPSALALRSAFPTTQDVACADSAELCKARLYTFPSNDALLRLKELARFTIGTKDDDRLRSLIIEQRQLIDELKVISVNLKELKTEITSIVMESREGRILASFIGCSPVEAATLLAGIGSIESFPNVGTLRKYMGWAPRRSQTGTTFDVEKLGKGGNRLLKRTISLIVASAVRYDPTWRTLYKRLEQRLCAFDARTKTWKGRGKVIGHVAGQLIKVMYLLLKQDARLVKQHKAGEKLPEPQLYDPGKHLVLGLQVEHAGGAATHQLTPTRRR

SEQ ID NO: 472780 - protein, 346 aa, unidentified
MSKRSAKKEIRVLGIDIGQNLSYLHGVDAEGHRVLWKQVSREKILAFMVDLKPCLVGLKACGGAHHLARTLKEMGHDVRIMAPQLLKPYVKGGKNSDLVKAICEAVQQPDMRFVSVKSIEQQDLHTLHRVRSMAVAHQTALINHTRILLMEYGIPLPEGSSHFRKQLPEILKNIENGATVALRELLGALRNELVYMGKRVDGFDIEITKVSQQNESCRLLQSIPGIGPLTATAFMAAVGDVRAFKSGREMVAWLGLVPLPHSTGDEIRPLGISKRGNAYLRMLLVHGARAALAQAPAKKDRLSRWVTELKKRRGGNVATVALAAKNVRIAWALLSKGEAFKVSDAV

SEQ ID NO: 472781 - protein, 337 aa, unidentified
MAILTVGIDLAKNVFALHGVNEAGKPELLRPKVPRAKLLEVVATLPPCLIGMEACSGAHHWAREFAQHGHRVKLMAPKFVAPYRRSGKRGKNDAADAAAIREAVRRPNMLFVPIKSQEQQSRLMVHRARQGFVVTRTATLNRIRGLLSELGLVMSLKASTVRREATLMLEALPGYANTVIGDLLSEVTHLDQRIAQYDAHIRAMAKDTSARQLMHLRGVGETTATALVAMIGRGHDFTGGRQLAAWLGLVPSQYSSGGKMRLGRITKAGDPYLRSLLIMGARAVVNAAKAKTDALSQWVTRLVERRGYWKAVVAVAAKNARMAWAVLSKGEAFKMPA

SEQ ID NO: 472782 - protein, 356 aa, unidentified
MGHVNKLNFSGQSIYVGLDVHKKSWSVSIFSEHCEHKKFTQPPEVDKLVHYLKHNFPGADYHSVYEAGFSGFWAHDQLRERGVNCMVVNPADVPTTNKERTSKRDRTDCRKLARSLRSGDLEGIYVPARPKLEDRSLVRTRQSMMKKQTRCKNQIKSLLYFYGINLPEELVRSSWTQKFLHWLEGIRMERASGDLALKAHLEELKHLKQIIASINRAIILLSRQEEYHGWVRLLKTIPGISTLTAMILLTELCELARFATLDRLASYVGLIPDTKDSGETEHTGNLTFRRNPQLRAVLIEAAWVAARKDPVLLLAFNEYCKRMRKTRAIVKIARKLLNRIRYVLKNQAEYVPGVVQ

SEQ ID NO: 472783 - protein, 314 aa, unidentified
MKALRTNVAGVDVHKEIIVVCILKGAADEDPVAEHFETSTMTDDLMAMGRILLDKGVREVAMESTGVYWRPLYNVWTPMGIDVTVGNAHHMKNVPGRKTDYKDAQWIAHLHRMGFIRPSFIPEPIFQRLRQLSRHRTNMVGDLARVKNRVQKVLEDGNIKWSSIVSDTFGVAGVNILRAIADGVTSAKTLASLATTNIKRKEDKEKALKNYLTTEHCRVIKSLMNQYDFLNSEIRGIENELAEQMVPYAEIIEKLDAIPGIDKVLAMAILTEATTRMQSFPDERKFAAWAGVAPGNNESAGKKKDQNVGRAILI

SEQ ID NO: 472784 - protein, 393 aa, unidentified
MQESASTAPVEGVAAYVGIDWADQKHDVALRSASEPGKVEHRLIAHEPEALMDWLGELQQRFGEKGKILVCLEQSRGALIYHLMGYEFLELYPVNPSQLASFRETFSPGGAKDDQPDAALLCELLYCHRDRLKAWKPDDELTRKLAFLNEGRRKAVDQRTQLANEIKSQLKVYFSLALQVLDNDTSTALAADLLLQWPTLDSLQKQSAHKLRKFFYAHNCRNEQKLLERLELIKVAKPLTRDPAVIEPAALRVQLLAQQLKSLLPYIARYEKWIAELFDAHPDSFLFRDLPGAGPALGPRLLTAFGTDRGRFEHSINFSSLSGIGPIRRASGKKTGKNASVHFRHACPKFLRQSLHEFGLHSIRSCPWAKALYQSLRARGKGHHAAVRAVTFK

SEQ ID NO: 472785 - protein, 436 aa, unidentified
MEQPTRFIGMDVHKETIAVAATAAGDSGKATGYGIIANTPEALEKLVKRLRQAGGGPLMFCYEAGPCGYGVHRRLTGMGEDCMVVAPSMIPRKPGQRQKTDTRDAASLAELLRGGLLTAVWVPDAAHEAMRDLIRARQAAVRAVRAARQQLSAFLLRHERVYAGKRTTWTKAHRGWLADQRFSEPAQQIVLQESIEAVRACEQRRDRVEAHLRAQIPSWRLFPLVRNLSALRGIDIIGGAGLAAAIGDPARFATAPHFMGYLGSVPSEQSSGPKRRIGGITKAGDVHARTLLIEAAHSYRFPARVARAKSGVLDEVPEAVRQIAWKAQLRLCRRYREMIAAGKPKQVVVTAIARELAGFVWAIACITSDPPGTAVAEPAVAETGEMAEQVAAAAKGGGSIGGSRAPCRQPLKGAARRAGPPDGASRGAARERRAAP

SEQ ID NO: 472786 - protein, 345 aa, unidentified
MPIVGGLDIHRKQLTFDYLDTVTGEVQRGQVSPADRAHLRAWLARFAGRNDVAFAMEGCTGWRYVAEELAAAGIAAHVGEPADTAFARGRKRHAKTDKTDARHLRQLLADGRLPGCWIPPAQILECRALLEAYHDLRREHTAWVERIHAVFFHQGAPRLGEGALRTERSLAALRAAAGTHLSPAGQLQVATALDMLTAVEARMDTLRRQLRDTARRLTGARVLADRLYGVGPLAALAMTCWLGGAGRFSSSRKAVRFAGLDVTVYSSDGKRSPGHLSRQGPEILRWVAYEAGKTHGRASAPGHDYYAAVKDRQDGKIAALSQARKLIRQACHILAEPGDDALTVA

SEQ ID NO: 472787 - protein, 372 aa, unidentified
MNEFSKYVGLDVHKETIAVAVAEANGGEVRYVGEISNTEDAIHKLVKQLRKGGANLTFCYEAGPCGYGIHRQLTDLGWDCQVVAPSLIPKKAVDRVKTDRRDSLMLARLHRAGELTAVWVPDGAQEALRDLTRAREDLKHLQLQARQRLLAFLLRHGRRYDGGKSKWTLTHFRWMETVKLDHPVQQIVFQEYIDTVKVMTKRIEAVDKHIESAATESVFWSVIEGLMALRGVSLLTATTIVAEIGDLRRFASAPQLMAYLGLMPSEHSSGGTKLRGGITKTGNGHVRRLLVEAAWTYRHPARKTATLQRRAEKATEEVQEIAWKAQTRLCGRYRKLDTRGKLSVQTCTAIARELTGFIWAIGQALPMPVARA

SEQ ID NO: 472788 - protein, 339 aa, unidentified
MNCVGIDVSKGKSMIAVMRPFGEVVVSPFEVRHTASELSELARLLKNLDGETRVVMESTGNYHAPVAWLLHGAGLYVSVVNAMLVHDYGNNSLRRGKTDKKDAVKLANYGLDHWLTLPRYVPEEDTRLMLKTCYRQYQQYSKVQTMLKNNLISLLDTAFPDANRLFTSPPRTDGSEKWVDFVATFWHCECVCGLSKKAFTAKYQKWCRKHGYNFSQDKALDIYASACGRFGVMPKTNTAKLLVEQAISQLQTTSAALAALKQEMQSLAASLPEYPVVMGMFGVGPTLGPQLIAEIGDVRRFHSKKALVAFAGIDAPPYQSGQIDVRSRSISYQSPYPYG

SEQ ID NO: 472789 - protein, 405 aa, unidentified
MHEGRFAGVDWASEEHAVCVNDAEGRILEGRRYRHDERGIRALCARLLELGVELVAIERPDGLLIERLLDAGLSVIAIHPNQVAAMRPRFSNAGGKSDSFDAFVLAELARTDSHRFRILVPDSDATKTLRALTRAREDLVAHRVALANELRAQLECFWPAAAGVFADIDSPIALAFIKRYPAPADARGLGEQRLARFLARHGYCGRRTPAELLTRLRGAADGRADTLEAEARRQIVLSLVAALEPVVARIAELTSEIRGALHDHADGETFRSLFRDPKSAITAATMLAEIGDCRARYPTIAALAADAGQAPVAVESGKSKRARFRWACDHRLRNAIGTLADSSRHHNPWAADIYQRARARGCTHPHAIRILGRAWCQVIWRLWQDQTAYDQAQHTALQHLLTARG

SEQ ID NO: 472790 - protein, 339 aa, unidentified
MKLYSAIDLHSNNSVLVILDENDKVVYERRHPNELPVILAQLAPYKKRIQAVAVESTYNWYWLVDGLMEAGYKVKLVNTAAVKVYDGLKYTGDEHDARHLAHLLRLGVLPTGHIHPKEDRAVRDLLRKRGQLVRCRTAQILSIQSLVSRNTGKGITTDGVRNLDEAAISRACGGDAVKALAIKSNLAILRCLDEQIAAVEDVVLKQAKLKPEFKKLLTVDGIRNILGMTIMYEAGSMERFEKVGHFASYARCVSSSRWSNGKKKGEGNRKNGNKYLAWAFVEAAHYAVRYNERIRSFYQRKQAKTNKIVATKAVAHKLARACYHVLKEQTPFDEARAFA

SEQ ID NO: 472791 - protein, 341 aa, unidentified
MSTIHILGIDLGKHCFHAVAHNYAGKEVLRKKYNRSQLLKFLANLETTTIAFEACGSAHWLARKCADFGHQVQLIPPQYVKPYVKGNKNDFIDAAAIAEAASRPSMRFVAVKSEDAQVIAVIHRIRDGFIKERTACMSRIGAILLEFGLSLPTGHTKMKVLFQWIADQKYQTLPQSLMHELSLIHAHYLYLNEQIKIQDTKLKQLAEQHELAKLLKTVPGIGDLTATLCVADVSAASNFSNGRNMAAWLGLVHRQYSTGGKTKLLGVSKRGNKHLRTLFIHGARAVLSRLETTGKVFGQWLVDLRASKPFNVVVVALANKLARIAWAVLYHRQAFKTASQS

SEQ ID NO: 472792 - protein, 308 aa, unidentified
MQVFVGIDVAKASLAVALYPGEQQLEVGNDAAGHKALCRWLAAQQVERVLVEATGGYEQALVQHLAEHWPVVRIPPHRARAFAVAIGKVAKTDPIDAAVLARLAAVVDGPEVTPLRAVDARLQALVRRREQLVAQRDDERRRQQQATDRCVRSSLLRQIRQLAREVARLDRDIAACVPQCDSDRAHRLRSVPGLGPVTVATLMAFLPELGQLGNRQISALVGLAPYNCDSGNRQGLRRIRGGRANVRRILYMASWSVVRHQPAFKARYAALRARGKCAKVALVACMRVLLIRLNAMIRDASEWRMAAG

SEQ ID NO: 472793 - protein, 339 aa, unidentified
MKLYAGIDLHSNNSVIDLLNEKDKVIYDKRLPNDLPTILSELSPYQSQIESIAIESTFNWYWLVDGLIDAGYSVQLVNTAAVQTYSGLKYTDDNHDARWLAHLLRLNILPTGYIYPKVDRAIRDLLRKRTQMVRIQTTNLLSIQNLIARNTGGSIKAHLVKRMTAEDIALQLPNDDHALALSCNLSVLQQCHEQVKILENAILKRIRLRPEFQSLLTVPGIGKILALTIMLETGDIHRFEKAGNFASYARCVQSKRVSNGKKKGENNRKNGNKYLAWAFVEAAHFSIRYSDTIKRFYQRKCAKTKKVVALKAVAHKLARACFYVMRDNVEFDINKAFTS

SEQ ID NO: 472794 - protein, 286 aa, unidentified
MLTIGVDAHKGTHMAVAVDAAGQECGHWQGPNSIEGWTALRTWAQGLGAERRWGIEGAWNYGRGLAQSLVVAGELVHEVNARWTAKERRHARNRSKTDRRDAQAIALYVWREGQTLPPVASDDDSAVLEVLVSQRDAAVAEATRLRNQAHQLLLQGDPSYREHLPALTTEEGIAALETYQAPGASALAHTRAAMIQMLGQRLRLAVAQAEDLKTQIEARARAGFSPLIQLKGINALTAGMLAAILGPGRRFRSDADLALYAGVAPLEVSSAGRVRHRLNRGGHRQP

SEQ ID NO: 472795 - protein, 342 aa, unidentified
MGQVTTIGLDIAKSVFQVHGVDAAGEAILRRRLTRARVAPFFARMARCLVGMEACATSHYWARELRKLGHEVRLMPPSYVKAYVKRQKNDTADAEAICEAVTRPTMRFVEVKSPEQQSIMVVHGTRTMLMRQRIQLSNAIRGHMAEFGVVAPVGREGLLTLTDTLHDEADDRVPAEARHCLQMLAAQLRLVNDQILENDRRIRVSARATDVGRRLMGIPGVGPVLASAFVATVPDPHAFRSGRNLAAWIGLVPRQNSSGGKERLGGITKQGNRYLRQLLFVGAMAVIRYAERHGTRRPWLVRLLARRTTKVAAAALANKTARMVWAIMTSGQSYREPELRTA

SEQ ID NO: 472796 - protein, 397 aa, unidentified
MSKEELNKKIEVVEKELGSYTWRELETNGKFAKNDKLSFITDDMLIVGCDIGSENHYIRAIDVRGRELSRGAFEFSNTSEVFENAKAWVLALAAKHDKKQIVLGLEPTGHYWFALAAWMISNGISVVQVNPYTVKQSKEIEDNSQLKDDRKDPQLIANLVKDGNYGMPYFPEKVYADMRRLSMFRDQLTEDRIRNINRLHRELKIYFPEHMDAFGKIDGAFTLEVLKVSAIPSDITALGAEGIKNIWHNEKLRGRGYSRANEIVSYAEKSVGLTDGIDAGREAVKWYAEQILKLVACSSGKHKGQTKISHRGRKRLRYWLFQAAKSAVSHADEFKQLHEYYTTRTNNPLKKMQSLVVIACKILRVIYTILKTGTTYDPQKLLEDIKRPTASHAPMAA

SEQ ID NO: 472797 - protein, 500 aa, unidentified
MKTKGSKAKIRAGRKSISVPCSEPAQELRILRPDAAGIDCGAQEHYVAVPPDRASAGQPTVRRFSAFTEGLDAVVDWLKDCRVTTVAMESTGVYWIPLHQKLETAGIEVYLVNARHVRHVPGRKTDVQDSQWLRQLHRFGLLNASFRPEDIICRLRSLHRHRDNLVSSSASEIQHMQKALQQMNLHLHHVVSDITGLTGLRIIDAILAGQRDPEQLVRLRDRRVYKSTPQEMQAALVGDYRGEHLFVLSQSLQAYRFYQARIEECDREMEPLLEKLAQQIEAASANLMLDALEPSGSKGESNRPEQLPEPKPTSGPKSKRKRKPRANEPKIQLAGLLERICGIDLTQVVGLNVLNVLLIVSEIGVDMSKWRSAKAFCSWLGLCPGNKISGGKLLDSRTRQVVNRVADALRLAAQSAGRTQTCLGIFYRRKQAHLGAPKATTATARKLACLIYHLLKNKQPYQEPDSASYQLRLQKSALSKLQRQAIALGYTLLPTAPVPA

SEQ ID NO: 472798 - protein, 362 aa, unidentified
MAHSVIFAGLDVHAAQTHAAQLEAATGELSVTRLAGGCDPVIAWLRRLGPGVRAVYEAGPTGFGLARAAREEGIDLRVVTPGLIPKRPTDRVKTDRRDAVRLARLLAAGELSFARVPTLAEEAFRDLIRAREDVRGDLMRARHRLGKFLLRRQIVYPGPGGAWTQAHLAWLTRLGFDDAASTVTMADYLAAVEALMQRRGTLDAAIAELVGDSPYAATVPVLRCFRGIDTLSAAGLCAEVGDFARFAHPGLLAGFLGIVPSEYTSDDKRRQGAITKAGPAHARRLLVEAAHHYRRPPHVGVTLQRRQAGQHPRVCAVAWRAQQRLHRQWQRLHTQRRKPAGVVAVACARELSAFLWEAATMT

SEQ ID NO: 472799 - protein, 343 aa, unidentified
MNATRIGLDLAKMVFQVHGVDRDEQRVIKRQLRRSQMLTFFEQLPACKIGMEACAGAHYWARELGQMGHEVKLIAPQFVKPYVKSQKNDANDAEAICEAVGRPNMRFVAIKTVAQQDLQAVHRIRGELVKSRTAKVNQIRGLLAEYGEIVPARIESIRRAIPELQEDATNGLTPLFRRLLEGLRLDLVELDRRVGELDQEIAVAAQEDPVARRLQTVPGIGPITATALVAAVGDGRQFKRGRDLAAWLGLTPGQHSSGGKDHLLGISKRGDSYLRTLLIHGSRAVLRAVGNKSDPRSRWIAGVAARRHKNVAAVALANKNARIVWALLTRGEDYDSQHGMATA

SEQ ID NO: 472800 - protein, 380 aa, unidentified
MTTIARGTTTNHRRDQQADPDPQLDQQREPGQVVGGVDTHLDTHTAAALDPVGRLLGHATFPADPGGYAALLAWLRSFGTVVVVGVEGTGAYGAGLTRHLRAEQVQLLEIDRPDRRARRSAGKSDPLDAEAAALTALARTRTGVPKVRDGRVEALRNLRVARRSAIDQRADCQRRIKTLIVTAAEPLRARLRGLPTRQLLAACAGLRPDLTRVGDPEQATKTALRALARRHHALSEEITDLDAVIDPLVAAINPQLVALNGVGADVAGQLLVTAGENSDRVHSEAAFAMLCGVAPIPASSGRTHRHRLNRGGDRQANAALYRVVLCRLRWDPRTQAYMHRRTEQGLSKKDIIRCLKRLIAREIYYVLNPRLQPSPALQTI

SEQ ID NO: 472801 - protein, 347 aa, unidentified
MTIVEPARGVTGGVDTHLEVNVAAAIDPVGGLFGTEAFPTTPAGYQALLSWLRSFGEVRKVGVEGTGSYGAGLSKFLRTEGVAVLEVNRPNREERRRSGKSDPVDAIEAARAALGGKAKSIAKSKDGAVEGIRALLVAKRSARVARTAALVRMRHLIVTAPDQLRSRLRNLTVHALVTEAARLRPARRGDLVLTATKASLCSLARRVQGLGEELFELDARIEALLMAHCPELLACFGVGPDTAAALVVCAGDNAERLHSEPAWAHLCGVAPVPAGSGKTSGRVRVDYAGDRQANSALWRIVMVRIAHHPETKAYFARKVEEGRSKHEIIRLLKRYVAREVYRYLPRG

SEQ ID NO: 472802 - protein, 403 aa, unidentified
MVFLGIDWAEAHHDVCLLDEQGKLLGKRRVVDGLEGVRQLHELVAEQVPEPEQVVVGIETDRGLLVQSLVATGYQVYAINPLAVSRYRERHATSGAKSDPADAKLLADLVRTDRHNHRPLSLDSELAEAVKVLARTHQNLIWSRQRQLNQLRSLLREFYPAALEAFAGDLASADAIAVLERAPTPHQGRSISQGQLVSALRKAGRERNLVVKAAQIQACLRRPQLEAAARLTQAYGRSVTALVRLVRQLNQELASLEQELSASFELHPNAEIYLSLPGLGKVLGARVMAEFGDDRTRFQNPKARKNFAGTSPITKSSGKHKAVLRRFACNHRLLDACYFWAFASLRRSPGAKDYYRRLRARRQSHKQALRALANRLVGILDGCLRHRQLYREKVAWPLLEAAA

SEQ ID NO: 472803 - protein, 371 aa, unidentified
MSELPAETRPARLKVEASPRPPGARKPETELGAVSTTAVPHPDSRSGPSPHLQGRVMDEQRTVFVGIDVSKDRLDVHLRPSGEAFCVPREGKGMDDLVIRLQGLSVALVVLEATGGFEATVAAALAGVGLPLCVVNPRQIRDFARAMGRLAKTDTLDAEVIALFAERVRPQARPLREPERVHLAELVGRRRQIIEMMGMETNRGRQAIDKPLARRLARHVAYLQKELDAIDHDIGDAIKHSPAWREAEALLKSVPCIGDVTARTLLAELPELGTVSRHQVAALVGVAPINRDSGLMRGRRAIAGGRTSVRAVLYMAALTAIRRRSPFRAFYDQLTAHGRPKKVALVAVMRKLLTILNAILRDHTPWRPLNA

SEQ ID NO: 472804 - protein, 368 aa, unidentified
MKNVTTYVGIDAHKKDLFVAMLIGNEKTPVTWQLANEPRAVHRLVRKLERETPGPVRVFYEAGPCGYALQRQVTTARVSCDVVAPALIPRKPGERVKTNRRDARKLAELGRAELLTAVQPPTPEDEAVRDLARARDDAREDLQRCRHRLGKLLLRRGLHFSGRNWTRAHRQWIDTLTWTYAAERAVVDDYLLAIDHTEARLQELDARLAEIAETEPYREPVRWLRCFRGIDTLTAMLILAELHDFRRFASAPALMAYLGLVPGEHSSGEKHRRGRITRTGNTLVRRLLVETAWHYQHRPSVGVALARRRKGQPGRVIAIADKAQQRLCRRFRKLAAEHKPAPKIAVAIARELAGFLWAALQPVPAPMT

SEQ ID NO: 472805 - protein, 402 aa, unidentified
MNAVGIDVSKGKSMVAIMRPFGEIVSAPFEIKHTASDIHSLVELINSVEGESRIVMEYTGRYYEVLAHQLSKANLFVSAINPKLIKDFDNDSLRKVKSDKADAVKIARYALDKWQNLKQYNVMNELRNQLKTMNRQFGFYMKHKTAMKNNLIGILDQTYPGVNTYFDSPARSDGSQKWVDFASTYWHVDCVRKMSLNAFIDHYQNWCKRKKYNFSDVKAEEIYGAAKELVPVLPKDAITKLMIKQAVDQLNSASTTVESLRTLMNETASKLPEYPVVMAMKGVGTSLGSQLMAEIGDVSRFTHKSAITAFAGVDPGVNESGSYEQKSVPTSKRGSSDLRKTLFQVMDVLIKTHPQDDPVYQFLDKKRAQGKPYYVYMTAGANKFLRIYYGRVKEYLSSLPES

SEQ ID NO: 472806 - protein, 408 aa, unidentified
MQVYIGIDWSEDKHDVVFMNQVGVDVARLTIPHSLDGFVQLDAARRKLGLAQDECTLGLETAHNLIIEYLWSQAYQQVYVIPPSVVKSNRNRFRQSGARDDQSDGYLLADILRTDRGRLQPWHPDSLLTRQMRAKVSWIHHLTRASTRLSNRLRAVLLRYYPAALQVFSDLGTQIALEFIRTYPTPQAAARLTLPEFVGFVQQQGYSHPKKLPSRYAQLKGDYPEASLETVMIYQDEAVQLASLLLQMTRTKLDALRELQALFRQHPDYPVFSSLPGAGDLLEPALLVKFGDDRARFPTPASVQALAGTCPVTDKSGKRKVIRFRKACDREWRSLSQAWAIALVNSAKSPLAIAYFEQIRPRCHNRHHAYRCVANRWLAIAWKLWQTHQPYDEAYHFQQRMARSKAKI

SEQ ID NO: 472807 - protein, 410 aa, unidentified
MAERFVGIDVALHEHRVAVLDRDGEAVGPSFTIAASQDGVATLLRTLDARAATAAQTLIGLEASGHLWENLEAALVGAGYRVLVLNPLQTRRYRDVVRRKAKTDDIDAHVIAGLLRSGAAQASYVPDEPIQSLRELARLRARLMADRQDYLRRLVAQLDVVLPEHHAVLGDLLTARARGILAQFPTAQHLATATPRAIRRAAADAGARGFALDDATGVRDRARRSLYRGKAAAARAHVVRTLVGQLERLTTAIDEIDRAATTLLPPSEPGTGPSDTELLQTIPGIGPQTAATLLGELGPLTRFTDARALVAYVGFYPVIHQSGDRAATPRLSRVGSRIARHSLYLAAVNAVRRSGEWRTIYLRKKAQGKTGKQALVVVAVKLLHAVYAMLKHRQPYNPSRLLVASATIGT

SEQ ID NO: 472808 - protein, 403 aa, unidentified
MKEDIAKAIDQQTAAARDSAGGWSRYGAFVGLDVHKETIAVAVALPGRGEPEYRGEIANEPKALKKWLDRLGTEFGGALLLFCYEAGPCGYGLYRQLLEAGHECQVVAPSLIPKKPGERVKTDRRDALKLARLLRAGDLTAVWVPDTEQEAMRDLTRARDDMKGQERKARQQLNAFVLRQGQHWPRGKTRWTKAHYNWLESIRFEQPWLQVVLQEYIDAVKAATQRVADLTGQLLQALPDWSLAPVVDALVALRGIDKLAATVLLAELGGISRFDSPKQLMAYLGLVPSEHTTGRRRSQGAITLTGNGHARRMLVECAWSYRFPARQSMHLKRKAKDASAQAKAIAWRAQKRLCGRYRQLSQAGKNIKLVCVAIARELAGFIWDIVRQEMPRVVGRPTAAATS

SEQ ID NO: 472809 - protein, 387 aa, unidentified
MYFVGIDISKFKHDCAIVDEFGDVITPSWSFQNDREGFSLLKELLDALDGEKKIGLEATGHYGQNLKLFLENNDFSFMEFNPLLINRFVHSKSLRKTKTDSIDALMIAQYLMTVEYKPYPPSFYTFEKLKSLTRFRDSLIRQRSRQLVELTNILDKVFPEFKPFFKGRFSATALYILSHYASPEKISNMNSKSYEPLRRLSRGRFSMVDFVELKTLARNTVGSTSDYLLQEMEITIDIYNQLQSKVEEIELQIHDCVLALAPPILTIPGIGAASAAVILSEFGDLSKFNNPSKLLSFAGMEPGYFQSGTAESTGKMVKHGSSHLRYAMMNCAQTVINNEPTFAAYYAKKRAEGKEHRVALTHVAKKLLRVIYTLQTKELSYNPDLVR

SEQ ID NO: 472810 - protein, 412 aa, unidentified
MDVLYPCCAGLDVHKDSVYACVRRVGPGGAVRETVKVFGTMTPELLQLADWLAGEGATHVAMESTGVYWKPVYYLLDEHFELLLANAQQLKRVPGRKTDTQDCAWIAKLLQHGLIAASFVPPEPQRDLRELCRQRVQLGRQKAAASNRIQKVLEDANLKLGSVASDVLGKSGRAMLRGLIAGETDPEKLAALALGRLRKQLPRLRSALTGRVTEHHRFVLKLLLDEVEMIEGLMTRLEERIGAVLGPFAEAVRRWMTIPGVDVRTAQAVAAEIGTDMSRFPSECHLAAWAGMCPGNDESAGKRRSGKTPKGSPWLKQALVQAAWAASHTKNTYLSAFYRRLAARRGRKRALVALGHTILVIMYHLQRNGTDYADLGGDYFERRDKDKLTRRLLRRLEALGMKVTVESTEQAA

SEQ ID NO: 472811 - protein, 424 aa, unidentified
MKVTYKTCCGVDVHKSFLVATIITTTGGIEPSYQKKRYSTFNNSILEFKQWLLDNDCHELCMESTGKYWIPVFNLLEDEINVTIANPKWVKAVKGNKDDTKDSKWIGDLFRLGLVKGSYIPCKKIRILREFTRYRYKIVSCRSSEKNRYQNALTVCNVALDSVVSDIFGKSSTSIIDYLLEQSGNSINHEEIASKLLKSLKSKEDAVIESIEGYQMTDSQKYRMHLVRAHMDYITAEINDVDREIEKLISSDPDFENALQFLMTIPGVKRDSAITVISEIGIDMTQFSSSKRLCCWAGLTPGSNESGGKKKSVRVTRAGVYLKPALVQCAHAAVKSEKSPYYKKKYESLMKRRGKKRAIVAIARMILTAIYQMLSTGESWNPSDLYKIDIPEALLEKQKAKAIKQAMKLLQREGLYPPPEPIAS

SEQ ID NO: 472812 - protein, 397 aa, unidentified
MYIVGIDIAKRKHEAAVIDGEGTVIIKPFSFTNNCSGYNRLLAMLTKAKLPLDEVSFAMEATGHYWLALFTRLQKEGFRVQVINPVQTNSIRSFYIRQVKTDPRDALLIAEVIRFGHFSESTLHPENIYELRELCRGRHAIVSMQADVKRKVVALLDQVFPEYETAFTNMFGDTSMAILQTCPTPKELSEMPLEELCHLIEVSSHKRFRMAKAQELQALARNSFGFAMAGDVFSTMIRLYAKHLDFLKQQVREMDRKIAEIMETLDTPITTITGIGPTLGAYILSEIGDISRFSSAAKLAAYAGIDPTMRQSGEYNGVRNRMSKRGSPYLRHAIWLAASSAVLHDPALKLFFPKKRDEGKPYMASVGHACRKMVSIIYAVMRDNKAYTPYIPNEISA

SEQ ID NO: 472813 - protein, 368 aa, unidentified
MMMWTAPPKRHQVPKVVAGAPQTGRPSMDKFIRIGVDLGKNYFQLHAVGTDGAPAMNRKLSRSKTRAFFARMAPCRIGMEACGSAHYWARELGTMGHDVVLMPPAYIKPYVKRGKNDAADAAAICEAMSRPDMRFVPIKSVDQQAVLMLHKTRELLVKQRTMSANALRSHLAEFGLVVAKGIGRVDELLQLADKDPSLPEEVRETVKLLAAHLEGLARSIGAAEKKIAAASARSKTSRLLDAIPGVGPLIASAIAASVPDPSAFESGRDFAAWLGLTPRQNSSGGKTKLGAITKQGNRYIRTMLVVGCTSVLRVAGKRKGALAGWIAALRARKPERLVAVALANKLARICWAIMTTGEVFRHEVFAKA

SEQ ID NO: 472814 - protein, 421 aa, unidentified
MKKKARIVGFDCAEDEHAAVLLDVSGEFERRVDVINERGQIQESLAELMLAVGPNAQLVVVVESKRSHGRIVADVASELGCEVWQVNTVALNHYRDLEGQPRKDDEWDAYLAARMVYLRMGGCRVAIETTEEERVLSRLTRTYSRLIEDRKRQVARLRAVFLELAPEMLHASWAGPQPGSKAMLYLLERWPGFEGLERAQMRSIEKILRRCRYGSRATQVAKLIRKMARGISVPAEERSAITMELNFLVRQIRFCNESADQVYIEITHRVERHPVGQKLLEMHGNGPVITGVLVSELFPVARTSTEPKCATYAGVTPLSRKSGKSLDKDRLTQGVNKRVLHGLYTASVVAIKNSAVDRAYYQKKLRDYAGHPKPHVAAFIALSRQRHKLIFKLMTTDARYDKEILIATHLARLEQERAAAA

SEQ ID NO: 472815 - protein, 376 aa, unidentified
MEHDSTLYVGLDVHKDSITVAYAVGMGDVELFGKIGTMQIDVDRLCKRLQSKVPHIFFVYEAGPCGYGLYRRLVDKGFDCMVCAPSLIPRKPGERVKTDRRDAIKLVRSLRAGDLSAVHVPTVEDEAFRDLARAWSAAREDLKAARCRLKSFLLAHGVHYLGRPNWGPTHRRWLSTFSFDSAWQQLAFNEHRRTIEDRLAQCERLEVALREAVTDWRFYPAVLALQAMRGINFTSAIGLVSELGDLGRFEHPRQLMAWIGVTPSEHSSGGKRRQGSITKTGNSYARKLLVESAWSYRHPARVSIDIQRRHEGLPKPIIDRAWDAQLRLCRRYRKLVAKGKSAHVAIIAVARELAAFIWDVGRLGIALAVPHNAQTA

SEQ ID NO: 472816 - protein, 352 aa, unidentified
MIIIGVDFHPEFQQIASVDTDTGEFQEKRLAHREEAETFYRALAGQKVRVGMEASGHARWFERLVAELQFELWIGDAAEIRTKRVRKQKTDRQDAQLILRLLLEDRFPQIWVPSWENRDLRQLLWHRHRMVQARTRIMNQLQAVALNEGLRCKKRLWRERGRQQLESFRLAPWASRRRRDLLELMDRLNPTITELTQAIEQEVEKCPEAQCLMTHPGVGALTALAFVLIIGKAERFGCGKQVASYLGLVPLEESSGNRRRLGHITKQGSSMLRFLLVEAAQVTVRSVPEWRSKYLHLMMRRGRKTAKVAMARRLAVRLYWMWRQGWDYQQWNKFGSHAGQPGNRDAVQQNTE

SEQ ID NO: 472817 - protein, 335 aa, unidentified
MEWTVAIGVDTHKEVHVAVALDALGAQLESREIATTSAGYRSLLSWAQELGVPAFAVEGTGSYGAGLVRFLERAGVNVFECERPRRQERRRGKSDLIDAALAARRLLSGERLSLPRGGGRREDLRLLLLERRGAMQARNAALNQLNALLVTAPDQMRERLGAFSGDRLARAAARLRPSAEVLNGVLRRLGRRVERLSSEVAEAERALAALVAEVAPTLLEECGVGPVCGAQLLVSSGDPGRMRSEASFAALAGTSPVEASSGKQRRHRLNRGGDRQLNWALHVIALARIRHHVETAAYYDRLLAAGKTTREARRCVKRALARHFYRHLREMPTLP

SEQ ID NO: 472818 - protein, 286 aa, unidentified
MDIGIDPHKLSHTASAVDSATNTSVASLRVDASLAGYRELMRWAGQFEDRRWAIENARGLGRHLAQWLLARDETVVDVPCTATARVRELSRGGRRKNDVIDASAAACVAAAQGDASPVLADDHTVICAMLEERRSNVSGQRVRVANQLHAVLRELVAGGAPRQISAGSASALLRSVRPANAVEQCRKQLARHLVKDLKALDSSLVDIEKRMAEAVTEIGSRLCEIDGVAAVTAARLIGRTGPASRFRNEHAFAAYVGTAPIEIASGDQSHHRSHDRAIAGSTPQST

SEQ ID NO: 472819 - protein, 350 aa, unidentified
MQGNGRWIGLDLSKKTYEMCYFDQKGKVGRSGGETTKGGRAKLYAKLKAEDIVAMEVNSLAFVMEKEMRTIGCTVVILDASQLSIIYSSTKKTDKEDALKLARLVKIYEKEDLPIVDVPTEKEYYRRKLTKECKTLKDDRTQEINRLHALFLQCGITTMKRSNLQTDANRQKVLPQLFGYEVGQAKRVCERLTLLEAQIKELEQTITKECKADKDIERLKTIPGVGDKTALAFAAYVGDGKRFNNGDEVANYLGLVPRVDCSGSINRYGHITKKGNRIVRALLYQAAWSIVRSKHGGALKAKYFYMTEHGKGKKISITAIARKMAKLMYLIMKNKGEEYKELPAPASRAG

SEQ ID NO: 472820 - protein, 352 aa, unidentified
MDYFAGLDVSLEMTSICIVDADGVVMKEAKVASEPDDLVAFFAQCGMAMKRIGLEAGAPSQWLYGGMAEAGLPVVCIETRHAKAALSAMPNKTDRNDARGIANIMRTGWFRAVHVKTQTAQELRFLLVARQTLVRKLMDIELAIRGMLRSFGFKMGVISKHNLEARVLELAGDRTMLMRALKPMLTARRALAVEYANLQKAAMDFARHDDVCRRLMTVPGVGPIVALTYRATIDVPQRFRRSRSVGAHLGLTPRAHQSGEVDWNGRVSKSGDAMARAALYEAAHVLLIRVKRWSSLKAWGMRLVKNRGHKRAVTALARRMAVLMHRIWVEGTTFIWKTGDGQAITPKSVPAV

SEQ ID NO: 472821 - protein, 363 aa, unidentified
MKQGITFVGLDTHKESIPVAMLLPEQVKPVEWTVTNERASVKRMVRKVQRQAPGEVRFCYEAGPCGYALQRWIRDLGAVCVVVAPSLIPRKPGERIKTDRRDARKLAELYRASLVHPPTEADEAVRDLCRAREGAHDDLVRCRHRVTKLLLRRGWIWRGGKRAWSQGHRLWLRSLRFEQAADQVVLEDYLLAIEQVEERLRELEEHIEVVSQHAPYAEAVGALRCFRGIDTITAMTIVAELHSFMRFDSPRGLMAYLGLVPSEHSSGGKRRQGALTLAGNSHVRRLLIEAAWHYRHRPSVVHLARRRQGQPARVIALADKAMIRLHRRFQRMLAKGKPAPKIAAAVARELTGFIWAALRPMAA

SEQ ID NO: 472822 - protein, 404 aa, unidentified
MNNVAGIDVSKGKSMVSVLRPFGEVVAKPFSVGHTGSELKELADYLKSLDGETRVVMEHTGRYYEPVARFLHEEGIFVSTVNPKLIKDYGNNTLRKVKTDKADARKIARYGLDNWVELRQHTPMDTIRMQLKTLNRQQGLYSKTKTMMKNNLIALLDQTYPGVNALFESPVREDGSQKWVDFATAFWHVDCVRSMSSAAFIQRYQKWCKRHGYNFSQSRAADIHAGAQDLIAMLPKDALTKTMVRQAIDALNAVSTSLERLKAEMRTLAAQLPEYPVVMAMRGVGDSLGPQLMAELGDVTRFTHRNAITAFAGVDPGADQSGTHEAKSTRTSKSGPPELRKALFLVMDCLLKTMPQDDPVYCFMDKKRAEGKPYLVYMTAGANKFLRIYYGRVKEYLASLESAD

SEQ ID NO: 472823 - protein, 407 aa, unidentified
MRLFVGDDWAEDHHDVELMDAAGRVLARKRLPEGAAGMARLHELTGQHLGEDAEDAEVVIGIETDRGPWVAALVAAGYVVYAVNPLQASRYRERHGVSGAKSDRGDSHMLADMVRTDSHQLRAVAGDSPDAAAVKVVARTHKTLIWERTRQVQRLRYQLREYFPAALAAFEDLDAPDALELLTRAPDPARARRLTRAQVSAALKRARRRDIPAKATAILAALRSAQLGQPEAVTAAYAVTARSLIAVITVLNEQVKTLQGQVEAVFGRHPDAEIYLSQPGLGPILGAPVLGEFGDDPHRYASGKARKNYAATSPLTRASGKKKIIAARFIRNDRLTDALMAQAFTALSTSAGARALYDAERARGTEHNPALRKVANRLVGILHGCLKTRTLYNEATAWPHRENRLAA

SEQ ID NO: 472824 - protein, 389 aa, unidentified
MLCVGIDVAKRKHDCCIIDSDALKTVESFTFPNSREGFDMLLSKISELGIPKDKIRVGLEATGHYSSNLAHFISEHDLPLLTFNPLLTNRYKQGFSLRKTKTDKVDACAIAQMIVSGKGSQTYSSSLYHNEEMKSLSRYRSQTMQKCSKLKISVSRLVTILFPELEGLTSSIHLASIYALLKAYPGHEQIAHCSMKQLTRLLSDASQGRFDKNKALEIHQAACRSIGKVSLSASMELVHTITDIEVLKQHIAEIDEKLKEMVDQEESSIIDIPGIGYTLCASILGEVGDFKRFPDVDKLLAYAGMSPSKHDSGDYHSKHNKMEKRGSPYLRKTLYLAARLVAQNVPKFKEYLEKKLSEHKPYKVALSHVAKKLIRLIYRLGISGCPYLA

SEQ ID NO: 472825 - protein, 310 aa, unidentified
MNKIHAGVDVSKATLDVAVTSQKEVRSFPNNESGVKQIASYLKEQAVALAVMEATGGLEKLLAASLVQESVPVVVVNPRQVRDFARAKGKLAKTDTIDAEILAEFAREIHPEVRPIPDKQTDEIKALLVRRHQLIDMITMETNRLWSADMRVKPSIEEHIGWLKQELKNMDKDMEKKIQNSPVWREKDNLLQSVPGVGQVLSMTLLGTLPELGHLNRKQIAALAGVAPFNRDSGRLRGKRTTKGGRVRVRTALYMATLVATRFNPVIKGFYNRLLEMGKVKKVALVACMRKLLTILNAMVREHRPWEYAN

SEQ ID NO: 472826 - protein, 368 aa, unidentified
MKTNQAVSSGSSNQASLVNYVNRVLKLGLDVHYRQVTVAMQEDGGRIKAAGKMRHVDFLNWVQKKLQEGWQIYSCYEAGASGYWLHRELVKLGVKNLVVVPKAMGQGGKKQKTDKRDAGELCDCLDRYLRGQDKALSVVAVPTEEQEEKRALIRYHRQIMADRGRCEARGKGLLCAQGIEVHGRWWHSNAWLEVQSDPRLKDWMKEQLIGWRNKILSTDEEQGGLRERIAALAPAILPKGVGAYSAAVLEYEMRGFERFTNRRQVGSMTGLCPGIHQSDGRGKEGSINRCGIGIVRWTLVEMVWRLMIWQPQYPPVRRLATGLVKGKRARKRLVVQAARRLAIDLWRLSTGQTTPEKLGLIMHDTSVK

SEQ ID NO: 472827 - protein, 321 aa, unidentified
MERSAQLNFGVDVGKHELVIASSVDQRITKIANRPDAIWRWLGTLPADCRVGMEATGIYHQQLADLAHAAGHQVYVFNPRAVAVYLKSLRSRGKTDILDARGIARYVQNEADEHPLYTPPSATQRSVQTLLHRRHQVVKQRAALRMSCQSLDESLRAPFEPLLIAFDQCVREIDSQLRQRVRADEQLLAQATHLRSIPGVGPLISTALALRLSRHPYRNSDALVAALGMDPRPHQSGVSEAPRHLSKQGNGEERRLIYMAAVSACRCALWRKRFDQLIARGLPSTAAHCIIARKLLRIAFAINKNCQLYRTEVLGDDCRAT

SEQ ID NO: 472828 - protein, 391 aa, unidentified
MFVGIDIAKMDHVACAVDEHGEKLTRPLPFRNDEGGFAKLESWIEGLAEDAAEVFVGMEATGHYWMACFSFLTAAGYACCVVNPMQVRAVRELRSMPRVKNDRVDSWLIAETLRVGDYEQTRLADDDVQSLRMLTRYRQSLKQELATVKTQCICVMDACFPEYAALFSDMFGAASLAVLASKPTPAELSRVRAGTLAETLSEASHGRLGAEKAAELKAAARSSVGVRLGEDAASFQVKSMAAQVEFLNATIAKVDAEVRALLDRVEPLIVTIPGVSYTTGAQIVAEIGDVRRFKNAAAIVKYAGLNSGVSQSGKFEASGEPITKKGSPYLRRALWLAANRARQHDPRMRAYYDKLREAGKCHRVAVTACARKLCHVVFAVMRDRVPYDPER

SEQ ID NO: 472829 - protein, 418 aa, unidentified
MESIHDRVAGLDVHKRSVVCCIRRQSGGKVQRECRSFETTTTGLEALLAWLEEAGCTHVAMEATGVYWRPVWTILSDGDFELVLANAAHIKNVPGRKTDMNDAMWIADLLACGLIRASFVPDPEMQDLRTLLRTRKQFVREQTRHVQRIQKTLEQGNIKLDAVISDILGISGRRMIEAMIAGESNPQTLAALADRRLKAKPDELRETLHGRLNQTHRFLLRTHLKQWDELDAAIVEIDRQVDSLIAGMQQAGRFRLLIALLCKMPGISKLSAISILAEIGIDMSRFRTAGHLVAWAGLCPGQNHSAGKRKSSRLRKGAPWLKTMLVQCAWAAKRQKNSYYKAQFYRLSGRRGPQKAICAVAASILTAIYHIILRGTPYQDLGADYFDRRSTEAKANRLVAQLTKLGYDVQIQPLAAAA

SEQ ID NO: 472830 - protein, 314 aa, unidentified
MSSSLYIGIDVAKAQLDVACRPTDARWTIPHTTGGIARLVRRLGRLRPTLIVLEATGGLELHVASELAAAALPVAVVNPRQVRHFAKATGQLAKTDALDAAVLAQFAAAVQPEARPLPDAATQILGALVTRRRQLLAMLTAEQNRRSRASRALHGEIQLHVQWLEERVAALDADLNQQIRGSALWREHDDLLQSMPGIGPVVSRTLLAELPELGTLDRRAIAALVGVAPLNRDSGTWRGRRRIGGGRGHVRAVLYMAAVTAVRCNPMIQSFYQRLRGAGKTGKVALTACMRKMLTTLNAIMKHKVPWHGALQQS

SEQ ID NO: 472831 - protein, 313 aa, unidentified
MVFVGIDVSKQRLDVHVRPSNDQWSTDNDSKGHAQLVKQLTAKSPTLVVLEATGGYQNAIAAELCAAKINVAVVNPRQTRDFAKATGTLAKTDSIDAAVLSLFAERVRPEPREIPDEVALEIQALVTRRRQLVDMRSAEKNRLSTCTVGPIRESIEAIIRVLSQQINALDDDLDTTLRGSPVWRAKEDLLSSVPGVGTATTRTLLGHLPELGRLNRREIAALVGVAPFNDDSGKRRGQRRIRGGRSEVRGVLYMATLVATRHNPTIRAFYQRLLAAGKLPMVALLACTRKLLTILNAMMRSNQSWRLDAPKAA

SEQ ID NO: 472832 - protein, 358 aa, unidentified
MNRNTGMSAGQIIGTLNGLQVMGLDIAKHVFQLHTVDMGTGEIANVQIKRAKVLEYFVNKPNSLIAIEACGGAHHWARELTALGHSVRLLHAKIVRPFVSGNKTDATDARAIWLAVQQPGVKFVGIKTAAQQATLTLHRQRELLMKMRTMQTNALRGLLYEFGATFAQGRKALFKDIERALEELSTQLPQMVRDSLREQVGRIKEMGDAMLEIEKRLALQLKADPHMQRIAQIPGVGLLTATAAIATMGEASAFKSGREFCAWLGLVPSQTGTGGKVRLGGISKRGDTYVRTLLIHGARSVLSHAKEPSPWLQQIKQRRPANVVIVAQAAKMARTIWAVTAKEQSYQQGFHSVRPQAF

SEQ ID NO: 472833 - protein, 369 aa, unidentified
MGEYSEAFVAFDVAKIKHAVAVAEGGRTGEVRFLGEIENREGPIERTVKKLAGRYGRLHFCFEAGPTGYGLYRQLQALGHDCMVVAPALIPKRPGERVKTNRWDAVTLARLHRAGELTGVWVPDAVHEAVRDLVRAREAAADDLRRKRQQLLSFLLRHSRIYSGSGHWTLAHRRWLANQAFEHAAQQIVFQDGIDAIEDAIARRRRLGEQLIAIMPSWSMAPVVEAYQAMRGASFLVAVTFAAEIGDVRRFDNPRQLMSFLGLVPAESSTGDTVRRKGLTLAGNRRARRALVEAAWTYRYPARVSETLRARLEGLPKAVRDIAWKAQIRLCARYRRLSATGKKLPVVVAAIAREMAAFLWAIGREVAPG

SEQ ID NO: 472834 - protein, 345 aa, unidentified
MKKIAIGIDFAKEKFDVTVKNVETGASEYGQYPNTPAGGRSMVKMVRKFAKGIDSSDWLFCGEDTGYYSQTIARYLTEKGYFMWLQNPYSIKHSEGDIRRGKNDKADSAAIADYAHRYEDKARKWELPSKVSEELHLLLTRRDAYVRAKRVIQSGANEIPRRDKQGESVSLIKSSAKRLLREIDEEIELLEAQMEKIVREEEEMQKSYEILRSFTGIGLVNSMCFIAYTDNFRKFDLNARKIATFWGVAPFGKDSGKTVHVDPHVSQFCNHWLKAIISNAANSALKWNPIIIAYNERLEKRGKCEGIRRNNVKNKIIQTVVAMIRKGEKFDPEFKFTKETVATEC

SEQ ID NO: 472835 - protein, 272 aa, unidentified
MENTITIGIDLGDKFHIAVVFDGEGNELETAQVTNTKAGVSKFFQRYKHARVAMEAGTHSPWISRLLDEMGLTVYVGNPRKLRCIWDSTDKSDARDARILGMVCRIEPRLLHPLKHCSSLAQTDLASIKSRDMLVKSRTQLINHVRGLVKANGERLPKCSAASFVKNVSPCTPELRSALDSVFQTIFHLNEQINVLDLQIEQLSMERYPETQLLRQISGVGPITALCFVLTIEDPACFVKSRQVGPFLGLTPRRDQSGNTDKQLQETLICAD

SEQ ID NO: 472836 - protein, 445 aa, unidentified
MPVVNLAAAGIDVGSRSHFVAIGQNTEDVKEFGVYTEDLHTLCKHLVASGITTVALESTGSYWQPLFVLLQQYNLDPILVNGKFTKNVKGRKTDVQDCQWIQKLHTMGMLEGSFIPDLFTEQVRQYYRHRQTLVANAASYINKMQKALRLINIRLDTALRDVMGRSGKDIIEAILKGERDAKVLASLAQPTVKTSKEEIVAALTGDWREEYIFELRQCYEIYQHYHKKIDECDEVIKQIVTAEVQRKQTEENLAKAEGVKIKKKKARKNEARINIQQLAVDLTGGVDISRIEGVGLGLVLCITSETGLDLKAFPTAKHFSSWLSVAPDIKKTGGKVINSRTRKGKGRLARALMHAANAIGNMKTGNYLVHFFKRIERRRGRPTAIIATANKLSKIIWNMLVKKQTYNPIMPKEYLDINRKREVKNIQRKIKQLNIQEEEIVFATP

SEQ ID NO: 472837 - protein, 346 aa, unidentified
MMIIGCDFHPSWQQISWVDSETGDCGEQKLVHAAGDARLFYQRLAAPVLIGMEATGNSQWFIELVEDLGHEIWIGDAAQIRASYVRKQKTDKRDAAHILKLVVEGRFPRLWTPDREQRDLRQLVLHRHKLVIIRSRVKNELQHLSLNKGVQRKHKLWSQAGQKMLRELPLKPWAACRREDLLGLLAMLNQQVGTLDDAVQQAAEENPQAKLLMTQPGVGPNTALAYVLTIGDVGRFRRGKQVASYLGLIPREESSGGRQKLGAITKQGNRMLRALLVEAAQVAVQHDPGLRKQYLHRCHQKPKGVAKVATARKLAVRLYWMLRSNVAYPEIVGIESSSGLPLVGAS

SEQ ID NO: 472838 - protein, 480 aa, unidentified
MQKTSEGTMQTTIPGVIACGMDVHRDKIDACVRIGDGSAEGNVIFKTFSTMRKSLFGLRDWLASLGCFKVLMESTGVYWMPVYNILEEVAGMNVGIGNSRDLKNSPGRPKTDKEDAKWLSRLCMFGLVLKSFVVERPFRALREYTRYHKKLVQERARQINRIEKLLQMNGFKLSSVLSDITGVSGRRILKKLVEKGKLSIFDIQIELDRRCKSTPEEIEIAINGIMKPTSRVLLRFQIKKLESCDNEIDEVYDLMLKLSDEYRGVIRIIESIPGMSTLSAIYILAEIGIDLSSFKTANHLAAWAGLAPKDNQSADKARPKKTKKANQYIKSMMIQCAWAAIKTRDTRLSLWYWRNMQRLGKKKAITAVARKLLCYIYAMLKTGALYDESLDVAYANIIKAKKLDAAQKIVGSRKVDNKNAAKSGNNVAQFATDQSSFLAEQNLITKQVEGLKQSEGGIESPSKTESPKKKGRPKKVTALD

SEQ ID NO: 472839 - protein, 348 aa, unidentified
MEAPLIFVGIDVSKAQLDVAIRPSAQSLSVTNDRAGIKSLIKHLKKLRPQLVVLEATGGLERQVLSALIAGEIPVVMANPRHIRDFAKSIGQLAKTDRIDASVIAHYAEAVRPKPRPLPDEASLELRALSARRRQVVDMIVAEKNRLATASKVVKKRITAHIAYLEQELNDADQDLDRFIEKNAAWKENQQILCSTPSIGPVSSRTLLVELPELGALDRKKISALVGVAPFPRDSGTLKGRRTIWGGRASVRSALFMATVVATRFNPVIRDFYKRLKAKGKPSKVCLVACMHKLLTILNAMIKNKIRWSENLLTRPLDMKHSCYISGLRLRLARSCTGEFIPSADCGF

SEQ ID NO: 472840 - protein, 352 aa, unidentified
MEIIALDAHKRYSYVCVQDSEGNFLCEGRINHAKGQVAGFLSQWTPGTSVAVETVGNWYWIVDEIEQAGMNPRLVHAHKAKLMLGSINKTDKLDARGLNKLQRAGTLPCVWVAPGEIRDNRELPRTRMVFANLRTRLKNRIHSVFDKYGLHTDFEGITDIFGRKGREQVALSIKQLPSETRYTLRCLLRELDMVEGQIQRIERRMKKVFSKTEQVKRLMTIPGIGFILAVAISNEIGDISRFAASQRLASYAGTVPRVHSSGGHIRYGKLRSDVNHYLKWAYSEAGNSIAVNHKRLPFRHTSKLYRRIRAKKGHAKAVGAVGRHLAEASFWILSRNEDYKEPGSKLFSSTAV

SEQ ID NO: 472841 - protein, 329 aa, unidentified
MTTNPPQIVFNHIVAFEVSKEKLVVHTLPDDGQWTIDNKPQAVRRLIKSEIKRNRKKQLGRMLVICEATGGYERHVLDVALEMNLSVHRAHGTRVRHFGHYCGLLAKTDPIDARLIGQYGLKTENIRLYSPPPPDTTALRALHARRTEIQQMLIAETSRLDHAQHKSVLKSLKAHIASLKAALAAIEADIAQLVEGSEMLRKKVALMQTVIGIGPISAMVVLAYLPDIGQLTKGQAARLAGLAPINNDSGKKRGARHVEAGRTAIRRALYMAAGVAMRANPILKAFSDRLRGKGYPFKYVVTAVMRKLIVILNAVLRDSESWKGAQMVA

SEQ ID NO: 472842 - protein, 371 aa, unidentified
MKNTIKYVGLDVSKEKIAVAIADEGRDPARYHGAIAHTPDAVGRLIRKLKSPEVTLEVCYEAGPTGYDLYRWLTKMGISCTVIAPSRIPQRSGDAIKTDRRDAERLAQLHRAGELTAIHVPTPELEALRDLIRARENAREELHRARQHLVHFLLRHQIHTPEGMKKRWTKRYRLWLSTLTFEHTAQERVFTEMQQQLREVEERIKRLEEAMRKEAEICPYASVIQALQGLRGIALLTAMTLVVEIGNFERFRSPAQLMSYLGLVPRESSTGPKTRRGRLTKTGNASVRRALVESAWSYRYRPAVKGDLEKRLEGQSAHVQETSWKAQERLHKKYVQMVKRGKHRNLVIAAVGRELVGFIWCIAVKAEAQMA

SEQ ID NO: 472843 - protein, 341 aa, unidentified
MEQATTIGLDIAKHVFQLHGADAAGHVLFRKRITRVKLLGFLAAQTRCVVAMEACAGAHYWAREIAKLGHHVRLIAPAYVKPFIKRQKNDAADAEAICEAAQRPSMRFVPVKTEEQQANGIVFRARDLLVRQRTQCVNALRGHLMEYGYVFPKGITHVEALVALVEDLQSSLPDSVRVILKLLVDTFTALEAQIAVLDAEINQRSKSDPTARRLMTIPGVGPITSTAITALVPAAEGFPAGRDFAAWLGLTPLQKSTGGKQKLGAVSKRGERTIRRLLIIGASAVVQQASRRGAPKGSWLAQMLARKPKMLVTVALANKMARIIWALLVKGGTYRTPVAAA

SEQ ID NO: 472844 - protein, 408 aa, unidentified
MQLFVGVDWAEDHHDVCVMDTDGQVRSKGRVSNDLAGIAKIHDLIGRAIPAEFDDDPEVIVGIETDRGLLVRALVAVGYRVLAVNPLGVDRYRDRSRVSGAKSDPGDARVLADMVRPDAHQPRAVAADSDLAEAIKLVARSHQSAIWSRRRLANQVRSALREFYPAAQLAFEDLTHSDAVSVLAIAPTPELGKGLSLSKIASALRRGGRQLNVDKKAAAVQAAVRTDQRTQPPVVADAYGAIVASLAKVIAAHNTQIAELEEVLEAHFSQHPDADILRSLPGLGVVTGARVLGEFGDDPNRYDTAKGRRNYAGTSPLTVASGTRRVVRARHIRNRRLADALYWWAFNAINRSPGARALYDHRRALGDTHSGALRVVSNRLVAILHGCLRHRTLYDEHTAWAHRNDIAA

SEQ ID NO: 472845 - protein, 363 aa, unidentified
MFTERTSVGLDVHARSVAAAAIDGVTGELFQTKLTPSYEHIWSWLSNLPGPIAVAYEAGPTGFGLYRHLTAAGLRCEVVAPSKLQKPAGDRVKTDAKDAVHLARLLRIDEITTVSIPTVDQEAARDLVRAREDCRGDLMRARHRLSKLLLRHGIVYYGGRAWTGKHDAWLRTEALAQLSARATRLTFDSDYETVLVTKARRDRLDAAIEEMAATSEFTPLVRRLGCLRGVGTLTGFALAVEIGDWHRFTGNTIGSFVGLVPSEHSSGQSKAQGSVTKTGNGHARRLLVEAAWHHRPRYTVGKTMRDRWDLAPAAARVRGDEGNRRLHHRWVKFIDRRKRGTIANVAIARELAGWCWSLAVLED

SEQ ID NO: 472846 - protein, 360 aa, unidentified
MSFNGTSVGLDVHALSVVAHAVDEQTGRVERARLCPDHGEILDWLHRLRAPVRVAYEAGPTGFGLARALADAQIDCVVAAPSKLIRPAGDRVKTDARDAAHLTRLLRLGEITAVTVPEADVEAVRDLVRAREDARADLMRVRHRLSKLLLRQGRVYSGGQAWNGVHETWLRRQRFDDAHTTAAFDHHFDAVLSTTAARDRLDEQIVALAASPRWADPVDRLGCLRGISALTGLALTVEIGDWTRFTGASIGAYVGLVPTEYSSGTSRVQGSITKAGNAHVRRLLIEAAWHHRSSYRNPGPTMRARWAKVDPALKARGHAGNRRMHQQWCRFLDRRKNPLVANVAIARELAGWCWSLATLD

SEQ ID NO: 472847 - protein, 355 aa, unidentified
MTHSSVSAIPTITIGLDVGDRFSHYCELDQAGAVRAEGRMQTTADALQRHFAHCGRARIVLEVGTHSPWMSRLLEDLGHDVIVANARRVRLIYSNDSKSDRVDAEMLARVGRMDVRLLHPVRHRGPEVQTDLALLRSRDCLVRARTQLINHVRGATKSVGARISSCSAPAFAGRAHAEVPDTLRPALEPLIELIAVLSQQIRSADREIERHCDERYPETRRLRQIKGVGPITSLCYVLTLENPARFKSGRSVGAYLGLRPRQNDSGDRSPQLRITKRGDAMLRRLLVNSAQYVLGPFGPDCDLRRWGLALAQRGGANAKKRAVVAVARKLAQVLYALWVQDTDYEPFRSLDQAAA

SEQ ID NO: 472848 - protein, 365 aa, unidentified
MNNKTITGNGIGQASLVNYVNRVLNLGLDVHYRQVTVAMQEDGGRIKAAGKMGYMDFLNWVRKKLAEGWEIHSCYEAGASGYWLHRELAKLGVKNLVVVPKAMGQGGKKQKTDKRDAGELCDCLDRYLRGQDKALSVVRVPSEEQEQKRALIRYHRQMMADRGRCEARGKGLLCAQGIQVDGRWWHSNGWLEVQSDPRLKDWMKEQLIGWRNKILSTDEEQGALRERIAALAPAILPKGVGAYSAAVLHYEMRGFERFSNRRQVGSMTGLCPGIHQSDGRGKEGSINRCGIGIVRWTLVEMVWRLMIWQPQYPPVRRLATGLVKGKRARKRLVVQAARRLAIDLWRLSTGQTTPEKLGLIMHCAK

SEQ ID NO: 472849 - protein, 408 aa, unidentified
MNAVGIDVSKGKSMVAALRPMGEVALLPREFLHTEVGLEQMAYAITTLGEDTRVIIEATGRYHEPVAAALHKYGIYVCVLNPLYIKQSGGGSIRKVKTDKADAMKIAKYGLDNWVDLREYTPMDTVRQQLKLCSRQYNLYMKTVVSLQNNLISLTDKTFPGVNELFSSPERADGHQKWVDFVMTFWHCDCICRVSEKAFTERYQKWCKRKGYHFSTEKALDLYAGSCGHFTTLPKNDNTKLLITTAAQQLLAGKMTLAALRAEMTRLAMQLPEYNTVRAMYGVGETTAAQLMAEIGDVRRFPRRSSIVGFAGVDPAVDQSGKHSAKSVPTAKRGSPHLRKTLYQIVCTYLRKAPANELVYQFLEKKRAEGKPYFVYMTADQNKFLRIYYARVKECLAAFDAQQDTTQS

SEQ ID NO: 472850 - protein, 320 aa, unidentified
MDFLKYGLGIDMAMEKFNACISTIDCQQQVMIRAQCSFNNNKKGFEAFSLWVTKNAKLPIPVVYLMEATGIYYEQLAWFLHNKSCSVSVVLPNKARKYKEALGLRSKNDRIDAKGLSHMACEQNNTRWKPLTGNIYFLRLLTRQIQAVAEQLTVFKNQLHALQYGMYRDKGIEKMYAKQINLLQKNKQLLQLKLEQVVQADQILKNKFKNICRIKGLGLQNLAVIVAETNGFAGFENISQLVSYAGYDVVENQSGKRAGKTKISKKGNHRIRRCLHFPAFNMITYQVAPFKNLYERVYAKNKTNSMDYLTDALISFLWKW

SEQ ID NO: 472851 - protein, 353 aa, unidentified
MAIVADQYDFVIGVDTHAASHTLALITAGTGAVGQQAQFPTSPSGLRRAVDWIERHTHQSPTLIVIDGAGSYGATFTEQLSAAGLTVAEAPDVAATTRRRRGKSDAVDAVAMTQAARSLDINELCWPRAGGDRTALRVLTVAREQMSGERTRAVNALTALLRTVDLGIDARRALTTTTIATVAAWRTRSDNATLAVCRAEAIRLARRIRALDAELAANHTALHEAVTAQAPQLLALPGVGAVVAATVLLAWSHPGRVRSEAAFAALAGASPLPASSGNTTRYRLNRGGDRRLNRALYTVALVRMGHDPRTRDYVTRRTREGRTKREIMRSLKRYISRQLFRTLNGTHPATSTT

SEQ ID NO: 472852 - protein, 356 aa, unidentified
MKYVGIDMHKKHCQAAVLDEDGELVDQARFLNRKKSIKEFAVKLLTFRDDVKAVVESTGNLWIQIYDILEKYGIDVSLSNPGKTRLIAEAKNKTDKVDAKILARLLRADMLFTCYVPGEEVRNRREFLRARQDFVKNKTQVKNRIHGILDKHGLRFPGTPYSKKSIVWLRKQDLGFMDNAVVKGQLALLETLDEQIRVLEDKIAVMGMEDPQVKLLMTMPGIGFFTASMLVAEIGDINRFGNDKKISSWAGLAPRIHQSGETAHIGRVGQGNKRVSGLLVQCAHNARRYDPRFKRFYDRYSKRSGKGKALVAVAHEMIRIVYFMLKRNEPYRGENVELTTRKLKSMKYRASIGLQI

SEQ ID NO: 472853 - protein, 372 aa, unidentified
MQDDSEVYIGLDTSKLKIAVALASAGRGGEVRFFGDIDSTPEAVEGLVRKLAKRHQRLSFAYEAGPTGYGLQRQIVALGHDCAVVAPSLIPKRPGERVKTNRRDALTLAKLHRAGELTPIWIPDPAHEAIRELVRAREAAMEDLRAKRQHLQSFLLRHGRVYTGRTAWSRAHTRWLGELRFAHPAQHLVLAEYRQAIVDAEKRLEGLSQQVAEMIPTWSMAPVIAAYQAMRGIALLAAVTFAAEVGDVRRFDTPRQLMAYLGLVPSESSTGEQVRRGGITKAGNRRVRRVLIEGAWTYRFPARKSRKLEERQANLPQAVRDIAWKAQRRLCGRYRKLMDRGKLKAVVTTAIAREVAAFLWAIGREVEPLRVS

SEQ ID NO: 472854 - protein, 352 aa, unidentified
MHATTYGLDVAKRVFQMHWVDNESGEIVNRRFGRDDLIQYLSRQSPARVALEACGSAHWWARKIKTLGHDVVLLHAKFIRPFVQTNKTDASDARAIWTAVQQPGMRTVAAKSEEQQTMLSLHRIRSLLVKFRTMQVNQLRGLLYEFGASFRTGRVAGLAEIRARMTELEEALPGAMMSCLQDQLRRIDGLQAEIHQLEQRLGAWQKQDAACRAIAEVPGIGKLTATALVATMGDARTFKSGREFAAFLGLVPRQSGTGGKVRLGAMSKRGDPYLRTLLIHGARSVLCHIKVPTPWQKAIQARRPTNVAAVAVASKMARTAWAIPCTRSGLPTRPREREAGIARRIDVELVGC

SEQ ID NO: 472855 - protein, 341 aa, unidentified
MKNLFIGVDFSKEKVDVAIIFADGLTETAARVFNEFKTTVSGYKQLVKWVEQNSYGIDSSLWLFCGENTGDYSKGLCNFLYGKGYDMWLENAKSIKDASGLRRLKSDRADASMIAEYAMRNYDKAVMYEPLSESLAQLRELFLYRQMVVRHRCSFQVRRGEKKLTMEKSPTKTMISQSGRHIVSELNKEVEKIDKRIAELIKSDEELTEVFTIVTSVPGIGTQNAVCLMVYTDNFRRFNYDSRKIACYYGIAPFGKDSGTSVHSDPHVHYMANRQIKAMLTQAALAAVNFNPIMARYYMRLVERGKKKQVALNNVKNKLVHLITAMVRNRQLFSPEYKISA

SEQ ID NO: 472856 - protein, 447 aa, unidentified
MTKFKEHGKSFAAHIGLDWADKKHFWTMQTADGKRSRGELKHTPEAIDAWAAELAERFGGRPVAITLEQARGALIAILSKYAHLHLFVVDPSRLNHYRKSVSPSGAKSDPVDGDLILDFQLKHPELLRCLEPDTVETRSLQFLTEQRRDLVNQHTGQVQIFNSWLKQVFPQILEWFDDVSTPLVGDLLKRWPELAKLKKARPETLLQFFHDHNCRSVERNQQRLEAIRTAVTATHDAALLKAANLMIQTSIQLLATLRTAIEQFECQIQAVFATHPDRFIVESFPGAGPALEPRLIAALGTDRSRFQSAADMACCFGIAPVTESSGNARWVHWRWACSKFVRQTFHEWAACTVRQEGWARDHYERQRAKGKGHHAAVRSVAYKWIRILYRCWRDRVPYSEQRYLEALRTHGAAKGKPAANAAEPSIGLPAVQWKNCGGFSKPTKFSS

SEQ ID NO: 472857 - protein, 344 aa, unidentified
MESELFVGLDVHKKSVAATVLDREGNRVDQSSFGSRDSELISYLDALPGRKHVVLEACNVWEHFYDAATSTDAEVTLAHPYRVRLISEASLKSDKVDSESLAELLRLRGIPMAYAPDPEIRALRQLVRDRAFYKREESGIKSHIYSALLRKGIEYDDGLLGQKRKREELRSYQLPEVDRGLDVLNRFDELTQTLDEEIHQASLKSKEAQLLETIPGIGEFTAVALVAELCPIDRFPNIEKLCSYAGLVPTNHQSGESSYQGHLKTDSNHLVKWLLVEASWSHRQWADKSSDVTKVARRVSRRSGKQKGNVAGAHKLLKIVYAVLKRGTPYTPDRPSFGVGAAES

SEQ ID NO: 472858 - protein, 378 aa, unidentified
MNRIIKIGMDVHTTNYTLCIFEPSFEHDGTVHCITQVKPEIKNIIHVIEAFKKKHENEELNIVCGYEAGCLGYSLYHELKEKGMECVILAPTTMKTEKGGRKLKNDYRDAKMIAECLAYGGYSAVHVPTELDNSVKEFIRMRDDIKENLKSIKQQIIAFLTRNGKQFNGKSYWTKKHIDWINAISFSEPLLLDTLKEYMIEYNHLCDRVETLDKQIEEISLKEEYVEKVQQLQCLIGIKTHTALSLIVETSDFNRFKKGNMYSAYLGLIPGDDSSGGHEKKLGITKAGNSHLRRLLVEAAQGYTRGKVGFKSKDLKARQEKCSSEVVAYADRANERLRRKYYRMILRGKKYNVAKTAIARELACFVWGIMTNHIDLCS

SEQ ID NO: 472859 - protein, 428 aa, unidentified
MRSVGLDVHRDFCEVAIVEDSAVRSAGRIKTTPESLGLFAQSLSATDQVVLETTSGAIEIARLLRPHVARVVLANAADVRAIAHARVKSDRFDAATLARLLAAGMLDGVWVPDERIGALRRRIARRAALVRQRTRAKNEIHAVIMRCLLGRPPASDLFGKKGRAWLAAQQLPAAEVETVDGCLRQVDFLGAEIAAVDAKLAEFALTSPEAKRLMTIPGVDVAAACTLIAAIGDIRRFDSPRKLAAYLGLDPRVRQSGEKPARHGRISKRGNPHARHVLVEAAWQAMRTPGPLRAFGERIRARKGTQVAAVAVARKIATIAWQMLTRGEDYAFQSPSLVRKKIRNAELKAGAPRLSTRHTGARQRVTSDERDRDRELQQQAENGYRRLIADWQATGPKTGAGATTGRASSMPPTRQATRQTSKPQGSAL

SEQ ID NO: 472860 - protein, 310 aa, unidentified
MGALLFVGIDVSKDRLDVHVRPADEAFAVARDGEGLAALIERLLALRPHLIAIEATGGFETVVVAALAAAKLPVVVVNPAQIRAYARSLGYRAKTDPIDAAVIARFGEATRPEIRAIPDEETARLADLIARRRQIIQMIVAEKQREKRAGPMLKRSIARLLKALQKELTAVDQQIDTSVRGSPAWREKEDLLISVPGVGNTVARSLIAELPELGTLSRHKIASLAGLAPYTQESGQWRGKSFIAGGRPAVRSVLFMAALSASRFNPQLRALHQRLIAKGKAKKVALIAVARKLLTILNAIIRTKTPWQTA

SEQ ID NO: 472861 - protein, 344 aa, unidentified
MHIASIGIDLGKTTFHLVALGDRSKVLLRKKFSRAQLLVYTANLPSSLIGLEACAGAHFMGAALREQGHQVRLIPAQFVKPYRKSNKNDFIDAEAIAEAVTKQNMRFAQIKTNDQLDLQAMHRVRDRLVHRRTALINEIRGFLLERGITFAAESIHLRKNLPAVIEDAEQNLTARMRWLLERMSEEWKQMEIDIKAVNDEIDRVSQEDERCRRLRQIPGFGPIVSTATVAAIGNGSAFRRGRDFAAWVGVVPRQYSTGGKQQLFGISKRGNVYLRRMLIHGARAVLLRVKYDTGGFGQWVRRLSERAPRNKVVVAIANKLARIAWAVLSSGKDYQHQPLHITAA

SEQ ID NO: 472862 - protein, 326 aa, unidentified
MTASQSSDNTFVGIDVGGAVLEVAWHRGGSAQYANRPDAIATLIQKLQSGPAITRIVIEPTGGYERPLRRALRQAGLPVEVIHPSRFKAYRTLVGAKAKSDTSDARQLAAYAAAPDDVRGCKAHHVKLPEDAIREALNELASRREQLKHMIHAETCRLNTMRLVEIRQSVEAHLEALRAEDKQAHKMMLTLVRQRVDLRRDQRLLRTICGIGEKSALACIAMVPELGRIDNKAAAALIGAAPFVNQSGTKTAPARIYGGRSAVRNILYMAAVAASRHNPVLRPFYERLIAAGKPAKVALIAVLRRLVVFANAVLKSGQPWRGAVPA

SEQ ID NO: 472863 - protein, 464 aa, unidentified
MTRKRTGTKKRSAQSKLDLKTVEIVHADAAGIDVGGSEHWVAISPDRDAEPVRRFGSFTADLRDMARWLVEKGVKSVAMQSTGVYWMPVFEVLEQHGLEVFLVNARHTKNVPGRKSDVQECQWLLKLHAFGLLNNSFQPTDEIRIARTLWRQRGNLVADASGTIQRMQKALIEMNVQLSSVLSDLSGVSGMSIIGAILKGERDPWKLAALVQPEVKAAPQAIAKSLEGNWRKELLFVLRQEVELYRTYQEKIHDCDLQLREHLKSFGSVVNLAAQPIGPKPKGKSGSKNAPQFDLRTELYRITGIDWSQVNGIDVLIAQTVIAECGANLSAFPSEKQFTSWLGLVPTNEQSGGKILKRRTRKVVNRAATAFRNAATTLLRSQSYLGAQYRRLRTRLGAPKAITAAARKLACLFYRLIKNGQQYVDKGTEYYETKYREQQVRILAKKAQRLGFQLVTPTPLEPAL

SEQ ID NO: 472864 - protein, 343 aa, unidentified
MKPCDWKELLQLIERIRKRIAQELKKPVEVISCYEAGYDGFWLHRLLEAQGVRNHVIDPASLQVDRRARRAKTDGIDVGKLLRSLMAYLRGEPRVWSVVRVPTIIEEDDRRLHRERSRLINERIQHVNRIKGLLAIHGIYDYEPMHPERIQRLERLRTADRHSLPLRLKAEILRELQRLELVLGMIQTIETERDAIVSVKSKSQQTTSTKKIKHLVKLKSIGPEFATVLVGEVFYRTFNNRKQIGSYVGLTPSPFQSGSTSRDQGISKAGNTKARTTMIELAWLWLRNQPDSLLSVSFRERVGSRKGRIKRIAIVAMARQLLIALWRYLETGVVPEGAVLKCK

SEQ ID NO: 472865 - protein, 311 aa, unidentified
MTDDTIGIDISKATLDIHRLSDGKAISFSNCPAGFKALSKFCAKTAVTRVVYEATGAYHSGLERALGAHLPLVKVNPLQARRFAQAQGVRAKTDAVDAKMLAVMGDAFALEPDEPAAKIQHDLKELRAFRSGLIKDRTGIINRMKTQTLSITRRQSKARLAQVDKQIADINAEIERLIHSSDTLAHSLQILRSIPGIGAICAATILIEMPEIGTLDRKQVASLTGLAPMTRQSGQWRGKSFIQGGRKIVRDALYMPALVAMRHNPDFKAKYQALIKAGKPPKVAITALMRKLIELANTLIKADRIWVIKGA

SEQ ID NO: 472866 - protein, 369 aa, unidentified
MADRITYVGLDVHKESIVVAVASGGLRGEVREYGRIANTATALDRLLRKLGGEGMTLRFCYEAGPCGYGIQRRLSTQGHECVVVAPSLIPKRAGDRVKTDRRDAASLAKLHRAGELTSVWVPDARHEAMRDLVRARLDAVHSLRRARQQLSGFLLRQGCHYGRPAWTKLHRRWLAGLTFDQAVHHLVLEDYIAAVEAAMARRDRLTVQIEAVLPDWTLAPVVAALQTMRGMALVNAATLIAELGDLSRFTNPRQLMAYLGLVPSEHSSGASVKRGGITKAGNGAARRLLIEAAWSYRFPARLSRELLLRQENQPRPIRDIAWKGQVRLCARYRRLTRAAKPANVVATAIARELTGFVWAIARQVAASPR

SEQ ID NO: 472867 - protein, 387 aa, unidentified
MYFVGIDISKYKHDCFITTETDTIITQNLSFQNNKDGFNEFLNLLKSLDNSQEIRIGFEATGHYHFNLMLFLEENGYSFMEFNPALVKKFISTTTLRRTKTDKKDASVIAKYLMSVNYKPYPKQFYHKYALKSLTRRREAFVHQRSYFKVELTNILDIIFPEFKPFFSNSFSATALFILSTYKSAEAIANMSDYDSVRKVSRGKFSYAKFLKLKELASNTVGLDSDIYTFQLDSLLSLINTMDKQISLIEDKISEIVDLLNPRCLSIKGIGNILCASIVAEFGDFNRFKSADACLAFAGLEPSTIQSGCAEQNGKMVKHGSHHLRASIMNAADFVFMHEPTFTIYYYKKRSEGKAHRVALSHVAKKLVRVIYKIETSDIPFDSSKLK

SEQ ID NO: 472868 - protein, 380 aa, unidentified
MQTQAALQRESTTNGAVLNIAFELSNKTWKLAASDGNRDKFKTIDARNLEALEKTIAWFKEKLGLGEEVLVRTCYEAGRDGFWLDRYLKEAGIENLVVDAGSIEVPRRKRRSKTDQIDAKNLLRLLMRYHGGDKKTWSVVRVPSVEAEDARRLHRELEELGEEKTRHTNRIRSLLITQGIDVKVGRGFPELFEAIELWDGTGLKEGLKGEIEREYKRLELVKEQIRELERKRQALVKAAEDEAVRKVRRLQQLKGIGVHGAWVLTMESFGWRNFQNRREVGGSAGLTGTPYDSGESEKEQGISKAGNGRVRKLMVQLAWCWLQHQPRSKLSRWFFRRFSQGGKRMRRVGIVALARKLLIALWNFVERGIVPERALLKASI

SEQ ID NO: 472869 - protein, 370 aa, unidentified
MDGPYGISLCQNEVWLKSQTREPSVNQIIRIGMDTSKHFFQLHGVDTAERPMLRRKLRRNEVLGFFAKLAPTVIGMEACGAGHYWARELRKLGHEVKLMAPQHVKAYVKRNKNDGRDAEGLCEAMSRPTMQFVPVKTEEQQAALMLAGVRQQLIARRTQLSNAIRGYATEFGLITAKGLDKIEPLLGRIAQDERLPELGREMFAMQGRDYARLQIELKAIEARLLAWHRANADSRRLAKIPGVGPIGATALVMKAPDPRLFPSGRHFAAWIGLTPKDHSTAGKTRIGKITRAGDEMLRSVLVAGATAVIQQARNGRGRQSPWLLALLARKSPKLAAVALANKIARIAWKLLTTGESYDGARMPGASALAA

SEQ ID NO: 472870 - protein, 455 aa, unidentified
MYLPDWKWIPIRKGLLLMSNKVIFNLDELFISVGIDVGADFSWMSIALPNQQFVGKPYKILHNSIDSLTTAVSKIKEAEELYSLESRIFLESTGIYHYPLFCYLRDKGFNCSVINPIITKNSTNINIRKVHNDRFDSKKAALVGLKPDLKVSLMPSDLALNCRNLCREYYDLMDNRSAYVNKLQGELRIAFPQYLGIFSKVTINTSLTLLETYTSPSAFLKADKQEIIDIIKSTARFGLTYAQNKYNAIIQAATDANQFGYIIDSNIKRIRLYISFIRKYDEEINSILESLHELVDANEDSDFVKQIHLIETFKGAGFLSAVSIMGEIGDFSAFSKPKQLFAYFGLDPAVKQSGKFEGTKVQMSKRGSAIARRVIHTLTLQSISISRNREAKNPVLREYYLKKCDSKPKLVAMGAVSHKVCNMIFAILRDNKPFKIIAPQEHIKQYNSAKCDIAA

SEQ ID NO: 472871 - protein, 412 aa, unidentified
MSLEDQPLYFVGIDWAAAEHAVCVLDQTGRKVTAFTIDHTAAGFARLTTRLGKLGDVDRIPVAIERPDGRLVDALAEAGHPLLPVKPTAIKSWRENEVPSGAKSDPGDAYVIADYLRVRFHRLRPAAPLSGHTKGLRAVVRTRSDLVETRVAATNQLAALLDAHWPGAKAIFANIESAIALAFLTQYPTAASASHLSEKQLAAFCSHHGYSGKKPAAVLLARLRSAPAGTLDPIVSEGIRAAVLAQVDVLTALNTAIKDLDRATAQRMGAHPDGAVFRSFPRAGTINAAQILAEWGDAREVFDRPDAIAALAGITPVTKASGKHRGVSFRWACNKRLRVAITTFAANSRFSSPWAAEIYDRARASGKDHPHATRILARAWVRVMWRCWQNGTTYDPALHGGAQQRLNQQVAA

SEQ ID NO: 472872 - protein, 328 aa, unidentified
MFYLGIDVAKAKLDCCLLLDPDKAKRKSKSVANTKAGLANLLEWLRTKKVSPNNLHVVMEGTGVYHEQAALVLVETGVTVSIVNPAQVKNFGRGLAVRTKTDGVDSFVLARYGALLKPAAWQPPTLEARVLRALLARREAVVLDLQRELNRLEKANVTEIPIFIRQSIDDSIEFLRTQLAKLQQEIDDHIDHHPDLRRDMELLTSIPAVGPQTGSNLLAIVHSYRFDSAEQLAAYLGLVPVERQSGSSIQGRARLSKAGPARIRAVLYMAAVVATKYNPHVKAVYDRLLAKGKAKMAAIGAAMRKLVHLCFGVLKTRTHYQADYAKIS

SEQ ID NO: 472873 - protein, 408 aa, unidentified
MNPLYVGIDVSSKSNVVYLMLPNGDKHSNFSVANSHDGSTQLVKRICSALESNSLDTVSIGLEATSVYGDNLVYFLREDASLASFNRKIHLLNPKQIKKFKESYNDLPKNDRVDSFVIADCLRFGRINKEVYIGDYHYKALQNLTRARYFAVTNLTKEKQRFMNVLFKKYSSMTQEKVFSDTFSTTALAVYDEFESAEELAYMDLQELTAFIIKKGKNRFSDPDAVAKAIQKAARSSYRLPKTVNDSVNQVLSISITSMKALKSQIKEFDQAIAAQMDLLPNVLISIPGIGPVYSAGIMAEIGDVNRFANQAQLAKYAGLAWTQHQSGDFEAQNTRLIRSGNRFLKYYLCEAAFSLVRCDKEYNAFYHQKYKEVNRYQHKRALALTARKFVRLVFALLKDTRLYRPAE

SEQ ID NO: 472874 - protein, 347 aa, unidentified
MNYIGVDCHISTLDFAVVTKTGRVKNKARVKTSVKEFMEFIKTVPKPRKIFIEEGELASWLLETSLRFGEQLIITDPRENKWISKAKQKNDSVDATKIAQLARGGYIKEIYHPLNDRRRFKELIFAYHDTVKSQTRIKNKIKAWFRREGIKCSADTVYSEKYRAEWKKKLPKNKIVNLIIDELWIQLDRPHSAKETLKKNIRTQARKYPEIKNFMELPGIGLIHAATISAIIETPHRFANKKKVWMYAGIGLAERGSGDKIYSRQLTREFNRPLKNAIKKATEAAIHSNNNPFMRKYLRLTIQQGVPSHKARLTVARSLLSTLYIMWKKGEEYDPDIDMKRDKGSKK

SEQ ID NO: 472875 - protein, 419 aa, unidentified
MTETINWESITHYAGFDWAKDHHDVVVVNQQGKIVKDLTFEHSAEGWAKWKELVAAYPHLAVAIETNQGAAIEQLLESGVVVYPVNPKSAERYRDRKAPSGTKTDFLDAWSLADALRVDGHGWRALKPLDPLIQELRLLCRDEVDLIGKRTELVNQLQAALHEYYPAALQAFEDWTATPSWNFVQQFPTPQLLRQAGRRKWEKFLHVHHLYRPELNEKRLEIFAKAHEFCGPAAVTRAKSRLALALVKLLHALENQLEDYRKEIRRLFNEHPDHELFGSLPGAGEKLAPRLLSELGSDRSLFDSAQALQCYVGTAPVSFESGQVRKVYVRFMCNKAFRHAVHLWADLSRKFCSWAQVYYQQLRAKGKTHATALRCLGQRWLKILWKMWQTKTCYSADFHMANQLKHGSWVLSVQPGKSK

SEQ ID NO: 472876 - protein, 334 aa, unidentified
MIYIGMDIHKYFIQGVAIDERGRKVEELKFKNELEEIERFVRRFGFEVKVAIEGTFGWQHVYEVLEYLKVETKLVNVRRTKVIAESKIKTDKLDALSIAQCLRTGFIAEAYAPKPEIRKIRDIVRHMLSLKREVKRIKNKIHSILLKNGIKHGFTDLFGKAGTEFLKKVKLREQDRYRLDSYLRILNSLNKEVNETAERISKISKADKQAMLLTTIPGISYYSALLIIAEIGDINRFKSAEKLCSYAGLVPRVIQSGNHVHHGKLIKECDQNLKWILTQCAHVHVRCCNSKITKHYRKVKKKRGNNKAIIAAARELLVSIYYMLMRNGPFKING

SEQ ID NO: 472877 - protein, 440 aa, unidentified
MPTPSLPVLDPTAAAVDVGSEQFHVSIAGGPPKVFGTTTGELHALRDYFLEQGVRSVAMEATGIYWLCAYEVLEKAGLEVVVVNGKYVKNLPGRKTDIADCQWQATLHAHGLLKPGFVPPEHIRRLQDYLRVRTDHITMAGAHEQHMQKALERMNLKIHDVISDLTGMSGLKMVEAMVAGERDPVALLARCDPQIQKNKAGRLRAALEGTWKAEHLFALRQAYELWQFYQKKIGECDRAIEEVLQPMAGPEDPNHPTPPATKRGGVNSPQIAGLHGMLFRLCGGQDPTQLPGVADYVLLQLLSEVGTDLGKNWKTEKHFTAWLGLAPGSHQSGKRRRSSQRRSRNRAGRLFCVIARSVGRSVDKALGGFYRRLKGRKGGLVANLALARKLAELFWRLMVHGITYVEKGLKKYQEKVVTTEQHLLQKLARKYNMVLQPKVA

SEQ ID NO: 472878 - protein, 400 aa, unidentified
MLSIGIDVSKGKSTVCGMKPGGEIVYAPFEVQHTREGMSELVSLLRSSGEEVRAVLESTGSYHCPVVAALLENGIFVSVVNSLRMKRFCSQSIRKVKTDRIDAMQIALYGLAYWQELQPTKLPEDTYRELQLLARQYYQMTSILIKAKVDFNAICDQVLPGMQELMNDHAGRHKLSDFVLRYRHTTHILEMGETRFRKDYCKWAEKKGYRNCERMAALIFATAQNGIPVLPNAPSTQIVITEAIRVLHTVEASRDAILTQMQALAKTLPEYSLVREMPCIGDTLAPRLIAEIGDVRRFHSKRALIAYAGIDAPPYQSGKFCANNRHISKRGNRYLRKTGYEVMQSYVMHKPANDPIFTFIEKKRGEGKSGKLAMVAGLNKFLRVYYGKVTELYRSLPAIE

SEQ ID NO: 472879 - protein, 335 aa, unidentified
MKKVSKQMWEKEVSSPPKPAMTVGLDLGDRFSHYCLLNADAEVIEEGRIRSTEAALRLHFEGEPRQRIALECGTHSPWVSRLLKQLGHQVLVANPRKIPTITGSESKNDRNDAEALARLAASDPKLLAPVQHRSQQRQLDLNLIQARAVLVRARTMLVNALRGLIKSGGGRLPACSTEALPSRAPAAVPPFLAEVATPLIDQIALLTTQIAGMDKQIDKLGAKYPEIAVLRTAPGVGPVVAATYALTLDRVDAAPSNRSAGAFLGLRPGQGQSGDSNPQRRISKCGNTYLRSLLVQSAQYILGRFAPDTALRRWGLKLAQSGGPQTGGDPAQHVA

SEQ ID NO: 472880 - protein, 298 aa, unidentified
MKFYTNQHKFYCGIDLHARSMYLCILDQEGNTMLHKNYKASPEAFLWAIKPYREDVVVAVECMFVWYWLADLCTQEGIPFVLGHALYMKAIHGGKSKNDKIDSKKIAALLRGGTLPVAYVYPMNMRSTRDLLRRRNHLMRKRSELLTHIQNTNSQYNLPEFGKKLAYKANRDGVTDHFPDPSVQKSIEVNLQLLDLYDRLLTELELYIVKQAKGHNVRSFYLLRSIPGMGKILSLILLYEIHDINRFPRVQDFVSYCRLVKCPRESGGKKSGAKNSKIGNAHLKMGLLRGRLSLPPRK

SEQ ID NO: 472881 - protein, 410 aa, unidentified
MDVVYERCCGLDVHKQTVVACLVVPGSGKQPRKEIRTFGTMTDDLLALGDWLLEEGVTHVAMESTGVFWKPVWNLLENRCTVLLANARHIKAVPGRKTDVRDCEWIADLLRHGLLQPSFVPERAQRELRELTRYRTSLIRERSAEVNRVQKTLEGANIKLASVASNPMGISGKEMLTALVHGTTDPVELAGLARGKLRVKREQLERALRGQFGPHQRFLLAEQLTHIDTLDEAIARVSNEIAEQMRPFTEALERLDTIPGVGLRTAEVLVAEIGVDMSRFPSAAHLASWAGLCPASDESAGKRRSGRTRKGDQWLRTALTEAAHAVVRARNTYLAAQFRRLATRRGKKKAIVAVAHTILVIAYHLLKDEADYRELGVDYFDQRQRDHLQRRLVQRLQGLGYTVKLEPSAA

SEQ ID NO: 472882 - protein, 369 aa, unidentified
MRENMSVAALSELKKRTIVGRMTIGIDLGDKKSHFCVLNDHAQVIARGFLPSTISAFRREFEGLPPSLVAVEAGSHSLWANQVLKVCGHDVLVGNPRKIRLITESDRKSDRVDAESLARLARADRVLLAPIQHRTQEKQVQLAVIRARHVIVRSRTALINCARGLVKPMGLRFRACSADAFAKRAAATPLPEVLRIALAPLLKQIEAVNESIRDYDRQIEQIAATEYPETCLLKQIKGVGTLISLTYVLTLEDPHRFAKSRDVGAFLGFLPREKQSGERAPRLGISRAGNEYLRTLLVQGAHYILGPLGPDTDLRRWGLQLASRGGGGSKKRAVTAVARKLAVLLHHFWKTGEVYEPLRKKPVSDVAAA

SEQ ID NO: 472883 - protein, 449 aa, unidentified
MSKIKTKNETVKRISQLTVINPTAAGIDVSDTEMMVAYPINSEQMEIRAFGCFTRDLHSIAKCLQEKNITSVAMESTGVYWVSLFLMLQEYGFEVYLVNAKHAKNVTGRKDDESDAEWIQKLHSCGLLNSSFQPDNMTRTLRSMVRHRKNLVRTSSSYINRMQKALELMNIKLHTIISDIDGKTGLLIIEAILAGERNPEILADMRDKRIKASRENIIKSLEGYWTTEHLFELRQCYQLYCTHRQMIEECDKEIEKQLVEQIASKNEGVIPNIPKVRRKAQNGKHKIPFNLTANLKELLGVDVTEVVGISEISALTIMSEVGTDMSKWKTEHHFTSWLGLAPNTKMSAGKVISSRIMKKKQNAGQAFRMAANSLYHSKSPLGDHYRRIRAKAGAAKAVVATARKLAIIYYKMVSNKEAFNPKALEDYQQKYKEKKINQLKRKIALLEAA

SEQ ID NO: 472884 - protein, 393 aa, unidentified
MICVGIDVAKDKYDCFILSSEGEVLADVFTIPNNAEGFDTLLQTIRRCARPEDKIKVGLEATGHYSYNILGFLLNEGLDTYVINPLHTNLYRKSLSLRKTKTDRVDARTIAAMLMSDVDLKSYTDTAYHNEELKSLTRYRFDKVRERAKLKQSVSRLVTILFPELEKLVSTLHMASVYALLSEFPGAKQVSEAHLTHLKAVLYDASKGRYGSDMATTLRDAARCSVGSVMPAKSLELRHTIRLIHELDAEIEDIEAAIQSMMDEIQSPITTIPGMGVRMGAMILAEIGDFSRFDSPDKILAYAGMSPSTYQSGQLSLSGTYSHMEKRGSRYLRYALYNATKYVCLWNPTFAAYLAKKRAEDKHYNVALSHAAKKLVRLIYALEKSKRPYSTAA

SEQ ID NO: 472885 - protein, 351 aa, unidentified
MLIVGCDYHPSVQQIAWIDTESGECGESRLLHSNGEAERFYRTLKEQGANVRVGIEATGHARWFERLLAELEYELWVGDPAQIKAKRVRKQKNDRQDAQLLLKLMMEDRFPRVWVPSVENRDLRQLLWHRHRLVQMRTRVMNQLQAVALNEGVRRKKALWSQAGRSQLESFRLGPWATRRRQDLLQLLDQLNSSIAPLTAAVEQQAAQHADAQRLITHPGVGALTALAYVLIIGSPQRFRCGKQIGSYLGLIPCEDSSASRQRLGHISKQGNVLLRFLLVEAAQAAVRANTDWRREFLHLAMRRERRIAKVAMARKLAVRLYWMWRKGWDYEQSLQFGSHAGQPVVGYGVK

SEQ ID NO: 472886 - protein, 420 aa, unidentified
MVYLERGYNLKELPWSKIVSNSFLFKEACMILVGVDVAKDKHDCYIMTSEGEVLFKSFTIANNMEGFNQLYEKILSVIDNFDNVKIGLEATGHYSYNILGYLLDKGLTPYVINPLHSNLYRKSLSLRKTKTDKVDSHIIASMLMSDVSLKPYSNTLYHNEELKSLTRYRFTKVQERAKLKISISRLVTILFPELEKLVPTLQMNSIYALLYEFPSAHAISKAHLTRLTNLLNTTSKGHYTKDKAVLIREAAKNSIGSNMPAKSLELKHTIKLIKELTSEINEIEEEIKIIMNKINSPILTIPGIGLSTGAQILAEIGDFKNFSSPDKLLAFAGLSPSTYQSGNMYSSNTKMEKRGSKYLRFALFNAAIYVSYWEPTFSQYLKKKRVEGKHYYVAISHVVKKLVRLIFHLEKTNERYSTVV

SEQ ID NO: 472887 - protein, 341 aa, unidentified
MEEYVGLDVSMKETSVSIRRAGERIWRGKCASDPRIIAELIRKRAPAVRRVVFETGPLSIWFYHSLRTEGLPAICIDARHAKAALDMATNKTDANDADGLAQLAEVGFFREVRVKGFDSMLTRTLVAARTRLVRITTELSNQIRGVMKTFGLLVPAGKGSTFEKNVRSLLADQDGLASIVLPMLEAWRGIRIRAAELGRQLVRDARQSQACRILMSIPGIGAITATAFSTAIERPDNFRKSRSVGAWIGLTTRRYQSGEVDYDGHISRRGDCHLRGLLYEAAAVILTRSSTDSTLRTWGRKLRERIGFKRAAVAVARKLAVIMHTMLKSGELFNPNAGAAA

SEQ ID NO: 472888 - protein, 364 aa, unidentified
MKKLVVVAGTGQEGLEARRRPDTGQDVWIGVDVSRMKWVYNVRWGGQEQRRLSSAGELRHLQALVAEYHGGTVHVVYEACGFGYEIAWWCQEQGIDVMVVAPSTIEQAPGSRVKTDRIDAGKLARDGEQRRLHGVRIPTRAQHAHRQLSRTYAQAMKDKQRAQARVRSLLQEQGRIGPVPAAGWAAYRRWCTTQELPDPVAQCVKELLQLREAALASVKRLRDALHQLSTQAPYAPVVRGLAAQAGVGPFTAVRLVLELGDMRRFPTAGSFPRYLGLTPSEYSTGLTERRGHLTKCGPRFIRAWLIQCAWVSVRLGGDARLRAVFERLAPKIGKKRAIVAVARRLALRLRARWIEVLTTQAVAA

SEQ ID NO: 472889 - protein, 397 aa, unidentified
MKVCGLDVHKDTIFCAVRNGKKCEEVKDYSTLTCSIRQMGEHLQEQGVLRVAMESTGVYWIPVWNILEDMGFELLLVNPFLIKQMPGRKSDVKDAQWIALLLQKGMLRGSLVPKADIRELRVYARKYRKLQGRMTSVVQEMDRLLVMCNIRLGSYVSDLNGKSFRRVVQAIADGRDSPEELLCHVHPRIRNRHADTIRNALEGHICPHHRFALSLLDEEYSLLESQEERCLAMMEQLCADRYAEQLELLKSHPGINDIAAMSFIAESGGEMSAFENSGKFSGWTGLRPRNDESAGKYKSTATTKGNKFLRTILVQIAWAAIRTKGSHYQGKYARLAMRKSKKKALIAIARKIGTVLWNMLDKKQEYDAGLMPVYDPDKIAAKIAYHDRELLRLQNLI

SEQ ID NO: 472890 - protein, 386 aa, unidentified
MTNPMLQTNHSNCEGQSPSPRLLVAMEMSLNKWGVALAVEGQPRKRVKTVAGGDYPVLLKAVEEAKQRFGLNADSPVVFCYEAGRDGFYPYRRLTELGHEVWVIDSASIELSRRRRQAKSDGVDLDKLMELMQRKARGEAKALRIVRVPSPEVEDQRALPREREALMHDAQRLHNRIESALFAQGYRDAPQTAKDLKAWLESPAVVLGQQLRERLRRDVERLAVLENQFKTVGKALLAQVQQEQVTAVAGVAKALMQLSGIGLIGAWVLASEIFGWRQFRNRREVGALLGLTPTPYSSGNDAREQGISKAGNARARSMLVELAWLWLRYQPESALSLWFKARFSGGGKRMRRIGIVALARRLAVALWRYSDAGVIPAGAKLKTAQA

SEQ ID NO: 472891 - protein, 326 aa, unidentified
MEHELHYIGIDTAKEKLDVDVLRPDGRHRTKKFANTTKGHDELVSWLKGHKIDHAHICIEATGTYMEPVAECLYDAGYIVSVINPALGKAFAQSEGLRNKTDTVDARMLAEFCRQKRPATWEAPHPLERALRALVVRHQALTDMHTQELNRTETAREAQRPSIDAHLLWLEAELKRLEKQIKDLTDDDPDMKHRRKLLESIPGIGEKTSAVLLAYIGLKDRFAHARQFAAFAGLTPRRYESGSSVIGASRLSKAGHVSLRRALYMPAMVATSKTEWGRAFRDRLAANGKKGKVILGAMMRKLAQVAYGVLKSGVPFDVSRHNPVAA

SEQ ID NO: 472892 - protein, 488 aa, unidentified
MAKTKRKQSTFERLRRGELNRKQRRNLARRLAGNDPGLTIIHTNAGGIDVGNESHFVAVPPDRDANPVQEFGCWTADLKRMAEWLKACHIDTVAMQATGVYSIPLYDILSGHGIQVVLVNAQHSKNVPGRKSDVQECQWLMKLHTYGLLRDSFHLEERMEGVRTIWRLRDRHVKDASRAVQHMQKALTKMNIQLANVISDITGVSGQAIIAAILEGERDPWKLADLKHEMVKASREEVARCLEGNWRDDLLFELRQAVDSYHFVHQQMRACDQQIESFLASLPTKILERPSQPDAPAATTKKAKKPRKPRKTRRNEPTVDLTTALKRICGVDLTSIDGIDVVTAQTIVSEIGTDISKFKTEDHFASWLGLTPAKDITGGKIIGSGRRKVQNRVAGALRMAATTLLESKTYLGARYRHLRQRLPSYAAAIKAMARYLAVLVHRLLTHGEAWVDRGAAKFEQRRTESELRSLTAKALAKGFQLVPITTTS

SEQ ID NO: 472893 - protein, 474 aa, unidentified
MSKPTQQPTAAGKAEPQIAKSKRADKLKETRPSVFQLNAAGIDIGAREIYVAVPADRDEHPVRKCETFTADLHLMAEWLVCCGITTAAMEATGVYWIPVYDVLEQHGIQPCLVNPRNMKNVPGKRTDFHECQWIQHLHSMGLLHSAFRPEGEVCAVRSLMRHRNDLVQMASQHVQHMQKALTQMNVQFQHVISDITGLTGLTILDAIVAGERDPAVLAKLRDPHIKASEETIRKSLEGNWRAEHILALKQRLSLYRNYRDQIRDCDQEIEKLVTAFEPRVDPEEKPLPKDRKQKQRRRRKNSGSPDFDMRTEAYKLFGVDLTQIPGLMMLVFMLFSEVGRDMSRWPTPAHFVSWLGLCPDNDISGGKVLWRGARRTKNRAGTLFRLAAHSLHRDQTPLGDYLRRMKAKLGPAAATTATAHKIAIIFYTMVKKQLEYDASLWAQRDAMREKRLEARLQKQAAQRGYKLVPLEPAA

SEQ ID NO: 472894 - protein, 348 aa, unidentified
MSAEREAEGISLGTIGTRQGEIDKLVRKLQAKGKALPFVSEAGPGGEWLSRYLTKQHVTCWVVAPSGIPKKASERVKTDRRDARQLARLLRSGALPPVYIPSIEEEAIRDVGRAREDCLKALKAAKVRLKAFLLRHDMRSTGRANWTAAHLGWLANVVCPPPAQQIVFQEYVRAVSAPTDRWQRLEAELHALVQTWHWAPVRDAIQALRGIQFIAAVTLIAELGELNRFESPRQLMSYLGLSPSEHTAGDRRRQGGLTKTGNSHARRVLVEGAGAYRYPAKVSRHLQLRLETGPKVIQEISWKAQVRLCTRSRRVAARGKHVQQGVVAIAREMAALVWAIAREVAPTY

SEQ ID NO: 472895 - protein, 403 aa, unidentified
MAYYGGLDWGGVGHAVCVIDAAGGIIARFAVQHDANGIAELIRGLSRLAPPAELPIAIERPSGLIVDSLTAAGYPVVPIHPNVVKACRPRYRAAGGKSDPGDSFMLADILRTDGHRFRRLAPCSDDIKALRALVRGRDDLVAQRLRLANQLRAVLDSFWPGAAAVFAEIDSPIALAFVGRYPTPDSAARLGEKRMRAFMAQHRYSGRRSAGELLDRLRRAPTSLAGDSETEGELVRALALLLASLQAQIAKLSSRIEHAVAELPDGEIVMSFPRAGRICAAQILAELGDVRERFPSEAQLAAEAGVCPVTHQSGKSRGVVFRWACNHRLRAAITCFADNSRHACTWAADIYKRARARGCDHPHATRILARAWVRILWRAWTSRIKYDPARHQAALDTAKATRG

SEQ ID NO: 472896 - protein, 344 aa, unidentified
MEPMYYIGLDVHKRKISYCVKDSGGKVCSEGSLTATRLELDVWMKTLPQPWTAAMEATMFTGWIYDHLKPHAAALKVAHPLMLRAIAAAKKKNDRIDASKICDCLRCDFLPECYMAPTAIRERRRTLRYRNLLVRQMVQMKIKISSLLMEAGVSYNKQRLHKAGYFRELLATNPDIDEGLGSLLRLCRETVVRLQKAESAMVRSLEHDSLLMDRVERLMTIPAVGPITALTWALEVGDVQRFSSIKKAISYCGLCGAEKSSGSTVQRTPLSKQRNKHLQTTLIEAAKMAPRNSPELAMLYDKEKQKGNANRATLAVARKLVTYLMAVDRGQRNFQVVETSNIAA

SEQ ID NO: 472897 - protein, 316 aa, unidentified
MTDNSMICAGIDVGKSHLDIAIHPDDARLRVTYDTAGLKALDAFLQEHDVSRIGFEASGGYEWRLMVHLRAGKRPAARLQPAQLRFFAKSRLRRAKNDRLDAALIARFTASLEQLPALPDARFDRLAAELTYVEQIEQQIALVKTFAETALSEAVKRRHAREIARLETCRKARLLRLEKTVRDDCDLARRLDLLISIKGIGLRSALCLIIRLPELGHAGRAEIAALAGVAPYDDDSGKHHGRRRIQGGRERLRKSLFMCAFTATRHNPDLASFYARLRSNGKEHLCAVIAVARKLIILANAILIRNTEWTPQYQQN

SEQ ID NO: 472898 - protein, 316 aa, unidentified
MASFLGIDVSSLSLDVAVRPQGIKMHLSNDPTGFEALLESLRKLSIQRVLLEATGGYERDVMRFLQDAGYKVIRVNPRRARSFADSLGIKAKTDAIDAEVLAHYAEVIPDQPSLQISPERALLRELLQQRDRLVQQRDDDLRRLKQVQSTAVANYLNANLKHFKAQIKLVEHEIEQQTAMLNDERVTQLIKVKGIGMVTAGKLIALLPELGRVESREIASLVGVAPFNHDSGKSMGKRSISGGRLEVRRSLYMACLVAMKYNPALKARYQSLRERGKLPKVAIVACMRTFIVRLNAMLRTGTSWLDLVLPQPESTT

SEQ ID NO: 472899 - protein, 335 aa, unidentified
MQIYGIDLAKEKFDVSFFDLTSKKVSNQPSHKVVTNNLKGIGKFFKGLPSDAVLVAEHTGVYGDTLLKCCMDSNVKIAFVGGYVIHRYRATPDRAKTDVLDCALLRDFGERYPDKLKYKTFPEEALYELRQLARHREMLVEQRKQLITADKSEDCRPIRSLAVKRSMDRIKEMLDTEIAETEKEMLKVINGHESIHHNYELVKSVDGVGLITAVELLVKTENFTKITTARQYAAYAGTAPYEKSSGKMDKGAHISKIGNRRSKTLLYICAESARLHNKEIKLYYERRTLIDKKPRHYVLNAIANKLLRIIFTLVEKGEYYDANFIRQDPRVVKHN

SEQ ID NO: 472900 - protein, 405 aa, unidentified
MIFAGVDWAEAHHDVHVADENGKRLGGGQLPEGIAGIAAFHELAARHAADPGEVVIGIETDRGLFAGALIAAGYQVYAVNPLSVSRYRDRHGVSGAKSDPGDAKVLADLVRTDRHNHRPAGGDSDLAQAVRALARAHQSMIWSRRQHASRLRSTLREYSPAALAAFDDLTSGEATAILRAAPEPALGAALSRAQITAALRRAGRSRRLGERGAAIQAALRAAQPQPPAVIAAAMGASARALAAVIAEMNTQIAALEKELAAGFEAHPDAEVVRSLPGLGTILGARVLGESGDAPDRYPTAKSRRNSAGTSPITRASGTRRVVLARHARNKRLADAIYLWAFASLTASPGARAFYDHRRAAGDTHHQALRTLGNRLVGILHGCLATHTTYDETRAWAHRTANPQAA

SEQ ID NO: 472901 - protein, 368 aa, unidentified
MGIEFKTRIIMKKQILKLSLGVDVSKDNLAVCLCRLTASLTKEFEDPFEVSNDQMGFKKLVKWLDKNAGSPENISIVMESTGIYHEALVYYLYDKGFPVSVMQSGRVKRYAQSLNQRSKTDALDSRMLAMLGCERELALWTPPDPMLRQLKGLSRERSFLLKEKQMEQNRLHAVEHSVYKSKPELKRYGQRLKLIEKQLLEIEKEMKLLVDSDPQMNQRIKHLESIPGISFKSAATVIGETLGFTGFTNAKQLTSYAGFDVVLKESGAYKGKTRISKKGNKHIRRALYMPAMSAIQWNPTLRKFYERIKPNKVKPIIALVAVERKLLILMYSLWKNEIDYDPEHEQKKTARTEVLAAQDRSNLALTTS

SEQ ID NO: 472902 - protein, 337 aa, unidentified
MRILLPEQSLEPQERARIYKAGSDMAKPSYVGLDISKSFIDLHQLPQERVARFENEPEGIAKLVSYLKKHRPALAVLEATGGYEVNIAAELATAKFNVAVVNPRQVRNYARALNILAKTDSIDARVLARFAQDVRPEPRKLPDSEERLLKDCVTRRKQLIEMLVAEKHRLSRASNVAVRDSLKRTISFIQSQLDELDGDIQSTIQNSPLWLEKDQLLQSVPGIGPSTSSTLLAQLPELGKLNRRQIAALVGVAPMNRDSGTLRGKRTITGGRTSVRNALYMAAVATVRHNPLVRAFYQKLRTSGKLPKVALTACMRKIIVLLNSILKYERPFQKSFA

SEQ ID NO: 472903 - protein, 370 aa, unidentified
MAKRSMFVGLDVHKDSIDVCVAEAGRTGEVRHYGVIAGDLEALDKVVRRLRAPGRRLHFVYEAGPCGFGIYRHLTAQGEDCVVVSPSRIPKRSGDRIKTDHRDANALARLHRAGELTAIHVPTADDEALRDLVRAREDAVTVGTQAKHRLKAFLLRQGRRYPGRAGWTRPYRRWLADLSFPSAPQHIALHEYRDTIEEAERRLDRLTEQLRQVVPLWRWAPVVDALQALRGVSFVTAAGLIAEVGDLRRFDHPRELMAYLGLVPSERSSGASVRRGGVTKAGNAHARHLLAEAAWAYQGIPRIGRQALYRQEALPKVVRDIAWKAQLRLTGRFRRLVARGKAKPKVATAVARELTGFIWAIGREVTPTGN

SEQ ID NO: 472904 - protein, 307 aa, unidentified
MFVGIDVAKDRLDVHIRPSGEAFTVARDGEGIDELAERLRAAAPSLIVLEATGGFEAVVVAGLAAAGLPIVVVNPRQIRDFARATARLAKTDALDAAVIAHFAEAVKPPIRPLADPQARLLGELMARRRQLIEMITAEKNRRRLLTARRTLKSVDRVLATLQAQLEQIDGDIDTAVRGTPAWREAENLMVSVPGIGPKIARTLIAEIPELGQLDRREIAALTGVAPFNRDSGTMRGRRTISGGRPVVRNALFMSVLVSIRFKLPLAHTYHRLRAAGKPAKVAITACMRKLVTILNAILRDKKPWQNA

SEQ ID NO: 472905 - protein, 317 aa, unidentified
MNNSSQDSFVGIDVSGEFLDVCVLSTEEYRRFLNAPEGIDELTAFLTENRPKLVVLEATGGLETAVAAQMGSMGFPVAVVNPRHVRDFAKAVGQLAKTDRIDALILAKFAKAVRPSVQALKDEQSQALADLVGRRRQLVGMVASEKNRLLRARPSVVKDIRSHIAWLEKRIRQIDGDLQTAIKSTPIWRERDKLLQSVPGVGDGCARTLIAALPELGRVDNREIAALAGVAPLNCDSGKMRGRRSVWGGRAAVRAMLYMAAISAIRHNPLIRDFAERLRARGKKPKVVIVACMRKLLVILNAMIRTGTPWLATTAAP

SEQ ID NO: 472906 - protein, 388 aa, unidentified
MSSPEPTRAENFTRCQPAASIFVSLELSKSIWLMTSLAPDGRQKLSKVQIAGGDAADLLSRLSRLREKCRVRTGRSCRGIVIQEAGLDGFWIHRFLQKEGIESHVVDPASVATSRRRRRAKTDRIDGEALVRTLMAFKRGEPRVCAMVVAPSPEEEDRRQISRERRSLTAERVAHVNRIKGLLVAQGVADYEPIRRNRRDRLEALRTGDGRPLPVGLKHRIRRELDRLELLLEQVKAVEAQRDRVLASEAEDARQSPAVLQRLRGVGPEVAMTLWSEGLFRHFGNRRQLASFAGLAPTPWQSGTVSREQGVSKAGNARIRTTMIQLSWLWLRHQPTSALSVWSHRRSKEGGARSRRVMIVALARKLLVSLWKFATTGLVPEGAVMNPA

SEQ ID NO: 472907 - protein, 406 aa, unidentified
MSTAPPTPTRFIGLDIHKHYLVACGVDPQLNPVLGPQRVQFSRLDEWLRQTLTPQDAVVLEMTTNAFQLHDDLAPHVHSVTLVHPPHVSLITRAQVMTDNIAALTLARLHAVGLLPSVWVPPTEVRDHRALVAQRTKMVRLATQAQNRLQAVLHRYHLAPPAGPPLAAANRDWWRQLDLGLAEDARIQCDLDTLAFAQTQIARLEETLTALAAQDERVVLLLQLPGVGLITALTLLAAIGDIARFPAAKHLVGYAGLGSRVHDSGLTRRTGGLTKTGRRDLRTAMVEAAQTASRVHPHWQAELARLEPRLGRNKAIVAIARKLLVAVWHVLTEETADRFAEPELVARKLLAHAERLGCANRPAGQSRAAYVRAQLDRLQLGRELESVPRGQRTVKLPPSSLAPARV

SEQ ID NO: 472908 - protein, 331 aa, unidentified
MNQLGIDVSNDTLDASRSGEGPIARRRFANTPSGHRQLLRWALNPSGAAQVCLEATGVYHLQLALALYHHSAIELMVVNPRAARRFAEAHMVRAKTDAIDADGLLLMVQRMPFRPWAAPRDELLQLQSLAHRVAQLDKELTRERSRLHAVRKAGPHTGPVQQDIQAHIKQLQRRKDAMQARAEALIQRDQALADDARLIDTAPGFAARSATQLLAELAPLPKDMQASQWVAQAGIDPRPGESGTSVRSARQISKQGNARIRAALFMPALVAIRHDANVVAYYQHLLARGKSKMTAITAVMRKLLVAIWGMLHHRQEWDGEKFYRLKLPQTA

SEQ ID NO: 472909 - protein, 478 aa, unidentified
MWRPGRGKAVTTGPREDFELTGFPCQEWPWRNDFSEAGKSHPILLSPAWVRAVNTRTIPTPMNIPNTLFIGIDRSDKQLDFTVLDGAGGLIERGKVSTDPAALHPWIEGWRNRGAANTRVVIAFEQPAPNLVVFFCQFEGIVIYPLNPTAVRSYCRSFAVSNAHSDRTDAAMIARYTFHYHGELRALEQASGPMRHLRSLVEHRRTLIDERTVLTNRLQALLKLYFPQALKLLSEDLWRPMDCDFLLRWPSLQALRKARPSTLDAFWAAHGSRSEKRLRERLDLLAGARALTEDADTIAPFVLRVESLVRQLQVLAHSLEVVERRIEELAPTFVDYAFFRALPGAGRAFAPRLLAAYGEDRSRWTSASALQCYCGIAPITRQSGNTRCVIRRLHCPNFLRQSFHEWSAESWKHSRWARAFVRYHQSHGKSFHTIIRMLAYKWIKILTRAWHDRELYDEERYLQCLSRRGSPICEYLDE

SEQ ID NO: 472910 - protein, 269 aa, unidentified
MAFVGIDVSKNAYAVVIAEDGRDGEVRDLGAIPATPEAVRKLLRKLAARFRQLQVCYEAGPTGYGLYRQVISIGFDCCVIAPSLTPVRPGDRIKTDRRDAERLARLLRAGELTPIWVPDETHEAIRDLVRARDSAAQDQRQKRQMISSYLLRHGRTYHRPKNWTMRYRRWLQRQSFDHQAQQIALQEMVLAERHAVERVERLTASIEELVPDWSLGPVVEALQSLRGVALIGAVTFMAEIGDVRRFEHPRKLMAYLGLVPSSRVAGIRV

SEQ ID NO: 472911 - protein, 386 aa, unidentified
MAQPNDDLSRSLVVLEQDKTLISVVELSLSTWLVGGLVPGVERDPLKKIAPDPQILLKLLHRWRDEAIKAGQTIQRIAVAFEAGRDGFWLARWLRGRGIEAYVIHPTSIPVSREQRRAKTDRLDIGLLKRSFLGWLRGERKHCSMAAIPTLEEEDAKRPNREREHLVGMRTRIINRMKSTLIRLGLRSFNPKLRKAPERVATLRTPEGALIPPNTLVELRRDMAHLRFVDEQIAEIENAREERLKQAPECEANARVLELKRISYIGIETADMLTHEVFSRTLRDQRAVSRYAGLTGSPDESGKHRRERGLAKAGNARVRHGMIQLAWRFVSHQKESVLVRWYEARVAAGKKKTTMIVALARKLLVALWRFVTDGVVPDGVALRPAQ

SEQ ID NO: 472912 - protein, 320 aa, unidentified
MNEISTKTAGIDTGKMWLDIAVYPASERLRVANTSDGHQWLASWLAAHKITRVGIEASGGYERAVVAYLRAAGFEVALLQPRQVRAFAVYKLRRAKNDRIDAALIAECAANLGDLHEPPDTRLAALAEHLLFIEQIEYDIAHLKTRRERFTDKRILKQIDRDIQRLLRRRDGELVLLQVVIRKHGDLARRLELIASVDGIGMRTALTLVVLLPELGKVSREQISALVGVAPYDDDSGERTGQRHIVGGRSRVRRALFNAALPASQRWNSALVALYGRLTDSGKAHKKALIACVRKLLIFANAVVERGTPRIKNAPAKQAT

SEQ ID NO: 472913 - protein, 409 aa, unidentified
MLLVGVDWAEAQHAACLMRPDGTVVHRLTIPHSAAGLARLREAIVAVEVEPAGVLVAVERPDGLLVEALLDTGYVVYALNPKAVDRYRERTRVAGGKTDPADAELLARVLVTDRDRHQPLRPSSPMVEEIRVLARQDERASRDQRRLLNRLRHDLLAVFPAALDAFPELTAVSALAFLERWPTAVVARDQDRSAIEAFLRQQFHSQARAAAGRIHAALQADALTAPLHLAAARAGAIQLAARQLLLLHRQRAAWEKRLRELLEGDGAHPDGEVLLSLPGLDARLAARVLGEIGDRRERFPTPAALQCYAGTAPTTKASGRSRVVVARGACNRSLRQALFRWAFCSLPRSAWARSFYDQQRAAGKGHFKAIRALANRWLEILHHLLATGQRYDENVHQRNRARATRPAAA

SEQ ID NO: 472914 - protein, 460 aa, unidentified
MNRKRSKSRIDRTLPMMHPNAAAIDVGATIHMAAVRADRAPQPVRSFGTFTTDLHRLVDWFTECGVETVVMESTSVYWIPIFELLDARGFTVFLVNARDAKHVPGRKTDVSDAQWLQRLHSYGLLRASFRPKGQIAELRAYVRQRERLLEYAASYIQHMQKALTEMNLQLHHVVADITGSTGLRIIRAILAGERDPEVLACLRHYSCHSSAETIAKALTGSYRTEHLFALEQALALYDAYHEKASACDVRIEAVLKELSIHRGRDVGSVPPASRRQHRTDQANALAFDVRAALFALLGKDITRIDGLGPYLSLKLIAECGDDLSSWPSAKHFTSWLGLAPSNKISGGKMLLSRTRRSGGRAAALLRLAAVTVGRTDTALGAFYRRLSSRIGKAKAVTATARKVAVLFYNAVRHGMEYVDPGASSYETRYRTRVVNNLHRRAKAFGFVLQPLEAKAHAVVS

SEQ ID NO: 472915 - protein, 468 aa, unidentified
MRIIGVDYHPSVQQIAWVDKETGECGEERLAHCAEAEQFYRDLKQKGVTVRVGIEATGHSRWFERLLAELNFEVWIGDPAQIRAKQVRKQKNDRRDAEHLLKLMLENHFPQLWVPTPENRDVRQLVWHRHRLVQMRTRVMNQLQAIAMNEGVRRKRGLWTRRGRAQLEALTLPPWTSRRRQELLELLDRFDPNIDELTEAIAQEAQRRPEVERLQTHPGVGPITALAYVLVVGTPERFACGKQVGSYLGLIPCEDSSADHWRLGHISKQGNALLRYLLVQSALSAAQAEEEWRRKYVHLTMRRNHAIAKIAMARKLAVRLFWMWRRGWNLEPVQPGPHRWVAFAKPPSLSFVVDFEHSKPESPASCHHGTEEENFAIRKLLLEIPAMLLHQESLLVRHVMRECRARRDQLEKIVFFGHGVGNCSSGGSQASTGTARPGSATCCSGVASPGSKPSTCSASTAKTCGICL

SEQ ID NO: 472916 - protein, 445 aa, unidentified
MHTARRIIHICEGVVAAGFTGADIGLKSLLESEVIIINTTTLFVGIDVSKTSNTVRLMDGGGDTLSLFSVPNNLDGAAKLQEKLRYTLLHTDYSKVTVGMESTSTYADHLAKYLRNDDFLRKWECTVYVINAKNIKNFKKSYPDLDKTDDIDTLIIADYLRFGRLPKSVCHDEKYLALRNLTRARFQAAQNLSREKTRFLETLFMKFSTLDSAKVFSDTFGTTALAAACEFLSVDDIIYTPIGDLADFVNQKGKGKFADPQAVAAALQAAARSSYRISKTVNDSLNQLLAIRLVGIKSIEEQIKSLDKAIESFMGAFQNVLISVPGIGPVYSAGLMAEIGDISRFKGQASLAKYAGLAWSKHQSGGFEAANTKLIPSGNKYLKYYLTEAANKVRMHDAEFADYYRVKSREVPKHQHKRALALTARKLVRLVYSLLNTNRLYTPRL

SEQ ID NO: 472917 - protein, 354 aa, unidentified
MMIVGCDYHPSFQQIAFVDTESGELKEQRLTHREEAEGFYRSLAARGQQVRVGMEASGHARWFERLLAELQFEFWVGDAAEIRRKRGRKQKTDRHDAQHILGLLLKDDFPPIWVPSWENRDLRQLLWHRHRMVQARTRIMNQLQAVALNEGLLCKKRLWRERGRQQLEAFPLAPWAGRRRHDLLELLDRLNPTIAELSQAIEREVEKCPAAQRLMTHPGVGALTALAFVLILGDAGRFQCGKQVASYLGLVPLEDSSGNRRRLGHITKQGSSMLRFLLVEAAQVTVRSLPEWRRKYAHLMMRRGRKTAKVAMARRLAIRLYWMMRQGWDYQQWSKFGSHAGQPAPGDGVQSNIE

SEQ ID NO: 472918 - protein, 410 aa, unidentified
MDVVHERCCGLDVHKRTVVACVIVPGPDRVPAKQIRTFGTMTVDVLQLADWLGELHVTHVAMESTGAYWKPVWNLLEHSFELLLVNAQHMKAVPGRKTDVKDCEWIADLLRHGLLRASFVPDRFQRELRELTRYRRSLVEERAAEINRLQKTLEGANVKLASVASNVVGKSARAMIELLLAGSSDVARMAQLARGKLRLKIPQLEQALGGEVGPHQRFLIAQQLAHIDFLDDAVEHVNAENQERMRPYEEELDRLDTIPGVGRKAAEEIIAQIGVDMSRFPTHRHLASWAGMCPGNNESAGKQKSGKTRKGNRALRAILTEVAQAAARTRGTYLAAQYHRLTPRRGKKKATVAVGHSILVIAYHLLIERSQYQDLGAHYFDTRDRAALERRLVRRLESLGNRVTLEPAAA

SEQ ID NO: 472919 - protein, 311 aa, unidentified
MYYIGIDVSKKDLSVFDGKDMKFINQKGLTSFKKYLKKKYHLQEIVIVFEPTGIYSQYLKEFCAENSIKAYILNPKQSHNFARALGIRPKTDKIDARNLYQFHKLIDFKDIQVPKVDQQAKTLVSYLVSYEFALRQRISLSHHLESLRDKQLITLIKKELKRAQRLEDEIFDDIKEYLGKNQNLKEDYQRLSTIPGIGEKAAIALLTLFKTYPDTNRAQITALAGLDPVKRESGTSVKYQVKISKNGKGIYRKILYLPTLCATVHHQKIRVFYQRLLANHKPKKLAIIASMRKILLIAHAIYRDKTEYMAA

SEQ ID NO: 472920 - protein, 374 aa, unidentified
MPQSRTLYVGLDVHKESIAVAYVAQDHGAEVISLGTVGTRQCDIDKLLRHLQSKSPQLVFVYEAGPCGYWLSRSLMKKGYVCWVVAPSLIPKKPGDRVKTDRRDARQLARLMRSGDLTPVYVPAVDDEAIRDLSRAREDTLRDLKAAKLRLKAFVLRHDIRSTGRANWSPAHLRWLSEVVCPTPAQQMVFQEYVQTVTEQTERLQRLEHELHEQVKTWRFQPVVEALQALRGVQFTVAVTTVAELGDLTRFANPRPLMHYLGLTPSEYASGARRQQGSITKTGNTHARRALVEGAWAYRYPAKVSRHLQLRLENLPKAIQAISWKAQVRLCKRYRQLLAKGKNANQVVVAIARELSAFMWAIAKQVTMAPKDQS

SEQ ID NO: 472921 - protein, 344 aa, unidentified
MTQYAALDVSQEMTAVCLVDEAGRVIGEAKLPTCPDAIATWLGKRAPNLVRVGLETGPMAVWLWNELHAEGVPIVCLDARHAHGALKVRPNKTDRNDASGLAQIVRTGWFKQVQIKTRSNYEVRALLTARDVLVRIRVKMENEIRGLLRTFGVLFGKATGGFSRRADEIVAGELDVSPTMKRLVEAIVQARAAVLDQIKGLDRQLIATAKVNPIARLFMTAPGVGVITALSVASAFDNAERFKRSSSAGAYLGLTPRRYESGEVSRNGRISKHGSTLTRKHLYEAATTLLTRTVRFSTLKAWGLRLAKVSGFKKARVAVARKLAVVLHAMWKSNTEFRWSEAAT

SEQ ID NO: 472922 - protein, 352 aa, unidentified
MQVLYPRCAGLDVHKDVIVACVRCVSTPVHQEVRSFPSTTSGLQSLDEWLSSHECSHVAMEATGVYWKPVWHILEADFELVLANAAHIKNVPGRKTDVNDATWIADLLAHGLIRSSFVPPAPIQELRDLTRTRKQLVREISQHCSRIQKILEDANLKLGSVLSNVLGKSGRAILHALIAGETNPQLLADLAEGTARKKRAELIEALHGRIRDHHRGLLKVHLELVGALEQALADIDATVGKTLAPIRDSARLLTTLPGVSDLTAQVMVAEIGVDMSRFPTAAHLISWTGLCPRNDQSAGKRRSSRVRKGAPWLKTALVTAAWAAVRVKDSYLQAQFHRLRSIVRRLSMCRIA

SEQ ID NO: 472923 - protein, 468 aa, unidentified
MPSKKSPKKRELDQLACVFPNAAGLDIGSAEIVAAVPPDRDAEPVQVFQTFTPDLRALVAWLLECGIGTVVMESTGVFWIPIYELLEAAGITPYLVNARHVKTVPGRKTDWNDAQWLQKLHALGLLAASFRPDAEIRTLRTLVRYRAELIERRAPHINHMIQALKHMNIQLNLVLTDITGKSGLAILRAIVAGERDPQQLACFRESGCKHSEAEIAKALTGTWDDAQLFILEQALEIFDYYTAKITGCDDKLEQQYQALESRAEKEAALPDLPPAKKDSRSKNALSFNARAQIARVVGVDLVAVMGLSAVTVQTIISEIGTDMELFPTVKHFCSWLGLAPHNDKSGGKVLRSRTMKVRNRANQAFRQAAQSVAQSDSSFGAYYRAMRARLGPKQAIVATAHKIARTVYHLLKTREPYQEESAAEYDRKRRERELKHLARRAQKLGYTLTVAQATAPESSPEPGGEGRF

SEQ ID NO: 472924 - protein, 422 aa, unidentified
MDTQQFEVIRPKCAGLDVHKKSVVAAVCTSDPVTLTASYKTRVFNTTNSDIAALRDWLLAQDCRDVCMESTGKYWIPIFNILEPHMHVILTHPKYVKAIKGKKTDKRDAKWIANLFRFDIVKASFIPPADIRALRELSRYRLKLSYMRTAEKNRYQNSMTISRIRIDCVLTDPFGLSASRIMDYLLSDEPFDEETCRSLIDRRVKASKDEVMDAVHGYHILEEQKFKMTHAKAHMDFINKSIDGIEAELFLRSRQYDTQIKQIATVTGITELSALFILSEIGADMSVFESDRHLCSWAGLTPANNESANKKKSTRCSKAGQYLKPLLIQCALAAVKNRKEPYFAIKYQRLAKRRGKKKAIIAIARMMLTSIYHMLSDNEDFHPDDYEATVNPPKQKPVILTLDNTLQFLSDYFADPVPPVRI

SEQ ID NO: 472925 - protein, 400 aa, unidentified
MSGLKGNFDCIVGIDISKDKFDACGITGKETKLFQISTSMDRKGFEKLKRHLGTVSVSSVLIGMESTASYHVNLFSYLVAEGYKVILINPLLISNYVKMQLRKTKTDKKDAVVIAQFLLANGDTLIQRATPSLISDLRDLSRQRESLVDEMTSLKIEIKQLLNITFPELEHMVGIFTKSILKLLQQYPSAFSLRDADIGQLSQTLITDSYGHKREEFAKELIKAARFSIGTNSPAKEMIIKQKIGLLLHLEEALQEITDMLIEMARRLMEEDINIMTSIKGIGDKTAANFLVEMGGDINKFECSGKIIAMAGLDPAVYQSGQHEGRGRITKRGNRHLRRIIWMMTTSVIQYTDIFHAYYLKRRKEGLPYKKAVLATAHKLIRVIYAMLTQRKTFCPQGNS

SEQ ID NO: 472926 - protein, 430 aa, unidentified
MSKPVSVCDVLTHKSTYPAQIHSHGGVDVTEGFTRFFGLDIHKEYFVAVGVNTQREVVFGPQRVSNHQLDDWISRVLTPQDTVALEMTADTYLFYDTLAPHVHSVIAVHPPNVPLVTNAQVKTDKKAALALAQLHAAGMLTRVWIPPQKVRDRRAMIARRGKMVRLATMAKNRLHSVLHRNHLDQPEKPFSPEQRSWWESLSLSETEQFLVRSDLDTLEFAQKQVAKAEESLQKGSAQDELIPLLVQLPGVAMLTAITILAAIGDITRFPDAKKLVGYAGLGTRVHDSGMTHSSGRITKTGRKDLRCAMVNAANHAIEHHPHWKKEFERLEPHLGRSKTVVMIARKLLVAVWHGLSEKAADRFAEPASVARSFFAYAYRVGVRNLPEAPSALAFTREQLDRLGIGQELQEIPWGSKHHKLPASKLLPEKE

SEQ ID NO: 472927 - protein, 353 aa, unidentified
MNYTGIDYHKRYSVACTLDAQGRLLQQARIDHNAPEGFAAYFAALDGPSETVIEACWNWATLYDLLEETKGVAKVVLSNPAKNRIIADAQIKNDRVDAKALATLLRGNFVSTVHVPGKAVRQKKHTVRQRFWLARLRTMARNRIHTVLDRHPRLERPAVKDPFSNQGKAWMKRVGLPVPDRQLLDEDLELHELLDRHIRALEERIESDNAADPDAARLRTLPGVGKVLGPVIALEIDGVSRFKTADRFCAYGGLVPTTHSSGGKTSHGRMLPFCNRWLKWAFIEAAWVAVGCSDYFGTFYKRHRARGKGANEAITITARRMATIAWKMLTEQRDYAKVPVAIKPLSPAALAKD

SEQ ID NO: 472928 - protein, 364 aa, unidentified
MFTERTSVGLDVHARSVAAAAIDGDTGVVCQSRLTPSFEQIRSWLHALPGPVAVAYEAGPTGFGLYRRLTAAGIRCEVAAPSKLQRPAGDRVKTDAKDALHLARLLRLDEITPVAVPSVEQEAARDLVRAREDCRGDLMRARHRLSKLLLRHGIVYYGGAAWTGKHDRWLIHEAFPQLTGQPTRFTFDTGYEAVQAVKGRRDRLDTLIEQMAAGSEFTAVVRRLGCLRGISTLTGFALAVEIGDWNRFTGASIGAFVGLTPAEYSSGTSRTLGPITKTGNRHVRRLLVEAAWHHRARYRPGKTMRDRWALAPAAAQARGDQGNRRLHQRWIGFLDRRKRDTIANVAIARELAGWCWSLATLEQP

SEQ ID NO: 472929 - protein, 377 aa, unidentified
MQNTYYIGLDVHKETIAIAYTYEGSRKEATYYGTCGGTNTAVERSLRLLAKKLEVKIQDFKVCYEAGPTGFVLARRLNQLKVETTVMSPSKTERKSNEKIKTDKRDAKKIAKLMRNGDITPVRIPPALDEAVRDLCRARTDASDDLSRAKQRLGSFLLRNGYRYDGKTKWTPGHMRYLRHLTLPDPTQALVLEGYLQTIDACIERVEAFEDKMKQVLADWEWRPIVEALMACKGFKEVAAMTVISELGDLRRFKSPRQLMAFLGLVPGEESSGGKRRQGSITKCGNTHARWMLCESAQAYRREPKISAQLSLRQDGQPHEVKALSWRMQKRLSKRYRRLRARGIRDAKCVVAIARELCAFIWELQTKLNLPLPTNNA

SEQ ID NO: 472930 - protein, 389 aa, unidentified
MSDSTSESDRIVIGIDPHKASWTAAAVGPGLRPLATIRVPVDQDGYRNLCRFAARWTDVVWAIEGAGGLGAPLATRLSADGIAAVDVPAKLAARVRVLSTGHGRKNDDADAISVAVAAMSAAGLRTVTVDEAVTALRALVEHRDDVVKTRTQTVNRLHALLTQLLPAGAPRGLSADTAAQLLRPVRPRGIAARTLRRLAAELITEIRHLDRRISVANTEITAAVQASRSTLTELRGIGDLNAGKILARVGDVHRFRSAAAFASYTGTAPIEVSSGDVVRHRLSRAGDRQLNCCLHTMAITQLQREGPGRTYYLRKRADGKSHKEALRCLKRRLSDTVYRCLIRDADQQNGAGPGGHQGATTNSSAAGSTPTTGSSDKSLPEPATTDPTT

SEQ ID NO: 472931 - protein, 336 aa, unidentified
MEIRNFIGIDVSKATLDITLLDQKGKQLFYKNIKNNGKEIADLVNELRKNYEAEIEACVFCMEYTGVYNLPMINYLSGIKANIWMESGHQIKLSMGAVRGKDDKVDSYRIAKYAFDKRDKMKVWKAPREIISKIADLITYRALMIKQKKALEVACKEKAAFKPKAWMKSIKASTEMLAKGLKKEIEKIEKQVLAMIKEDKNLSRIYPIIISVQGVGFVTAAHIIVATNEFLNINDPKKFGCYCGVVPFDHKSGTSVRGKARVSHMADKDMKTLLHLCATSSIRCKGEIKDYYERKLAEGKNKMLVLNAIRNKIILRIFACVTRNKKYEKKYTYLVA

SEQ ID NO: 472932 - protein, 355 aa, unidentified
MTVTIVGEARPVTCRTAITGGVDTHADTHVAAALDPVGGLLGVREFPATAAGYAGLLGWLAGFGAVCLAGIEGTGSYGAGLARHVTAAGIRVVEVDRSDRQDRRRQGKSDPLDAVSAARAAQSGRASGAPKGRDGAVEAIRALMVARRSAAGERTRTINQARALVLTGPDDLRARFAKHKPAALVTGLAALRPRPGDVAGHATRIALRELGRRAQFLDGQLVRLDELIIPLVTARAPGLLAIYGAGPRTAALLLIAAGDHPERLRSEAAWAHLCGAAPIPASSGKVTRHRLNPGGDRQANHALWRIVFTRLGSDPATRAYAERRTAEGKSKAEIIRCLKRYVAREVYRQLRPAAG

SEQ ID NO: 472933 - protein, 445 aa, unidentified
MARKTKKQRLTIVHPHCAGIDIGSREHWVAVDPQVCEQPVRCFTTFTDDLLTLAAWLKSLGVEVVAMEATGVYWIPLYEVLDAQGFDVYLVNSRATRQVSGRKSDVLDCQWVWQLMSHGLLKGAFRPADAVCSLRSFVRQRAGKVQEQSRCIAHMQKALTQMNIQLDNVVSDLMGKTGSAILRCIVAGERDPQQLAKWRDRRLRADEATVARSLHGNWRGEHLFALAQALAHYDFIDEQISACDQQISQALGALPTLCEEPAPKPVKPLRSAHRTAAEQKQLHQALHIAMGVDLSAIPTLGIDTVLVLAGEIGPDLSRFPTERHFCSWLSLAPPTHISGGKPVSGRKLKTFNRAGQALRQAASNARRSESYIGASHRARLARMDTAKAIKATAHQLARLIYAMLTKGQAYVEQGMEAFEARSQERQLRALQRKAGKFGLALTEAA

SEQ ID NO: 472934 - protein, 346 aa, unidentified
MMKIIRVGVDLAKNVFQVHGVDVREKPVWQCCLRRKDWLAEICKRVEPGAEIGFEACAGAHHWARELMARGYRVKLMAPQFVKPYVKSNKTDRNDAAAICEAMSRPSMRFVALKSTEQQDIQAVHRVRSDLLKQRTAKANQIRGLVGEYGLVAPLHLRALRGAIPEWLEDAENGLSDRFRRLLAGLADDLRELDNRILELDKEISLLVQDSSAAQRLLQLRGVGPITATALVAALGMGEAFRCGRDFAVSVGLTPKQHSSGGKDRLLGISKRGDAYLRKQLVHGARAAVRTAAKHNDPLSQWIQKLSARKHANTVVVALANKTARMAWALIRYQTDYKPPLAASAM

SEQ ID NO: 472935 - protein, 423 aa, unidentified
MEITTLGIDLAKSVFCVHGCDANGKAVLRKQLSRRQLLSFMANLPQCMVAMEACASAHYWAREIEKLGHQVRLIAPRFVRPYVKANKNDASDAEAICEAATRPSMRFVAVKSAAQLDIQAVHRVRMEACASAHYWAREIEKLGHQVRLIAPRLVRPYVKANKNDASDAEAICEAASRPSMRFVAVKSAAQLDIQAVHRVRQQLVKTRTGLANQVRGLLAEHGIVIARGFAPLRRAIPVILEDRDNGLSAVMRELLREIGERLRFIDGRLRQYDLTIQQLFRQDERCQRVAAVEGVGPLTATALVAAVGNATEFRSGRELAAYLGLVPSHRASGGRTVLLGISKRGNRYLRTLLIHGARSSLYRIERQRGARAIWAARLKLRRGANVAAVALANKNARVLWALLSKGQSYRPAPFPARVPQAGG

SEQ ID NO: 472936 - protein, 309 aa, unidentified
MDTIVVGIDVSKDRLDVSVHPAGTASSYSRDAGGIELLIEELRPVCAQLVAVEATGGFETVVAASLAAAGLPVVVVNPARVRAFAASLGQRAKTDRIDARVIAQFAAATRPPVRSLPDAATQALADLVTRRRQIVQMIVAEAQREKRASARAKKSIQRLLKSLRAELSEIDGEIDESVRGSAIWRGKEDLLASVPGVGSGTARTMLAELPELGTLNRREIAALAGLAPFTRQSGKWRGKSFIGGGRSSVRTALFMAAMTAMRCNPALRAFHHRLRAAGKPKMVALIAVARKLLTVLNAILRDNRKWQNA

SEQ ID NO: 472937 - protein, 359 aa, unidentified
MQTQSNKIDFNGQNIYVGFDVHLKSWTVTIMTEKLTHKTFSQPPKPELLYQYLKKTFPGGIYHSAYEAGFCGYWIHNKLDEYGINSIVVNPADIPTTEKEKVMKTDPRDSVKIARSLRNGDLKPIHVPSLKTLEDRGLVRTRATLVKDLTRYKNRIKSSLYFHGIELPQIFSNDQTHWSNRFIKWLEEIEMTEPSGKLSLNALIGESKHLRASILQVTRQIRELSKTDCYKKRQEMLCSIPGIGILTAMIILTELETIDRFANLDQLCGFIGLVPSTDSSGDHEVVRDITPRGHSVLRSAIIESAWIAARLDPVLNKCYHDYCKRMEPNKSIIRIARKLVSRIRFVLKNNQPYVCSVVK

SEQ ID NO: 472938 - protein, 297 aa, unidentified
MRDSRTRYVGLDVHQESIAVAYAREARDAEVVCWGRLGTRQRDSDKRIRTLTSKTQQLVCVYEAGPCGYGLSRDLSRKHLRCGVVAPSLVPTKAGDRGKTDRRDATQLARLLRSGDLTAVDVPTGADAAIRDLARARAEAIRDRQAAKNRLTAFLLRQDLRYEGRATWGPAHRRWLAAVVCPTPAQPIVFQEDGRAVAAHDARRQRLETARREPVQGWRLAPVVQARQARRGGQCTVAVTRVAERGDRTRFEHPRPLMSDLGLTPREYSRGDRRRPGTMTTAGHTCARRALIAGAWA

SEQ ID NO: 472939 - protein, 337 aa, unidentified
MTTLPFTTLPFTTLPLGIDIAKLKFNVCLLQEGGKLRHKVFPNTAAGFAQLCNWIEKQGAGQVHACLEATGTYGDSLATYLHEAGHVVSVVNPAAIKAYAQSHLSRTKTDRVDAALIAGFCSERRPPAWLPPAPELRELQALVRRLESLAEMRTMEENRLSSGIAVEAVRASVEELIAHLCEQIKKTEVLIRSHIDRHPGLKRQRELLDSIPGIGETTAAALLAEVPDISHYRSARQVAAFAGLVPRERQSGSSVRGRVRLSKIGNARLRKALYFPAITALRCSEFFRAWAKGLRERGKCKMSVIGATMRKLIHLAYGVLKTGKPFDPEWMQRTETA

SEQ ID NO: 472940 - protein, 367 aa, unidentified
MKKVSTAAAKQIRNFSEQKLTIGLDLGDRSSWYCVLDETGEVLLEQKLSTTPKAMREVFGAMPRCRIALETGMHSPWVSRLLSELGHEVIVAHARNVRLIGESRKKDDRLDARTLARLARIDPQLLSPVKHRSAKAQADLTVIRARAGLVRSRTALVNTARGLTKSYGERLRGCNPRNLNPEKAQGLSPELQAALQPLLAAIESLSEQIYEYNQQIAKIAKESYPQVARLEQVKGVGTLIALTYLLTLEDPHRFRKSRDVGCYVGLQPGRRNSGQSEPQMHISKEGDPYLRTLLVQGAHHILGPFGADSDLRRWGLKLAERGGKNGKKRAVIATARKLAVLLHRLWVSGEAYEPLRNSHPAATPAAA

SEQ ID NO: 472941 - protein, 369 aa, unidentified
MRRDILHIGLDVDDNFFTGAIFNSRTGKTEIFRVRPTIGALLKYLKKLEEKGEEFRICYEATYIGYSLCRELRKRGIECEVIAPSLIPVKPGKKVKTDKTDAINLSRYYSRGDLTIVNVPDEEDEAVRSLIRSRSFVVEERKRLKLHILSLCRVHNLNYKSESKRKNYWTQMHIKWLKEKISGLNENLRKCFELLIEQYISQNIIIEEYDREIKAASEKERYSKKVKALNCFRGLDTLSSMTLITEIGDVKRFSHPNKLTCYSGFDIREYSSGGKEQKYGITKMGNKRIRTTLIESCQFNFSEVKISRRLKLSREGAEMKYINIADRCMERLRKKSIMMKVKNKHHNKIKTACAREMLCFIWEALMLAS

SEQ ID NO: 472942 - protein, 340 aa, unidentified
MKDTVIGIDLAKNIFQVHGASRAGEVMFRKKLRRQQFMQFMATQPPALVVLEACGSAHYWARELAGAGHEVRLIAPQYVKPFVKRQKNDAADAEAIVIAARQPEMRFVEPRTEAQQARGVLFRARQRLVHQRTELVNALRAVLYEFGLVVPQGIAHIRHIEAMLDEAVLPEAVKQECLDLLRQISEQSVRIDVRTKKIRMLAQESENTCRLQSMPGVGPLTALAIEAFAPDLQSFRRGRDFAAWLGLVPRQFSSGGKERLGKISKAGQADIRRLLIMGAMTQVNWASRKAPAPGSWLARMLARKPRMLVAIALANRMARAIWAMATKQEDYRDPALSVAA

SEQ ID NO: 472943 - protein, 332 aa, unidentified
MENFYFIGVDVSKKKLDFCVMFEGKVVHEEETANHQGAIIALLHQLEEEYGIAGGQMLVCAEHTGQYTFPLACACKAVECKLWLENPAEIKYSSGVQRGKNDKVDAKRIAIYAKRFQDRVQYYERPTEDIERLKQLEAERTLYVTDLAKYKGQLKDQKDYMPRKLYECKMKRLQALMDDLEEAIQAITDEMDEVIASCPVLSKQRELLMSIDGVGCVVATNMIITTEAFTRFDDPRKFNCYAGVAPFSYSSGSSQHSKARVSHRADKVMKRLLHLAAVAVTHRVGGELKKYYERKVAEGKNKMSVINALRAKIVARMFAVIKRNEKYKPILS

SEQ ID NO: 472944 - protein, 272 aa, unidentified
MKCYLGIDISKNFLDVHIRPAGIKERFQYDNTGIRLLITLLKEYSEIFVVLEATGGYERTLSEALSSESISYHIANPARVREFARATGKLAKTNRIDAEILSLFAEKIELPISTPKSKDEILLKALIMRKTQIKSELVREKNRLDKTIHPIILEDIKSQIKALQEKITKYDSEIKNLISTLDNFSSKAKIIASVPGIGCATAAILVSELPKLGKLNGKQIAALVGVAPMNWDSGGCSKKRSIKAGRTFIRHSLYMATVVAITHNPKLKEFYQ

SEQ ID NO: 472945 - protein, 424 aa, unidentified
MMDTLHERCAGLDVHKAMVVACVRLMIGGKVNRECRTFDTTTTGLLALLKWLTESGCTHVAMEATGVYWKPVWNILGDGPFELRVANAAHIKNVPGRKTDVNDATWIADLTACGLIKASFVPEEAIQQLRSLLRARTQLTREQTSHTQRIQKTLEEANIKLDSVISDILGASGRRMIEAMIAGVRNPSKLAELAGRRIKASPKQLYDALHGRLTDHHRFLLRLYLKQYDALQAAIAEIDQQVDAAITRMDEEAKEGQPPFRSLIDLLCTIPGISILGAMIILSEIGSDMSRFPTAGHLLSWAGLCPSQNESAGKRRSSRLRKGAPWLKTLLVQCAWAASRKKDSYYKAQFLRLRAKRGPKKAICAVAASMLTAIYHMLKDGTEHRDLGAAHFDRRSTEVKTNRLVAQLTKLGFKVELQLLADAA

SEQ ID NO: 472946 - protein, 304 aa, unidentified
MFGIGIDVSKATLDVAVHEEQFRQFSNDKRGFVGLIRWLKKWPIKQVVLEASGGYEHAVLDALHAAGLPMVRINPARARRFAQGTGRAAKTDRLDATVLAEMAHLLKLTRYVPPAPWQQRLAEFAQCRRHLVQMRVSETQRLRRLVDPALIAIKQRHIAQLSEDLKQLDRAIAEQLEGQPGWKEIGSLKGVGPILVSTLACELPELGSLGGKAIASLVGVAPMNRESGTWHGQRRISGGRAVVREALYMAALTAIRYEPKLRDFYAGLKAKGKASKVALVAVMRKMLVILNARKRDAEVALGSP

SEQ ID NO: 472947 - protein, 340 aa, unidentified
MAAIGVDTHKFSLAACAVDERGAVVAEASFVNDPAGHDEFARWAAAAMPRAVVGIEGSATYGAALVHSLGPTWSVREVPPHLTRRERIRTRRPGKSDPGDALAIARVTLREHELPPPRRAGASRDLQLLVEARDDLVGEATRMRNRLHADLLVLLPGDRTVAGRLVGPRRLALVAARLRRRPELQAELARSRLAALRRLDAEIGALEARIAARVTGHPLLAIPGVGPLVAAKLLGEIGDVRRLRSADGFAALAGVAPIPASSGQRQRMRLNRGGNRQLNRALFTIAMVQLRHYPPAQAFAARKRAEGKSGREAIRCLKRHLARAVFHALRRGVTEATAAA

SEQ ID NO: 472948 - protein, 371 aa, unidentified
MEHTRFIGLDIHKERISVAVAESGRSGAVEYLGEIANELGAISKLCDRLRRPGKPLAFCYEAGPCGYGIHRQLTRLGHRCDVVAPSLIPTKAGDRVKTNRRDATMLARLHRAGELTPVWVPDADHEAMRDLIRLRSVVRQIVTRARQHLQGFLLRHGRKHGRGTAWRMAYRRWLSTLAFEHPAQQIALQDYVDAVMDAERRLKRVEEQVFGLLPDWNLRLVVDGLQAMRGIALINAVVLVTEVGDFTRFSNPRQLMAYFGLIPGERSSGETVRRGAITKTGNAHVRRALVEGAWAYRMKARIGRHKVDRIEALPKVVRDIGWKAQVRLCTRYRRLRARGKTANVVNVAIAREMVGFIWSIACTIQSAPRAA

SEQ ID NO: 472949 - protein, 342 aa, unidentified
MISVGIDVSKGKSTVCLLKPYGEIICKPFEVQHTEKNLEELANLLQKLDGEIKIVMEATGIYHLPILTFLLEKGFFISVINPFMMKRFARDNSLRGAKNDRLDSVMIASYGIEKWHKLKKYEVNDGIYPEIRFLGRQYHRFMQTHVKHVQELTHLLDHTAPGLKAMFNSWNEHSNRDKLSDFVERFWHFDLITSLSREEFVEQYLLWAKEKKYHQSRSKAEKIYDLASNGIPTLSSRTPSTQMIIQEAINVLRIVNNSLYRILSRMKELAKSLPEYATVRSMGGVGDALAPQLIAEIGDARRLHNGHALVALAGIDPPPYESGKFVGTHRRISKEGHPFCAR

SEQ ID NO: 472950 - protein, 354 aa, unidentified
MSNKSNLTVATMGIDIGKNAFHVVGLDRRGAIVLRQRWSRGQVEARLANMPPCLIGMEACVGAHHLSRRLHSQGHDARLMPAKYVRPYSKGQKNDFRDAEAIAEAVQRPTMKFVATKTADQLDLQALHRVRERLVSQRTGIINQIRAFLLERGVAVRQGLRFLRAELPIILATRSDVLSPRMMRVIEELAGDWRRLDERIEGLSQEIEALARQDPACERLMTVPGIGPIISSAMVAAIGNGAVFTKGRDFGAWLGLVPKQISTGDRTILGAISRRGNRYLRALFVQAAWVVLVRIKDWDRYGFKAWIDAAKKRLHHNVLAIALANKLARIAWAVLNKERAFECVKTRATASQPA

SEQ ID NO: 472951 - protein, 348 aa, unidentified
MTVYIGVDFHARKQMLSYLTTEDGEIQQIELLHEQDDVRGFYGQLRSEGPVIVGFESSGYAAWFEEMLEELGCEIWIGHAAQIRKCARRRQKNDRRDADLILELMLRGDFPRIHRYSRENREVLQQLRYRQRLVKMRTMTINSLRFMAASRGVTLRGKLQSQRGQGRVLGLALPTPMDQQRDELCRLLMELQQKIETVEEVLTQTAVADVKVKRLRTHPGIGLLTGLGLVHTLASIERFANGRKVTAYAGLDPVEDSTGERRRMGSISKQGSRLLRSLLVEAGQVAARHDEELGHVYRRLLVRRGHATAKVAVARRLLVRAFIMLRDEIDFAEFSRRGVAARSSRRSA

SEQ ID NO: 472952 - protein, 336 aa, unidentified
MTIVAGFDVHRAQITFDALDSDTGELTRGRIDATPAAVERWVQRFGDRGVHVALEACTGWLFVSRALERAGAVAHLAEPVETSALRGRKRRAKTDREDARWLRQLLSERRLAESWLPPEHVREWRSRARLRKTLIDERTQWLQRIRATLFHHGVDGTPERLRTSGGREFLQGLALPADARERIEIALAMIDALERQLHPLEAELRKLARRQSGCRALMNLYGMGELTSLVTLTELGDVQRLSASRKAVRMAGIDIGVHRSDRRARVGKLNRQGSPHLRWALYEAAAGGVPPEQPRPPGLPRAQGTRPFAHTRIADDRPQARTALFPRSQRARTRRA

SEQ ID NO: 472953 - protein, 342 aa, unidentified
MYYIGLDVHKKTISYCVKDASGQVHQEGKVGATRWELDDWMNTLPQPWTVAMEATIFTGWIYDHLLPHAQQVKVAHPLMLRAIAAAKKKNDRIDAGKIADCLRCDFLPECHMASTAIRDRRRTLRYRHLLVRQMVQMKNRISGLLMETGVSHNKKRLHKVGYFRELLTANEEVQESIRPLLRVSRDPIVRLQKTEYALVSSLQRDPLLAERIKRLRTVPGVGPITALTWALEMGDVSRFPSIREAISYCGLCGDEKSSADKVMRTPLSKQRNKHIQRVLVEAAKLAPRQDHNLALVYEREKQKGNANRATLAVARKMVAYLLAVDRGQRDFVPFPDSQSAAA

SEQ ID NO: 472954 - protein, 343 aa, unidentified
MDHYVGLDVSLKQTSICVVSGTGSVVREGVVDSDPDAIAAFVRSKAPGAIRIGLETGPTTTWLWTELKRLGLPVICIDARHAKAVLKMQINKSDRNDAAGIARIMQTGWFKEVRVKDLDSHTVKALLASRALLVKIKRDLENQIRGLLKNFGLVIGRAKFNVFAVRAEELIEDRPELIAVVGPLLKARKAIEQQTGDLDRKVLTLARYDAQVRRFMTVPGVGPITALCFKATIDDPTRFKRSRSVGAYVGLTTRRHASGEIDWTGRISKCGDAMLRSYLFEAAGVLLTRVPKWSALKAWGMRLVKRNGLRKAKVAVARKLAVILHRMWIDGTEFNWSKKEVAA

SEQ ID NO: 472955 - protein, 340 aa, unidentified
MLSNYKVMKFIGIDISKSSFVVAYPELTGFKTAEFVNDVKGIKKFISSFSHTEYHCVMEATGNYSTLLLYMLCKEQIATSLINPKQTKHFARMMMATIKTDRVDAKLIAMYGEKMKPEIYKMPTEDIIVLKQKRVVLRQLKKQLTALKNLKESFDALPTTDRKSLSVLSKTTTFLKKQIALVEADLCSIVKESYQAQMKSLTSIPGIGITIASALIITTGGFSQLENAKQVSRYIGLCPTYQQSGTSIKIRGAINRNGDSEIRSLLYIASWSAIRYNEPCKEFYERLKAKGKPSKLALIAVANKLLRQAFAVYKSGDVYCNEHLGQGSRYSDRSLSPKAF

SEQ ID NO: 472956 - protein, 364 aa, unidentified
MNEYSYWVGFDDDAEKICVAILRGEDERPIAEFVVERNDRGMRRLLSQLKRLRGTVRCVYEAGPCGYGLQRWLTSHGVICQVAAPSLTPKKPGKKVKTNRIDARELARLYRGQNLTFVHVPGEEQEALRDLMRAREDARADVLRCRNRLSKFLLRHGHYYTDGVRWTQKHLRWIDSIRLQQPTSEAVLTEYKAALGAALEQLQRYERLVAEEATKPTHAPMVEALSTLRGISTTTALTIKAETGDLRRYRSAPAFMDSTGLVPSEFSTGDDRRQGSITKTGNAHLRRVLIEAAWAYTRRYALRGQVNKRREKLPAELAQVGHRADLRLTGKYRRMVGRHKRPTVAVVAIARELAGFVWAIGQNA

SEQ ID NO: 472957 - protein, 341 aa, unidentified
MKNLFIGVDFSKEKVDVAIIFADGLTETAARVFNEFKTTVSGYKQLVKWVEQNSYGIDSSLWLFCGENTGDYSKGLCNFLYGKGYDMWLENAKSIKDASGLRRLKSDRADASMIAEYAMRNYDKAVMYEPLSESLTQLRELFLYRQMIVRHRCSFQVRRGEKRLTMEKSPVKTMISQSGRHIVSELNKEIEKIDKRIADLIKSDEELTEVFTIVTSVPGIGTQNAVCLMVYTDNFRRFNYDSRKIACYYGIAPFGKDSGTSVHSDPHVHYMANRQIKAMLTQAALAAVNFNPIMARYYMRLVERGKKKQVALNNVKNKLVHLITAMVRNRQLFTTEYKITA

SEQ ID NO: 472958 - protein, 432 aa, unidentified
MVAVMIGVDPHKASHTAVAIGATEEPLAELRVRASESQAERLLAWAQAWPERTWAVEGAGGVGHLLAQQLLAAGERVLDVPPKLAARVRLLQAGDTNKNDPNDARSVAVAALRSPGVREASRDDHAVVLKIWSKRYKDLGRTRTQVACRLHQVLCELIPGGVAKQITAGQAARILESVTPADAVAVARCELAAEFTQDLRGIDAAIRDTRKKLAIAVRAAGTSLTGLFGVGPVIAAAVIGDVRAVSRFPGRDHFAAYNGTAPIEVSSGGRKIYRLSRRGNRRLNHAIHMAAVTQIRYPHSQGRAYYERKLAEGKTPKEALRCLKRQISDAIYACLQADARRAAGAKSPGGQRGNDSLTSAAGSHPQHRLFGKATPGPATHPTTPADAAGDPASAAFPWPPSRASGRPGPGPGKARPRSGARRASLTQPPASR

SEQ ID NO: 472959 - protein, 464 aa, unidentified
MSKLSQRKPSSQAGAQIEVRPFDGLSRIQPHAAGMDIGAHEIVICVPGPDSTQIVRAFGTYTADLHDIAQWLLENGIQSVAMESTGVYWIPLFETLESHGFKCCLIAATAIKRFPGRKTDVLDCQWIQTLHSYGLLESSFRPEADLVTLRTLLRHRAQLIQHRSPHILHMQKAMLHMNIQLSQVLSDITGETGQRIIRTIVAGERNPYKLAALRNYRCKKDEAEIAKALTGTWREEHLFVPRQSLAFFDFYTWQIETCDEQIERTYAAIRPDWGNPDPEDQLWLPSKKPRSHSKNTPENVQVRTHLKRISGVDIVAVHGISTSLAQIIISEIGTDMSRFPTEKNFCSWLGLAPHNDITGGKVIHSRTLKTHNRAGQAFRMAAGSVMWADCAFGAFYRRQKARLGPAQAAVATAHLIARVVYRMLKYQVEYEPLSVQEYEKHYREQQIKYLEKKAARFGFQLTST

SEQ ID NO: 472960 - protein, 367 aa, unidentified
MKKVSTAAAKQSRNFCQQKLTIGLDLGDRFSYYCVLDETGRIVVESRVSTSPKVMEAVFGAMARSRIALETGMHSPWVSRLLSGLGHEVIVAHARNVRLIGESRKKDDRLDAQTLARLARIDPELLCPVKHRSAKAQADLTVIRARAGLVRARTALVNTARGLAKSYGERLRGCNVRNMNPEKAEGLSPELQAALEPLLVALESLSEQIREYNERIEKLAQESYPQVALLKQVKGVGTLIALTFLLTLEDSHRFRKSRDVGCYLGLQPGRRNSGQSEPQMHISKEGDPYLRTLLVQGAQHILGPFGVDCDLRRWGLKLAERGGKSGKKRAIIATARKLAVLLHHLWVSGEVYEPLHNSGRITMPAAA

SEQ ID NO: 472961 - protein, 346 aa, unidentified
MTIVEAARAVTGGIDTHGEVHVAAALDEVGGLLGTRSFGADPDGYSALLSWLESFGSIGKVGVEGTGSYGAGVARFLAKAGVHVVEVDRQNRQARRQSGKSDPLDALEAARAAQSGRAHGTAKSRDGSVEAIRVLVVAKRSARGARIKALTQMRQLTFSAPDQLQSKLKGLPIAAFVAAAQGLRPTRSPDVVTAATKAALSSLAHRVADLEEEISDLDAMITPLLKETAPELLAVYGVGIDTAAALLVAAGDNPERLHSEAAWAHLCGVCPLEASSGKVTRHRLNRGGDRQANRALWHIVITRLASDPRTQAYMERRVKDGRSKSEAIRMLKRYVAREVYRYLPRA

SEQ ID NO: 472962 - protein, 428 aa, unidentified
MIESIATMPSEAIAAYIGIDWADEKHVVALRSAAEAAKIEHLLVDQRPEALMEWIGQLEQRFGSRGKILVCLEQSRGALIYHLMGYELFELYPVNPLQLARYRETFSPGGAKDDLPDADLLSELLYCHRDRLKAWKPDTELNRKLAFFNEGRREAVDQGTRLSNAIKSQLKVYFPLALELLDDDTSTILAADLLLKWPTLEALQKQNSHSLRKFFYAHNCRGESKMLRRLERVQQAKPLTQDQAVIEPAVLRVQMLARQLKALLPDIARYEEHIAELFAAHPNHFLFDNLPGAGRALAPRLCSALGSDPDRWQSAQEISTFHGIAPVRRASGKKTGKRASIHFRQACPKFLRQSFHEFAACSIRYCTWAHALYDTQRARGNGHHAAVRAVAFKWIRILFACWKHRIPYDPQRYLQALHHRGSPLANAC

SEQ ID NO: 472963 - protein, 318 aa, unidentified
MNTIGLDISKNTIDVTLIRTNGQTDYTKIANNPEGFEQLADWIRTKRIRKLNIAMEATGIYYESAANYFSSIHTVYVINPLKIKDYAKSQFTQTKTDKADSKLIADYTRRHQDKLTPYRTPEHPSLHKLINLLQQLKQQHHETQNRLHAAKDNFIRATHQTIILLLSDKITQTATRINHLIKQQNNLNQQYQNLQTIPAIGKATAAVLLCHLTDKTFDTANQFVSFAGLSPRIEQSGTSVNKKGRLSRYGHRQLKRALFMPALVAYRINAFPHLIKNLEAAKKPKMVIIVAIMRKLAKLAYYLYKTQKPFDKTRHQTA

SEQ ID NO: 472964 - protein, 402 aa, unidentified
MNAVGIDVSKGKSMVAIMRPFGEIVSTPFEIKHTSSDINSLVKLIKSIEGESRIVMEHTGRYYEVLAHQLSEANLFVSAINPKLIKDFDNDSLRKVKTDKADSVKIARYALDKWQNLKQYSVMDELRNQLKTMNRQFGFYMKHKTAMKNNLIGILDQTYPGVNTYFDSPARSDGSQKWVDFASTYWHVDCVRKMSINAFIDHYENWCKRKKYNFSKSKAEEIYGKAKELVPVLPKDAITKLIIRQAVDQLNSVSTTVESLRTLMNETASKLPEYPVVMAMKGVGTSLGPQLMAEIGDVSRFTHKGAITAFAGVDPGVNESGSYEQKSVPTSKRGSSDLRKTLFQVMDVLIKTHPQDDPVYQFLDKKRAQKKPYYVYMTAGANKFLRIYYGRVKEYLASLPES

SEQ ID NO: 472965 - protein, 409 aa, unidentified
MSTTFDCPTGPVAGIDTHTDTHTVAVISDTGRHIATDTFPATNPGYVAISEFMATYGVTTVGVEGTSSYGAGLTRHLRTQKYSVVEVLRPTRAVRRRDGKSDPVDAVAAARQVLTGEALSIPKDTSGPVESLRGLQITRRQLVMTAAKLMTTIKSLLVTAPDEIRRRYSAMSTLVMVEALSRCRPSADLADPRNGVLLALKTLATTYRDLQKQGTQLEKHISILVEMINPHVTSIFGCGSVVAADLIVSVGDNPGRIHSEAALAHLCGVAPIPASSGRTHRHRLNRGGDRRANSALHRIALVRMHHDQRTRDYVAKRTKEGLSKKEILRCLKRAIVREVYRVLCLGQAVLPTGQVEVDELKARRIQRQLSQAQVAEKLGCAPARISDIETGKRPLPELRLAYEELLKSA

SEQ ID NO: 472966 - protein, 394 aa, unidentified
MTDALMNSAPTHTRLSAIFVSLELSRSTWLVTALSPASGEKMSKFSITAGDTAELLSRISILQDRAIQRTGYAYPITTIQEAGLDGFWLHRVLMNEGIESNVVDPASITVSRRRRRAKTDRLDGEILLRTLMAYTRGEPHVCAMVHVPSAEEEDQRRISRERKTLIGERVTHVNRIKGLLYSQGVSGYEPLHRDRRKHLDELKTGDGRDLPVHLKRQISRELDRLELLLEHIKSVEADRNKFLLSQVKQTKEPQLEMLLAIKGIGAEVATILWTEALYRHFDNRRQIASYAGLAPTPWQSGSIDREQGVSKAGNPRLRVTLVQTAWLWLQHQPNSALSKWFRERTQANQGRRKKSTIVALALSNLPAEATLKQLTSTSGWSGKLMPHVQFGPRK

SEQ ID NO: 472967 - protein, 388 aa, unidentified
MNKIIYIGMDVHSSNFTLCSFEPGYGFEADKIFGTTQIKEDIFNSTVKYINKLKSMRPDVDVVCGYEAGCLGYDLHRKLKAKEIESVILAPTTMAVARNSSKKKNDYRDAITIAQCLASSAYKAVYIPDEKDENVRDFIRMRDDHKTALKQIKQQLNAFCLRHGHHYDKTKWTGLHLNWLRKLELSKLQRETVEEYLATYETLTSKIAALDVRIEDIASEERYAEKVNKLKCIKGIKTHTALSFVCEIGDFNRFKSADKFAGFIGLVPGECSSGNTERMLGITKAGNRHLRRLAVEISNTYRRGAVGRKSTALKERQKDMPKDVVAYADKATNRCQRKYQRMMFKGKNSNQAVAAVARELCCFIWGMMTGHYSRTAQAEASVYRSELD

SEQ ID NO: 472968 - protein, 391 aa, unidentified
MVCVGIDVAKDKHDCCILDSDGTIRADCITIPNNMDGFKQLLQTIRDCTKKSDKIKVGLEATGHYSYNILGFLLDNGLPTYVINPLHTNLYRKSLSLRKTKTDRVDARTIATMLLSDVDLKSYTDIAYHNEDLKSLTRYRFDKVQERAKLKQSVSRLATILFPELEGLVSSIHGTSIYALLGEYPGAKQISEVHLTKLTNLLTTASKGRYGKEKAIQIREAARASIGSVMPAKSLELKHTIKLIQELASEIDEIEDSIQKIIDELNPPILSIPGMGVNSAAVILAEIGDFSNFSSPDKILAYAGCSPSTYQSGKLTNCYAHMEKRGSRYLRHALYNATKYVCYWNPVFAEYLAKKRAEGKHYNVALSHAMKKLVRLIYALQKSGKAYLAAA

SEQ ID NO: 472969 - protein, 408 aa, unidentified
MQVLYTRCAGLDVHKDTIVACVRCVSPPMHQEVRSFGTTTTQLLELADWLGEHGCTHVAMEATGVYWKPVWHVLEDEFELVLANAAHIRNVPGRKTDVNDAMWIADLLAHGLIRSSFVPPHAIQQLRDLTRTRKQLVREVSQHSLRIQKVLEDANLKLGSVLSDVLGKSGRAMLDAIVAGETDPARLAALAQGTARSKTAELREALRGRITEHHRTMLRLHLQVIDALHRTLGELDTAVGKALAPIQQRTRLLTSMPGVSDLTASVMVAEIGVDMSRFPNAGHLISWAGLCPRSDESAGKRRSTRVRKSGTWIKTTLITAAWAAVRVKTSYLRAQFLRIKARRGAKKAILAVAASMLTAAFHMLRDGTEYNDLGSEHLDRQDRSKTIRRLLKRLQDLGCEVPQMAHET

SEQ ID NO: 472970 - protein, 351 aa, unidentified
MSEIITVGLDLAKNVFQAHGADGAGQPVLRKKLRRGQVLAFFSELQPCVVAMEACGGAHFWGCEIGKLGHDVRLIPPAYVKPFVKRQKNDAADAEAICEAALRPTMRFVPVKSEETQGAAMVFRVRELLIRQRTQAINALRGHLSEFGQVAPQGAGNASKLIAIVEDPESGLPADAIPTLKVLIAALTQLEAEIVKLDAEIARRAKENDVARRLMTVPGIGPLIATAIATLAPPPETFHKARDFAASCWKHAFGVTLGLTPRQHSTGGKQRLGATTKMGERSLRRLLIIGANSVIIKRHVHTEARPGTWLAGMLSRKPPMLVRVALANKMARIVRALMARGGVYQSPATAA

SEQ ID NO: 472971 - protein, 341 aa, unidentified
MSSIAVIGLDIAKRVFQVHGVDETGAVIERRRLCRGEMLDYFGTLRPCLIGLEACATGHHWARELGRLGHEVRLIAPQYVKPYVKRNKTDAADAEAICEAVSRPSMRFVGIKSTEQQAVMVLHRSRDLLVRQRTMVVNALRGHLAEFGVVEAQGMAGTKRLIAVLGDATDRRVPALARRVLSVTVDHLRGLMERIGDLERELVAWHKQSEVSQRLATIPGIGPITATALAATVPDASAFSSARQFAAWLGLVPRQHSTGGKPRLGGISKRGDGYLRRLLMTGATAALRRSKQTRARPWVQELLKRRPAKVVAVALANKMARTAWALMHSGGTYRAPKPGRA

SEQ ID NO: 472972 - protein, 416 aa, unidentified
MKIVRPICCGMDVHKNIIVATIGITNKKTRITEYIQETFSTLNPDLLNLKQWLINHKCFDACMESTGKYWIPIFNILEDEINIYLTHPKYVKAIKGKKTDKKDSKWICDLFKHDLIKFSFIPPKEIRALREISRYRYKLVGMRSSERNRYQNCMTVSNIGIGSVFSDPFGKSAQAIMKEVLESDIIEDEKILKCIHGSCKNKDKILDSIKHCNIETDQRFKMNESMTHMEELQVHIDNCEIEMMKRAAPMFDQFMHITQLPGISTLSAILIISEIGVDMKQFESDKQLACWAGLAPANNESANKKKSVRISKAGQYLKPLLVQCALGAIKDKEGYFGIKYSRIKKRRGHKKAIIAIARMMLVSIYHMILTGETFNPSDYESFRNPNPPIKQQDLTEESAIEFLKKSGFDVSKLTKP

SEQ ID NO: 472973 - protein, 323 aa, unidentified
MIKDIKYFGIDISHLVFDVTDSEGNYYQFQNNVTGFKKFLKLLGSSSHCVMEATGYYHYQLAYFLLESGIKLSVENPLAVKRFIQMKLSKIKTDKSDSKLICEYAKQVKLKLWEGNSKHQTECLQMTRLLSVYTKQSTMLKNKLHGEAVLGNPSKVVVSSLKRSLKHVKKELKTLEDKLLEMVKENHQDILTRLKTIPGIGNKTAVMLVVLTDGFDRFTSGSELCSYAGLTPVIRKSGSSVNGRSRISKIGNQKLRNLLFMCSFNACKYNKACRDIYQRIVAKGKSKKLALIAVCNKLLKQAFAIAKSGLIYDDTYRSILVKN

SEQ ID NO: 472974 - protein, 341 aa, unidentified
MNITRVGIDLAKTVFQVHGIDEKGKTVLRKRLKRAQVLEFFANLQGCLIGMEACGSAHYWARKLTALGHEVKLMAPQLVKPYVKSNKNDRNDAEAICEALGRPNMRFVPIKNPEQQALLALHRVREGLVTARTAQVNQIRGLLAEFGLVMPQGVAKMRARVPEILEDGDNELPGLMRELLARCYEQFQRLDAQVHELEAHIVRWHRNNEASQRLAQVPGVGPITATAYVATVGDGQAFKSGRQAAAWLGIVPKQRGTGGKQQLLGISKRGDVYLRKLLIHGARAVLRHLKPEQAHSWLGQLARRRHCNVAAVALANKNARVLWALLAHGREYQQAHLPMRP

SEQ ID NO: 472975 - protein, 374 aa, unidentified
MKPSITYVAMDTHKRQHRVAWVHPNTGELQEFSVANTAREIERMIKRIRRQAPGEIHVCYEAGLCGFVLKRRLETLGCVAQVIAPSLVWRKPGERVKTDRRDAKKLLSQFVAGQLTEVVAPEAAQEADRELTRCRENAEQDLKRARQRLNSLLIRHGYIYQDGSLWTGRHARWLQGLAFDQAPLRTVVEEYTSEIEHGLTRVPSLDKQLAALAQSERYQAAVGVLRCLRGFDTLTALTVLTEIFEFGRFASPRALMAYLGVTPSEESSGEHRRPGAITKTGNWRVRRLLTEAAWHYRHPYAVGRALKLRRKDQPIWAVDLADRAAKRLYRRYRHLLERGKAAPTAIMAVVRELAGFLWAMLRQLHQHQTPRPSP

SEQ ID NO: 472976 - protein, 391 aa, unidentified
MIYVGIDVAKDKHDCFITNSDGEVLFKSFTISNNREGFETLFQKVQSVSDDLTKVKVGLEATGHYSYNLLGFLLDKGLPTYVINPLHTNLYRKSLSLRKTKTDKVDAHTIASMIMSDVNLKSYSDTSYHNEELKSLTRYRFDKVKQRAKLKSSVSRLVCILFPELEKLVPTLHMASVYAMLSEFPGAKQVANAHLTRFTNLLSKVSKGRYGKETAIAFRNAARTSIGSNMPAKSLELKHTIKLIQELTSEIDEIENEIKLIMDEINSPILSIPGINYRMGAMIIAEIGDFNRFDSPDKILAYAGFSPSTYQSGQLDGAYSHMEKRGSRYLRYALYNAAKYVCNWDPTFAEYLAKKRAEGKHYNVAISHAVKKLIRVIYHLEKTNQQYIKAV

SEQ ID NO: 472977 - protein, 348 aa, unidentified
MKVKTIGIDLAKDVFGVHGVDVRGKALVHRRVTRQHLLGLLAKLEPCLVGMEACGSAHHWAREIEQLGHTVKLMSPQFVKPYRKGNKNDPNDAEAICEAVTRPSMRFVPVKSAAQRDVQALHRVREQLLKSRTALVNQVRGLLGEHGIIAPRGIARARRLLLEILADPERHGLSELFREALQEVAERLRFLDERVGAYDDRIERVFKHDERCKRLAKIEGVGPLVATAMVAAVGNAREFKSGREPSAWLGLVPRQHSSGNRNVLLGISKRGDRYLRTLLIHGARSALCRVERRRDRRSIWACRLKLARGFNVAAVALANKNARIIWALLTRGDNYRPAVSADPGNQAA

SEQ ID NO: 472978 - protein, 417 aa, unidentified
MIEDVVWFVGIDWATQSHSVCLLDAEARRVAQREFAHGGAGLTELRDWLLEKTRAAAGQIAVAIEMPHGPVVEMLLEHGFAVFAINPKQLDRFRDRFTVAGAKDDRRDAHVLAGSLRTDRAAFRQLVSDAPVMIELREWSRMADELQQERTRLANRLRQQLWRYYPQAAKLTDDVADEWFLALWQKVPTPVSAAKAREKAIARILSTYRIRRLDAAAVLRTLREAPLFVASGTTEAACAHIRSLAARLHLVNRQIREAQQNLDRLCDQIEGEENASGQGSEQCDVTILRSWPGIGRINLATLLAEATEPLRRRDYHALRALAGAAPVTRQSGKQRFVVRRLACNRRLQSAVYHWSRVAMQHDAATRKRYDALRARGHGHARALRSVGDRLLFALCTTLRRQTPYDADYNSEKTPATG

SEQ ID NO: 472979 - protein, 438 aa, unidentified
MSNKFIFNLDELFISVGIDVGADFSWMSIALPNQQFVGKPYKILHNSIDSLTTAVSKIKEAEELYSLESRIFLESTGIYHYPLFCYLRDKGFNCSVINPIITKNSTNINIRKVHNDRFDSKKAALVGLKPDLKVSLMPSDLALNCRNLCREYYDLMDNRSAYVNKLQGELRMAFPQYLGIFSKVTINTSLTLLETYTSPSAFLKADKQEIIDIIKSTARFGLTYAQNKYNAIIQAATDANQFGYIIDSNIKRIRLYISFIRKYDEEINSILESLHELVDANEDSDFVKQIHLIETFKGAGFLSAVSIMGEIGDFSAFSKPKQLFAYFGLDPAVKQSGKFEGTKVQMSKRGSAIARRVIHTLTLQSISISRNREAKNPVLREYYLKKCDSKPKLVAMGAVSHKVCNMIFAILRDNKPFKIIAPQEHIKQYNSAKCVIAA

SEQ ID NO: 472980 - protein, 422 aa, unidentified
MLGVGIDWAEAFHLVALGRPTEGVIQLRRVEHSPAAVDQLIAQIAALEPDPAEVRVVLETCHGLLVERLLDAGYVVLPVNPDLVARRRGPARKKDDAEDARIACLLALDRHTSLRPLIPHGELAGELRAIARDDERAARDQRRLGNRLRQDLISTFPAALAIAGDDLGAPTMLRLLERWPTRDQLASASHQELVAFARAGRHGWPDRFADRITQALAADHFTPRAWLVRAKADTIRLAATQLLAIGSQRRVWEQRMAELLVGGPRQGRTRQPGEDNPGQALPGGKVYLSFPGLGDRLAARVAGEIGDHPQQFGSPNALQCYAGKAPVTRRSGKSELVVATRLACNRYLADAVQQWAFCSLRCSGWAREFYDAQRARGKTHHAALRALGNRWLEILWHCLMRGQLYDEATHIANRNRALGQAA

SEQ ID NO: 472981 - protein, 322 aa, unidentified
MKREKSNTKIAGIDVGKRQLDVAVHGVAGGQIFANDVQGVSALVAWLKGQEVGRVGLEASGGYERAVREALSAAGFEVVVHQPAEVRMFARLKRLKAKTDRLDAVLIAAATAQVDAVKAANDPRLVELGERMTAYEQVSEELAKVKTQMEHVTLKDLVEELRVHMLRLKALKAKLLAKVLAVIKAHADLATRYKLLLSLPGVGRVVAVSAVVRMPELGAMDRGQAAALLGAAPFARDSGQYKGMRFIIGGRGRPRRMFYIAALSARHHDPALKVFGDRLKAKGKPPKVVLVAVARKLVEAANLVLARGEPWVSQPQGAHPDA

SEQ ID NO: 472982 - protein, 384 aa, unidentified
MERYYLGVDWADEFHQVWVCDGEGKKVIEIKLAQKAEAMSEFGRWLDERRAQGIELSAGIEKPQGRIVDFLLDHGVVVYPINPKALDRSRDRFRMSQSKSDSFDAYVLADIVRSDHDRLRALQPDSEQAQELKLLTRDHHRLGRHKTRIRNLLDHTLKEYYPRPLEVFADLESKIALDFLTKYPTPQALSNLSRREWNRFAQREHHLGKERCEQLWEELNKPQLKVPEHVVRAKSQLLAVLVGQLKTLSEAVDSYSQKVQRFFASTPAADLAKTLPGGKSGTTISTLWAELGDTQSRWVSFHHLQAEAGAVPVTIKSGKSCSVQFRYACNKLLRYATYWFSFNSINRCEWADKYYRDQRAKGHTHAQALRALGAKWLKIIFVMW

SEQ ID NO: 472983 - protein, 344 aa, unidentified
MKDVSIIGVDIAKKVFQVHGVNEAGEATVRRALRRAQVLSFFAKLRPCLVGLEACGTAHYWARELEALGHRVRLMPPAYVKAYVRRNKNDAADAAAICEAVSRPAMRFVAVKTAEQQAAAGLHRARSLLIKQRTMLINAVRGQMAEFGIVVPAGPQHVGKLTALLADPDELRIPALLRAALTTLAETLTDLKGRIAAIERQILEWGRDNATYRHLITIPGVGPILASALPAMVPAPEIFRSGRDFAASLGLVPRQDGTGGKVRLGPISKRGNGYLRRLLVNGAMAVLNGKRARQDPWLVKLLATKKRKVAAVALANKMARIAWAVMIRQEDFRPALQVVPAKAA

SEQ ID NO: 472984 - protein, 334 aa, unidentified
MENIALIGIDLGKNSFHIHCQDHRGKAVYRKKFTRPKLIEFLATCPATTIAMEACGGSHFMARKLEELGHFPKLISPQFVRPFVKSNKNDFVDAEAICEAASRPSMRFVQPRTESQQAMRALHRVRESLVQDKVKTTNQMHAFLLEFGISVPRGAAVISRLSTLLEDSSLPLYLSQLLLKLQQHYHYLVEQIKDLESQLKRKLDEDEVGLRLLSIPCVGTLTASTISTEIGDGKQYASSRDFAAATGLVPRQYSTGGRTTLLGISKRGNKKIRTLLVQCARVFIQKLEHQSGKLADWVRELLCRKSNFVVTCALANKLARIAWALTARQQTYEA

SEQ ID NO: 472985 - protein, 355 aa, unidentified
MERYIGLDVHAQTTAFAVVSASGRQLSAEIIPTSARELIDRVQRVKRPRAVCLEEGNQSAWLSEVLTPHVDQLVVTVPTKRDRSKPKNDVADAYAVAEQLRRNAVDTRVFKAPPSLAALRSAFTLYARLNEDTVRAKNRLKALFSSRGVSTAQYGHRLYDPPLEVLEELQQKLPVAIRFSAEAQLEQISGLENLRERAAHELVSEAKKEPAYRRLLTLPAIGEIRAATLLAVVVTPHRFRASHLFWKYCGLALRTVVSSEWAFRGGRRYRQNAPMTRGLEQGNPHLKNVFKGAALTLAVMNPDEQPLAAHYQHLLRRGLEENLARVTIARKLAAITLAVWKNEEDYDPKKHTILT

SEQ ID NO: 472986 - protein, 430 aa, unidentified
MHNKNYISVGIDVGSAFSFMTILAPDETVILKPFKITHNNKDSLERAVSEIKKAEELYSLESRTFLEFTGIYHFPLFCYLVDCGFNASIINPIITHSTKNGNIRKVKNDKIDSKGIAKLGLSKDVPVSQFPEKLVLELRSLTRKYYDLTDERSAHINKLKGDLHTVFPQYLDIFCDVTGKTSTMILRQYGTPDKILRGHKKTMIEKISKASRKGLAKASERYEKLCAAANAAKTFGCQIDSIYFNISLTLDLVEKLDSALDSILNRIRQLITFNKNEKFIQQIKLLNTIPGVGFLTAVTIMCEIGDFSAFRNPKQLFAYFGLDPEVNESGKFVGTQLHMSKRGSRIARRAIFAVALASIRTKRNGEGINPYLRKYYELKSGQKPKMVAIGAVMHKVCNIVFAVLRDEKAFELRSPEEHCKQYQRAALAAA

SEQ ID NO: 472987 - protein, 415 aa, unidentified
MALKIVYKICCGIDVHKTFVVACIASTDKHGVTSYERHRFSTYTKGLKNLLQWLLEHNCKDVCMESTGKYWIPVYNILEKDCSIVLAHPKYVKAIRGKKTDKKDAKWIADLFKHDLVAGSFMPPADIRQLRDLMRYRFKLTCFMSSEKNRLQNCLTVSNIQLASVVSDTFGKSSQRILDKILENPDDTSFDIEPLIHGSMKKKLPELELAIDGFITPEQAGKLKVIKKHFEDLESRKAELEKLILALASPYQQELDLILTAPSFKNKFTAIGIISEIGVNMEAFPSAKHLCSWAGLTPTNNESAGKKKSVRVSKAGCYIKPLLVQCANSVVKSEKHPEIRNRYLRLRKRRGHKKAIIAIARMLLTALYNMLKNKEPYNAELYRKSDVLPVNREITIEQAILMAQFQGYKIKSAAE

SEQ ID NO: 472988 - protein, 397 aa, unidentified
MYIVGIDIAKRKHEAAVIDGEGTVIIKPFSFTNNCSGYNRLLAMLAKAKLPLDEVSFAMEATGHYWLALFTRLQKEGFRVQVINPVQTNSIRSFYIRQAKTDPRDALLIAEVIRFGHFSESTLHPENIYELRELCRGRHAIVSMQADVKRKVVALLDQVFPEYETAFTNMFGDTSMAILQTCPTPKELSEMPLEELCHLIEVSSHKRFRMAKAQELQALARNSFGFAMAGDVFSTMIRLYAKHLDFLKQQVREMDRKIAEIMDTLDTPITTITGIGPTLGAYILSEIGDISRFSSAAKLAAYAGIDPTMRQSGEYNGVRNRMSKRGSPYLRHAIWLAASSAVLHDPALKLYFQKKRDEGKPYMASVGHACRKMVSIIYAVMRDNKAYTPCIPNEISA

SEQ ID NO: 472989 - protein, 427 aa, unidentified
MAATPTVELRVSVDVGARQHHVAIGLSSGAVLEECAIAHQPEGFAHFFARVETHHQHDPGPVAVAMEGYNGYARPLDRLVQARGYRLYNINHLKLARFKEIFPGAAKTDRLDARKGLELFQLREHLPLAKAVLQEVGVVPAANARLKRLTRRRRRLVNERVRVLNTLQADLQAVCPGLLDITREVGNQWFLHLLVSAATLPQLTRLRNATILNIPCVGRAYARVIQDWQPRAQWSPEVEWVGAMIQEDAQRVLALDAQITALETAMHDVAQESTIATTVASIPGFGPICTAELAGEIGTVTRFQQESSLALYLGMATLDNSSGTRHGSKPPKQVNVRAKAAMMTAVDRHRKSVPESQQYYEKKRQAGKSHNQAIRALGRHMCRIIYTMLKDERPYEIRAGEGDTTGQAASRSSRVGQLRRAKTVAPA

SEQ ID NO: 472990 - protein, 365 aa, unidentified
MREQDERDKITIGLDLGDGRHRFCALDKEGQVMEEGTLGNTRECLGELSSRYAGALIVMEAGCHSPWISRYLEGMGCEVVVSNPRKTRAIYQHERKSDRRDALMLARIARMDQALLYPVRHGSEQAQQDLLRIKLRDSLVRARVGVINSLRFMLKSLGYTIANPSTERFHKVIEDQIPDSMSPVIAPSVRALEELSLRIKLLDREIIALARTEYPETAWLEQIPGVGSITALYFVLKLGDPDRFERLRDVGAFIGLCPRRDQSGENDPQLRISKRGDVYLRRLLVSAAQYILGPFGPPSALRQYGLRLAAGGTSRAKKRAVVAVARKLAVLLLTLWKNKSAYQAFPGHDEEKMRTSDRERLRCIA

SEQ ID NO: 472991 - protein, 428 aa, unidentified
MDKVDRNRLEEFRQLRQEVRHSEEYLIVGIDIAKDRHHGFFGTATGKTLLRRLVFSNDCEGFTKLLDQAEALRVRHGLKKVVYGMEPTANYHKPLGEYLITLGRTVVLVSGVTVKKNRESLDGRWDKHDVKDSANVADLISQGKCLYYEYPSAELRGLRNLLSLKRRLKKQEHGYRVRIRNHLIAQYYPEMDRDWERLGAEGLSIMRWCFPPSQITELDVEPFIERVTSRSIRMEKRRRLEAIWEKAGETIGCDGVPGVEHEAKVMVEGLRQIREMIKETEDKIQQLCQQFPEYPYLLTIPGYGPDLSAKVLGAIGDPDRFHNGKQVLKLAGLDLSADRSGKDSDQAIPQISKRGKADLRYALYQAALIASTSNQDFMLYYTRKLLGREREKGIHMKMRVKLSAKMLLIAWTLMKKKEVFDPAYLNAD

SEQ ID NO: 472992 - protein, 313 aa, unidentified
MAQMVPTVGIDVSKDRLDVAVHPTDEEFSVTNDAMGWRLLVRRLRPLMARGIGIEASGGYERGAISALLEAGLPVRSVNPWKLRLFAKAAGVLAKNDRLDAGVIARFVATMPSREVRRDVAVEHLAELVTARRQLVDAVQQTGNQTEHLRDPSLRRLQARRIRQLERDVAQLDQLIAQAIAASPALRARHDLLCSMPGVGPVLAATLLALLPELGSLPNRSIAALVGVVPYDFDSGRMRGRRHIFGGRAAVRRVLFMAAQVAARFNPALKAFKQRLLAAGKKPKVAIVAAMRKLIVTLNAMVRDNLPWRSVAA

SEQ ID NO: 472993 - protein, 340 aa, unidentified
MGNITAIGLDLAKNVFQVHAVDEAGSVVMRKRLRRGQVLAFFAGIPSCLVGLEACATAHHWARELIALGHVPRLMPPTYVKAYVKRNKNDVADAEAICEAVRRPSMRFVPIKTTEQQSALMIHRARDLLIRQRTMLVNALRGHLAEFGLIEAQGLHKVAKLIAIVLDEKDRRISDIARQVLKMIVSQIEDTQTRIAGLERQILAWHKNNPISQRLATIPGIGPIIATAIAATVTDPRTFCSGREFAAWLGLVPRQNSTGGKARLGGISKRGDCYLRRLLVNSAHTVLLCSKQAKTDPWLRSLLSRKPRLVAAVALANKTARVAWAIMSRQDTYRNTALAA

SEQ ID NO: 472994 - protein, 391 aa, unidentified
MVCVGIDVAKDKHDCCILDSEGTTLVDCFTIPNNMDGFKSLLQTIQDCSQKSDKIRVGLEATGHYSYNILGFLLDNDLPVYVMNPLHTNLYRKSLSLRKTKTDRVDAKTIATMLLSDVDLKSYTDTAYHNEELKSLTRYRFDKVQERAKLKQSVSRLVTILFPELEQLVSSIHGTSIYALLSEYPGAKQISEAHLTRLANILVKTSRGHYRKDKATHIRDAARTSIGSVMPAKSLELKHTIKLIQELTSEINEIEDALRKIMDELKPPILSIPGMGFHSAAMILAEVGDFSNFNSPDKVLAYAGCSPSTYQSGKLTNCYAHMEKRGSRYLRYALYTATKYVCYWNPVFTEYLTKKQAEGKHYNVALSHATKKLVRLIYALQKSGKAYLAVT

SEQ ID NO: 472995 - protein, 327 aa, unidentified
MMFIGIDISKEKIDLSWLRDQLTNKIKTKVFKNKHQDFEKIEKWLLNTTKSVASELVITLEPTGVYHEALMYFLHEQGFNIILANTGKAKKYADALNIIHKTDKSDATMLAHYGCAKHAVVDYWQPEALEVRELKALIRRLDALESNRQREANRLEASEFSNVSARVCQSIKVTIAFLDDEIKQLKSDIDDHIDNEPGLKRNRKLLESIPGIGHVLSRELTYLFAAKKFNKAKEAAAYCGLIPRHNESGKLKGRTTISKLGPARIRCKLYMAAIVAGQWNKRIKRHKLTLINNGKTPMQAVCANMRKLIHICFGVIKNQEEFKLQES

SEQ ID NO: 472996 - protein, 415 aa, unidentified
MEGLQPLHRRVAGIDVHRMLHVATVVIEQPDGSIEQTSRQFGGFRRDCRALAAWLAEQRVELVVMESTGIYWKSVHAHLENAGITAWVVNAHFIKHVPGRKTDMSDSQWLAVLARFGLVRASFIPPKDLRELRLVSRYRRKLTQMHSAELNRLHKVLDDGSIKLGGVVSDINGVSATAMVKGLIEGQDIASLLGLARGALKLKREDLQAALDGDLSARHLFVLKHIHAHTQSLQRELADIDAYLLAAMQPYALAHGLLQTIPGIDQIAAALILIEIGDDMERFGCAERLASWAALCPGNNESAGKRKSGRTRHGNGVIRYILCECANAARWTKSTLAAKYRSLMVRKSHKKAIVAVAHKMIRVIYVLLTRKQGYLDQRIDYAAMSAKKKAPRWIKQLKLIGKWPAPDNAPATASA

SEQ ID NO: 472997 - protein, 390 aa, unidentified
MQVTADRPEAPSAIRSDLGAIFVSLELSRSIWLITSLSSGSGEKMSKHTVPAGDICALMARFSELKQKALARTGKLFPIIVIQEAGLDGFWIHRMLQNEGIESHVVDPASIAISRRRRRAKTDRIDGEALLRTLLAYKRGEPRVCAMVKAPTPEEEDRRRLCRERKVLIAARVEHVNRIKGLLFSQGVSGYEPLRRNRRQRLDELKTGDGRVLPDHLKAQISRELDRFELLIEQIKAVEAERDALFAAAKAAAPTPAPVTMLLDIKGIGPEFAAVLWSEGLFRHFDNRRQVASYAGLAPTPWQSGSVDREQGVSKSGNPRLRTTLIQLAWLWLRHQPQSALAQWFEERVTRNGGRFKKTAIVALARKLLVALWKYVSAGVVIEGAVMKTA

SEQ ID NO: 472998 - protein, 385 aa, unidentified
MHQLSGSTQGALDYNSTIIGALELSEKKWVLAVQLPGVSRHSRHVLDACGDGLVSFVERLKARCAAGGRKIARVILTHEAGRDGFWLARFLARRGIEVHVIQPSSLPVDRRARRAKTDMIDVEMLLRTLMAWLRSEPRVCSMVPIPSEADEEARRAYREREDLTGERRSIVNKIDGILATLGIKGYKALRRDRREQLNCARQPDGDPIPPKAKARIERLLDRLDLVLKLIEQVELARDAVLKKDAPADEAERMIRSLTDLRSIGPDFATLLVREAFVRQFRNRRAVAGYVGLGGTPFSSGRSEREQGIGKDGNRRVREAMVELAWMWLRWQPDSALSVWFRARVGAMGGRIRKIMIVALARKLLVALWRYVKDGVIPEGARMKAA

SEQ ID NO: 472999 - protein, 351 aa, unidentified
MTSLQQIAEVVIGVDTHVHTHSAAVVDARTGGVLAEITVTADADGYQELIDFAGQHSGQRAWAIEGTGGHGNGLARVLAQRDEPVIELDRPERAKRRNGAKSDPLDAVRAAREALSRDNLGTPRSHGDRQALSVLLAARQSAVQGAGDAQRQLFSLVIAAPEPLRKRFRGHKLPAMTRLAAQLRGSPRWDTETATTAAVLRALARRALDLAAEAAQHEKDIRAIVAAWRPDLLTQRGVGPITAAVILCAWSHPGRVRSEAAFAMLGGVAPIPADSGSGTAPKRFRLNRYGDRQLNRALHTITLSRLRYDPTTQAYAKRRTAEGKTPRDIKRCLKRYIARDLYRLLEHPAAT

SEQ ID NO: 473000 - protein, 403 aa, unidentified
MNSVGIDISKGRSTIAVMRPFGEVVISPFEVRHTGSELSKLARQLKSLDGETRVVMEATGNYHASVAKLLHDAGLYVSVVNAKLVHDYGNNELRRVKTDRKDAVKLANYGLDRWLTLPRYIPEEDTRLLLKNCYRQYRQYSKVQTVLKNNLISLLDTVFPNVNRLFSSPIRGDGSEKWVDFVAEFWHCRCVSEKSQKAFTNKYQRWCRKHGYNFSEAKAHTIHAEACGHIDVIPKSETTKLLVEQAVSQLRATSTALAALKHEMQSLASQLPEYPVVMDLFGVGPTLGPQLIAEIGDVRRFYSKKALVAYAGLDAPPNDSGDVTGRHKSMSKIGASSLRRTLFLVMSVYLQTAPLDEPVYQFMDRKRAEGKPYRVYMMASANKFLRIYYATVKAYLESLEHTA

SEQ ID NO: 473001 - protein, 421 aa, unidentified
MDVVHERVCGLDVHKRTVVACVLVPGEAGTVTPEPQTFSTMLGELERLAGWLGERGVTHVALEATGVYWKAVYNVLEGADRFRVLVVNPEHVKAITGRKTDRADAERLAFLLRHDLLSGSFIPAREQRELRELTRARTALVRERARVVQRLEKVLEGANIKLGAVVTQLLGASGQAMLDAALAGVTDPEELAGLAHGKLRPKHDLLVQALAGRLSRPLRFLAQQHLDHWRELDARVTAFDAEIADLLRPFDRLVERLDAIPGVGRRTAEVILSEIGTDVAAFPSERHLAAWAGVSPGNRQSGGRRKYARTRHGNPWLKGALTEAAWAAARCKHGYLAAQYRRLAARRGSKRAVVAVAHSLLTSIFFMFQHDLPFADLGGDYFDRRDRDRREQRAVATLHSLGYDVTLAPRPAPALPAAEVA

SEQ ID NO: 473002 - protein, 418 aa, unidentified
MKVVYPICCGVDVHKTFLVATIITSEGLTPHYSKKRFSTFNKSILQFKQWLIENNCYDVCMESTGKYWVPVFNLLEDVIHVTIANPKWVKAVKGNKDDVKDSKWIGDLFRLGLVPGSYIPPKPIRILREYTRYRYKLVSCKSSEKNRFQNAFTVCNVALDAVVSDMFGKSAYSITDYLISSDSFDPEHCSSLLKKSLKKKADTVIESIEGYQMTKEQKNRMLMIRSHLEFVEKSIAKLDENLNEMVAPYQSAINLLCTIPGVDRNSAITIISEIGTDMSQFASSKRLCCWAGLTPGNNESAGKKKSVRITRAGVYLKPALVQVAHASVASNKSPYYKNKYERICKRRGKKRAIIAIARMILTAVYHIFITGEEWNPCDLYKIDMPQEMKDKQKDKAIKQAIKLLIAQGVINDTDISVA

SEQ ID NO: 473003 - protein, 323 aa, unidentified
MTVYIGIDIASKKFDAAELRDGAYRCKTFENTPTGFTALYNWLKTNSIPDIHVCLDATGSYGTALAIFLYEKNLKVSVVNPARIKGFAASELTRTKTDKADSRLIARFCKAAQPDPWRPVPAPVRKLQVLVRRIGALNGMLRMECNRRENADIDAQESVERMITHLKMELKSVRRAIKEHISNVPELKKQNDLQLSIPGIGAVSASLILPFMASKDFTKAKEVTVFLGLNPRHHQSGTSVRGKTRMSKMGDAKLRCALYMPALVALQHNPDIRAFGLRLLAAGKPRMLVVGAIMRKLIHIIFGVLKAGTGFSSRVTVNAGFNQ

SEQ ID NO: 473004 - protein, 479 aa, unidentified
MIPGTYTDKGGFEMKPFYMGIDVSKGYADFMIINSKKQPVVQRFQLDDTFEGHRSLYYLLSRFLADYPESTLFAAVESTGGYENNWYNSLIEFQGSLNIQTARLNPLGVMHNSKADLKKNTTDKISAQNIAEYLIAHREKVVYQQHDQLAGLRKQWGFIKMLTKQCTQFLNQLNALIYSANPELLSYCQAGMSAWMLKLLVKYPSADRLKRAHVKTVAKIPYVSKQKAQQLIAGAKRSVASDTDVTTQQLIVATAEQILHLKKTIADQTNQMLRECSIPEVELIKTFPGISDFSAVGLIIEIQTVKRFAEAKKLASFFGVHPVYKISGDGVGGFKMSKQGRTAPRQILYMAALSAIQCNPLIREIYEKHQKQGKHNMAALGICMHKILRILYGMLKNNKPFNPHIDIANRLRSVRMKNDTPVKNTSRRFQDYDQKAPVSSRQRKKRLERERSHSVSDTKVRITAPVPLADIIANILPQL

SEQ ID NO: 473005 - protein, 410 aa, unidentified
MNPLYVGIDVASHSNVAYLMKPDGSKHSVFPITNSKAGCQQLVKRIVSAMTGNGLSEMKIGMEATSIYGSHLVYTLKEDFSLSAYTKEIHVLNPRQVAKFKESYDDLPKNDYVDAYVIADCLRFGRINNEVYLGDYRHEALKKLTRARYTAVVNLSREKQRFLNTLFLKYSTFAQEKVFSDTFSTTALAVYEEFESADQLALMDLHELTEFIKEKGKNRFPDPDAVAKAIQKAARSSYRLPKTVNDSVNQVFSISISSMRALEASIKQYDKAIAEQMNAISNPLISIKGIGPVYSAGIIAEIGDIHRFKNQASLAKYAGLAWKQHQSGGFEAENTPLIHTGNRYLKYYLCEAVMSLVRCDTEYNSYYHLKYKEVNRAQHKRALVLTARKFVRLVYCLLSENRMYIAPEER

SEQ ID NO: 473006 - protein, 457 aa, unidentified
MYKEVKMRSYLSYQAKRSSVTDKTIIGIDPGKSRHQAVIIDANGIPKGKTFSFSVNYKGYHEKLWNEINKQIPDHSTSNLLFAVEVSCNLWQTISNYLRKEGYEVVLVSPMCTKQSRVMLNNDFSKTDPKDALLIALNTQRGYYNEMRIYPQDSNNMHALSIAYNKLRKDHSSYRGRLRAAIELIFPEFLEVITLGTQTSFYLLGKYLFPKDYINMNIDFESLQIGRISRSKYGMKHLHKLQDLAKYTIGISSNNELYDRTIVLTWLEGMKEIGFRMKVILDQLIKSASTMKEFSILTNLMGISSETASLFLAEIRDISAFDNYKEIEKFAGYNLRLTQSGKHIGSRRISHIGNCRLRWVLYRMTEETMKYIPEVRIKYLKRQLKKQIYRKNLISCVPQLLKLVFSLLKENRFYEYNEERVAEMKKLDIQYQVVKAERAAKHRKHRSIIKEELRKTA

SEQ ID NO: 473007 - protein, 317 aa, unidentified
MQTYIGVDISKNDFLACFNEMDKPIKFANNNLGLTKFFNHLKNSGYAKDKTIIGVESTGAYSLPLAIVGARKKYVVKIINPIVTKSYLGSSIRKVKTDKADARVIRSCLIGGAGAEFRDTTEETVFKNLIRQRYFLVKLKTELTLKQQDVTLKEECLKMPISNINSELKEVIEKKIIYLEQQLSACLPEQQILLQSIPGVGKITAMTFATEIGDVTKFNGPKKLVGFVGIDSKIRQSGTSLNIKGHISKRGNRIIRKTLYAAALTAIQRPSLFRDFYQKKLSEGKAKNVCIVAVMRKMIHVIYAVLKRQSPFVEKGA

SEQ ID NO: 473008 - protein, 343 aa, unidentified
MEKASMIGLDIAKNVFEVHGRTAAGEVVLRRSLKRGQVEKFFAKLPKAVIGMEACGSAHHWARVLGKLGHEVRLMPPAYVKPYVKRNKNDGRDAEAICEAVSRPTMRFVPVKSVEQQATMAVHTTRALLVRQRTMVANSLRAALSEIGIVAAQGIEGLRELMAKLEAPHEEVPEIMRGALLLLAKHWQALDADERVLERQIAKAARSDREARRLMEVPGVGPIIASTVLAKVPDAKVFRSGRDFAAWIGLTGRDHGTGGKHRPGRISKQGDRMLRALLISGASAYLRHQRTRGVSDPWLRDLLARRPYKVVMVALAAKTARILWAMLVKGEPYRDRASASAAA

SEQ ID NO: 473009 - protein, 360 aa, unidentified
MAKTKAVHSSYVIGGVDTHKDLHVAAVVDQNNCVLGSEFFATTRQGYRQLLAWMASFGTVKRIGVECTGSYGAGLLRYLQSAGVDVLEVTAPDKMERRRRGKSDTIDAESAAHAVFSLIRTVTPKTSGGMIEALRVLKVCRKTAVAARRTALQMIQMNIVSAPDELRDQIRSLTRMQLIRTLASWRPDVTAYRNVQDAYRIALKSLARRYLELHDEIADLDVMLASIVDELAPELIKRNSVGYECASQLLITAGDNPQRLHSEAGFAALCGVSPVPASSGKKNRHRLNRGGDRAANSALHIIAIGRLRTDTKTQEYIGKRVAEGHSKMEALRCLKRYISREVYTLLRNQNRQINSTQITT

SEQ ID NO: 473010 - protein, 390 aa, unidentified
MGIDAGKAHHWVTAIDDQGAMLWTKKVSNDEGAILDSLAEVLALGENFTWAVDIVGTTSALLLALLASHGQSALYVPGRIVNRMAGAYRGEAKTDARDAYVIAETARHRHDLTPIRLPVEIIADLKLLIAHRSDLVADRVRMLNRLRDVLTGIFPRLDRAFDYAKHKGALTLLTGYQTPTALRRMGQARLTKWLSRRGVQGAPAVAEAALEAASGQQTQIGNETIAAQIIADLATQILALDTRLRTLESQITTIFRAHPQAEIIESMPGMGPILGAEFLAAAGQLDNYADDGHLAAAAGLIPVPRDSGRRTGNMHRPKRYNRHLRRSLYLSAQTSIIREGPNRDFYLKKRGEGYKHTQALLALSRRRVSVLWALLRDNRTFTQAPPIRAA

SEQ ID NO: 473011 - protein, 338 aa, unidentified
MKKNFFVGIDVSKQTIDVAFIMQQGDEKTQPCWKVFENNEKGFYEMKVWLQNNQVLFNESSLFVIENTGLYHRLLVKFCNKHELRLCIENGAQVKWSLGIARGKSDKVDSRRLAVYAVRFADRLKPAAVLQEGIQTIKDLITLRNRHLVHLRSLQTHLKELKVTTDQKAVKELQKMHNPLIKAIQVTIKKTELAIIKKIAINDLTKRQYNLLLSIPSIGPVTASYLIASTNAFTLCSNGKQLACYCGVVPFEYQSGISIKGKYHVHKMANKNLKALLHLCAMSSIKYVAEMKHYFNRKLKEGKHKMSILNAIRNKLVLRVFAVIKNNKPFVENNFIAG

SEQ ID NO: 473012 - protein, 344 aa, unidentified
MDYFAGLDVSVKETSVCILDDAGRIVKEVKVASEPQALLKVLGNPTYRFKRIGLEAGPLSQWLFSALAEAELPVICVETRHMQAVLKAQINKTDRNDARGIAQMMRVGMYRPVHVKTLRSQKLRMLLTHRKLLQSKAIDIENDLRGTLRNFGLKVGMMGAARFEARIRELVEGLPDLAVLVEPLLVVRRVLRQQLNVLHRRLLAVVRNDEVCRRLMTTPGVGPLVALTYRTTVDVPARFRKSKSVGAVFGLTCSRYQSGEIDWSGRISRCGDEMMRVMLYEAAQTLLTRSTRWSWLKAWAMQVARRRGKKKAIVALARRLAVILHRIWVDGTEFRWTREAVPAA

SEQ ID NO: 473013 - protein, 340 aa, unidentified
MKFVGADLHKKSITFCVVELVGRTTRVVEGKRMLCKDVKKIEEFLQSLGPFQVTVEATIGYDWFAALAEKHADRVVIAHAGKLRIIAESTRKTDKIDARILAEFLAHDMIPEAWRATPRVRQHRSLVRRRHKIQNRITSIKNTMHGILTRYNADRSDLFTSLGWEAARKLELLEEERWLVDDLWDDLPQSSERLDKTNNRLAHFASKATLKEREARAVLATMPGVGDVTIDTILAELGDWERFRCADAVVSFAGLDPGVRESDGKRKDLNLTKAGSPLLRWIMIQLAHRVKRNSRRWRTTFERLSNRSGNKKATCAIARRLLLVIYAMLRDGNAYQFPAA

SEQ ID NO: 473014 - protein, 316 aa, unidentified
MNNENIYAGVDVSKSSLDVAIIPSGKSVCFANDKQGRTKLVKCFGKLKVSHVTLEATGGLERPVAMELVSAQVPVSVVNPRQVRDYAKATGRLAKTDSIDAEVIARFGEALKPAVNQLKDAQTAELSELVTRRSQLRKMVVMEKNRLYLASGLSGVLIKSHIKYLEKQIEKVDTKLAEMIDANLEWRESDSLLQSVPGVGRGTSAVLLALLPELGKINRREIAALVGVAPFNRDSGFFRGRRSVWGGRADVRNMLYMCAVVASRFNPAIKSFYQHLKEKGKPSKVALTACMRKLLIILNSIMKSRTKWSDNHESIA

SEQ ID NO: 473015 - protein, 385 aa, unidentified
MKRNDLSRALVAFDQDSTIVAVVELSLNSWLVSGLVPGVMRQPLKKQPADPDRLLALLQRWREEAVKAGHAIGRIAVAFEAGRDGFWLARWLRARGIEAYVIHASSLAVSRERRRAKTDRLDTQTLMRAFLGWLRGEVRHCQMAAIPTLAQEDAKRPSREHENLVAERTRITNRMTAILVWLGLPRVNIKLRKAAEQLAALRTPEGEPVPPNTLAELHRGLARLGVIRAQIKAIEAARLQRLKAAPAQGTHPMMLMLAKVLGVGIETADMLVHEVLARGLRDERAVARYGGLTGAPDESGSKRREQGLAKAGNGRVRRGMLQLAWRWLRFQHESALAQWYRSRTTDGRRDTRKTMIIALARKLLIALWRYVTAGELPPGVVLKAA

SEQ ID NO: 473016 - protein, 345 aa, unidentified
MDKIITIGLDIAKQVFQVHGVDAAGGLVLSRQLRRGEVLKFFAKLPGCVVGLEACASAHYWAREIVALGHEVRLMPPTRVKAYGRRGRKNDRADAAACCEAVTRPSMCFVPIKTPDQQAALMLHRARQMLIEQRTRLGNAIRAHLGELGIVARKGAGGLAALLQMLETAQDERVPAAIRPILQPLVEQWRCAAAQIAGLDRQIAAWHASNEASRRLATIPQIGPIIASALLATAGDATRFKNGRQFAAWIGLVPSQNSTGGKQRLGAITKAGDRYLRQLLVVAASGMIRRVRANPLLSPWLAQLLARKPAKQAAVALANKLARIAWALLATGQTYRTPTPAAAKP

SEQ ID NO: 473017 - protein, 341 aa, unidentified
MEQATTIGLDIAKHVFQLHGADGAGHVLFRKRITRAKLLGFLAAQARCVVAMEACASAHYWAREIAKLGHHVRLIAPAYVKPFIKRQKNDAADAEAICEAAQRPSMRFVPVKTEEQQANGIVFRARDLLVRQRTQCVNVLRGHLMEYGYVFPKGITHIETLVAVVEDLQSALPDSVRVILKLLVDTFTALEAQIAVLNAEINQRSKSDPTARRLMTIPGVGPIASTAITALVPAAEGFRAGRDFAAWLGLTPLQKSTGGKQKLGAVSKRGERTIRRLLIIGASAVVQQASRRGAPKGSWLAQMLTRKPKMLVTVALANKMARIIWALLVKGGTYRTPAVAA

SEQ ID NO: 473018 - protein, 344 aa, unidentified
MYYAGMDVSLEETSICIVDETGRIVKEMRAISEPPALVTALEEFGLPMERIGLEACSLAAWLHDGLRSAGLAAVCIETRQANAAMKTMPNMTDRNDARALAQIMRTGWFRQVHVKSRQCRLWRSLLVARRTVMNEMRSIENVVRAILREGGIKLGTPSRADFVGRVRDIMAGDPLVMALVEPLLTVLATMLEQFAHLTKQVLDVAKNEMTCRQLMSVPGVGPITALAFRATIDRPDRFRRSRDVGAHLGLTPSRYQSGETDIQGKISRCGDEIARTALYEAAHSLLVRSKKWSSLRAWGMGIAKRRGMARARVAVARKLAVILHRMWCDGSEFRFGKQTDLEAA

SEQ ID NO: 473019 - protein, 415 aa, unidentified
MKEFRLYAGVDWATEAHQVCVVDDTGQRQLERSFEHSAQGLASLADTLAKLGGGDPAAVAVSIETPRGAVVEILLERGFAVHAINPKQLDRLRDRHTVAGAKDDRRDAYVLADSLRHDGHLFRRLCVDDPLVIQIREATREDEDLRQESNRLANRLREQLHRYFPSLLKLSPSADEAWLWALLESAPTPESARKLKRPKLDELLRRHRIRRLTGAELHQLLQGPGLEVAPGTTQAAAGHVQLLLPRLKLVSAQRAQVASTLESLLEQLSNAEAAPGQSGEHRDVQILQSLPGVGRVVCATMLAEASHALRDRDYAALRAHGGTAPVTRQSGKRAHVVMRQACSGRLRNALYHWARVASQVDAHAKRRYAHARARGQTHGRALRGLADWLLRIAVAMLRTRTLYEPSRLTLLPAPC

SEQ ID NO: 473020 - protein, 373 aa, unidentified
MPRYSTAFGMDVHLRSTTVCALDAETGEAVARRFRGNPWGEVAEWMSGFPGPSLAAYESGYLGFAPQRELSALGVDCVAAAVSKVPRSAADLSSKNDRNDAARMAKAILSHDVTPVWVPSPEIEGLRDLAAAHDAATARLAAAKQRLLAFLARRGYVYGGTTPAGNPRKYWTYGFLRWLDKVRPADDGGIRALAALRNEVEAADEAREALLAEYRAAVAAGPLSAEVEALQSIKGCGFVLAAAFASEVGDFSRFRSGRQVTAYFGLAPKQRSSADSVRLGGISGAGNALVRRLAVEGSWRYAQAGHQPKLMPKGSGVPLEIRMHGRKGSERLLRRREEMLERGMPQAKANAATAAELVRWLWALGTMCREAGE

SEQ ID NO: 473021 - protein, 461 aa, unidentified
MPDGDVENSSSRRKKQIEGLPVVRRNVAGIDLGSERHWVCAPVAGGVSREVADFGATTPELIRMTKWLQACGVESVAMESTGVYWIAPHEVLEAAGLEILLVDTRQLARVPGRDKKTDPSDCEWIQRLHSCGLLRGSFRPREEVCMLRTLVRDKANLVAECGDWLRRMQKSLDQMNVRVHRAVSNIDGVTGMAILRAIVAGERDARKLAELRDSRCHKSEEEIAEQLSGHWREDHLFSLQQSLKMYDAIQQRLADYDREILQRLAAMQREECRQQPPPPIKNPQKARNIKKRGEEPMREALFRMSGVDLTGIDAIGVETVQVVLSEYGPDLSRFPTEKQFVSHVTLVPHKPMSGGKPVRKKRRNSASTRVAAALRMAAVTLRNSATALGAYYRKMARRLGADVAVFATARKLATLIYRLLRWGQPYVDEGAEAFEKRYQDTRLKNLKAKAKELGYELVATV

SEQ ID NO: 473022 - protein, 444 aa, unidentified
MPNATPLTRGDRRRNEKLARLRTIVRPDLAIVGIDLASAKQAAVIADHDSITLGRRMFDGDAWVIDEILDWALPIAVEAGFSGVVVGCEPTGHRWKPVLDRCRARGIDLVCVNPMLVHRGREEEDFTRDRSDFKDSTIIARRVADRHCYVPYALEGHWCRLRHLGARRNDQLVESGSARQQLRDLLECVWPAVLATASKPLDSTTWRAAMALSCDPAEIVAMGYDAFADAVGAELARWGGQRRSHRILRAIWAAAQVPGGVERERSAALERAGFAVGDWRRALDCLDDVEARMVAVLDALGLTELVTTIDGLSVVGAAAILAEVGDPARFDCARTWVKHAGLCPRANESGTIAGMTRVSGRGRPALRTAAWRAVWGALSHNAVYAARYHHLTSRADNPLRDGQARTAIAGALLRQLFVVVTRRVAWDPAIARGDKFEGVVEEAA

SEQ ID NO: 473023 - protein, 342 aa, unidentified
MYYIGLDVHKKTISYCVKDAAGHVHREGKVGSTRRELDAWIPTLPQPRTIAMEATIFSGWIYDHLLPHAVAIKVAHPLMLRAIAAAKKKNDTNDASKIADCLRCDFLPECHMASTEIRNRRRVLRYRHLLVRQMVQTKNRVSGLLLETGVEHNKSRLHKVGYFRGLLATSNDIDDSIRPLLRLSRDTIERCQKTDYALVSLLQRDPLLADRIRRLRTVPGVGPITALTWALEMGDISRFRTIKQAISYCGLCGDEHSSADKVMRMPLSKQRNKHIQHVLVEAAKLAPRQSAELALIHQKALEKGNRNRATLAVARKMVAWLLAVDRENREFIPAEQGEIRAA

SEQ ID NO: 473024 - protein, 338 aa, unidentified
MKTYAGIDLHSSNNYIGVINAKDKRLYGKRHDNRIEDVLKVLGKFKAGLQGVVIESTYNWYWLVDGLMDQGYTVHLANPNAIQTYNGLKHTDDKWDSFWLAHMLRLGILPEGYIYPKHQRPIRDLLRRRLMFVRQRTSQILSLQSMITRNRGLNFSGAQIKRFRDPFIDKLFSDRHLVFTAKRNIATIRFLDQMVSEIEVEVASQIKLKKEFISLLTTPGIGNILGLTIMLEVGNIGRFPKAGNYSSYCRCVESKKTSNGKKKGENNKKNGNRYLAWAYVEAANHAIRCCPKAQKFFQRKMANSERVLATKALANKLTKATYYVMRDQVAFDEDKLFG

SEQ ID NO: 473025 - protein, 356 aa, unidentified
MKISRIGMDIAKNVFQLHGVGSFEQIVLKKKLKRADVLAYFRTLAVCQIGMEACGGAHHWARSLIAMVHSVLLMAPQFVKPYVKSNKNDAADAEAICEAMSRPGMRFVPVKTVEQQDIQALHRVRSELVKQRTAKGNQIRGLLAEYGLVVQKRIECLRVALPELLEDADNGLTCEFRALLDGLRLDLVGLDERVGQLDRQIVQMCRASVAAKRLQEIPGIGPVTASALIAAVGDGSGFKRGRDMAAFLGLVPRQHSSGGKEKLLGISKRGDSYLRTLLIHGARSVQRVSVNKTDPSSRWLNAVSARRHKNIAAVALANKTARMAWAVLSKGQAYRVPAQHDERIGPVLPVAANGQH

SEQ ID NO: 473026 - protein, 374 aa, unidentified
MRSTDAAAEARETVFAAIELSKKTWVLGIAFPDRDRPSIHRIPGGNVAELVSRLRVAARNNRRILVCYEAGYDGFWLARTLAKMGIECRVLDPASIQVNRRARRVKTDRIDVLALLRALIATDRGERHVCAIVRVPSVEEEDARRSHRERQRLIRERTGHINRIKGLLFAQGIRDIKPKLRRTRIDFAALETGEGHPLPDRLRRELEREYARLALIETQLREVEKERDLADAQDPVVERKRQMLVALQGVGGTSAAILAREVFARPFANRRQLGSYLGLTPSAYDSGSVTRCQGISKAGNSWARRILIEVAWLWQKHQPASPLSHWYIQKTSGQSSRIRRIMLIALARKLALSLWRYVETGLVPEGVVIAGAEA

SEQ ID NO: 473027 - protein, 391 aa, unidentified
MPMYFVGIDISKYKHDCCIISAADQQIISKFTITNDKDGFEQLLTALNSLSNPEDIKIGFESTAHYALNLELFLENAHHSFMEVNPVLIKEYKKSTTLRRTKTDSVDCESIARWLMTVEYKPHSKGFYHSYSLKSLTRLRDRLIRQRSFYLVKITNVLDHTFPEFKPFFNERLSKTAIYLLENYGSAEKMAHMNSASYDKLRCASRGKFSIQQFLRLKELAANTVGVNNSIFDIELNSLLTLYNSLCKEIKTLEAEITKLIEEVHPHYMSIPGIGPISAAVIYAEYGDISNFSNPGQMLAFAGIEPGINDSGTESHGGRMVKHGSSQLRYVLLNACLPLIRFDITFATYYAKKRAEGKKHRVAITHVAKKLIRVIYALERQDVDFNVQKLR

SEQ ID NO: 473028 - protein, 350 aa, unidentified
MTVVIGIDPHKRSHTAAALDEHDKVLAELRVEAHPRQVERLLGWAECWPERIWAIENANGLGWLLSRQLLEVGEQVRDVPAALSAQVRKLSGSGHKTDAYDARSTAIAGRHARRLRPVVPDGAPQVLGLILERRWRIVTTRQRTLVAIHEQLVKLIPGGVARNLNANKTAAALRKIRPTDPIGAMRRQTIVELLAELRRLDRQCKTLDAELGRALADYGTCLMDIDGIGPVAAATIISIVGDIRRFPNAGHFASFTGTAPVAASSGEVVRHRLNLGGQRQMNKVLHVAAKVQISLPNSDGRAYVHRKLAEGKTRAKATRSLKRHLSNTVYRALQADVVAHEVSGEDNQAA

SEQ ID NO: 473029 - protein, 458 aa, unidentified
MTRHARPPHRTGPLSVIHPHAAGIDVGATEHWAAVPGGDPAPVRRFGACTADLEQLADWLAGCQVTTVVLESTGVFWIPLFELLESRGFEVRLVDARQMRRIPGRPKSDVHDAQWLQRLHTYGLLAGAFRPDEPVCVLRSYLRQRAMLVTYAAQHIQHMQKALTQMNVKLQHVVSDITGVTGLAIIRALVAGQRDPTELAKLRDDRCGHSAADIARALYGTWRAEHLFALKQALELYDFYHRQMATCDRQIEQQLQQFADKSGGQPLPPKARRRRRGGNRPGFDPRGALYRMAGVDLTVIEGIEESTALVVLSEIGTDMSRWPSAKHFGSWLGLCPNHRISGGKVLSRRTKPCANRAAAALRLAAQALHRSQSALGAFLRRLKARVGAPKAITATAHKLARLVYSLLKHGTAYVTQGMKEYERRYRERVVRSLSRRAKELGYALVELPAPAAAQPLPT

SEQ ID NO: 473030 - protein, 453 aa, unidentified
MAKRTKGSKRKGSRNRPTPVINPTAAGIDVGAREVYVAVPQDRDPEPVRTFATFTPDLIELADWLTACGVTTVAMEATSVYWMPLFTILEERGIEVCLVNARHLRRVPGRKTDVLDCEWLQYLHSVGLLRGSFHPSEAVAAVRTVLRHKASLVQMGSSHVQHMHKALTQMNLQIHHVISDITGVTGLAILDAILGGERRPDVLAGLRHRSIKADEKTLAKALTGTWRREHLFTLRQSLGAYRHYQAQIQQCDEELHQLLGTFGSRVDPDEDPLPPAPRRRPDPLGLDLRTEFYRIFGTDLTAIPGIEIHTIQTLFAECGRDLSAFPTAGDFASWLGLCPDNRITGGKVISTKTRKVNNPAATALRLAAQSLHRSPSVLGDYYRRMRYRQGPAKAITSTAHKLARVLYTLVTTRRFYDETVLAQHQHQTRARKTRRLKTQAAALGFDLVPVEAA

SEQ ID NO: 473031 - protein, 316 aa, unidentified
MNKKEQVVGGIDVSKAMLDIAVLPNGEVLQLPNDASGIEELGKRLQALAADLVVMEATGGYETAVASALVASGFRVAVVNPRQIRDFAKATGRLAKSDRIDAQVIATFGQAIEPEIVRLPDEEARELEALLVRRRQLVAMRVQESNRLSLVQGAMRKSIKAHIEWLEKEIAKLDIDLTAGLRKSPAWRAKDELLRSFKGVGPITSGTLLVALPELGQLDRRAIAALVGLAPFNCDSGIMRGRRSIYGGRSHVRTLLYMATTTAIRRNPVIRTFYERLKSRGKPHKVAMVACMRKMLTILNAMVRQSTPWTPEIRPV

SEQ ID NO: 473032 - protein, 392 aa, unidentified
MTAGKKLWRNRKERKEWARRLQSEDPGLEVVHPHAAGIDVGNAAHYVAVRPDRDPEPVRRFECFTVELHRLADWLQSCGVKTVAMQSTGVYWIPLYEILEERGLEVYLVNARHTKNLPGRKSDVQESQWLLKLHTYGLLNNSFQPVSEIRVLRTYWRQRGEHVREAATCIQRMQKALTQMNVQLANVISDISGLTGQAIIRAIVAGERNPLKLAALSDPRVHASREEIAKSLEGNWRPELLFVLQQEVDMYDIYQKRIAECDQRLQKHLASLTHPLPLQPPTQKPKTKKPAAKNAPRFDLSSELQRVTGVDLTRIDGIDVMVAQTLLSEVGLDMSRWKTESHFASWLGLCPDNRQSCKHSWCLAFRQLMRYIFDARRGRRETQVPDFLFIMA

SEQ ID NO: 473033 - protein, 355 aa, unidentified
MTMLADVVDAVIGIDMHRDSHEVEIADNAGRPVAVLRIGNHSAGFARLLAAIAEVAPGPRVAVCIEGSRSYGIGLARALAAAGLLVLECEQPRRKQRRGTGKSDPIDAHLAVLAALRLDTSRLPVPRSDGDREALRILLVARHEITGACTAQAGRLRALLLGGDDTGRRAARTTLSGKALTALAGRELPADAGREHAVRQAEISRLALALRQGRRQLKDNRAQLLAIVEDIAPGLTSRFGVGPVSAAQAIVSFSHPGRCRSEAAYAALGGTSPLPASSGMTVRHRLNRGGDRALNRAIHAIAVVRMRSCPRTRAYVARRTAEGKTIREIRRCLKRYIARELYRQLTRSMNPPLNP

SEQ ID NO: 473034 - protein, 412 aa, unidentified
MEVLYPHCAGLDVHKDTVVVCVRHMVNGTVSREVRTFKTTTKELLALSEWLATEGCTHIAMEATGVYWKPVWHILNDGDFALVLANAAHVKNVPGRKTDVNDATWLADLLAHGLIRGSFVPDQQTQEMRDLLRTRKQLVREASRHIQRLQKTLEDANIKLDSVISDVMGLSGRRMIEALIAGQSDPEELAQLAHRRIKASPEELREALRGRVTRHHRFLLSLHLQQIDAIDAAIGAIDQEVDAQIEPFRTTVHLLTTIPGVDELSACVILAEIGRDMSRFPTAGHLISWAGLCPRNDESAGKRRSTRMRKGAAWLKTTLVQCAAAAARKKASYLQALFHRLRARRGAQKALGGVAASILTAAYEMLKSGALYEDLGCDHFEKRGKARQINRLVSRLQNLGFAVQITPVPAAA

SEQ ID NO: 473035 - protein, 394 aa, unidentified
MPELFVGIDVAKDTSSAQGIDSNGIGQFSLTFTMDSEGFMLLWKAIAEHSKDLSEVRAAVESTACYHINLYSFLTAKGVSTVVINPLLIANFAKLSLRKTKTDKKDAMSIAQFLLVNRDTISQLTMSQDLQDFRDIARERESVGSMLTAHKVEIKRLLQSTFPELERIGDLSTKVMQDFILEFPSARLVKMATVKALQKKLQRKWVGTKLTYTAEDLMQAAKQSVATISPAKELILQGKVRTLQHLQERYAELTKILTEYCKSTMLEDFEIMTSIDGIDKRTATTFLAEIGCIGNYASHKKLIAFAGIDPTVYQSGKFEGASRISKRGNRHLRRVIWLMTTCVIQHNTTFKTYYMKKRSEGQPFKKAVFATAHKLIRMIFAMLSQRTMFREVCI

SEQ ID NO: 473036 - protein, 412 aa, unidentified
MDVVNTRCCGLDVHLKTVVACVLMTQDDGTVVRKTHTFKTMTEELLALRDWLDRWGVTHVAMESTGVYWRPVYNVLEDEGRTLLLVNAQHIKAVPGRKTDVKDAEWLADLLRHGLLAPSFIPPQPIRELRELTRYRATLLRERTAEINRLQKTLEGANIKLGVVASDVLGASGRDMLQALVAGERDPEVLAELARGRLRAKLPELRQALTGRMQPHHATLLAHILAHIDFLEQTIAALQEEIAQRLGPYDEELALAQTLPGIKATAAATILAEIGTDMTRFPTHRHFASWAGVCPGNKQSGGRRLSGKTTPGNAWLRAVLGEVAWAAIRTKDSYFRAHYYRLARRRGKNKALMAVAHSILVALYHVLREKRPFQDLGADYFDRLDTTRIERHHVRRLEQLGFKVDLTPVAAA

SEQ ID NO: 473037 - protein, 379 aa, unidentified
MEVFIEKCAGLDVHSKTIVACVIKGNREDDLYTEIETFPTLTKDLFRLLKWLEGHEVTHIAMESTGVYWKPVFNILEDFFDITLANAQRIKNVPGRKTDVSDAEWIAKLLRHGLIEKSFVPPLDIRELRDLTRLRKKWISHLVSEKNRIQKVLESSNVKLSTGISDVFGVSGRKLLNRLIEQGYVDEVDVEKDIHGKLIPKKQRITDSLFGTINEHQIFLIRQSWQHIQYLETLISEIEERIDQLLQNYQEELQLLITIPGISKDTAAVIIAEIGVDMGQFPTSQHLASWAGVSPGNHESAGKRKSTRTVKGNPHIKSALCEAAWAVSRSRNRWLANKYWSLASRRGKKKALVAISHRMLRAIYSMLMNKEPYKEPQLV

SEQ ID NO: 473038 - protein, 428 aa, unidentified
MIKINPLSTLYVGIDVSSKSNYVCALDFYKNKYINSSFANNQPGAEELAQKILECLKEHPDLNTVVAALESTSVYSIHIANYLSSCEELMPFKPFIFVLNPKCTANYKKSYIGLGKSDPIDAFVIADYARAGNIETEPWRGSQFLALKRLTRHRLHLVECITREKAYLVSNLYLKFSELQMLEKDNQPFCDIYGATSSSVLTEYLSPEEIIESSEEELVSFLADKSRNRIKDISKTADLLKKAARDSYRLDKALYEPLNVSIASSFNCIETFKKEIKAIDIAIEREIKGLNPNAFIILQSIDGIGPVFAGGIVAEIGDISAFTSSDALAKYAGLCWRSNQSGDFDGEDTPMTKAGNRYLRYYLGEAANSMRKHNVEYGAYYRKKYNEVSKHQHKRALALTSRKFVRLVYGLLARNQLYSGVSLDTSNE

SEQ ID NO: 473039 - protein, 355 aa, unidentified
MKRAHFIGMDTHCQFCEIAVVDACGNVVLRDRCDTCIPTLLAVIEKVPQPRMLVIEEGPLAGWLWRNLHEAVKRMVVSEPRRNRLIAEEGDKDDDLDAEKLAQLLRGGFVKPVHQVATLDRAVFKQHVSWYHHRVRQRVREALRISSLFRQHGVMIREKAFVAEAERPALLARLPEASCLRDMVPLLWTSYDAAVEQEEQWCRRLVALAKQEEVVRRFEALPGVGWIRAATLYAYLDTPWRFRSKAALWKYLGIGLGRHRSGNGPEHLGVPMMAHRPLKGTILGAAKSAVASGVNPFADLYGRWLEQGLSAKLARRNVARALAATLWGLWKNGSAYRPEWVGVAAAAMPATKASR

SEQ ID NO: 473040 - protein, 455 aa, unidentified
MKVKAVSALRSKRGLHRVNGAEPQVVGLTPQTTDIRKTDTMKTYILRQVRTVESEKSAGPARRKPVAAATAAAILERPVAPLKGPVLFIGLDVHNDSIAVSLAPSDAVEVRRYGIIGGEHEDVVKLAKKLAEAHPGRLLKFCYEAGPRGFALCRCLQAHGRDCILVCPSKVPRKPGERVKTDRRDADDLARLYRAGELTGIYVPEPEDEAMRDLIRARFQVGKQQHRARQQLKMYLLRHNLRYGGQSSWSPAHLRYLAKIKMPFPVQQIVFQEMLEVISQAAAQLERYDQEIERAVPGWRWAPAVRALMSLRGMALLHAATLVAELGDFNRFEYPGQLMGYLGLVPSEHTTGNDRQQGGITKMGNAPARRALVEAAWQYRAPARLSPHLQKRQEGLPKTITDIAWEAQRRLHHRYTHLTRVGKKKSQVAVTAVARELAGFVWAIARQVKPVAATP

SEQ ID NO: 473041 - protein, 339 aa, unidentified
MREVTTIGLDLAKNVFQVHGVDHAGAVVVRRALRRSQVLAWFAKLPPCLVGMEACATAHYWGRELRRLGHEVRLIPPAYAKAYVRRNKNDAADAAAICEAVSRPTMRFVTIKTEQQQAVAGIHRVRDLLIKQRTMLRNQLRGLLAEFGVVAAQGRRGLNELLAILSDPEEQRIPSPLREGLMAIMETWRGIERKLEEIDRQMVAAGRADATCRHLITAPGYGPILSSAMAALVIDPGAFKRGCDFAASLGLVPRQDGTGGKVRLGPISKRGNGYLRRLLVNGATSLIKCQRARQDPWVAKLLASKPRKVVAVALANKLARIGWALMTRQEDFRSRLAAA

SEQ ID NO: 473042 - protein, 408 aa, unidentified
MRLYVGDDWAEDHHDVEVMNEAGKVLVKKRLPEGAAGMSQLHDLIGRHVPEDADDAEVVIGIETDRGPWVAALIAAGYTVYPANPLLASRYRERHGVSGAKSDGGDAHVLADMVRTDSHQLRPAAGDSPEAEGIKVVARTHKTMIWDRTRTVQRLRHQLREYFPAALEAFDDLDAPDVLELLAKAPDPARAAKLTRAQVAAALKRARRHHVPARTDAILAALRGEHLGQPAELTAAYAATARSLIAVLVTLNEQVRFLEAQVKEHFGRHPDAEIYQSQPGMAAVLGARVLAEFGDDPYRYESAKARKNYAGTSPITRASGKKKVVAARFVRNNRLIDALMAWAFTSMLSSPGARAFYDEQRAKGFEHNDALRRLANRLVGILHGCLKSRTLYDEDAAWGHREELKRAA

SEQ ID NO: 473043 - protein, 359 aa, unidentified
MDGSKGRTKMTAGLDLGDRYSYLCLIDTLSGEVIEEGRLRTTPETFRRRFASEQPPMRIAIEAGTYSPWVSRLLKECGHEVLVANARKLRLIYANKQKTDEIDAENLARLARLDPKLLYPLNHRGEDSQAHLAVIRSREALVSCRTQLVNHVRGAVKSFGARLPKCSARSFHNKAAAHIPEALRPALGPILEQIGSLTERIRDYERQLETISKEHYPETDLLRQVEGIGPLTALTFVLTVEDPHRFAKSRSVGAYLGLVPARDQSGERDPQRHISKEGDEMLRKLLVGSAHYILGPFGKDSDLRRHGEKIASRGAKNANKRAVVAVARKLSVLLHRLWITAEHYEPLYNTHRRAQQEAA

SEQ ID NO: 473044 - protein, 418 aa, unidentified
MTATNSTPSTVLVAIDVSKYRHEVLIGVPGKKRRRRMTIMNTLEDFHRLSAALVGYDLPVRIGFEATGNYHRPLAHHLGQAGFELKLVSSVGLARTREALHNSWDKNDPKDAQVILHMLEIGAVQFFHDPLVVGTADIQELSKTHEIVSRSKTELWHRILTHYLPLYFPEAERFHRSSRTDWFLAFLEKYPTPAMITAMSQEAFIADAWQVVGRKVSKERLLSDIYATAIDSVGLPVGLDSDAVRMFRLVLAEGRSLVRQRNEIEARAVELLSDLPDYQLLTTIPGIGPINAMTILAEAGDLRRFRHHRQFLKFCGMDLATMQSGMFRGQSRISKYGNARLRRTLWMAGQTAVLKRTNSFRDKFERYISKDRHNAHLRRKAYTAIAAKMARTVHAVVNHGEPYRPFFEGVSPGGRTSL

SEQ ID NO: 473045 - protein, 338 aa, unidentified
MRLYSGIDLHSNNSVVVVIDEQDRVVYERRHPNDLGAIVSALSPYAEDLEGIAVESTFNWYWLVDGLMEAGFRVHLANTARMQEYGGLKYTDDHHDARWLAHMLRLGILPQGYIYPADERAVRDLLRKRGQLVRHRTVQILSIQNLVSRNRGMQLSGNRIKGLDEQALSELLPVAEQHLAAAANLAVMQALDGQIEHLEQEIKARVKPRPALKWLKTVAGIGDILGWTILLEAGDIARFERVGNYASYCRCVDSKRVSNGKKKGENNRKNGNKYLAWAYVEAANFAIRYHDPVKGFYQRKKAKTNGVVAIKAVAHKLARASYYVMRDRVAFDIHRAFA

SEQ ID NO: 473046 - protein, 339 aa, unidentified
MNITTLGIDLAKNIFQLHGTDGRGNALFKKTVTRNNLAELIANLPKCRIVMEACGGANHWARKFNDYGHDVKLISPQFVKPFVKSNKNDRNDAEAIVEAASRPSMRYVSAKTIEQQDLQSLLRLREGCIEMRTKMSNQLRGLLTEYGIAIPKGMSHLHKALPKLFDRGIDNELTVTLKEMLEMQYNLLLLMEQQIATYEAKLKIIAKTNEACQRVQQVEGIGPITAVALASTIGNPNDFKNGRHFAAFIGLVPRQHSSGGRERLLGISKTGDSYLRQLLIHGARSAVLYAGKKTDIRSRWINGLKMRAGANRTCVALANKNARIALALLKNKETYKPAN

SEQ ID NO: 473047 - protein, 350 aa, unidentified
MHYIGMDCHISTLEFAVIDEAGRLVKADRVATSVSGMVEFVKKVPKPRKVFMEEGTLAAWALETCVRYGEELVITDPKQNRWIGSAGQKEDAIDALKLAQLSRGGYIKEIPHPVGQRRRFRELMLAYHDTVRSSTRVKNKIKAKFRQNGIPCTGETVYGKTHRGEWKAKLPQDPSVLLIVESLWNQLDGLAQTEKELLTAAKGQARHYSEIKLFEGVPGIGFIHAATVSAIIETPHRFASKSKAWMYAGLGIVKKASGGKVYTEKLSTDYNRQLKYTLKQAVEAAIQATDNPFRRKYLDMTLLRGVVPHRARLTIARDILATMLAMWRKGERYNPEIREKAKTRKQVQAC

SEQ ID NO: 473048 - protein, 329 aa, unidentified
MKRKSFIGIDISKKTIDICLYTPGSTNPKKFFKTENSLKGFKLFIRELKTVKTKLKETFVCLEYCGVYGLELGFFLEGKIEYCFCNPLHIKRSLGLTRGKSDKLDSFKIARFNYLFRDELSPMSMPSECMLRLKSLMAERSRMTKSIVIDKQVLTDLQKTLGINAKQRAERRLELLQVDRKAIDKEILKLIESEDCISTNYKLLISIIGISLVNATMMILCTNNFEGITNPRSYACYCGVAPFEHTSGTSIKGRTRVSPYANKKVKANLTNAARSAVQHDPEINIYYKRKRAEGKDHGTVMNAVKFKIITRAFAVVKRGTPYVKLRQAG

SEQ ID NO: 473049 - protein, 319 aa, unidentified
MLIGIDVAKAELVVAVRPSGAPWAVANDAAGVRTLVARLQEERPTLIVLEATGGYELLAVGALAAAGLPVVVVNPRQVRDFAKATGQLAKTDRVDAAILALFAERVQPAVRPLPDEAAQELDALLARRRQLLEMLQAERNRLGQVFGGGRQPVRKSLKTHITFLERELRIADTELGQMIKQSPAWRAQDDLLQSVPGVGRVVALTLLAELPELGRLSRRQIAKLVGVAPLSRDSGTLRGRRFVQGGRASVRAMLYMAALVATRRNAVIRAFYQRLVAAGKPKKLALVACIRKLLTMLNAMVRSTTRWHDTAAFATPVGA

SEQ ID NO: 473050 - protein, 315 aa, unidentified
MFVGIDVSKDWFDAAWQAEGQLRTQQFAYTDEGIEQLMEQMPPEAVCVMEATGTYHARLALKLFEAGRGVSVVNPLVIKRYGQMKLLRVKSDRADAQLILGYAQQERPALWQPASEQVQELQQAHGWLNDLIGQRVRLLNRQHAVSYRAKPSAFVVGQMAAQLQQLNERIDECERHLEVLVKKSFAELYERLLTIPSIGAKTALELIIVTDGFTRFEDVKQLGAYIGVSPTTLRSGSSVKGKGSIAKLGQGRMRQLLYLCTWTAKNCNPACKKLHQRLKAQGKPAKVINIALAHKLLRQAHAVATKNVSFSAEMA

SEQ ID NO: 473051 - protein, 340 aa, unidentified
MGEVTTIGLDLAKHVFQVHGVDAEGATVLRKQLRRAQVLAFFSRLPPCLVGLEACATAHYWGRELRALGHEVRLMPAQYVKAYIKRNKHDAADAEAICEAVGRPTMRFVPVKTADQQAAVLLHRGRERLVRQRTGLVNALRGHLAEFGVIAPQGLRNVGKLIAIVRDEGDARLPDLARQVLQVLAAQIEQLEAAVAAIEKQLMAWHKSNPVSQRLASVPGIGPIIATAIAATVVEPSGFRSGREFAAWLGLVPRQNSTGGKHRLGGISKRGNQYLRRLLINGASANLLRSKATNADPWVIGLRHRRPSLVVAVALANKTARIAWAVMHRHENYQRVVAAA

SEQ ID NO: 473052 - protein, 346 aa, unidentified
MLIIGCDFHPGFQQIAIFDNRTGEIQEKRLQHRADAEQFYRGLAGREVRVGMEACGHYPWFERLLAELGYELWMGDAAKVRASVVRKQKTDRRDAEHLMQLLIEDRFPKIWAPSLEVRDVRQLLVHRHKQVQARTRTKNQLQAMALSHGVQKKYKLWTKVGRAELEQVPLLPYAAERRKKLLQALDGLEAEIGELNGRVEEEARRRPGAVLLMTHPGVGPVTALAMVLTLGPAERFESGKQVGSYFGLIPSEESSGGKQRLGRISKQGSSFLRFLLVEAGQTAARKDPQLKRFYRRLATRKNRGVAKVAVARKLATRMYLMLREGWTYAQLNQAVMSVSPSHSVVE

SEQ ID NO: 473053 - protein, 319 aa, unidentified
MASFLGIDVSSLSLDALVRPQGIRISVRNDPAGFEELVKSLRGLSIKRILLEATGGYELDVMRFLQNASYKVIRVNPKRARSFADSLGIKAKTDAIDAAVLAHFAEVIPDKPTLKTSPERALLRELLQQRDRLVQQRDDDRRRLKQAQSAMVANFLKTNLQHFASQIKLVEQAIKRQATVLSDERIAKLDEVKGIGMVTATKLVALLPELGHVESREIASLVGVAPFNHDSGKSVGKRFISGGRFEVRRALYMACLVAVKHNPTLKARYEALRGRGKLAKVALVACMRIFIVRLNAMLRTGTPWRDDLPQPENMAQITA

SEQ ID NO: 473054 - protein, 355 aa, unidentified
MNSEKYIGLDVHQATISVAVMDSQGKIIMESVLETKASTLLEFIAGLRGSLFVTFEEGTWAAWLYDLLKPHVTEVLVCNPRKIALVKQGNKSDKIDARKLANRLRLHDLKPVYHGETGVRMLRELARSYLTVVKDLSRVMNRLKALYRSWAIPCAGRDVYYKRHRSQWLEKIPEAGTRWRAEQLYQQLDMLQHLRQQARRELLAEGRKHAITAKLRQIPSLGPIRSALTVALIQTPHRFRSKRQLWTYSGLGLETRDSGEYHYVNGQVRRRKKQATIRGLNKDYNHDLKGLFKGAATQASVQPGPLQEFYQRSLAKGIKPTMVRLTLARKIAAITLTLWKKGEDFDINKLNSQAA

SEQ ID NO: 473055 - protein, 406 aa, unidentified
MRFYIGLDWADAEHAVWVEDENATKIVSRTVPQTAEGLSEWGRWLDERRAEGIELWAAIEKPEGRIVDFLLDHSVLVFPVNPKALDRARDRFRMSGAKSDPFDAHVLATFLRTDHGHLAPLRPSSEAAQELKGLTRDHARQVRQQTRLLNQLTATLKAYYPRALEGCDDLKSQWARAFLREYPTPAALAALTAQRWQRWTREHRLGAERTAELWTILQRPQLPVPAHVVRVNARLVGALLAQLEATITAVEAYREAITDFFASMPAAEWATSLPGGRSGTTVPQLYAELGDAAGRWQTFRHLQGHAGSVPITDRSGKQVSVQFRFACNLHLRQAVHQFAFQSLGKSEWARAYYDRGRKRGHSHHHAVRALAAKWLKIIFVLWTRQVAYDETYHLATMARQHLRQTA

SEQ ID NO: 473056 - protein, 356 aa, unidentified
MIRPRVHGGAGLAPAAGLIRSLSAFGGVTHHSPAARFPCAQTGVHRTLRVESAAVRFADEHAPGARVWAVEGAGHYGAGLARHLSGRGETVIESGRGPRDERRLRGKDDPLDAVRAARAALASEKLVLPRTGQRREALRLLLVARRSAVEVRRRALVQLRSVIVTAPDRLRDQLQALPERRLLERCSHFRRSSSCPVDELAAKLVLRTLARRIEAATFEAEQLERELLAHVRALAPRLLDEPGVGPIVAADVIVAWSHPGRVRSEAAFARLAGVAPVPASSGQTIRHRLSRGGDRQLNRALHTIVLHRRQHDPTTQAYIDRRVAEGKSRREATRLLKRYLARHLYRLLQQTEPLMT

SEQ ID NO: 473057 - protein, 337 aa, unidentified
MAIIRVGIDTSKHVFQVHGVDESEQRVLRRAVRRGELLTVLGKLAPTRIGLEACAASHHWARELGRLGHEVVLLPPQYVKPYVKRGKHDAADAEAICEAMSRPGMRFVAVKSSEQQAMLMLIKVRDLLVKQRTMLINAMRGHAAEFGVIAAKGRSKMAELLRRVQERDAGVPALAVSLLAGLARGCAALDAEIAALEHQLLAWHRQDPVSQCLATQPGIGPIAAVSFALKVSDPRGFRSGRHFAAWLGATPKENSTGGRRRPGKISREGDAGLRKLLVLGATAVIRAAGPGRASPWLLQLLARKPKKLAAVALANKMARTLWAMMVSGEVYRRPMPA

SEQ ID NO: 473058 - protein, 376 aa, unidentified
MREKLRFLGLDVHAETIAVAVAEPDGEVRSLGTIANREDSIRKLIKKLGPAEQLRACYEAGPTGFVLYWQLAELGVDCAVVAPSLVPKKPGDRVKTDRRDALKLARSHRSGDLTAVWVPDEACEALRDLVRQREAAKQDQLRARHRLTKFLLRTGRRPPLGLKAWTERYWRWLEQIHYTPLAQEVTLRDCMNEVEHMSARVKRLEEAILEVVKLAPQPMQEVIRGLQALRGVAHISAVTIAAELGNISSRFESARKLMGYCGVFPSEDSSGKRIRKGGITKAGNAHLRRIVVESAWCYRHWPRVGARLRKRQQGIPAEITEIAWKAQNRLHKRYMKLSMAGKDQRKVMTAIGRELLGFIWAIAVKAEQAFQQPMAA

SEQ ID NO: 473059 - protein, 342 aa, unidentified
MKFYCGIDLSARDCHVCVIDEQLKIVVQQKLRNELAKICQLLAPYKAYLKIVVESTFNWYWLIDGLQAEGFDVVLAHTLGLYLITGAKVKTDRRDAYSLAKLLLVGAVPVAYIYPVETRPVRDLLRRRAHLVQMRAGEYGSLRRLLLRQGILSSKQQEIKTATEAELEQWFEHPLVRLHASQELRRIELYSEQIAELEKTILALAKTEQSYELLQQLPGVGQTIALTILYEVGELTRFANVKVFSSYCRVVPGIAQSGNVSRRGRASKQGNHYLKAAFSQAAVHAVRCYPKVRRYYERQLKRHRGRGRQMICYNIIAHKLAQAAFHVLKEQTEYREELLFGP

SEQ ID NO: 473060 - protein, 374 aa, unidentified
MLRDAQHYVAVLELSKESWLVAGIVPGVERQPLKKLAADENELLKLLERWRAEAEKAGHKIDRITVAFEAGRDGFWLARWLRERGIETHVIHAASVAVSREHRRAKTDRLDTEQLKRAFLGWLRGERDHCKMCAIPTSAEEDAKRPYRERETLVGEQTTTINRIKATLARLGIRNFNPKRKNAAERLEHLRTPEGEPIPPNTLAELQRDMARKQLLAEQIRQIEKQRVEQLEKAPKAGPNLMVLVLMRVIGIGIETADMLVKEILSRNLRDRRAVARYGGLTGSPDESGKSRREKGLARSGNARVRRGMIQLAWRFLGHQKDSALAKWFEARTKNARKTRKKMIVALARKLLIALWHFVHDGVVPEGVVLRPAH

SEQ ID NO: 473061 - protein, 353 aa, unidentified
MIHVGIDLHSRNMILVAINDKGKLLVEDKQLNSPANLSLFFQQFDEPVQAVVECTSFWYWVADWCGAHNVPLTLAHAKMLKAISYAKVKTDSVDARTLAELLRVGLIPEAHQCERQQRDLRELTRGRLRMIERRSSLQSSLWQLAAKYNVIVQDVGWRYLGTLGEFLKQQLPAVAWVEARLLLEQIRLIQDQVGVLEQAIESQTHFHKDVERLKVLPGFGLVCAWTVIAEIGDITRFPSSKQFTSYCRLVPGSKDSGGKHRHRSKNKDGNRYLRIAFNQAAIIAYRDYPEVKEFYKKITRRSGKHVARTVVGKELAKIVWHMLSKDEEYKGFKGRMTRITTQNYWPQPISPNA

SEQ ID NO: 473062 - protein, 412 aa, unidentified
MKIAGIDVHKKVLMVVIIDASMPEEKPVRRRFATLPSELQRFLLWLREQGVEEAVMESTAQYWRSVWLELEPHMRLHLAQAFSNRAPRGRKHDFKDAERLVRRLIADELILSFVPNGEQRIWRSMTRMKLQLTRDRVRLQNQMECLLEEMRIKLSIVVSNLLGASGLRILHALAKGETDAQRLAQLGDERLQCTEEQLVDALTGRVHPLHREMLALQLQRLQLIDQQMVELNGLIAQAMKPHQDAVQRLAEVPGLGVDSAQQIIAEVGAQASTFPSAAELTSWVGTCPGKEESAEQNRSSRSAKGNKYLRRVLNQAAHAAVKRKGSYFQAVFRRLLPRLGYQSAVWAVAHRLCRVVWKILHEGVRFIEQGQEPDPRAKKKRAQMLARALRKLGYEVAITPINPVTATNGLQM

SEQ ID NO: 473063 - protein, 329 aa, unidentified
MKFQHIIGADLSKKSIDLVCHFQSTHIQIENSITGFKELKQWMRQHKINPLKTMIVMEHTGLYSYCFEKFLHEQRIAFSKVNALAIKRSMGLVRGKTDKIDAARIAAYGYEKKDSLVIDVPASDALKRLQMLHSTRNRFVKQRASLTCVIKEYRHIGIAEKDVIIQSQIQLIKNLDKQIDKLMAEIKTIIDGQEALKQNFNLLNGVVGVGKVVALTTIIKTHNFTRFTNGRKFSCFCGTAPFEHSSGTSIKKKSKVSHLADKEMKTLLDLSAKSAIQHDKELREYYLKRTEAGKSKMSTINIVRNKIIYRMFAVIKRQTPFLKNYLQTA

SEQ ID NO: 473064 - protein, 375 aa, unidentified
MKEKVRFLGLDVHAETIAVAVAEPDGEVRSLGTIPNRVESIRKMIGKLGPAEKLRACYEAGPTGYVVYWQLAGLGVQCEVVAPTLVPVKAGDRVKTDRRDAEKLARCYRSGDLTAVWVPDEGSEALRDLVRAREAAKQDQMRARHRLSKFLLRSGQRPPTGVRSWTRPYLIWVAQLRFTQSAQEFTRQDYLHEVEHMRARVTRLEQAITEAVKLASPALQQVINDLQALRGIADISAVTIAAELGQVSRFGSARQLMGYCGAVPSEDSSGRRIRRGGITKTGNAHLRRIVGEAAWSYRRPPCIWYGLRRRQESISEEAKEIAWKAQHRLHKRYMKLGAAGKPQGKIITAVARELLGFIWAIGIRAETIAGQQTAA

SEQ ID NO: 473065 - protein, 410 aa, unidentified
MEVLYPVCCALDVHQASVTACLRSPGDGPQRRQEVRTFGTTTRELLCLADWLTAAGCTHVAMESTGIYWRPVYNILEGRCELSVVNAQHVKMVPGRKTDVRDSEWLAQLLELGLLRRSFVPPAAQRELRDVVRYRKRLIEERAREANRVQKVLETANIKLASVVTTVLGVSARAMLKALIAGEGAPEQLAELAQRRLRRKRPALTEALTGRVTAHHRFLLDQLLCHIEFLDGAIAACDRQIATLTAPHADALARLDTIPGVARRTAEVIAAELGCDMTRFPTAGHAASWIGLCPGNHESAGKRLSGRTRQANRTLRQALVESARGAVRKRDSYLTAQYRRLVKRRGDKKAIVAVAHSLLVIAYHVLRDGQPYRELGGDYFERLNADRLTRYHTKRLAALGYAVTLTKCAA

SEQ ID NO: 473066 - protein, 331 aa, unidentified
MSVHVGLDVGSRTTAMGWRDKGRAAGSWEIAQTPKGRKAAVKKLMALKPLSVVMEATGIYYLDLALELSAAGLPVSVINPKSSRNFARLMLQHSKTDAIDAQLLAEYGERMAPRLWVPPSPVQLELRAIGRHINRLTCHCTRAKNELHALQATGTTSALLIEDEEEAIAMFGKRIERFRQAGRAIIANCPALRSQFDHMMAAPGMGEVSTFAVLAELTALPVTLKSPQVSRYAGLDVRLTQSGTSIDKPGRLSKGGNAYLRSAMFMPAMSAIRCDPHVKAFYDVLIGRGKRKMQAICAVMRKYLTGLWACIRTEEDFDTAKLFSEKHLLKA

SEQ ID NO: 473067 - protein, 412 aa, unidentified
MKDLLEISCGLDVHKDKIVACILTGPLGKPTNSEIREFTTLIPDMIALRDWIVSQNCHHVAMESTGIYWMPIYEILEEAFGGDITLLVVNARHMKNVPGKKTDMRDSEWISTLLRAGLLNGSFIPEKRIREFRDLNRYRKSVIRDITSQKNRVEKFLQSSGFRLSSFISDIFGASGRNIIRHLTEHGQIDRSALDSCLKTKTRNRIDEILMSVNGTLSEHQKAFLKILMDHYDSLKEHLAEIEKSLEADMAPFALQVEQLSSIYGISTTASCAIIAEIGIDMKPFKTAEHICSWAGLCPGNNESAGKRKSTSVTKGNPYIKSMLCEIAWIIAGKRNTYLSAWYWRIKQKKGAKKAIIALARKLLVIIYTMLKQGTLFDESCFEARRKSCEQKQLSRYIRELEKHGYHVEAQA

SEQ ID NO: 473068 - protein, 354 aa, unidentified
MAISKQCIGIDISKATFTACLCQRSDDGVLTFSKTLDFSNDTKGFNQFLRWVKGVIAPGAALVFLMEATGVYYENLAHHLHKIKKRVHVVLPNTSKHYFSSLNIKTKTDAIDARILSQFGVERAHKAWSPPPAVLLQLRNLTRYHVQLQEQKTALVNIKHSKDCSHDIQNFILKSNKKLISDIDKEIARCIKEINRLVKSDVGLHRKIEKLATIKGIGMITMVTILAETMGFEQFRSAKQLVSYAGYDVVQRESGTSVKGKTRISKNGNRYIRNALYFPAMVACRHNSVLKEAYTKIIQKKPSKMVGQVAVQRKLLILMYTLWKNDTVFIENYKVSSPDPKTETTLDSSEAELL

SEQ ID NO: 473069 - protein, 362 aa, unidentified
MPMLAELIDAVVGVDTHRDTHEVELALPTGTAIGIRKISNDNSGFAELLAWILDHSPGPRVVVSIEGTRSFGVGLARAVAAAGLTVIECEQPNRKARRGKGKSDPIDAHLAVLAALRLDADRLPIPRADGDREALRILLGTRHELTVVTTAQTNRLRALLLGGKDSERDLARATLTDPVLLAMVRRREPPQASREQAVRHGEIRRLAHAIRAGRHALAANRAQLQAIVDQIAPELTERRGIGAVTAAQAIVSFSHPGRCRSDAAFAALSGTSPLQASSGKTVRHRLNRGGDRALNSAIHTIAVTRMRCCPRTKDYVARRTAEGKSSREIQRCLKRYIARQLYRALNASTTLTAQISAAPTTA

SEQ ID NO: 473070 - protein, 352 aa, unidentified
MKIIGCDFHPSYQQIAMMDTETGELWEGRLEHEQGEARRFYQALQGQTVRVGMEAVGNSHWFEQLLAELGHELWIGDAAQIRRLVVRQQKTDRRDAKHILDLLLDGRFPRLWVPSPQMRDVRQLLRHRQKLVEIRTQVKNQLQHLALNQGVRRKSRLWSVQGRAVLEQLPLPPWTARRRGDLLAMLDRLQEQVGELDRAVRAEAEQRPEVRLLMTHPGVGPVVGLAYVLTIGPITRFPRGKQVASYLGLIPSEHTSGGHQKFGPISKQGNTMMRTLLVEAAQTAARFDEQLRRQYGRLKARKHSALAKVMVARKLAVRMYWMLRENKPYAQLYAQRPVARMQGSPSHSVVAS

SEQ ID NO: 473071 - protein, 337 aa, unidentified
MRKASTVKVFKDCLGIGIDVSKGELVVVGLTTGEPYIKRVNNRLTSIRAFVRALSKAGYGGKIICESTGHYHLKLALACHELGMEIIVLNPLQSSKHSKAKVRKTKTDAEDGLMLATMCITEPKLPKPTQLTASKALIQLKMGQLASIEKQLQKSQSSLNQYEETYAELGLELSELQVSLRAHHRSFKRLQKQLQGELEDLLIDNMADQKSYIRLCRLPGYSNVVSGLVGQLDRQVKGASSWVAYAGLDISVRESGTWKGRGKLTKRGNAYLRKRLFQAAWGACMNYDYVRAYYDMLKAQGRNHTEANCMISRKFLKIAYQVVVNEKEYDPKIAFSN

SEQ ID NO: 473072 - protein, 345 aa, unidentified
MTSVATIGLDIAKSVFQVHGVDAAGQVVVRQRLARRRVLAFFEKLAPCLVGIEACSSSHYWARELVARGHQVHLMPAQYVKPYVKRGKNDAADAEAICEAVTRPTMRFVPVKTPEQQSVMMLHRVRLMLNRQRTQLSNSIRAHLSEFGIVAPIGRRGLEQLLAIVADEEDTRVPADARLCLQMLTAQLAVVKDQILENDRRVRASARATELGRRLMQVPGVGPLLASALTATISDPAAFKTGRDLAAWIGLVPKQNSSGGKERLGSISKAGNRYLRQMLVVGAMAVIRYAERHGTRRPWLVQLMQRRSTKVAAVALANKMARIIWALMTSGECYHEPAAAGAMAA

SEQ ID NO: 473073 - protein, 317 aa, unidentified
MEKTRYVGIDIAKDSMEVMVHEGEGHWAYTNDEKGLSKLLTKMKRLSPCLIVLEATGGYETTVASELQSKGFPVAVVNPRHIRDFARSTGTLAKTDVLDAKIIARYAATVKPVPRDLPTEETRTLGAIIMRRRQVVTMLTAENNRLHTADAAVKERIKVHINWLEQELEDINKELKQKVQDNPDWKEKDEILQSVPGVGPNLSITLLADFPELGNLNRKETAALSGVAPFNRDSGTLRGKRTTWGGRDIVRTAAYMSAFVAIRCNPILKSFFGRLIAAGKHYKVAMVACMRKLLCILNAMLKNRTLWNYSTNQLISP

SEQ ID NO: 473074 - protein, 342 aa, unidentified
MGTITTIGLDIAKSVFQVHGIDATGEVVVRRRLSRGRILAFFEKLPRCLVGMEACNTSHYWARELIALGHDVRLMPAQYVKPYVKRGKNDAADAEAICEAVARPTMRFVAVKTPEQQSTMMLDRVRLMLNRQRTQLSNAMRAHMSEFGVVGPVGRRGLEHLMAVIADREDLRIPADARVCLEMLAAQLAVVKEQILENDRRIRASARETEVGRRLMEIPGVGPLLASAFVASIADPTVFKSGRDVAAWIGLVPKQNSSGGKERLGSISRAGNRYLRQMLVVGAMAVIRHVERHGTKRRWLIQLLARRAKKVAAVALANKTARTIWALMTNGERYHEPTVTLP

SEQ ID NO: 473075 - protein, 417 aa, unidentified
MLFVGDDWAEDHHDVEIVDGSGKRLGQARLPDGIAGVTRLHEMLAEHLDDTDLDPETGMLAPERVVVGIETDRGPWVAALIAAGYQVFAINPMSVARYRERHTTSGAKSDPGDAHVLAEIVRLDRDHHRPVAGDSGEVEGLKLVARTHQSLIWDRTRHRQRLRQALREYYPGLLDALAAAGLDLGDPEARELLERAPDPERAGQLSRSKIAAVLKRHRRRNVDARAEAIQAALRAAALRQPPAIESAYATIAATQARLLEALAGQIPQLEEVLGQGFGRHPDAEIYTSLPGLGVVLGARVLAEFGDDPHRYRDARARKNYAGTSPITRASGRKTVVLARYARNRRLGDAMHQWAFCALTSSPGARAYYDTLRGRGIGHHAALRQLGNRLVGILHGCLKTRTHYDESTAWAHHQTVAA

SEQ ID NO: 473076 - protein, 405 aa, unidentified
MEAMIEGCAGLDVHQETVVACILVGPLNKKPEKYIKTFNTTTKGLLELNDWLFEHQITDVEMESTGVYWKPVWNILEGHFKLTLANAKHIKNVPGRKTDVNDAEWIAKLLRCVLIEGSFVPPENIRDLRDLTRYRKNLIQDRTQERNRIHKILQDANIKLTTYITDIFGVSGRNILEAIMNGEVLDENALLTIVKGASRKKIPQILEAIHHRICPHHRLMLRHHWEHIQFLDKAIDEMEREIDHKLKPYHKEMELLTSIPGVSHDAAVLIAEMGVQMEVFQSEKHLASWAGLFPGNNESAGKRKTGKTTKGNKALKTICVKCALATQRQKNRISAHRYRIMRRQGKKKVNVATAHLILRIAYQILKTGQPYQELGYDYFTKQKKEQNEQNMIKYLSALGYQIEKK

SEQ ID NO: 473077 - protein, 313 aa, unidentified
MLNEVIVGIDVAKNKSDVHVSGSGTSFSCSTTKSGLRSLSRRISRIKPSLVVLEATGGYEFPVASALYKAGLPVSVVNPRRIRDHAKSIGRLAKTDCIDAGVIADYGRANRQHCRAFKVRQEQAVKEVVARRSQLIAERSAEKNRLKQASNPVVLKSIRKNIGNLNQDIKELDREIARLIKDNESWRRRQEVLTSFCGVGTVTSAVLIGMLPEMGEVNRREVAALAGVAPFNNDSGKQKGHKSISCGRGPVRAALYMATLTAIRRNPVIKEFYERLVKKGKPRKVALTACMRKLLTILNAMVHTNTTWKSKNP

SEQ ID NO: 473078 - protein, 348 aa, unidentified
MIAIGADVHQQQCTLAVQRPDGKLSMLPSMENTRENWLELLTQLPPEAQIALEVSTSGHFVMSVLEEAGWRDRAHWVHTAGIDSLRKQKTDRLDAKRLARKLSVREQDPLPEAWFPPRPIRELRLRARQRCWVAVLRTRVKNRVRSLLQMSGVGAGTNPFTASGRTWLKNQKLSEATRESVEQLLRFHDFLTTEREKSETSLRGMEKDFPEIARLQTLPGLGHILSAVIWSEIGELKRFDSPRALVNYTGLAPSLYESGERSVRGGITRQGPVWLRWALITAVNAATRGDNAFARRYRRLRRHKLPNVAKTAVARSIARCAYGVLKHGVDYQEQRWGRKAGIEMEQEA

SEQ ID NO: 473079 - protein, 346 aa, unidentified
MLHLGLDLSRKRLDTCLMRDDGTIVESGREGVDADALGSFGRRLAAFDEPVRGVIESMTGARFVHDTLEDAGIDVEMADAAKVKGFAPVTAKTDQIDAAVLADLSRRDLIPKVWLPDPHTRAARELVRFRTSLVKHRTMIKNRIHASLMTHGVANPTSDLFGVAGRRILDSLDVPEPWVSNIAEGVDMIEDLDERIATHRKRIIETGRDYHYVNHLVTIPGVGPILGLTIAAEIGDIARFATPNRLVSYTGLAPRVYQSGDTDRRGPLTKHGPTQLRWALIEATTHAARHQTYRTRHDNIRRRLGPHRGPKIARIDVARRIAVAAWWMCTRNEPFAPKGPNSPLAA

SEQ ID NO: 473080 - protein, 350 aa, unidentified
MPMLEGKVDAVIGVDTHRDRHTAAILDPNGGLVAQLEIPSDQAGAEALLSVVTERAPSRRCWALEGTGCYGAGLASFLAAQGEWVVEVDRPKRPRGRTGAKSDLLDAIRAGREALSRDHLACPRQRGQREALRVLHLTRSGAVKVSADARRHLKALLVTAPEPLRAELRRGTWLRQARACAALVAAPTDPVEHRATVRALRLTAERALAAHQEARQLGKELGALVQAMAPALLAQPGVGPVTAAQLLISWSHPSRRRSEAAFAILAGVAPIPASSGQVVRHRLNRGGDRQLNRSLHTIVMTREAWHEPTKRYVARRTLQGKSRREIRRCPARSTARQLFRLLERQPATTG

SEQ ID NO: 473081 - protein, 296 aa, unidentified
MNSNDPHYKLYLGVDTHLELHVATLINGLGQVVKSNAFSANLSGYRELFAWCKSYGFLQKAGIEGTGSYGAELTKYLIKNGVDVYEVMRPNRMERRLKGKTDGIDSENAARSVLSGEVKVIPKSHAGPVESLRSLLLTRNSAVKARTQAMNQIRALLVSGPDELKQSLYLPKPQACATACLAQCSNSSEPLMISLVLLAQRWNFLNEQVKKLDKALKKLTLSAAQDLVSRFGVGANVAATLLVAAGDNANRLRKESSFAALCGVNPIPASSGKTTRHRLNRGAAAVLIMLSGLSLW

SEQ ID NO: 473082 - protein, 323 aa, unidentified
MHHSTTVGVDLAKNVIQVSVVSPRGKEVLNRSFTRRKFAEFLGKQKSSLVAFESCASAHYWARAAKRHGHEARIIPAKAVAPFRQGHKTDSNDALAVAEAARRPNIKDAPMKTAEQQGLQAVQRSRELLIGECTALSNHLRGILLEFGVAIPQGFASLLRALPEILEDGDNELPDLYRPTLHRMHQRLLELREDIESMTREIDGLVKQRPVCKRLTAIEGIGPIGALSLYAVMGSGKAFTKSREFSAYLGLTPRQYSSGGKTNIVGISKKVGNRRLRSILIQGALAYVYRMKEPRSLKDRWLRDLIERAGLRRAAVALANKNV

SEQ ID NO: 473083 - protein, 351 aa, unidentified
MSLVMLGVDPHKQSHTATALVTGSHQQLATLRVPASASGYRQLLNWARQFPQRRWAIENARGLGCHLTQWLLARGETVQDVRTTATARIRELSRGRGRKTDALDAAAAAAVAALQGDAAQLQPEDATVVLAVLEERRSNLVAQRTRSVNQLHAVLRELIPGGAPPKLRADRAAALLRAVHPMTAADRARKQVAWDLVAEVRGLDRRLTVIGQRIQDTVAALGSRLPETVGIGPVIAGRLLGRTGRASRFPTAAHFASSTGAAPVEVASGEHARHRLSRAGDRQLNHALHIIALVQVGTPGCAGDHYFRRKLAEGKTTREAMRCLKRRIADHVWRIMLSDEQARNHRQPQAA

SEQ ID NO: 473084 - protein, 468 aa, unidentified
MKPAPRRHGQGKPASGLSLLERINPNAAGIDCGAEMHYVAVPADRDPTPVRAFKTFTADLHRLADWLLACGVTSVAMESTGVYWIPLYEILEARGLDVVLVNARHVKHVAARKSDVVDCQWLQELHSVGLLPASFRPTAAIAVLRAYLRHRETLVQSAATHIQRMQKALVQMNLQLSVVLSDITGVTGQHIIRDIVAGQTDPHVLAQHRDARCQASEAEIIAALTGHYRPEHVFVLRQNLELFDMYQQQLAACDAAIEAHLATLVAQAPPPGAPLPAPRTKAKPKARDNAPRFDLRTPLHQLTGVDLTQLDALGPYSALRLLAEIGTDMRCWPTEKHFTSWLTLAPCNKISGGRLLSSKTLPSANRAAAILRLAALSLGRTQTALGAFYRRLAYRVGKAKAITATARKLAILVYRSLKEGLLYQDPGAAAYDAHHQERVLRRLRQRAAHLGFSLVNRDTGEILDHAVS

SEQ ID NO: 473085 - protein, 479 aa, unidentified
MAKRKKSTFERLQHLNRQQRKQLQRQFDADSPELTIVHPHAAGIDIGNESHFVSVPPDQDQEAVREFGSWTEDLRRMARWLKSCGVKTVAMQSTGVYWIPVYDVLEQEGLEVYLVNARGTKNLPGRKSDVQECQWLRKLHAYGLLRKSFRPPQEIREVRSLWRVRDVVIQDAAREVQHIQKALTTMNVQLANAISDVSGVTGMRIVRAILQGQRGPHELAKLRDPHIRASEEEIAHSLEGNWQKDVLFTLQLAVEAYDFHRQQLSRIDKEVEKYMAALPTREPVGKAEESAKLTAKQRKKRKANRKSKDNRPAFDLGAELARLMGVDLRIIDGIDVMTTQTIYTEVGADLSAWPTEEAWASWLELVPRKDVTGGKVVKHRKRPSNNRVTTALRNAAEALARSDSYLGARYRSWTGRLEGLKGVKAMAHYLALLVYRLLTKGPEWVDRGALYYENKQRERQLVSLHRKAAALGMRLAPAK

SEQ ID NO: 473086 - protein, 314 aa, unidentified
MAQISPKVGIDCSDDRLDVHIYPLDLSFSVANDLEGWGELDRRLAAVQAEIVALEASGGCERDIVRFLMARGDYSVRLVDPFRVRQFAKAAGKHAKTDRIDAQVIALFVASIATRPLVRHKHLETLAELVTARAQLLDQITVDKNQGRRREDSLLRRLDARRTKSLQVDIKLIDRRIAECVDGNAELKAKNLVLRSMKGVGPVLAHTLLALLPELGQITGKQIAALVGVAPFDDQSGKRNGLRFIQGGRPAIRTALFMAALTAGVHNPALKTFRDRLRNAGKKPKVAIVGVMRKMIVILNAMLRDNKEWMPAIT

SEQ ID NO: 473087 - protein, 458 aa, unidentified
MKVRVGIDIACRAAHRAACADDTGRIIWTGHRFRTVAAELDELWDRLPGDAEVTVVMEPTRNAWVPLAAWFRRRGAAVVMVPTEQSSDLRAYYAKHAKTDRLDAELLARLPLLHPEGLHAELADGPGDPLKRAVKIRSGLVHRRTTCMQRLDALLEIMGPAWVEAIGSDMCQTAFKFLATWANPHQVRRLGRIRLARWFQRETRKAWGERRADAVVSAAEATLELWGPDGLDWEALAADIAVEASVALELSRQIARLDERIFDLYSEADPDHIVMSAPGVGKILAAQIRGRLGDPHRFTSLAAARSFSGLVPRQNSSGLTDSAGGPTKQGDACLREALFMAAEHARKVDPTLAARYQRLMCDTGRHHTSAVCTIAAVLLTRIVACIRNGTPYELRDVDGRSITASEGRAIVSERYQIPPEIRAARRAVSNARNRTRRDERTKQGVAERSKVTPVPIPA

SEQ ID NO: 473088 - protein, 343 aa, unidentified
MKDTIYDHYIAIDWSIKNMAIARMTKKSNKITAIDVPSDIEDLQAYLKNLRGTKILAIEETTTSQWLYAELKEYVDRILICDPNRNKLLNEGPKTDKIDASKLVQLLKAGLMKEVYHSTDKFLYLRRVVSGYEDLVKSGVRLKNQRYALLRACGKRGKEKAGSSIDSQGEQFVLDCLDRQIEAYEKEKECYENEFERLARKNPEIKHQKSLPGIGTINAVKIVARVVTPHRFSDKGRYLSYTGLIKLEKTSGGRSYGKRSPRYSRQLKSVYKSGVLAAIAGNNPINDYYDYLIQENGYPEHNARQKACRRLAILSLGVFKSGKKYQPFRRNHVKNNKEGTSGL

SEQ ID NO: 473089 - protein, 348 aa, unidentified
MNILAMDLGKSKTVFCEYNSNSGGYKFGKVKTTPQQIHDLIVERSPGRIVFEICTIAGWVFDIAKVLEVEVEVANVNHEAWRWKNVKRKNDRDDALKLARLSAMKQLPTVHMPKREVRQKRALIQYRHKLVSRRTQIKNTIRAILNKQGLRMPKGRNGWTKTCLQWLTEQSVVLEKVSIEDMWRGQLWMELKMLDSVCKAVRQIESKLDNLAKSDEQIKRLESVAGVGPRLAEAIAAFLDEPGRFASGKQVGSYAGLTPKQYQSGQMDRQGNISHQGNKLLRHLLVEVSWISLRYNPWARQTYQRLLRGSPSRKNIAIVGLARKLLVRCWAMLRDEQPWGSEVSGEAA

SEQ ID NO: 473090 - protein, 358 aa, unidentified
MKIIGCDLHARQQTIAMVDTETGEFTEKTLSHEGNALREFYAGLESPVVVGIEATGAMQWFLELLEELGIECQVGHPAKIRAAETRKQKHDRRDARLLLDLLVMKDRFPKIWMPSIEQRDLRTLLRDRHQWVKIRARLQHTLQAIALNHALRRGASLWSAAGQDALQALSLPAYSSQRRTELLRLYVQLQKRIQALDKEVDIQARQRPHARRLLTHPGVGAVTALATEVFLGDPDRFATGNQVASYIGMIPSEHSSGKRQRLGKLSKEGNSLLRYLWTEATMHAVGKDPELKRFYRRKLIQKGMGKARVAAARKLGIRLWIMMRDQIDYEEFCRRGKLRQEGKAHAGMPDFNSGPALQ

SEQ ID NO: 473091 - protein, 468 aa, unidentified
MVAARKHKQRHMSAQVAVDEDYQLRYEIVAGTGVAKESAVVCVRMPPAKGRKHRTSHLQAVPATVPAIGELAAELTVAGVQMVPVEATSDYWRIWFAVLEEAGLAVQLVSSSQARNLPGRPETDKEDARWIARLTEMGMLRSSFVPPPQIRALRVCTRHIWDLTADRTRYWQRLEKLLEDALCKLSAVVSRLAGHQTARAIIEAMIAGERDPRVLAALGRGKMRNDKLPALAEALSGMQFGPEHAHAAASLLRAIDLLDAEISDLQERAAAQLATIPASWGVDADGVTGPQAGRAGDAAALPAADRLDEIPGLGTEAAIALIAEIGLDMSRFPTAAHLVSWAGLTPTARQSGPRNGRGKKGHGNTYAKRIAVLAAYAAANTGTFLGERLRRLASRPGGGGRKKAGCAVGRSILIIVWHLLNDPAARYRDLGSDWHTRHADRSRKARNAQRQLEALGYDVIITLREDAA

SEQ ID NO: 473092 - protein, 432 aa, unidentified
MEQIDRRVKLVPNKLWAGIDIGKEHHHCVVIDEAGQRLFSSRIANDETALTTLIDEALTLAAGGELLWAIDLNRGGAALVIGLLAARSQPVAYLTGLMMHRAAAGYRGEGKTDARDAFVIADQARVRRDLGLLRPGDDIAVDLRILTGHRLDVVFDRTRQINRLRAQLLEVCPTLERALTLTNQGPLMLLTRYQTPSAIRRAGVARIEAWLRKQHVRGAAALAQKASVAAAQQSISLPGETVAAQMIARLAQAVITLDAEIAELDTAIEERFRRHRSADIIVSLPGFGPLLAAEFLAATGGDMAAFTSVDQLAGFAGLAPQPRDSGRINGNLRRPRRYHRGLLRTMYLSAQISTRRSAQSHAFYHRKRSEGKTHKQAVLALARRRVNVLWAMLRDNTIYHDSPPATGGSISLTVFRRFSISKFPIPANDRRT

SEQ ID NO: 473093 - protein, 341 aa, unidentified
MSEVSTIGLDLAKRVFQAHGADASGKVVFRKRLRREQVLAFFAGRPACVVAMEACSSAHYWAREIGELGHTVRLIPPAYVKPFVKRQKNDTTDAEAICEAAQRPTMRFVAVKSQAAQANAVVFRARDLLVRQRTQAINALRGHLGEYGLVVAKGPSHVAKLIEQVEDPATDLPEAARIVLRVLIASLQFLSERITLLDREVARRAREDNEVRRLTTIPGVGPVTATALAAMAPPAGAFRRGRDFAAWVGLTPSQHSGGGKQKLGATSKMGERTLRRLLIIGASSVVRKAIKHGTQSGSWLGQMLARKPRMLVIVALANKMARTVWALLATGEIYRAPLAAA

SEQ ID NO: 473094 - protein, 305 aa, unidentified
MGQYVGIDLHRRSTTIVRMAKDGEVLGTERFVSQPFELAQAMAAAGPEPEVVLESTYGWYWAADVLQDLGAHVHLAHALANNWGNRRVKNDVRDAQDLAAMLALGRLAEGWIAPPEVRELRELVRYRYSLIRHRTSAKAQIHGVMAKNGILPVVGELWGPTGQAQLDRLELPEAYALRLDSLRNLLDVYEAAIAELDAHIHAELKADPGYRAVMTLPGVGKVIAAIFVAEIGDVTRFDSAKKLCSWAGLTPKHRESDQVVHRGAITKQGSPLVRWAAIEAVGNYRAKGNEKLRADYKRIAEHAGK

SEQ ID NO: 473095 - protein, 480 aa, unidentified
MNVKTSKAKNQANASNQVTNLLSKEELKKKIEVIEKELKSYTWRELETNGKFAKNDKLSFITDDMLIVGCDIGSETHYIRAVDVRGRELSSGAFEFSNTSEGFENARAWMLELAAKNDKKQIVLGLEPTGHYWFALAAWMISKGISVVQVNPYAVKQSKEIEDNSQRKDDRKDPKLIANLVKDGNYGMPYLPESLYADMRRLSMFRDQLTEDRIRNINRLHRELKIYFPEYMDAFGKIDGAFALEVLKISAIPSDIAALGAEGMKKIWHDAKLRGRGYSRAGEIVDYAEKSVGLTDGTDAGREAVKWYAGQILKLDRKLEEVEGALHRKCREIPYAENILIISGVGENILSGILAEMGDISRFDDVKEIQKLSGMGLVACSSGKHKGQTKISHRGRKRLRYWLFQAAKSAVSHADEFKQLHEYYTTRSRNPLKKMQSLVVIACKILRVIYTILKTGTTYDPEKLLKDIKRPTSAQASLAA

SEQ ID NO: 473096 - protein, 359 aa, unidentified
MKSISPTASSSNIIIGVDTHKYVHVAVAIDDAGQRLGEHRIPVDTVGYQDLERWARSWGRVTSFGVEGTGSYGAGLASFLRRQGHRVVEVNRGDRRSRRANGKSDTLDAELAARSVLAGTSSSVPKSADGLVEMIRQIKVARDNAQKARTSAVVTLKTVIVNAPPEIREQLDRLGDKALIEKCAGFRLGKVEGATSSTKHTLRSLARRWIFLDQEIKGHDAILNELTQGISPTLRDGFGIGPDTAAELLIVMGDNPDRVRSEACFAKLCGVAPIPASSGMTNRHRLAWNGHRQANAALYRTAIVRMQHHEPTKAYVARRTEEGLSKRDIIRCLKRFIAREAYGRIMIDFRVRTALLSAT

SEQ ID NO: 473097 - protein, 332 aa, unidentified
MSSFVGIDIGATAFEVVIRKNDKNGAVKSYQQTPKDHEKLAAQLLKLDPACVVMEATGIYYLNLAVVLFNSGLKVSVINPNSFNHFAKLTLTHSKTDGIDAALLAEYAQRMTPRLWTAPDPKLLSLRDIGRQINRLVGRRTEAKNNLHALQAKDSTYQPLIDDELEGIEYLEFRIERMRNMALEIIANNGNLKQKLENLTAAVGIGTNSAIMIICELELLPEHLKSSQVSRFAGLDVRLTQSGTSINKPGRLSKAGNSYLRTAMFMPALSAATHDANVRAFYQSLIQRGKKKMQALCAVMRKMLTGIWACLKLNTPFDSSKLFSEEHKKACS

SEQ ID NO: 473098 - protein, 464 aa, unidentified
MNWKGSFGIDIGLEAKHVASVLGVNGMPLQAKTVKFSSDPDELEALVSRYAPDIETRKDITVSMEPTGNAWVLLSAFFRVKGFRVFLVKTQKSYDLRRFIKRHTKTDSLDAKALAKLPFIFPEDMNEYVPPSKESSALERLVKSRETIVSKTSGYKNRVYSHFQLLNPFVLQEFGTNRFTQLAKAFYSRYANPLKAVEIGRKRFCAYLAKHGYGSPSPELLDSLYNACEKAARLHKINTDENGQRHYDLEIQAELVQNDLDIIAFFEKKVKKLEEEIGVFYKKVDPQMVLKNMKGFGGEIVAPGVIALSGPFPRFSKINNYLGLIGLVPKTSQSSTSNKEGMKITKAGKKLLKKYYCIAAETARQWDVEVAACYHRHINNGLHHNQAICAVANMLARRVYAVMKRRDEALARNDTKALGKIGYELRDLKGNPITSQQAREIILRDYPSKKVQKERAIMKKEKAA

SEQ ID NO: 473099 - protein, 451 aa, unidentified
MSKRGSKSAGLPIIHARAAAIDVGARFHVAAVPAELCDEPVQTFEAFTSDIERMADWLVSLGIKTVAMESTGVYWVPVYEVLEDRGLEVIVANARDARAVPGRKSDVNDAQWLQRLHACGLLRASFRPGRDIAALRAYLRLRERHLDDAAAHIQHMQKALTFMNLQLHHVVSDITGATGMKIIRAIVAGQRDPEVLARMRDVRCKANFEAVRAALVGNYQPEHLFALRQALALYDLYQERVDECDAEVEATLARLNIDKQFPAEPLPKARHRTQQPNAVNFDTRPLLYQLTGVDLTQIHGIGPYLALRLISESGTDLSRWPTAKHFTSWLTLSPGCKISGGKVLSARTRKTNNRLAAHLRLAATTVGRTNTALGAFYRRLAARIGKAKAVTATARKIAVLYYNAMRYGMTYADPGADQYERKYRERVVKQLHRRAAEFGFTLQEATPQGVS

SEQ ID NO: 473100 - protein, 362 aa, unidentified
MNYIFVGCDSHDKTLVNKIALNREAAQRKGFGASGAGRRKMIEYLKERSQEAGGAKVVVAYEASGNGFILCDELKQAGIECHVLAPTKIERSTKQRRNKNDDRDADRLLEILRGHYLAGNKIPSVWVPDRQTRDDREPVRGRQDLSQKQTSVKTQIQMLVKRHGIEKPEGVGNSWSKTHRRWLKALTEDGQPGWGRQQALGSLLRQLEFLEEEIEQLDKAMEELADTPRWKPIVEAMRKEKGVGLMTALKYSTDIADFSRFRRGRQVGAFYGLAPSSHESGETNDRKGHITREGSPSGRQVLCQSAWSRVRHDTHEREVYLRLALKNPKKKKIALVACMRRLAVRLWHVGLQAQLQMKAAAV

SEQ ID NO: 473101 - protein, 392 aa, unidentified
MAEKNATLAEGHEAYLGLDVGKQSHWAYAVDAAGAVLLSRRVANAEADVDAVIAECPDDTLVVVDQRRNIGALAIRRARAAGRPVAYLPGSAEHALAKGFPGIAKTDERDAQVIARAALGLPQALRPVPADDPALEGARIMSAQLAQVKKDRTACANALRSRLLESCPAFERACDATAPWCAGMLSELGGPWNMLDAGRERFCASSRRHGAAREQRDRLWDAISGERPSEQAVAAEMRYVRHFAGRIAADNEEEAALGEAIAESLSGNADFANLQTVPGIGPRTAAQLVVSVDISEFDSHDKLASYCGLAPSTRQSGTSIGHDRAHRGGNKALKSLLVFSCNSLVRSKGYYGEYLRARLDRGVGYRRALRAVARKRMKVIYAVMRDGVPYSA

SEQ ID NO: 473102 - protein, 311 aa, unidentified
MKQSVVYIGIDVAKAHLDMAWGGASRRFANDQKGRAALINWIKQSSDPSAVQLICEASGGYEQALLESLKQNNLKATLVQAMRVRQYARAAGILAKTDKIDAKVLAAFGSAMQPKPTQPPSAEQKRLRELEAQRRHLSRVLLGEENRLGQMSCAELRSLSRSLINKINKQIALLDARIECLIAQDRTLCAKAQKLTAISGVGARTAALLLAQMPELGRLNRRQAAALAGLAPFNHDSGSIRGKRAIFGGRPALRSGLYMAALSAARYNPILSNFYRRLRVKGKPHKLALTAVMRKLLLALNSTLKPIACAP

SEQ ID NO: 473103 - protein, 397 aa, unidentified
MIAVGIDISKAKSTVAVIDSDGTVLASPFTMAHTQPEMEAFVTYLKGLGEPTTILMEYTGHYHYPVLKRLQGEGFPVCIVNPYQMKKYGDVEIHKAKTDKKDALRIAAYALEKSYKLVPYSSMEQKYEDLKFLSRQYSQRITYVAKLKVQLIALLDQTMPGITRILPLNSRNPEKCALLLFIRRFKSFDEIHRIGKARFLASYDVLAKKTSERNASSKGLSIYELAVDSITTRGEDPYIWLSQNQCVDLLSTTQNAADEIISQMRNIAETIPEYKVLRAMRGVGDRLGPIILAEIGDIRRFHSGKALNSYAGNDAPPYQSGQFESRNRHISKRGSSALRKACYEVMQALKLTKPQDDPVYLFMLKKEQEGKPFNVAKMAGVNKFLRIYYARAMELYK

SEQ ID NO: 473104 - protein, 405 aa, unidentified
MDGPIITVDVSKGSCHYQPFLEKGKPLRKPKVLYDTIEGFEELQKSIDQTEEKSGSKVSVVFEATGVYHRCLQKYLDDHDIPYFIISPLLSATYRKTNLHANKTDALDCAHIAKAYYGDERLHVFEKQEDRFISLQRLNRMYEDELQHLRKRKVSFRSTLDIIYPRLDKCFNGKASLYDPVVMEILKKYPHPKLLLKHKEETITKAIERRTDHGFLFISKIVHKVYECAMKCYSGCDINDIEVKKLPDMIEELQDQMERCGSLLSELVNEASRIEYFNNVASIIGIGVNLASRIIAEIGDISRFRNHRTLSAYAGLNPFIKQSGDEDGLHLKISKKGNRHLRCLLYLGATCNYRLKKGDPLYEFNQKKRQQSQSPLKSKAANIAAAHKLLVIIYVLCKNGEQYRF

SEQ ID NO: 473105 - protein, 336 aa, unidentified
MNYCGIDLASKASAVCMLNEEGVILREQMVATEEGDLRIALDGVGRLRCVVEAAPLAEWVAQMLEELGHEVIVIDPRRAKAVIQTKNKTDKLDARNLAKLAQTGWYTAVHRKSPAARLQRTHLQARQGLVTTAKAQASRIRGLLRAHGIKVGKVSAGQFVTRVHTLIAQHAPALGPILAPLVTIYQHAQEAAKVLEQTVHRHAQQDPVCKRLMQVPGVGPLVASTYVATLDDPTRFPKSTQVAAYLGLVPRVYQSGETNYHGRISKEGDKLLRWLLVEAANVLLTRTKRSCALKRWGQKLAKKRGQGKANVAVARKLAILLHRLWLTEADFTPAAS

SEQ ID NO: 473106 - protein, 463 aa, unidentified
MGHEPASEHDPDAFRNNQLSPPLWDEHARGPRLLLSGVHCLPAEEEITVQILYPRCCGLDVHKSSITGCCLWFDAEGQRREEIRKFGTHTAELRRAAEWLRQHEVKNVVMEATGSYWRPVWNVLEVEGFELTLANPQHMKAVPGRKTDTKDAHWSADLFQHGLIAPSFVPNQQMRHLRDLTRMRTKVTQDRTRVVNRIEAVLEDANIKLSSVVTDIMGVSAQAMVQSLLRGERDTAQLAELAQGRMRAKRSQLQTALEGNLQPHHVFVLRRLLMQSRFLQQQRQAITRQIEHRLDKEMRQAIALWDSIPGVDEDIATIMVAEMGICTEQFPDGPHAASWTAICPGNHESAGKRKSGKTRQGNRWLRGALTQAAWAASHTKGTYCSALFRRIAARRGAKRAIVAVAHSILISAYYMWKNKQLYQELGDTFLDKLKPEKTANRLLKRLAKLGYIVAVTELPNPVA

SEQ ID NO: 473107 - protein, 405 aa, unidentified
MNAVGIDVSKGKSTVTIRKPGDVILMSPCDIPHTQSAINDLIKQIKSLEGKTKVCMEHTGRYYEPVATWLSDAGIFVSAVNPILIRDFGDDSLRTPKTDKADSKKIARYTLDRWAKLKQYGIMDKTRNQLKTMNRQFGFYMAQKTAMKNNLIALIDQTYPGANDFFDSPARNDGSQKWVDFIHTYWHVDCVRSKSLNAFTEHYQNWCKRKNYNFSAEKAAKIYQISSDLIAVFPKNDITKMLIWQAVALLNTASKTVESLRSKMNELASTLPEYPVVMDMNGVGATLGPQLIAEIGDVSRFTHREALTAFAGVDPGKNDSGKHIQNSVRTSKKGSPYLRKTLFQIMDSLIKRSPVDDPVYAFMDKKRSEGKPYYVYMTAGANKFLRIYYGRVREYLSNLSNNETI

SEQ ID NO: 473108 - protein, 340 aa, unidentified
MTAHVCGIDIGKTVFHLVGLSKEGQIVAKRRFTRKQLIIHTVNMPACLIGMEACPGAHYLARVLTAQGHEVKLMPAEYVRPFVKSNKNDYIDAEAVAEAVQRPTMRFVPIKSEAQLDLQALHRVRDRWMGRRTAVINQIRGFLLEHGITVAVGPAHLKRQIPSILEDADNLLSPRMRALLAELRDEWEKLETQIEEIDREFSQAVKREENCRRLLTIPGIGPLTATALTAAIGNAMAFRKSRDLAAWLGLVPRQHSTGGKSRLLGISKRGNPYLRRLFIHGGRAVVARAKRENHTFGNWLNQLEARAPRNAVVVAMANKLARIAWAVLTRGQVYRATVCP

SEQ ID NO: 473109 - protein, 339 aa, unidentified
MNILFLGIDLAKNVFQLCGLNQAGKPVYTKRTGRKELLQTLANIPACLIGIEASTGAFYYWQREFEKLGHKVKVISPQYVKPFVRGQKNDGNDVQAIAVALMQPTMQFVPPKSPEQQDIQALHRARQRIVNHRTATVCQIRGLLLDRGIPIGSAVSRARRAIPLILEDAENGLSSRMRRTIAELYDLFNDLGRRIHFFDKEIETVFRQSEACQRIAKVKGIGPETATAVVAAIGKGTEFKNGRHFAAWLGLVPRQHSSGDRQVLMNMTKKGDKHLRTLFIYGARAVVRVATNNNDGHMNQWVNQLKERRGFNKTTVAVANKNARIIWSMLRNDTGYQVV

SEQ ID NO: 473110 - protein, 410 aa, unidentified
MQVVHERCCGLDVHKKVVAACVLTPAAEGRSHKELRVFGTMTDDLERLADWLAERGVRHVAMESTGSYWKPIWNVLEERFALVLANAAHVKAVPGRKTDVKDAEWLAELLRHGLLKGSFVPDRAQRELRELTRDRTSVVEERTAAVNRLQKVLEGANVKLASVASNVAGLSARRMLDELVAGSTDAAALAELAVGRLREKIPALERALSGRVGAHQRFLLAQQLAHIDFLDEQITRLDAEVAERTRPFEAQIARLDTIPGVSTRIAEILVAEIGTALDRFPTPGHLASWAGMCPGNHESAGKRHSGKTRKGNPALRRALVQAAHAAGRTKNTYLGAQYRRLAARRGAKRAAVAVGHSITTIAHYLMTRGTVYQDLGPLYFDLHDRDAVRRRLVGRLEKLGYKVTTETAAA

SEQ ID NO: 473111 - protein, 363 aa, unidentified
MIYRTSVGLDVHARSIAAAALDHLTGEVARRSFAYDPAAVAAWVLSLEGPARCVYESGPTGFDLQRSLSAAGVECCVGAVSKMLRPSGDRVKTDKRDAVFLARMLAVGNVIEVAVPTPEMEAARDLARAREDCREDLMRARHLLSKLLLRKGIVYDGGGAWTKRHREWLSRVDLADPCERLVLEEYLEGVRSLELRRSRLDAAIAERAKAPDLAPVVSALCCLRGISTVTAFSIAAEIGDFTRFPTARSFMSYLGLVPSESSSGETVSRGRITRAGNGHVRTLLVESAWHHARRRSPMSAASLADARGVPAPVAEAAERANGRLHERSVRLRSRGKPANLANAAVARELAGFVWALAAMAQAE

SEQ ID NO: 473112 - protein, 359 aa, unidentified
MEQKIKPVRHVVGGVDTHKDLHVAAVVDDYDRVLETRSFPTTRNGYRLMLVWMRAFGELQRIGVECTGSYGAGLLRYMQTAGVEVLEVTTPDRHDRRRRGKNDDLDAQAAAHAAFAERRTVTPRSRDGMVESLRVLRACRKTAVNARRIALQLIQNTIIAAPDALRDQLRRMTRMQLVRLLAAWRPDLTAYRDVEAAYRITLKSLGRRYLELHDEIADLDMMIAAIVEDLAPELIERNSIGHNSAAQLLLTAGDNPERLKSEASFAALCGVSPVPASSGKTTRHRLNRGGDRLANSALHIIAIGRLRTDDNTKQYVARRVAAGHSKLDAIRALKRYIAREVFGIIMRRQKQINQTRIVA

SEQ ID NO: 473113 - protein, 430 aa, unidentified
MGCIVPTAMYRERDDQCMPYEWFVGIDWGSQRHQVCVLDRDRRLVGERTVDHDGASLAQLVAWLWTLAAGQPERVSVAIEVPRGAIVEGLVERGFHVFAINPKQLDRFRDRHSVAGAKDDRRDAFVLADSLRTDQPSFRRLRLDAPQLLLLRELSRAEEMLLEEFRRSANRLRDQLHRFYPQMLQLCSAADEPWLWDLLDLAPTPAKAALLSEEQVRRVLKTYRIRRVKAQEVLTCLQAPALPVAPGATEAAQTHCQFLLPCLRVLAEQLQACSQQVSALLHTLAEEPGDGEGPSDVAIVQSLPGVGRKITAWLFAEAAQPLAQRDFQVLRTHSGVAPVTRQSGKRRQVVMRRGCNPRLRHALYHMARVAMQRDAHFSQVYAALRAKGHRHGQALRTIGDRLLRILMAMLRERICYDASRIHREPVVQMG

SEQ ID NO: 473114 - protein, 344 aa, unidentified
MAVYSTGEIRSFGNDDASIAKATTWLKQVNPAIIVMEATGGMEISLYVALQEANLPLAVINPRQIRDFAKSMGILAKTDKVDAKVLARYAATIQPEARPLPDEEARQLNTLVRRRCQLVEMIIAESNRATITRDKAMKQRINAHIDWLKQELAGIDKDISQMMKENPVWHAKDKLLQSVPGVGPVLSATFIAELSELGILNRKKIAALVGVAPFNRDSGKHRGERSIWGGRCRVRQPLYMAALSAVRFNPTIRIFYERLLANGKEKKVALTACMHKLLIMLNVMLKHNSYWSCNYAIFNNTCIPDAKTVARWERARVRVKFPPPSTSRRGWEYSRGLRSLFRVK

SEQ ID NO: 473115 - protein, 387 aa, unidentified
MKKMNSNVACAGMDVHYKFSNVTFRDACGKVVSRQRLDHPDRKQLADRLSRWPTGIPVVMEASFGWGWLSDLVEQAGQDVHLSNCYKVEQMRKARGWVKTNKKDADLVSLLVFEQSDWWKVWRAPPDVRNRREQMRFRGDLVGSQTRVKSRIHAIFHRHGIFHEFSDLFGGKGRKFLVELCLYNPANLPAEALLALRGQLKLLDHLRRQLADVALILHKQLLKTPLTTRLKTIPGFGLILAHVLAAEIGKIERFKNQKSLASYSLLAPRADDTGEDDPSHSPKGRHLGLRGNRTLKWAFIEAAHGAVRSGGKWRAIFDRVTNGGKKNRNRGYIKVARELVKVVYAVWAKGVDYQVIPPVRPGRKSNKKKSRSETGQLLHPMVHALPA

SEQ ID NO: 473116 - protein, 421 aa, unidentified
MRGLRAKREKMVKEGTLIATVDIGVASNTGYCTTLDGRSTKSFRFDNTKEGFEKFWCMTIASKNRFGCEEVVVGYESTGPYAEPLVHYLARKQVKVVQVNPMHTKRMKEVNDNSPLKTDDKDPRVIADIIRLGRALTIVVPEGDAAYLRRLNNARERHVGEQTAFLNQLQQLVFLIFPEFKTVLKNMKGKTAQYILKRYTTPERIGNLSKEVLGEEMRKRSMGKFGIKDAESLIGLAQETVGIKEGVAGISLDIKHILMQLEAEGRFISEIEAEMGVTLERIPCSVRLLSIKGLGIVSVAGLIGEVGDFSKFSTQSEIMKLAGLDLYEISSGKRKGQRRISKRGRSLLRKILFYAAIQMIRRNGIMYDYYARLTGRGMERMRALIAVSRKLLRIVHAIVRDDRDYVGQYQALERRVMKKAA

SEQ ID NO: 473117 - protein, 430 aa, unidentified
MGFIVPTDMHPEPADQPMPYECFVGIDWGSQQHQVCVLDGDRRRVGERTVDHDGASLARLADWLWTLSAGQPQRVAVAIEVPRGAIVEGLLERGFHVFAIHPKQLDRFRDRHSVAGAKDDRRDAFVLADSVRTDQPSFRRLHLDAPQLLRLRELSRAEETLLEDFRRSANRFRDQLHRLYPQMLQLCSAADEPWLWDLIHLAPTPAHAMLLSEEQVQRVLTAHRIRRIKAPAVLACLQAPALPVAPGTAEAAQAHCAFLLPCLRVLAEQLQACSQQVSALLRTLAEEPGEGEGPSDVAIVLSLPGVGRKMTAWLFAEAAQPLAERDYQMLRTHSGVAPVTKQSGKRRVVVMRRGCNPRLRHALYHSARVAMQRYAHFNRVYTTLRAKGQRHGQALRNIGDRLLRILVAMLRHRTCYDASRIRREPVVQMG

SEQ ID NO: 473118 - protein, 338 aa, unidentified
MASLTLFVGLDYHQSSVQVCAMDASGKVLVNRRCPNCRQTIVAVVRRFGERIHAAIEACSGAAELADELVRHEGWSVDLAHPGYVARLKRSPDKTDFGDAQLLADLERVGYLPRVWLAPEPLRELRRLVRYRQQLAQQRRNVKLRIRALLRDLRLVVPAGRSPWTRSWFAWLQTTDVFAEQTRWIMDRHLAELKRLNSEVRDVEARLAIVIKDDAMVQTLMQTPGIGLITAVTLRAEIGRFDRFRSGKQLARFCGLSPRNASSGQRQADAGLIKAGNPQLRAVLMEAAHRLMRYEDRWIRLGHSLKSHGKANSVVVVAVANRWIRWLYHQMPSLDLAA

SEQ ID NO: 473119 - protein, 338 aa, unidentified
MQWTVAIGVDTHKGLHVAVAFDVLGVELGSREIATTEAGYRDLLGWARGLGVPAFAVEGCGSYGAGLTRFLQLAGVAVWECERPRRRDRRRGKSDLIDAAIAGRRLLAGEGFSVPRGGGRREELRLLLLERRSAVRARTAALNQLSALVVTVPAQVRARLEPLSGERLARAAARQRSGPEVTAAVLRRLGRRVEHLSEEIGELERALTALVVELAPALLGEPGVGPVCAAQLLVSSGDPKRMASEASFAALAGTSPVEASSGKQQRHRLNRGGDRQLNWALHVIALARIRHHVETAAYYQRLLATGKTRREARRCVKRALTRHFYRQLRELSTLPLTT

SEQ ID NO: 473120 - protein, 318 aa, unidentified
MSEELFVGIDISKHKLDIALGDDKQSPVESIDYTSEQVNRLVERLQAMQPKLIVFEATGGLERPLMEALHAAGLPVVRVQPRRVRAFAYAEGQLAKTDRLDARLLAHFGRKVTPPAHPPMEERRQALRDLLTRRSQLLQIRTAESNRLGTASRHVREGIERHLEWLNKEIASVEKEIQELMDGSDELRQQQELLQSVPGIGKITAFMLAASLENIQDKSAKQVAAFVGVAPHPNQSGPKDKKRRIYGGRADIRHVLYMATLAATRFNPVIRDFFQRLQKAGKPFKVALVAAMRKLLGILCAILKQKRPWNPALHASHP

SEQ ID NO: 473121 - protein, 274 aa, unidentified
MKITTIGIDLAKTVFQVHGVNARGKVMVRKALKRAQMAAFFANTPPCLIGMEACGSAHYWARKLQALGHTVKLMAPQFVKPYVKTNKNDAADAEAICEGVTRPSMRFVPIKSVEQQSVLALHTVRQGFVKARTAQANQIRGLLAEFGIIIPQGISHIATSLPEILEDGENGLPGTFRQLIERLGAHLKELDRQVQELDVQIQLWHRDNAASRRLAQIPGIGPITASALLGLIGEPKHFASGRQFAAWLGLVPRQHSSGGKQTLLGISKDRKSVV

SEQ ID NO: 473122 - protein, 326 aa, unidentified
MEHELHYIGIDTAKEKLDVDVLRPDGRHRTKKFANTTKGHDELVSWLKGHKIDHAHICIEATGTYMEPVAECLYDAGYIVSVINPALGKAFAQSEGLRNKTDTVDARMLAEFCRQKRPAAWEAPHPLERALRALVVRHQALTDMHTQELNRTETAREVQRPSIDAHLLWLEAELKRLEKQIKDLTDDDPDMKHRRKLLESIPGIGEKTSAVLLAYIGLKDRFAHARQFAAFAGLTPRRYESGSSVRGASRMSKAGHVSLRRALYMPAMVATSKTEWGWAFRDRLAANGKKGKVILGAMMRKLAQVAYGVLKSGVPFDASRHNPVAA

SEQ ID NO: 473123 - protein, 341 aa, unidentified
MYSIGLDVSKASLSVHVPLNSLDFEIKNTLKDLKSLYAKLKKLYKKDIDKLVFVYEPTGSYSALLTKFCALKHIKSFIINPKQSSNFAKALGYRSKSDKIDAHMLSQAISIAKEREIKVPVINATAEDIKELMSYYMFTVKQRVAVNNHHEALNSKDGNTYALKDLKKRIKELKLKEAEILEKIKDIIQEDDEIAQGYSNIITIPGIGKVAGIVLTHLFIRYPDANKKQIVSLTGLDPVIKDSGTSVKSKPRISKSGSRLYRAVMFMATMVSINYNSEMKEFYDRLKENGKHSTVAQIAVMRKLIVIAHALYKNNTQYDKELYNKACGRIETIEAEKELVA

SEQ ID NO: 473124 - protein, 402 aa, unidentified
MTYDYVIGMDVGKYFHHACVLDIDGTQVLSKRINQNEKSLRTLFSTFSAHDHKILVVVDQPNNIGRLTVAVAQDIGIDVRYLPGLAMRQLSRIHAGNAKTDIRDAYIIAHAAKNLPESLRSVDRVEEAFLQLKVLNGIDEDLARSYTRLINQIRSALVGCYPQFEQALRGQIIHRKWVLHLLARYGGPTKIKRLGKAKAAAFARRYKARNPEPVLDAIFAAISEQTVTIAGAHYAEMGIAMSAKDALLKLEHRKQIEQEVIELINDIPHTQILLSMPGIGPKTAAQILMTAGDMSDFPSAGHLASYAGLSPRTNQSGTSIMSNSLNRAGNKKLKNALWQSSFASIRFHERSRQFYERKRRDGKRHNAAVVALARRRLNVLYAMMRNHECYRDPALQQEGIAA

SEQ ID NO: 473125 - protein, 497 aa, unidentified
MSTAAQQEQGKKGSAAPRSASERKARGSHCPQGKGHRRRSKRSKLAQSKLTITNPDAAGIDVGARVHYAAVPEGRAEVSVRSFGAYSAQLDELAQWLTDCGITTVAMESTGVYWVALYQKLEEAGFEVLLVDAHQAKHVPGRKSDVQDCQWLQQLHTYGLLRAAFRPEDSICRLRTLQRHRKNLTEAAGMWIQHIQKALNEMNLCLHHVLSDISGYSGMAILDAILAGERDPRKLASLADHRVKKSRAQIEAALTGDYRPELLFVLRQALESYRQTQQQIAQCDLRVEKQLAQIADCSNQSQASEPTPPSPESAGGKPRKTKPKDALELNLAGHLKRILGVDLTTIPGLNVLAILTLISEIGTNMTKWRNEKAFVSWMGLNPNNKISGQRVLSSRTRKVVNRAATTLRLAAMVLGHTNTPLGSFYRRKRAQLGAPKAITATARKLGCLIYRLIKNGQGYQETDVHVYELKYKDQILNSLRKRANSFGFDLVEVPKAA

SEQ ID NO: 473126 - protein, 361 aa, unidentified
MADTTLLVTGGVDTHKDFHVCVALDELGRVLGTEQFPTTLRGYRSLLRWLGGFGQLGAVGVEGTGSWGAGLARFLTDAGVEVIEVNRPNRQARRKRGKSDPADAEAAARAVLAGEAVGTPKAATGTVESIRLLRVARRSAMKARTQAANQVHSVIDTAPEELRAKLIGLKERERITKAARMRSNDTSTPLGAAKLALASLARRWLSLTEEITQLDTHLAVLVESAAPSLLDIKGVGVATAATLLAATGDNPTRLRSDRSFAALCGSSPVDASSGRQLRHRLNRGGDRQANCALYLIVLNRLSWDQRSKDYVARRTAEGKTKKEIIRCLKRYVAREVYQAIMRDMADQVAPITTLKAFQRAA

SEQ ID NO: 473127 - protein, 388 aa, unidentified
MLLDHPSDGPTAIRTQFGAIFVSLELSRSTWLVTSLSPGTGEKMSRHSVTAGDTTKLMKLFAELKRKAAARTGQTYPMITIQEAGLDGFWLHRVLQQEGIESHVVDPASIATPRRRRRAKTDRLDGETLLRSLLAHKRGEPRVCAMVVAPSPEEEDRRRLCRERRTLIAERIVHVNRIKGLLFAQGIFDYVPMRRNRRAELDVLRTGDGRVLPAHLKVQISRELDRLELLLEQIAAVEREQDALLAASRPAGGTDGSDPVAMLLELKSMGPNFAAVLWTEAFWRQFANRRQVASYAGLAATPWRSGGIEREQGVSKAGNPRLRTTMIQLAWLWIRHQPQSALTQWFNANSPRGRKRTIVALARKLLVALWRYVTAGVVIEGAVMKSAA

SEQ ID NO: 473128 - protein, 366 aa, unidentified
MEKYKFVGLDVHKATIAVAVAEANGGEVRYVGEIANTPEAVVKLVRQLKKDGAIPSFCYEAGPCGYVLYRQLKGLGLECLVVAPSLIPTKAGDRVKTDRRDSLNLARLYRAGELTAVWVPDGAQEALRDLTRAREDMKHAEKQIKQRLLAFLLRHGKSYGGETNWTKMHFRWFETVKFEHPVQQIVFQEYVDTVKAMVKRVEGFDGQIRTSAAESVFWPVIQALMALRGISLLAATIIVAEIGDLRRFASAPQLMAYLGVVPSEYSSGATKTRGAITKTGNGHVRRILVEAAWTYRHPARKTAHLQQRAKHAPDPIQELAWDAQKRLCGRYQLLQTKGKLKQKVCTAIARELTGFIWAIGQALPQQ

SEQ ID NO: 473129 - protein, 318 aa, unidentified
MKSAEVFVGIDISKDWLDVAVSPSSKEYRVAYKRKQLTKFVDEMVRLQPSRKILEATGGYEVEIAEALSNAELPVCVINPRQSRDFARATGELAKTDRVDARVLAEFGRALRPTVRPLASAHARQLREIMDRRGQILETLLAERNRLQRTESKTVKASLRSHIRYLERQLKKIEDALSDQINASPAWQEDVDLLTSVPGVGQLTAANLTILLPEIGTIGRRQIAKLVGVAPLSRDSGLRQGSRSIWGGRAQVRRALYMSTLVATRYNPVIAALYNRLVERGKPKKVAIVACMRKLLIISNAMIRDRTKWTPELAAALS

SEQ ID NO: 473130 - protein, 453 aa, unidentified
MEQEEKISMEIVNPHAAGIDIGSRSHWVGIGQHEKDVREFGVFNQDLFEMADWLHQNKIRTIAMESTGTYWQNLYAVLISKGFHVILCNGKFTKNIKGKKTDIKDCQWIQKLHSLGLLSSSFLPDGKTEQLRTYCRHRANLLHNAASTSKKMQKYLRLLNLRLDVVVNDICGLTGLLIIRAICEGEKDPQKLASLRHGNCRKSEDEIARALQSNGRKDYLFALQQELDTYDHLQKKITECDVMIEQMLNEIIDNDDNKKQHYIDPKTHKRINKNTPKDIDLNLKSYQMSEGTDLLAIEGMGYSTVLALMSEVGIEGIKKFPSAKHFCSWLRLAPNNKVSGGKVLSSKIPKGSNRLKIALRNAANAIGNLKDSTPLRDFFQRINFRKGRVSAVSATARKLAVIIWNMVIKGSAYLNPENYLFLDQKRKLGLVKRIQKQIDKFALTNDDLKFASD

SEQ ID NO: 473131 - protein, 411 aa, unidentified
MALLYPRCAAIDVHKRTAVAAVAWVDASGRHQRQVRTFATATGDLERLRDWLAERGVTHVAMESTGVYWKPIFNVLEEGFAVVLANAAHVKAVPGRKTDVRDSEWLLELMQHGLIRASFIPPAPIRELRELTRHRANLVEERAGAANRVQKVLEDANIKLASVVSDVLGVSGRLMLQAIIAGETDPGALAGLAKGRLCTKRAALVEALTGRVRAHHRLLLRELLGHLEYLDGTIGRLSAEIAARLHPFAADLALLCSIAGIKGRVAEVLLAEIGADMGAWPDARHLCSWAALCPGNNQSGGKQHSGRTRHGNRWLKGVLLQAALAATRVKDGYLGAQFRRIAKRRGAQRAAIAVAHSLLTIVYHVLKSGTPYREAGAAYFDRFDAGKQAQYHLRRLAELGYAVPAEAISAA

SEQ ID NO: 473132 - protein, 380 aa, unidentified
MASMHDSTRSKTTVYAAIELSKKSWVVAIARPDRDRPSIHRIAGGNLADLIGRLRKAAGEKQRIVVCYEAGYDGFWLARSLAKIGIDCRVLDPASIQVNRRARRVKTDRIDSLALLRALIAIDRGERHVCAVVRVPTVEEEDARRSHRERQRLVRERTGHINRIKGLLFAQGIRGIEPKRRRTRIDFGKLTTAEGMPLAERLRRELEREYQRLELIETQIRIVEKERDTADAQDPAVEQKRELLCALQGVGGASAAILAREVFARQFASRRQLGSYLGLTPSAYDSGSTTRCQGISKAGNSWARRVLIEVAWLWRKYQPGSPLSHWYAQKTADQSPRIRRIMLIALARKLAISLWRYVETGLVPDGAVMAKTTPHMAAAA

SEQ ID NO: 473133 - protein, 352 aa, unidentified
MIIIGVDFHPEFQQMASVDTDTGEFQEKRLTHREEAEKFYRALIGKEVRVGMEASGHARWFERLLSELRFELNIGDAAEIRTKRVRKQKTDRQDARLILQLLIEDRFPQIWVPSWENRDLRQLLWHRHRMVQARTRIMNQLQAVALNEGLRCKKRLWRDAGREQLESFALAPWASRRRRDLLELLDRLTPTIAELTQAIEGEVEKCPEARRLQTHPGVGALTALAFVLIIGRAERFQCGKQIASYLGLVPLEESSGNRRRLGHITKQGNSLLRFLLVEAAQVTVRSDQEWRNKYFHLALRRGRKIAKVAMARRLAVRMYWMWRKGWNYEQLKKFGSHAGEPGNRDGVMSNTE

SEQ ID NO: 473134 - protein, 337 aa, unidentified
MDRQYVGIDLHRRRSLIVRTDGAGEVLEEVRIDNDPVRLALEIAKAGPAPEVALEATYGWYWAADLLAECGARVHLAHPLAIKAFENRRVKNDRLDARLLAELLRMDRLPEAWIAPAQVREQRELVRYRHKLVDLRSGLKSQVHSVLAKEGVHVPMTDLFGLAGNVLLDGLELTDGYLIRVESLRDLIIRLDTEVAMLDRRIHERLRNDPSYRAVQRIPGVGPVIGAVFVAEIGDVTRFANAGQLASWAGLTPRHRESDVKVLRGRITKQGSRLVRWAAIEAVRSGSRSQHWLKADYRRLTERRGKNIAAVAIARKIVTLAFYALRDGEVRCLQRAA

SEQ ID NO: 473135 - protein, 370 aa, unidentified
MSVRRILAKTIDTDLEYEAIGIDLAKNCVSAALLTTDGEVVCIDRLDYSELEKSAQALSSTTFAMEPCTEMNYLVQKLEAWGHRCLVIGGKNGQNYVENHYSGQKTDLNDAQALAFLAQDKQLRTIKAKDVEQQKYASLTTLREQYIKQYRQTIVSLKGICQAWGLNISKGISGKARLKDLIENHAAFPEELKESLVDMVTHAQTAQKALNKITKTLEELAKSDKVCQLIQTIPGLGSICSCRLRATVGDIKRFKSPKDFPAYYGLVPRSIATGHNERKGKITHRGDRTMRSLMVQAAGSLVNMATKGKLKSKQLTKWILKKQKEKMPWGKLVCAVAAKLLRIVRAVLISNKPYNSKIAGVAKCSLPKGS

SEQ ID NO: 473136 - protein, 388 aa, unidentified
MNTITTTASTKAILAIDLGKYKSVACVHDPATGEYAFTTFETTRAELRKLIGQERPGVMVIEACLLAGWVHDLCGELGVRCLVANTASEAWKFKHLKRKTDKDDALRLAQLYLLGQLPMVTLPPVGVRQWRSLIACRLTWVGRRVAVQNRIRALFVAQGLPAPRGAKAWSATGLAGIATQAKPLGECGNDELWRGLLDLALTEYRQVTELVAQAESRLDALGKQNAEVILLETAPGLGPRTAEVVAAYVNDAARFKTSKQVSAYSGMVPRQHQSGEMDRRGRITKRGPALLRKMLVECAWCMVRYNAWARGIYQRLTGGGQRRKKQAVVALARKILVRCWAMLRDKKPWRDPQTGPKQPLPPSKQRRQAEAQQRRQEKMQAALTPTGV

SEQ ID NO: 473137 - protein, 416 aa, unidentified
MDTMYERCCGLDIHKKTIEACFRSGKKKAHMSFGTTSAELRKLTMWLVENGCQSVAMESTGSYWKPIFNILELSGTDMEIIVVNARHMKNVPGRKTDVHDAEWIAELLQYGLLRPSFIPDREQRELRELSRYRKSLVGERAREINRLQKMLEGGNIKLTSVVSEVTGYSSRRLLDRLLRSDEPMTEEVISELVHTSLVGKSKELEIALDGLLSELQKGLLIKVLDHIDDMNKRIADLDDFCRKQMKKYEDALDKLDEIPGIARRTAETILIETGLDMSRFPTAKHFARWAGLAPGNNESAGKRSSGRTTKGNPTLKSTLIQSAKVAARKKDSFFKARYQKIAARRGANRASVAVAHSMLIAIYHILKSGERFKDLGEDYYNQFNREKKKNYYLKKLTKLGVNLKEATLLISIQAAT

SEQ ID NO: 473138 - protein, 341 aa, unidentified
MDKELYFGVDVSKKTLDLAYYDGETIDWKNAHIKVSNDDAGFKKIGSWVAKVGKDFDTFLFCMEYTGLYNQNFRLWLESKEYIYGMVEPRKMHRFEPDLDDDQRSLDRIKTDELDAFRIAIYCEQNHKKILRNPSKLPSPVYFKLKRLLAERKQNTKQSTLYKQQLHDICAYDTDLSVERKKLLLKNMKENQKAIDKEIDSYMNEDASISKNYDLLTSIPGIGRIIALETIVLTENFTAISNPRKYACYIGIAPFKKESGTSVRKRTSVSKKGFSEAKADLSIAVLSAIKNNPSIRDYWIRKRKEKCGGIVLNAVKFKLVLRMFAVIKRGTPYVETDAYKN

SEQ ID NO: 473139 - protein, 340 aa, unidentified
MNTMTLLGIDIGKHSFHLHGQDSKGHQVLRKKTNRGQLLSTLAQLPACTVVMESCGGAHWLARQIGALGHEVKLIAPQYVKPFVKGNKNDFIDAEAICEAASRPAMRFCSIKTAEQQTLSALHRVRESLIGHRTVATNQIHGFLLEFGISLPIGVTALHRVPALLDDPQHPVPVRLKGVVMRLHRQIQQLNDEIKDIESDLKQQLKEDDAGSRLQSIPGIGPITASAVLADVGDASNYRSGRDFAASLGLVPKQYSTGGKTVLQGISKRGDKHIRQLLVQGARALMQHIDKREDALGPWVRELLTRRHANVVACALANKLARIVWAVLAKGGQYRPHPNV

SEQ ID NO: 473140 - protein, 338 aa, unidentified
MKHTVIGMDIAKHIFQLHCVDPSTGEIKRFKLKREQVLDFFAKQSPVLVAMEGCGGAHYWGRELSKLGHTVRLLPAKLVRPFVLRNKTDAGDARAIWVAAQQSDIKSITIKTEHQQSILALHRIRSQLIKMRIMQTNALRGLLMEFGETLPEGYLALRKALPVSLAALETKLPGMLLQTLREQWTRSQGLDQDIGAIELRLKHALAQSSACKAIAEIPGIGLLTATAAVATMGDPASFKNGREFAAWLGLVPRQTGTGGRIQQLGISKRGDAYLRTLLMHGARSLVNRNKQSVWITGLLARRPYSVAVAAVANKLARILWSVLATGRPYEPATLSAAV

SEQ ID NO: 473141 - protein, 431 aa, unidentified
MSPSDIPSSSVDASSFAYVVGIDIGSQSCDFCVLKPDKSQVIKSTEFANTRPGFELLQSKLAQLGVPAERVLIGLEATSRYGENLYQFLDSHGYQMCPLHPRQTHQFAQQRGLRAKTDRIDATTIARVLLSGEARRGYVPTELIATYRELVRVHSQLSDEVARYKNEIQALLSVLFPEFPQVFADPCRATAIALLKLYPSAQAMAAAGVETIAAKLHELAPRNYGRQTAEQLVQLAQQSSSSRLATTARSTTLKIFCDQLEHTQANLAQLEKELDHLLDADEAVKGLKSAPEFGRKTVSVLRAELGDVTRFQRVDQVVAYAGLDLEVKQSGKWKGQTKLSKRGSGRLRRVLYLAAVRSIRLKGSAFGAYYHRLIERGMKACDALMAVMRKMLIVAYHLLRTQETYDPTKVCAVLAPALHTPSSENLIGVGT

SEQ ID NO: 473142 - protein, 461 aa, unidentified
MKYSSKKQKLPEGKSSSSSLPVLFPDTAGIDIGSKSHFVAVPHERDCNPVREFSTFTADLHKMVKWLKECNIKTIIMESTGVYWIPAFELLESNGFCVKLVNARHIKNVSAHKTDVLDCQWLQQLGTFGLIKGAFRPADAILPLRAYLRQRDMLIKNASTHVLHMQKALTQMNLHLHNVISDITGVTGMAIIRSIVSGVTDPKILATLRDERCRNPEEVIEASLVGNYRTEHLFSLKQALELYDYYIEKIAECDRQMEKQAKKMETHGDQQKLELFKKDSLPKKTRKLKKHEYSFDVSSELIRMTGVDLTKIPSIGASTALTIISEIGFDMSCWRNAKAFASWLGLCPGNKVSGGKKLSGKTKPCANRVAIALRMSANTLYRSECAFGAFLRRMKARLGSPKAITALAHKLAKLIYIMLKYGHEYVEKGVEFYEEMYKKRREGSLRKKAKEMGYDLVPKVA

SEQ ID NO: 473143 - protein, 406 aa, unidentified
MKLIGIDIGKNKHFFCVMDQQTGEIISQPISFSNDKEGFDFLVQKIKSYPKDSILIGMEDTGHYHFALLKYLLDLQYTVALINPKTTDFNRKMQGGITKNDKLDTINICDVLDTPERKKQYRITKVNSFDLYEQKQLTRHHHNLKEEENVYKNRLQKCIDIVFPEFNKLFNSKYGIVYMNILKMFGSAENIANTDIRTIRKCFEIEGRGNRISLTPERLKECARSSIGISSSAEVIQIKHLTAQIELIEEQLTEIDKKIEEFSIQNNSPILSIPGISHFSGTSILAELGDISNYSKPSQIIKFAGVAPLHYESSQFNAQHTAITKKGSKYLRKTLYQIILPVIRHNPVFNKYYQLKISQGKGHRCAQGHCVRKLLRIIYHLLKTNQQFDPQLLRSVSYTHLRAHET

SEQ ID NO: 473144 - protein, 365 aa, unidentified
MPSMPQPAQPDHNTSATEEVILGVDTHKDIHVAAVITAVGAVTASRSFPTTMAGYQQLLAWARSFGTLRRAGVECTGSYGAALTRHLLAAGITVIEVNQPDKATHRRRGKTDTIDAQAAARAVLSGRATATAKTGDGPVEMLRMFKLAKSSAIKSRTQTINQLKAILVAADPTLREALSGLSIPILIRHCAQLPTDAPSDATSAATWTLRLLACRIVELTGEIDDLNQQLARAVNRHTPKLLARPGVGPDCAAALLITAGDNPERLGSEASYAALCGASPVQVSSGKTVRLRLNRGGDRQANAALYHIALSRLRWDPQTRAYLARRIAQGKTRREALRCLKRYIAREIYQLITQPRPHSTAACHP

SEQ ID NO: 473145 - protein, 352 aa, unidentified
MERYIGGDVHQASVTFVVLSATSRKLREDVIETNGRALVGYLKQLAGSLHLCIEEGEWSNWLFEILSPHVAEFVVYRQQWRPGPKSDAIDARGLAEKLRKGEIKSPVYKTTAYRELREAARVYTKLTRDAARVKCRIKSVYRSRGLPYKGSEVFKDEKRQRHIKRLPAFLRGPVTLLGEELDQLSALKGLAEQQMIKASHQLKISRILETAPGMGPVRVAQMIPIVVTPHRFRTKRQFWSYCGFAIVTRSSSDWVRENKQWIKSKKVIQTRGLSFNHNRMLKMIFKGAATTVIAHSGSNPLRSGYDRQLDNGTKPNLAKLTVARKVAAIVLAMWKNEEKYDAERLVAAQATG

SEQ ID NO: 473146 - protein, 341 aa, unidentified
MEIDILGIDLAKRVFQLHGANRRGQALHRSKVMRAGLLEAVRTLHPRIIAMEACSSAHHWARRFQELGIEVRLISPQYVIPFVKTNKNDRNDAEAIAEAAGRPTMRFVTVKSVEQQDMQAVHRVRELLVAQRTALINQARGLLGERGVTIAQSPEAFKRAVPQILGQCAGEVTSVCQTMLMELVQQVQALEERIKHAESWIKSFMKRSALCKKIAAIGGVGPLTATAMVAAVGEAKEFKNGRHLSAWLGLVPRQYSSGGKSRLKGISKRGDTYLRTLLIHGARSVLRYAVGKTDPRSLWLQELINRRGYNRAAVALANKNARVIQALLSSQDSYHPSVVAG

SEQ ID NO: 473147 - protein, 320 aa, unidentified
MSATSVVVGIDVAKTHLDVTVPGAKLDAQRFANDAEGHSALAAALRPLGVSLVVMEATGGYEAALACALQATALPVAVINPRQARDFAKAMGRLAKTDRVDAGVLAELAAVLVRRDDLGRFLKPLADPQQQALAALVTRRRQLLTMLGSERQRLQLAIALVRPSIEALIEAIRAQLDEVEGQMLGHVQEHFAELDALLRSASGVGPTTSATLIAELPELGRLNRRQISALVGVAPMANDSGSSRGRRRVQGGRFEVRRVLYMAALTASRRNPVIQAFYQRLTDAGKLPKVALVACMRKLLTSLNAMVRANQPWDTSLHHA

SEQ ID NO: 473148 - protein, 426 aa, unidentified
MNNTQNKKISQITEDTLIVGVDIGSTTHYARAFNWRGIEVGKVYRCGNCRDQFELFAKWMQQLSDVNGMNKILVGIEPTGHYWFNLGQYMELCGIQICMVNPYHVKQSKELDDNNQTKNDSKDPKVIAKLVLEGRFSYPYMPCGVYADLRILNNERLRSAKKLIACKNRIERWLSIYFPEYKSVFKNIEAASSLLVLEKACLPADVLTMGENAINALWREAKLKAVGIKKATRLVDAAKNSIGQTCGSKAARMQLQLLLQEYKNQQEIDAQIMAEIEEILPEVPGSQELLKIKGIGIKSIAGFIAEVGEIGRFSSPKQIQKLAGLSLRENSSGKHKGETTISRRGRARLRGILFNAVIPLLASNTSFQTIHAHYTKRENNPLKRKQSVVAICCKLIRIFYAILKHGAVYDEQKMLQDIKWYGNEAA

SEQ ID NO: 473149 - protein, 416 aa, unidentified
MQKKDYVEFEQVVERGCGMDVHKETVVATIQGKGIKTITKSYSTYTSSLIKLKEWLKKHGITHIAMESTGIYWKPIFNVLGDDFEVLLVNARHVKNVPGHKTDKKDSRWLVKLLLSGLLKGSFIPERPFRELRDLTRYQKKLTYQVSAEKNRFLKILEDANIKLSMVLSDVFGASGTKMINHILSFNDYRPEDLMRYVHGKVKASREDIKEALTGYITAHHKFMMRTILGNIAKIESTISEIEEHINTVLVPYKLEKELLETIPGVGPDVSIGIIAEISTDMENFPDHKHLASWAGISPGSNESAGKNKSGRTTYGNKHLRGLLTEGGWAAARTKNTYLSSKYKTLVGRRGKKKAIIALGHKILIAAYFIIRDKVEFKELGEEYLNNFRRDKLIAYYKKQIERLDPNLNLDKEEAA

SEQ ID NO: 473150 - protein, 394 aa, unidentified
MILVGIDIGKNQHTFSIVDKNTGEILSNPSPFTNNQEGFLCLIKKLNRYSKSDLLIGMEDTGHYHFALLKYLLDIRYTVALINPTTTDLTRKLQGGITKNDPLDSLTICDVIGSNQRKKPYRITKVNRFDLYEQKQLTRHHHNLKEELNIYKNRLQKCIDIVFPEFNSLFQSKYGIVYMNVLKAFASAEKIATSDIRTIRKYFEYEGRGKRITLSAEQLKAAAKTSVGIPSVAEEIQIRHLVCQIEMIEEQLSEIDKKIEEFSLQNNSPILSIPGISHFSGTSILAELGDICNYTKASQIIKFAGVAPYHYESSQFTAQHTAITKKGSRYLRKTLYQIILPVINHNKVFTAYYNKKLIEGKGYRCAQGHCIRKLLRIIYHLLSTGQTFDPALLI

SEQ ID NO: 473151 - protein, 351 aa, unidentified
MKTQITAIPKLYIGIDIHKRSWKVHCSTDLFSGKSFSMPPSPGQLLKYVSKHFSGYEVSVAYEAGCCGYSAHRAFEFYGWRSLVVNPADIHRKGKERYTKTDKIDAQLISRELKDGRLTSIVVPDVHREQFRSLFRRRNDLVKDFRRIKSYIKMQLLYYGIKEPLEFDNDHWSHKYRKWLDNMVFQYPTAKATLDGRMRFFRFIDKELREISNQLRAYCRKHLKKDYNLLRSIPGIGGIVACGILCELGDLRRFNSVKHLAGYVGLAPGVHQSGSNYRTLGITPRAHRLIRSYFVEAAWQAIRADPVMQAYYRKHQGKNVKSIIIKVARKLLSRTLAIIKTETPYTIGVIK

SEQ ID NO: 473152 - protein, 412 aa, unidentified
MLHPKMRKLFVGVDIHKRTHVAVIINCFTEKLGELRFENNKKGFEKLIEFVKSHLKRGITPCFGLEDTSGNGRNFAIFLLNLGYTVKSVDASLTYTERRNQAIAHKTDGHDAFCVAKVLLNQLDTLPDASIHDDSWTLQLLVSRRNSIVKVRAASKNQVHSYISHHYPSYTKYFTVTYCKAGMEFFQNFPSPSKLKGITKEELAEFLSIHSSGFFGIEHAERILMLVAKDGDTSTEYQETRDFIVSHCIKEIKHCNEELEVIEAEIKKHMKQFPYKLETMPGINTITAAMLISEIGDIRRFSSSDKMCRYSGISPVACSSGDKDKNFRNKQGNRRLYEIFRDIASRNICRGRDKKSPINETFLEYYNKKISQGKTKRQALIAVMRQIAKVIYSMMINQREYIKPTISKTENA

SEQ ID NO: 473153 - protein, 356 aa, unidentified
MSYDVKYIGMDVHKEAVVIAVQNESGKLVMESVIETKASSILQFLHGIRGELHVTWEEGTWAAWLYDLLQPHVQHIVVCNPRRNALLKEGNKSDKVDAGKLADLLRTGMLRPVYHGENGLRTLRELGRSYQTISKDLTRVMNRLKALYRGWGIPCAGTQVYAVRAREEWLNKLPQAGLRRRAELLYLQLDGLQALRRDVRPEFLAESRKHKAAKLLRQIPCIGPIRAARLIGLMQTPHRFRSKRQLWTYSGLGIETHDSAQYRFVSGQLQRSKKPQQLRGLNRNHNHEMKEIFKSAATRASCGRGPFHDFYTGLLAKGMKPEMARLTLARKIAAITLTLWKKEERFDAKQLKTQAA

SEQ ID NO: 473154 - protein, 342 aa, unidentified
MKDMLIGVDLAKNVFQLHGASMTGDVKYRKKLSRGQFFRFMSEQPSALVVMEACGSAHYWARELVKLGHAVKLIAPQYVRPFVKRQKNDATDAEAIVIAARQPEMRFVEPKTADQQARAVLFRARERIVHQRTELVNALRAVLYEYGQVIPQGIGHIKRIEAIVENAEIGLPELVQEECRDLLAQIGEKTARIEEKAKKLAELSRQSETARRLQTMPGVGPLIALAVEAFAPAMQSFRCGRDFAAWLGLVPRQFSSGGKERLGRVSKAGQADIRRLLILGAMARVSWAGRKPPAQGSWLSRMLAKKPRMLVAIALANKMARKIWAMLTKQEDYRDPALAVAA

SEQ ID NO: 473155 - protein, 414 aa, unidentified
MELLHERCAALDIGKKDLKACVRTSSPKGRRVRRQEIRTFATTTNALLELRDWLLGERVSLVVLEATGDYWRGAFYLLEDDLNVILVNAAHVKGLPGRKTDVCDAAWLCQLGECGLLRASFVPPEPIRQLRDLTRYRTTLTAERSWEAQRLEKELEDAGIKLSAVATDILGVSGRAMLAALIGGEDNAVALAELAKGRMRTKIPQLVAALTGNFSAHHAFLCRLHLQRIDQLSATIEELSTRIEEQMRPFSHKLDRLQTIPGVARAVAEVIVAETGGDMSRFPSPGHLASWAGVCPGHHESAGKRKSGKTRHGDRWLCGALGTAAMAAARTRDTTYLGARYRRLAPRLGKTKAIVAVEHSILTAAWHMLTNDVDYADLGGDYFARLDPERAMRRILRQANALGFTVRFDPIQAA

SEQ ID NO: 473156 - protein, 448 aa, unidentified
MLPRDGVVVGVDLADEKQALAVVDHDVRVLARKTVRVKAFRLGEALDWAVEQARAGGFARVTVACEPTGPRWLQVQRLCAERGLPLVCIQPLVSHIAREQQDYTTHKTDEADCVMIARLAGELHCYIPEELDETWAQLRHLGRRRAQLITSATASVQRVADFLSVAWPVVTETCARPLESRTWLAAVLAVTSRCGGQPGRLAAMGPEAFTALVRAEVPGWGGQRVFGPVCRRVFAALTDTEGVVVSSRRGLLRRCADELGDLQRTRAQLRAVEADMVAVLAELGLSRLGDIPGLTAVGAAAILAETGDPRRYDSSSSLVKHSGLAPADNASGAFAGQARISRRGRPGLRLTAWRAVLPMLRHNPVMTARYQAMTAGDGTAPGPDGAGSRQATAAAAARARRARARTACAAALLRWIYSMVVHGTSWDAAVACGTAGIQHAPRCPAQAA

SEQ ID NO: 473157 - protein, 337 aa, unidentified
MKVTLIGIDLAKTIFQVCGVNQASKKVFNRQLRRNKLLAFLMQHPEATIAMEACGGSNYWGRMLGKRGFTVMLIPPQHVKPFVKGNKNDRNDAFAICEAAGRPDLRCVQPRSLAQTDTMLIHRILERRVSERNSLMNQIRGLLNEYGVVVARGKEKLRNELPFILEDAENELTETARYYLHRQLLEWYELDAAIAELDKAIAQQVKSSEQSSRLKKIKGVGNKISSAAEAFMGNGSGYHSGRHFAANLGLVPKEHSSGGKQRLGRITKRGNAYLRRLLIQGAWSVVRYADHSEDRLSRWAKQLIQRRGKHKAAIAVANKLARIIWAMSYHQTEYRAN

SEQ ID NO: 473158 - protein, 335 aa, unidentified
MAWRNRWGRRMAIVGIDIAKSKLDVALLLGEGMRRATFANHEAGFRQFLDWLERHRPDPHSSWHACLEATGNWGLDLADALQAAGIIVSVVNPARIKAYGESELARNKTDRLDAALIARFCRAQVPPPWTPPAAHLRELRELVRRCDALKAARVQELDRQKSGFASSAVAGSIAAHLDWLDRQIEAVFTEVRRVIAADPTLSRNVALVRSITGFGEVSAAILLAEIPNIAGFTPKALAAFAGLSPSEHSSGSSIRRPGSISRIGSERLRRTLFRCALSAKRTNHALADFVRRMAIAGKPPKVILVAVARKLLVYAHAVIRTQTPFGPPSAPPQHS

SEQ ID NO: 473159 - protein, 373 aa, unidentified
MPKYSTAFGMDVHLRSTTVCALDADTGEAVTRRFPGNPWGEIAGWMDGFPGPSLAAYESGYLGFAPQRELAGLGVECVVAAVSKIPRSAADSASKNDRNDAARMAKAILAHDISPAWVPSPEVEGIRDLAGAYDGATARLATAKQRLLAFLAKRGFVYGGTTPAGNPRKYWTYDFLRWLDKVRPEDDGGVRTLAALRNEVEAAAEARADLLSEYGAAVDASPIAAEVAALQSIKGCAFALAAAFSAEVGDFTRFRSGRQVTAYFGLAPSQRSSGDSVRLGGISGAGNALVRKLAVEGSWCYAAARHQPKLMPRDTGVPLEIRMHGRKGSERLLRRREEMLARGVPAAKANAATAAELVRWLWALGMMCREGAE

SEQ ID NO: 473160 - protein, 351 aa, unidentified
MDATTVAVDLAKSVFQLAEADDQWRIVRTHRLTRRQFERFFANRCVRLVIMEACGSAHHWARSLAALNIQVRLLPPRHVRRYVLGNKTDAADCAALLEAARNLQIRPVRVKSVEQQALQALHRLRSQWMATRTQRINGLRGFCREFGLAVPRGARTGLRNIAQLVGDTTSAVPAMLRCEMSATLDEVRMLELRIAQLERDLAVMARSMPACQLLMTIPGIGLLTATALVAAVGCDVSHFKDARHFASWFGLTPKEHSSGTMRRLGRISKAGPRYLRTLLTHGARSVLLSAARARSSGRECHGLHHWALAVQRRANHNKATCALANKLARICFATLRSQQPFDAQRPCALPD

SEQ ID NO: 473161 - protein, 366 aa, unidentified
MNHKVGNDNTVARFIGIDVSKQWLDVACLPERETRRFGNDCAGLEQLCAWIVPLAPELIVMEATGGFETNVATALAARGLALAVVNPKHVRDFARAFGILAKTDRIDALVLAGFAQKVHPPVRPLPDEERRELIDLVDRRRQLVTMRAEEKTRLTQATPAARQDIKEHIEWLNERLRRLDIDLTAKLRSSSLWKTKEQILTSAPGVGRVTVATLVARLPELGTLNRRAIAALTGVAPFARDSGQHRGRRMIWGGRADVRNVLYMATVTAARINPVIRSFYLRLKQAGKPPKVALTACMRKLLTILNTMVRTNQPWQTPPTHSIDTVALPRSSVEREFSWLLYCKRRPHTLHPVIPLGRRARYRAIA

SEQ ID NO: 473162 - protein, 340 aa, unidentified
MKKQTCFFLGIDVSKLWFDISLMPVVNYQKEPMITERFDNTMKGLALLKRWLKEQKVSFDNDTLLVIENTGIYHRLLWKFFSENNIPIHIGNAAHIKKSFGIARGKNDKIDSQRLCSYAYKNDDELKASSALNPAFLNLKDLITSRTRLKTQLGANKAYLKELKNINDKATQKMMENVYKMAINGLQKSITEIEKQITIVIKSDSSINANYTFLLSVPAIGPVTATYILCCTNNFANKISGKQLSCYAGVVPFADRSGKSLKGRNKVHKMANKELKSLLHLCALSSIKYYQEFRDYYERKVKEGKHPNSVLNAICNKILLRAVAVVNNQKSYVENYKKAA

SEQ ID NO: 473163 - protein, 415 aa, unidentified
MKKHNYRAKKVNDINWPQLREQFAGQALVFAVDVAKEQQFALLSNTELSESVLIQWNQLEQTTWLINELKQLNALITVVMESTSTYGDAMRYQFRQAGFTIHQASAKRVHDAKEIYDGVPSLHDAKAAWLIAHLYQDGLTKPWHELGDIERELNAYRREYELHESQHKRNQNRLEAFLSRHWPEVMPLLALDSVTLESLLIDYGSPEQIAAGAEQAAKDMRRWGKHCLSTEKIDAVIHSAATTLGQPCIEAERRYLQALAEELRHSRTQAKNAKLALEAVVKAEPELKEMGMTVGMVTTAILIGLHLDPRHFGCARSYLKALGLNLKEKSSGQDHGKLKLTKRGSALARKYLYFAALRLINSDPVISAWYQNKVDPRAKLKTVIALMRKLAKALWHVARGQRFDARKLVMTTVVN

SEQ ID NO: 473164 - protein, 319 aa, unidentified
MLIGIDVAKAELVIAARPSGERWTVANDERGIRTLVDRLQGAKAELIVLEATGGYELLCVAALVAAALPVVVVNPRQLRDFAKATGQLAKTDRIDADILALFAERVRPQVRVLPDADAQEFDALLARRRQRLEMLQAEKNRLGQVFGRGKRPVKKSLKLHIAFLERELRIADTDLGAMVRESPAWRERDDLLQSAPGVGPVLSLTLLADLPELGRLSRRAIAKLVGVAPLSRDSGTLRGRRFVQGGRASVRGVLYMGTLVATRRNAIIRAFYQRLLAAGKPKKLALVACMRKLLTILNMMVRTQQRWCADRVAGALAVA

SEQ ID NO: 473165 - protein, 323 aa, unidentified
MNKDIKYLGIDISKDFFDVCDNNLAYYQFKNNLSGFRKLVKLLDSNTICVMEATGYYHTRLAYFLLELGFGVSVVNPLKIKRYIQMDLSKIKTDKSDAKMIQLYGKDRRPKLWIGQSDTQQESLQLLRMLSIYSKQSTQLKNKIHGEEVLGYPSKVVVNSLNRSLKKLKKEMEVLEKALNDNVKKEYQESLTLLKSIPGIGDKTALMLLVFTDGFHRFESSKELCSYAGLTPIIRQSGSSVKGRPRISKMGNPKLRNLLFMCSFNACKYNQGCKALYDRIVAKGKSKKLALIAVCNKLLKQAFSIVKNGVPYNNQYKSTLVNN

SEQ ID NO: 473166 - protein, 442 aa, unidentified
MSDSNVRYVGLDVHKRVVEACLLDDEGKVLRRDRLDLSRSYLETYGREVLRPTDRVALEATTNTWAVVRVLRPHVAAVVVSNPLATKAIAAAKVKTDKVDALVLAQLLRCDYLPSVWQPDEATQEMRRLTAHRASLVGDRTRLKNRLHAVLAMRLIAPPCADLFSVEGRDWLAAVELDAEGRLLLDSDLRLLGHVEAEIEQLDKLLAQKAYPQQAVKLLMTLPGVNVAVALALVAAWGDIGRFASPDQAASYLGLVPSTRQSADKCYHGPITKAGRSQARWMLVQAAHHVRNHPGPLGVFFRRLAKKKNYNVAVVATARKLAAIGWQMLKHNEPYRYAQPRPTQDKLARLRVAATGKRRTSGPPKGAKCQAKLPGGSRTIKPLATVYEQEHLPPLSAPKPAERRVLAAGELTEFAASLGVEQIVPRRKCGSRTKNEPQAATK

SEQ ID NO: 473167 - protein, 405 aa, unidentified
MNAVGIDVSKGKSMVSVVRPFGEVVVTPYEIRHTASELRELAHSLKSLDGETRVVLEHTGRYYEPVAQSLCNAGIFVSAVNPLLIKEYGNNSIRKVKTDKADALKIARYGLDNWAELREHTPMDKLRDQLKILNRQYSLYVKNRTALKNNLIALLDQTFPGANAFFDSPVRQDGSQKWVDFAASFWHVDCVRSLGSKAFTERYHKWCKRHGYNFNVSKAAVIYEEAGELVPTLPKNDSTKVLITEAITQLNTGSRTVEVLRAEMNRLAGQLPEYPVVMSMYGVGPSLGPQLMAEIGDVRRFAHRGSLTAFAGVDPMPNQSGSYERQSNPASKRGSPYLRKTLFLVMTVLLQKAPADDPVYQFLDKKRSEGKPYYVYMTAGANKLLRIYYGRVREYLASLEDTTLV

SEQ ID NO: 473168 - protein, 351 aa, unidentified
MSRKTEAGLACTIGIDTGKNTLHLVGLDAKGAVVLRDKLARGRIAARLANVPPCLIGIEAGMATHYVARELLVLGHDVRQVPPSYAKPFRQGHKNDFRDAHAIAEAVQRPSTRCVPVKTDAQLELQALHRVRSRLIGGRTAAINQIRSFLLERGITVRQGLRFLRQQLPQVLATRTDVLSPRMIRIIEDLSSDWRRLDERIEHVTEEIELLASDSEACRQLMTVPGIGPIIASAMVAAIGNGAAFAKGRDFAAWLGLVPKQMSTGDRTILGRITKRGNRYLRTLFMQGARVVLLRPTNWAKHSFGPWLAAAAKRLHHNVLATALANKLARIAWTVLAQGRSYERRAVPGII

SEQ ID NO: 473169 - protein, 417 aa, unidentified
MVNDVCWFVGIDWATQSHCVCLLDAEGRRVGQREFAHGGAGLTELRDWLLEKTKAAPGQIAVAIEMPHGPVVEMLLEHGFVVFAINPKQLDRFRDRFTVAGAKDDRRDAYVLGGSLRTDRAAFRQLAADHPVMIELREWSRMADELQQERTRLANRLRQQLWRYYPQAAKLTDDVADDWFLALWQKVPTPERAAKANEKAIARVLSAYRIRRLDAATVLRILREAPLFVAPGTTKAACAHIRSLAARLHLINQQIKEAQQNLDRLCAELEEEEKPSGQSFEQCDVTILRSWPGIGRINLATLLAEAAEPLRRRDYHALRALAGVAPVTRQSGKQRFVVRRLACNRRLQSAVHHWSRVAIQHDAAARRRYDALRRRGHGHARALRSVGDRLLFALCTTLKRQTPYEANHNSAKVSAKG

SEQ ID NO: 473170 - protein, 326 aa, unidentified
MTHKLGIDISKAKFDVALLKADGKYRSKVFSNDATGFKSLLQWLDTHVPTGKAEVHVCMEATGSYHEALALFLSDQGVAVSVVNPLLVKRFIEVDRVRNKTDEGDAKCLARFCQMTQPERWEAPSVGVRTLQALVLRLDTLQEMRQGELNRLEIAHASVRQSMRDVIAGLERSIEAVREQIRQTIDDDPDLKQRQGLLASIPGLGDKTIPQLLAYIGRPERFKSVKALIAYAALAPLIRQSGTSLNQHKGTHPQGHRALKSALYYPAMVAGKYNPLIAAFWQRLKAQNKPGKVIVVACMHKLLAIAYGVLRSKKPFNADHLKPIVT

SEQ ID NO: 473171 - protein, 335 aa, unidentified
MSLYYAAVDLHSKQSVLVLIDERDRLVWKGRLPNDLELVLMALVPYREQVAGVAVESTYNWYWLVDGLMEAGYEVKLVNPAAVKKYEGLKHQDDVSEAYWLAHLLRLGILPTGYIYPRERRGLRDLARKRLRLVSQQTAHILSLESLYNRCLSRSLSANQVRKVQAQDLGDPYWAQAALSSQQILQALGEQIDRIEKQLKQALESEQEYKILQTIGGVGEVLAATIWLETGDLSRFPKVGQYASYCRCVESKKTTNQKKKGEGNRKNGNQYLAWAWQEAAAGAIRWQSKARSFYQSKKAKKGAWVAHKALAHKLCRAGYFMLRDQVKYCPARLFG

SEQ ID NO: 473172 - protein, 351 aa, unidentified
MDRYVGVDGHSRSCTFGIVSASGRRLESKVVETNGRALVEAVRLIPGRVHVCLEEGTQSAWLYELFKPHVAEVVVSMPSKAKGAKDDKRDAWARAQELRLGAVETRVFKAPQHLAALRSAVRAYGFAVTDVVRAKNRLKAVFLGRGIVADAGVYEPERRDGWLAKLSGPYRQLAEVLSRQLDLVVPAWDEAESWLLTESKSHPIIRKLLTAPGMGPIRTAQVVAIVAVPDRFRTRQQFWSYCGLGIVTRSSADWRPGRMGGLERAQTLSTRGLTRKRHPLLKAVFKGAAMTVITQLPNDPLHAHYQRMIEKGIKPPLARLTVARRIAATVLSMWKNQEVYDSKRHAVVEQP

SEQ ID NO: 473173 - protein, 414 aa, unidentified
MKVVYSVCCGVDVHKSFLVGTIISTDNGIQPHYQKKRFSTYNGDIHKFANWLHANDCLDLCMESTGKYWVPVFNILEEQGIRVTIANPKWVKAVKGNKDDTKDSKWIGDLFRLGLVPGSFIPSKPIRILREFTRYRYKLVSMKSSEKNRFQNAFTVCNVALDSVVSDMFGKSASAITDYLLSDDTFNPEHCVSLLQRSLKKKADTVLESIEGYSITLEQKLRMQIVRSHLEYIENSIAQLDTAIDTMVAEQEVLISLMCTIPGVDRNTAITVISEIGTDMAQFGSSKRLCCWAGLTPGNNESAGKKKSVRITRAGVYLKPALVQAAHAAVKATESSYYRLKYEQISKRRGKKRAIIAIARMILTAIFNMMSTGEVWNPCDLYKIDMPEALKEKQKAKAIKQAVKFLEKQGFAVG

SEQ ID NO: 473174 - protein, 418 aa, unidentified
MGREVGVDVMVERGCGLDVHQAMVVACLLTGPPGRRPQKEIRSFRTMTAALREMREWLQENGCTHVAMESTGIYWQPVYAVLDGAFELVVGNAHHIKNVPGRKTDVKDSEWIANLLRHGLIRSSFVPAKPVRELRDLLRYRRKLVDACAAERNRLLKLLETANIKLSSVASDVFGVSGMAMLRALIAGTVTPAEMAGLARGRLRHKLAELELALQGCVEDHHRYLLSVQLRRIEAAEYDIKELDARITAKLEPYDEQLQRLMRIPGVDWFVAAVIVAELGIDMTVFPSAAHAAAWVDICPGNYESAGKRNGGNIRKGNRHLKTALVTAAVAASRKTGSYLKDKYFRLRARRGPLRAAVAVGHKILIAAYHMLATGAPFKDLGADHLDTAYRQRATRTLVRRLNRLGYKIALIPTQARA

SEQ ID NO: 473175 - protein, 392 aa, unidentified
MFFVGIDIGKNNHVASMMDDSGKIIFKAFSFSNTSDGADALLSKLSSYSSNTADFEIGMEATGHYWLSVYSFLYGKGFLIHVINPIQTDGWRKGVEIRKRKNDIIDSILIADLIRYGQFVETRLSDEDIFSLRNLTRFRSYLVESISDLKRKVVCVLDQVFPEYQYIFSNIFGKTSKEILRQFSSPIDFESVSADTLAQLLTQLSRQKVGAEKAKQLKSAASNSFGITFAKDSFSFQLRALIEQISFIEQQVKDTEREISRLMEKLGSPITTITGIGNVTGATIIGEIGDISKFSSPRKLVAFAGIDASVSKSGEYESTHNVMSKRGSPYLRKAIFQAALIASFKDPVLSAFYQKKRAEGKHHLTCVGAVSRKMCNIIYAVLKNNQPYVPKA

SEQ ID NO: 473176 - protein, 408 aa, unidentified
MYNAVGIDVSKGKSTVAVLQPGGTVVRKPFDVTHSSCELKSLTDYILTLDGETKVVMECTGRYHEPILRTLSDAGIFVSAVNPHLIKNFGNNTIRKVKSDPADSKKIARYTLDNWADLREYSSMETTRAQLKTLNAQMAFFTKQKVAAKTNLISLLDMTYPGVNDLFDTPTRDDGSEKWVDYAASFWHVDCVRKIGLKAFTERYQAFCRRHGYNFQMSKPEELFNASKELVAVFPKEQEYKDMIQMSIKQLNVISANVEHTRQEMNRLASTLPEYSTVMAIRGVGATFGPQLIAEIGDISRFNHREALTAFAGVDPGVNESGKFKSNSNNASKCGPSRLRKTLFLIMSSLLQTKPVDDPVYRFLDKKRSEGKPYHVYMTAGANKFLRIYYGKVKECLRTQAQAETTDA

SEQ ID NO: 473177 - protein, 336 aa, unidentified
MRYVGLDVHWRQSSICVLDTRGRKLSTQTIRGGWSKVLEELGKVKKPFAICFEASSGYGYLFEQLSTIARRVVVAHPGQLRLIFRSKRKNDRVDAEKLAKLLFLDEVPPVHVPSVEVRSWRSMIEHRRKLVAEQTRTKNGIRSLLRSQGIEAPRGLWSRRGLTWLAEVKLATELDTLQRDIMRERLESVASMIQRVERVLNRKGTAHPGVQLLRTIPGVGPRTGEAVVAYIDKPGRFHSNKAIGCYFGLIPKQDASGRSNRLGHITREGPSVVRSLLVEAAWQGIRRCPQIREVYQRIMRDDKQRKKIALVATAHYLLRAMLAMLKTGEVWRYEAA

SEQ ID NO: 473178 - protein, 363 aa, unidentified
MHSITNTELSSHEGTRCQFNGGNCTIKLGIDVHQDFYVVVCQVGGTNPKPPQRFHKEAFLHWAAKLTQSGGEVHAVYEACGFGFTLQRQLSALGIVCHVVCPQKLDEHNKRVKTDGLDAKALCLKLDRFVQGNRDALALVRVPSEEEERSRAIHRQREQLVGARKRLEAQGRSLMVNHGIEPVQNWWKPRTFTALPVPQWMRELLLNSQPILLALQEKISAMTLQLQSAAAPNQPRGLGKMTSVLIDREIGDWYRFNNRRQIASYTGLCPGEYSSGNTRLQSCVTKHGNPRLRAALVELAWRLVRFQPNYKPVGKWRQILAKGALATGAARKKAIVAVARQLAVDLWRIKTGRLTAEQLGLTT

SEQ ID NO: 473179 - protein, 396 aa, unidentified
MGTIGIDIGGRVHVAARCREGETKADRGVLRISQSRAGFTALDAWLDAGPEPVELVVMESSGHYWMPLAAHLGRRGIPVAVVNPLAAKYFAKSRLGRTKSDPADARSLAEMAMRDTPPARDPLVGVELRQAARFAMTLVTEQAKVCQRLYRLVELGFPELRELFDDPTCRTARAVLRLAPTARAATRRRMETLANANKGRGRRRLGETRAEQLQGAAAETIAVPELDAETAFEIGLLLDQYDLLEAQIEGADRRVAGLLDGEIARRLLTIPGVGPAIAATLLAEIGDIGRFTDFDQLLAYAGVHPAERSSGTKGARPGTSWHMSKAGNSHLRAAAYRMAVVGVQHNPVIAAHYARKRAAGKSPMNALGHCMRKALSIVWGVWRNGQDFDPDWGAEA

SEQ ID NO: 473180 - protein, 343 aa, unidentified
MQAVTTVGLDIAKSVFQVHGVDARGNVVVRRQLRRRQVLPFFKKLPSCLVGVEACATSHHWSRQLRALGHTVRLMPPAYVKPYLKRQKNDAADAEAICEGVTRPNMRFVETKTPEQQSCLMLHRTRHLFIRQQTAVINAIRAHLAEFGIVAPVGRNGVEELLDVVADPNDDRVPEVARECLAGLGAQLRMLKAQILEFDRCIVAWHRSNETSKRLDEIPGVGPALATALVASVADPRVFRSGRDFSAWVGLVPKQNSSGGKEKLGSITKRGDRYLRSLFTAGALAVIRYAKIHGTKHRPWLTALLARRPTKVAAIALANKIARMAWAMMAKGERYKEPAALAA

SEQ ID NO: 473181 - protein, 377 aa, unidentified
MTVANNLECYQLLLDRCQLDRFQVHVAFEPTADYQRNIAYWLATHGCQCFLVSSLSSARAREMLFNTWDKNDRKDAGVILYLMQQGLMLPFYDPLHADVMDIQEISNTYHQISVARTRCMNSLFNHYITLYFPEMERYFHSSRSEWFCRFLLKFPTPASITRYRCETFVKRAWDVVGRKVNKEHLLEELYAVAGQSIGLPVVLGSAAVGTFKLQLARFLELTNTRLQLEKQADAFLCSRSDYEHLRSIPGIGPIVALIILAESGDLKRFGHYRQFLAFCGFNLSAQQSGTKHGHYHLSKRGNSRLRYAFWLAATVAINLKENAFWQKYTRYVKQNPTDADLCRKGRVAVAAKMARIAHAVVKQDINHIGYYEVSHGT

SEQ ID NO: 473182 - protein, 318 aa, unidentified
MSDKTIVGIDVAKNTLEVFIDTTGQLLHPENSASGVHELQEALSGLTVAGVVMEATSRYHCTAELMLSASGLPVAVINPRQIKNFARAMGRVAKSDPIDARIICEYGRRLTPQFRPAKSEQQQELAVLLTRRRQLVQNRVMESNRCKERCGAYVEQGIMRHIEWLDFEIDILDAEIKQRLRQDDELAAKRLLLDKVKGIGPITQATLLIQLPELGCLTRRQISALVGVCPYDRDSGQLRGKRAIWGGRSGLRATLFMAMLSAVRYNPQIKAFFNGLLARGKPKKVALTACIRKFVTIPNAMFRDQKEWVYEEASSLTL

SEQ ID NO: 473183 - protein, 407 aa, unidentified
MTVAVGIDIGSCSHAVAVCHEGAQEAERKGLKIAANRGGFDDLDAWLRRQPEPVARVVMESSGHYWFNLASHLRRQGYPVAVVNPLEAKYFGKRRLQRSKSDPADARTLATFAMVDQPPTRELLVGAELREASRFAMRLTREQGQVCQRILRLVDIGFPEFAEVWDDPTCVSALAVLRRAPTARAVARMSVEKLAQLRRPGSGGRAIGPSKAAELKRLAATSVAAPELEAQVGFEMRLLIGQYDLLEQQIEEADRRVAALLDGEVAQRLLTIPWVGPSTAGTLMAEIGDIWRFADVDQLLAYAGVHPREQSSGKKGANPETSWVMAKTGNAFLREAAYRMAVVGIQHNPVIRAHYARKRAAGKSRMNAVGHCMSKALSLVWGVWRGGKAFDAAHGNSAKTPQTAPEA

SEQ ID NO: 473184 - protein, 401 aa, unidentified
MNAVGIDVSKSKSVVAIMRPFGEIVSTPFEIKHTASDIHSLIELINSVEGESRIVMEHTGRYYEVLAHQLLEANLFVSAINPKLIKDFDNDSLRKVKSDKADAVKIARYALDKWQNLKQYNVMDELRNQLKTMNRQFGFYMKHKTAMKNNLIGILDQTYPGVNTYFDSPARSDGSQKWVDFASTYWHVDCVRKMSLNAFIDHYQNWCKRKKYNFSQSKAEEIYGKAKELVPVLPKDDLTKRIIKQAIDQLNIASRTVEELRSFMNETASKLPEYPVVMAMKGVGTSLGPQLMAEIGDVTRFTHKGAITAFAGVDPGVNQSGTYDQKSVHTSKRGTPMLRKTLFQVMDVLIKTKPQDDPVYLFMDKKRAQGKAYYVYMTAGANKFLRIYYGRVKEYLASLPQ

SEQ ID NO: 473185 - protein, 337 aa, unidentified
MRLYAGIDLHSSNNYLGIIDEENKRIYKKKLSNDLREVLNALEPFKEEIEGVVVESTFNWYWLVDGLMEHGYPVHLANPAAIKQYEGLKHVDDKVDTLWLANLLRLGILPEGYIYPKEGRPVRDLLRKRLQLVRHRTSHILSTQNIITRNTGKKMGTRDVKKLDEEWVSDLLKEKHLLLSVNSSVGVIRYLTDKIKHIERVIKSEVKLRKEFKGLLTVPGVGDILALTIMLEVGDMGRFKEVGNYSSYCRCVRSIRISNEKKKGEGNRKNGNKYLSWAYVEAANFAVRFYPGINRYYQRKKAKTNGIVAIKAISNKLSRASYYIMRDRVVYDSRKLF

SEQ ID NO: 473186 - protein, 358 aa, unidentified
MTTVSKKQKWFNTIQLTQDDDLYVGIDTHKESFHVALWLNDAPAIDFVMPADSKKLITTLQKFRQSLRLVVYEAGPTGYSLARALKDAALPVSVVAPSKTPRQAAPDSKTDSLDARKLAEYAAKGLLRQVAIPTKHQEAQRQLTRLREQLVAKQTRIKLQIKGFLLQHGIDQPDGLARWSICAIEKLKTIRLSEHLRYCLDILIEELRFIAEHLKSAEQKIKEAFSEKPICTTVKILITHPGVGPIIATQFATEIFNPKRFRDKTQLTKYVGLAPSVHQSGQTFRDGPILKTGRPQLRCNLIQGAWAWIRKDANAYKTYCRLIHNTGQKNKAITAMARKLAIHLWMMACENKPYDPAA

SEQ ID NO: 473187 - protein, 424 aa, unidentified
MADPIYDVRPSTWVAIDIAKQFHAVLIETSQGRLQRFKMASTACEHDRLIALLSSLPQPCRIAFDLHRTLAWRLLAAGFDVVTVSTVAVARYREARFNSWDKNDPKDAQVILEMLKQGLTQFYHEPLLTGCHDLQELSKTYHQVALARKRLADTLLNHYLPLYFPEMARYWEATRAEWFIAFLQRFPTPGAILTLNESEFVQAAGPLLGRKVNKTGKLLEMYALAQHSSALPVLKDSLAVQTFRQQLAHMAHVAALRRTLEQQAQVLLQDRWEFRCLSSLPGVATILALIILAEVGDIRRFGHHRQFLKYCGLDLAKSQSGQSKGKERLSKRGNARLRYAFWMAALVAVRMTENSFRDKYERYLASAPHDADRKRMALTAVAAKMARVAYGLLKTRTLYQGYFEHALPGGSTSLALAVEATMTS

SEQ ID NO: 473188 - protein, 392 aa, unidentified
MVVSVGIDVSKNKHDCFIVSSEGEVLADVFTIPNNMDGFYALLEKIRACTTPQDKIKVGLEATGHYSYNLLGFLLDNGLPTYVLNPLRTNLYRKSLSLRKTKTDRVDARTIATMLLSDAGLKPYTNTAYHNEELKSLTRYRFDKVKERAKLKSSVSRLVCILFPELEKLVPSLHTASVYTLLEEFSGAKQIAAAHLTKLKALLETASKGRYKRDMALEIRDAARNSIGSWMPAKSLELQHTIRLIRELDVEIAEIEEQIQSIMDELCSPITTIPGLGFRMAAMILAEVGDFTRFDSPDKLLAYAGMSPSTYQSGQLKNCYPHMEKRGSRYLRYALYNATKYVCHWNPTFAAYLAKKRAEGKHYNVALSHAAKKLVRLIFAMEKSRQPYCSAS

SEQ ID NO: 473189 - protein, 346 aa, unidentified
MPYSTTVGVDLAKNVIQISVVSGRGKELSNRSLTRKKFAEFLGKQRPSLVAFESCATSHYWARAAKRHGHEARIIPAKAVAPFRQGHKTDSNDALAVAEAARRPKIKEAPMKTVEQQALQAIHRSRELPIQESTALSNHVRSLLMEFGIVIKRGFASLLRAVPEILEDGENELPDLYRPTLHRMYSRLLELRGDIEAMTGEVECLAKGHPICSKLMALEGIGPIGALLLYATMGSGAAFSSGREFAAYLGLAPKQYSSGGKTNIVGLSKKIGNSRLRSVLILGARAYVYKFKEPKSAKDTWLKAIIERNGESRAAVALANKNVRTAWAMVTQGTEYQRRQQLEIAA

SEQ ID NO: 473190 - protein, 303 aa, unidentified
MKLQHIIGADLSKESIDFLFHDRNTHLKTENGNGGFQQLLKWLSEQKINCSDAMIVMEHTGLYSYHLEAFLHKHHIAFAKVPALAIKKSLGLVRGKNDKVDAKRIARYGFEKKDVLVTEPPPDKLLLRLKLLHSSRQRLVRLRTSLKSAVTALRGIVGASDLIITSHRRLIKDFTDQIKRIEAEIKEVRSQHTSISFNTRLLQSVKCVGEVVSTATIIRTHNFTRFANGRKFSCYCGTAPFEHSSGKSIRRKTKVSHLADKEMKTLLDRCACSAIQYDKELKAFYERRCTGEVKAKHHQHRPK

SEQ ID NO: 473191 - protein, 410 aa, unidentified
MSVANSGGSPRVLFAGVDWAKDDHAVCVVDEHGLVAERFTVAHQAAGLARLVKVLHRREVVAVGIERGDGPVVDALLAAGLPVFVIAPGQIKSLRGRYGSAGNKDDRFDAFVLADVMRTDRVRLTRLQVDTDDTVVLRKLCRARKDLVGHRVAAANQLRAHLDTAMPGVVGLFHALDAQISLAFLARFSTQDALERLTETRLQGWLHRQRYSGRTSAAVLLDRIRTAPRGPVGAPAAGLSAITKALLATVHVLAEQIAGLDKQITAAFAAHPDQEVFAGLPKAGTLRAARLLAEIGDARGRFPTASSLACLAGAAPSTRQSGRSRVVTFRWAADKNLRDAVCDFAGDSFHTNAWANDLYQRARARGHDHPHAVRVLARAWLNVIWKCWSTHTRYEPAKHRRLQQVLTQTG

SEQ ID NO: 473192 - protein, 380 aa, unidentified
MKKVRFVGLDVHAETIAVAVAESGRNGEVRSLGVIPNGIEAIRKLVKKLGAPEQFRVCYEAGPTGYALYWQLTELGVRCEVIAPTLVPVKAGDRVKTDRRDAEKLARCYRAGELTPVWVPDAAHEALRDLVRARLAAKTDQLRARNRLSKFLLKYGRRPSAGMRPWTNAYMAWVREKAWFDQPAQAVALDDYFHEVEHANERIARLERAIDTVIETLPERMRAVVEGLQALRGIAKISAVTVVAELGEISRFQRARQLMGYSGAVSSEDSSGPRTRRSSITKTGNAHLRRIVVEAAWAYRHRPAVGALLAKRQKEISPELKEIAWKAQHRLHNRYRRLLARGKTKQKVVIAVGRELLGFIWAIGTAVERQYPASKRGRSV

SEQ ID NO: 473193 - protein, 337 aa, unidentified
MGQITKNEIYKHYIALDWSKNNFALASMRDNGTNIKLTKQLPDLKKLRQCLKDLPGKKILTIEETTTAHWLYVELREYVDRILICEPHRNKLLLTGPKNDEKDARDLCLLLRNGSLKEVFHSDDKLYQLRKLVSMYEDFVKASVRMKNQRSSMFLSVGKDHTKEKILTENAISKFITEKQNVTIEHIDQIRGEFEQLFKKIQRENETVRRLVKISGIATKLAVTILAVVIDARRFESKYKYYAYCGLVKYLKDSGGRNYGKRNTRHSRILKRCYKIAANAAIGGNNDIREYYEYMLQNNYSYPDARNETARYIAKVSYAIMKYKTDYRPYQWRENKH

SEQ ID NO: 473194 - protein, 404 aa, unidentified
MHHPTSNFAGVDWATDAHQVAVVDPTGALVAEFSVPHTADGLTDLCRRLERAGVVRVAIERPDGPVVEALLDAGFEVVVVSSRSIKALRTRYGTAGNKSDRTDAYVLADCLRTDGHRWPSLQPDTPATVTLRSHVRARKDLVETRVQVANQLRAHLHVVFPGAVGLFRDIDSPISLRFLERFPSATRAAWLSDKRLAAWLRANHYSGRKTPTELYRRLTQAAPGIGSDDGDARGTVALAFVTILRSLRSQIDELETRITELLDAHPDAAIFQSLPRSGTIRAATLLAEIGDCRARFPDPESLACLAGVAPSTRASGKHHAVTFRWAADNKLRDAVCDFAGDSWRANTWAEQRYRQLRDHGKRHPHAVRILARSWLTIIWRCWQDGVPYDPTQHGAHQRLTQKAA

SEQ ID NO: 473195 - protein, 349 aa, unidentified
MKHSATTIGLDIAKQSFYAVGVDRQRREVLKRKLTRAQVLAFFANLPPAAIGIEACAGAHHWARELNALGHDARLIAGQHVSRRVVGNKNDYRDGKVIGELRGNPETNYVPINSEEQQDIQMLHRARARLVSNRTALLLQIRGLLGEYGVVFAQGVAALRKGLSEVLGGEHVNLSPSALETFCDLREQWMDLDERVRRFDARIRRLAEQNETATRIMALPGVGALTSTALVASLGDARHFRAGRDYAANLGLTPREFSTGGKQRLFGISKRGDRYLRTLLIHGARSALRCAEGKPDRLLQWALRLKEAKGFNVAACALANKLARVAWALVAHGRTYQGQWNNSTAAAAG

SEQ ID NO: 473196 - protein, 424 aa, unidentified
MDVVYARCAGLDVHKETVVACVRVAVAGKKVTREVRTFGTTTGELSALLAWLTEMQCSHVAMEATGVYWRPVWHILSEGDFEMVLANAAHIKNVPGRKTDVNDATWIADLLAHGLIRSSFVLDEDFHALRSLLRTRKQLVREQTGHILRIQKTLEDANIKLDSVITDIVGVTGRAMLQAVIAGETNPVKLAELADRRIRASHDVLREALRGRVTDHHRFLLRLHLQQVDALDAAIQQIDHEVDAAIIRMDKEIETGETTLRSLIALLVTIPGISLLAARMILAEIGPDMSRFPTAGHLISWAGLCPGNNESAGKRKSSRLRKGAPWLKTLLVQCAWAAGRTKESYFRAQFLRLKSRRGPKKASCAVAASMLTAIYHMVKNGTVYEDLGADHFDRRSNEVKANRLVGQLAKLGFHVELQPLAVEA

SEQ ID NO: 473197 - protein, 455 aa, unidentified
MKQAQRIRAHLKQVNLFAAGIDIGSRSHFVAVPEELDEQPVREFAGFTGDLHRLADWLVEMGIQTVAMESTGVYWIPVYEILEARGLEVLLVDARHVKNVPGRKTDVLDCQWIQQLHTYGLLRGAFRPPEEMVALRSYLRQREGLIASASDCIRHMQKALRQMNLLLENVVSDITGVTGLAIIRAILAGERDSKQLARLRDKRCRSDERTIAGSLEGHYREEHLFALQQAVACYDFYQQQIKVCEGAIERHMREIEDDNDNDQDVPPASKPKGHNKNGFDFDVRSQLYRLTGVDLTEINGMSESNVLTIVSETGLDMNAWPSEKHFASWLGLSPGNKITGGKQLSGKTRPSPNRAAAAFRLAAYSLANSKTALGAFYRRLRNRLGAPKAITATAHKLARLFYRLLKNRTPFIDPGQDYYEQQYQERATRNLKKRAAALGYKLIPESTGGLQESMC

SEQ ID NO: 473198 - protein, 403 aa, unidentified
MRVPAAADKAWAGIDVGKRHHWVCVVDRDGRQLLSARVANDEAGIAAVIGSVTGLAAEITWAVDIIGAPSALLLAVLSQSGQHVRYASGRLVAAMSGAYTGEGKTDPKDAFVIAETARIRRNLPVTGHKGELVCNLSLLTAHRADLIADRVRMINRLRDVLTSVFPALEREFDYSSCKGALVLLTGYACPARIRRIGQARLASWLRQRRVRGYASVAARAITAAQAQRITLPGQDIAADIIAELARNLLALDERVTELDTQIAALFAEHPQAEIIQSMPGFGPVLGATLLVTAGDLAAFPSPGHLAAAAGLVPVPNDSGRRSANLHKPRRYSRPLRRVFYLSAQTSMMREGPTRDYYLKKRQHARPHNQAVIALARRRIDVLWALLRDNRTYAATPPAPAKAA

SEQ ID NO: 473199 - protein, 358 aa, unidentified
MTQQHRQVTGGVDTHGHTHHAAVIDTMGRHLADREFPATATGYRDLLAWLHTHGELAAVGVEGTGAYGAELARVLTGAGVTVIDVDRPDRKTRRMKGKSDPIDAYAAATAVASGRASGSPKSRIGTVESIRVLRIARRSAVKARTQAINQIRSLLVAAPAALREQVEGLPHADLIRTLARLRPAADLSMPLNATKAALCRLARRHHALDEEIAELDAQITPLVRQAAPQLLDLFGAGPHTAGQLLVSAGDNPERMRSEAAFAHLTGVAPIPASSGRTHRHRLNRGGDRAANNALHTIVLVRMRYDPRTRAYVERRTTEGLSKKDIMRCLKRFVAREVYRALTATPPTRTSPATLTLAA

SEQ ID NO: 473200 - protein, 425 aa, unidentified
MPTSSGILHRWWETRTFGTTTPELLELHDWLMEWGCTHVAMESTGEYWKPVYNLLEGSFEVLLVNAQHVKHVPGRKTDVGDSEWLAELLLHGLLQPSFILPKPQRALHDLTRYRCKLVEEHTRIVNRVQKLLEGANIELASVATDIVGVSARAMLEEIAAGQTDAKSMANLARGRMRAKIPELEKALTGLVGPHHRFLLAEQLAHIDFLDEQIADIDAEVARQMETLSHSPEGRGSSGRDEEAPVTEVTSGEQEAPPLTWIEAVALLDTIPGVDRTVAEVMLAEMGLDMSQFPTDKHLTSWAGLASGNRESGGKRYPARTRKGDRSLSSIMVQAAWSTVHTKDTLLESRYHRLAARRGKKRAIVAIARSMLVSAWHILTYRQPYKELGGDYFDQRRKEAKVNYLTRQLEKLTGGAVRIELQTVAA

SEQ ID NO: 473201 - protein, 368 aa, unidentified
MTVASMPHPPQSSQADACGEEVVLGVDTHKDTHVAAVLTTMGALVTSRCFPTTAAGYQQLLSWAQAVGTLRRAGVECTGSYGAGLTRHLRTEGVQVVEVNQPDKTTRRRRGKTDAVDAEAAARAVLCGRATATAKTGDGPVEMARMFKLAKDSAIKSRTQAINQLKAVLVSADPALRESLSGLSTPKLLRRCAQLDTGVPTDATSAAAWTLRLLAHRIVGLTAEVGDLQTRITNAVNTSTPRLLERNGVGPDSAATLLITAGDNPERLHSEASFAALCGSSPVEASSGKTQRRRLNRGGDRQANAALYRIALSRLRWDPRTRGYVDRRIAEGKTPREAIRCLKRYIAREIYQIIIQSRPTPTMVPSAA

SEQ ID NO: 473202 - protein, 347 aa, unidentified
MRFYTKQHRFYCGIDLHAKKMYVCVLNSAGEIVLHRNINTEREIFLAVIEPFREDVVVAVECMFTWYWIADLCAKEAIPFVLGHALYMKAIHGGKAKNDKIDSHKIAVLLKGGMIPMAYTYPAKMRATRDLLRRRNHLMRKRAELYAHIQNTRSQYNLADSFGRIAKPQNREGIAERFEDPAVQNMIATDFAVITAYDPIIAKMERDIISMANHHDPVAYALLKSIPGIGKILGLVILYEIENIHRFPTVQDFVSYSRLVKCSKESNGKKYGSSGKKIGNAHLKWAFSEAAVLFLKGNEPAKRYLNKLTAKHGKGKALSILAHKLGRAAYFMLKNKEPFDQKKFLGL

SEQ ID NO: 473203 - protein, 404 aa, unidentified
MKGPIVSIDVSKGKSDYQAFKNLNVKYTGSRSIKHTKEGFDEIVSLVREMEKKLETEVCVVYEATGVYHRVLKKVLEDNNIKQFIINPLLSAKTRKNDSLRSPKTDKLDPKSIAKTYYSHSLHNSHKQETIYHELRELSRYYEDILVHIRKDKVAFRAQLDIVFPGYDALFDDLYGPVALAVIEKYPHPEMLQKKKINTVSKVIQNKTCHRQAVSDTMADKAIEYSKTIYSGCDKDDIEVLILQRLIKKLNEDMAEAERTIGEMIKLAQELPDFSIIKSIPGIGDNLAARIIAELGDMTRFKKKNELVAFAGLDPRISESGKNDGDHMHITKKGNKRLRCLLYLAVTCSIRLKRDDNSIKEFYIKKKQQSNPMCSKAAKTACASKLVRIIYSMCKTGELYQYNK

SEQ ID NO: 473204 - protein, 316 aa, unidentified
MERYIGLDVHAASCTAAIMDARGKRLGAHVIETNGESLVKFLATQPGKAKLCMEEGTQSEWLYQVLSPHVVEILVIRVGETSGPPGQKNDERDAYDLADRHRRDALPSTVWKDAGKLTTLRQLVKVHASIVRDTVRTQNRIKALYRSRGVNATGSSVYTNKGRKKWLELLSANSLASMSLLYAQYDQLSEVRERAHKDLVAESHRHPIAEVLETCPGLGEIRAAQIIAVVMTPDRFRTRQQFWSYCGLGIVMRSSSDWVQMSDGRWARAQVQQARGLSASRTTRCSRWSSRARRRASSCSTERRCSLRTSGWSPPE

SEQ ID NO: 473205 - protein, 461 aa, unidentified
MEIIHRCCCGLDVHKKMIVACLIVLDAAGQRQKETRVFGSMTKDILALADWLTGAGCTHVAMESTGVYWKPIFNLLEGQFEVILANAQHLKAVPGHKTDIKDAEWIADLLQHGLLRPSFIPPAPQRHLRELTRYRSTLVAERARLVNRVHKLLEDTNLKLTAVVTDVTGVSARAMLAALLTGQTDPQTLALLARGKLRKKREQLAQALQGQLQPHHRFLLTTQLAHLDFLDEQVAQCDSEIQRHIAQSIPPSVSAETSATAPRDEPPAELTALQAPLPSSPVEEAKRAPAASTPLSIASALTLLDTIPGVNQRLAEIFLAEIGTDMSRFPDAQHLASWVGICPGNHQSAGKHLNGKTRKGDRWLRQALIEAAHGAMRTKDTYLSAQGKRLGARRGKRRAVVAIGHSILVIVYHVLKHKQPYQDLGSNYFDERDRTMVARQSVRRLEQLGYTVTLETAGEAA

SEQ ID NO: 473206 - protein, 345 aa, unidentified
MSISRVGVDIAKSVFHVHGVDRHDQIEWRGKYSRSKWLDAIVKRVPTGAEIGMEACASAHHWARALQARGYHVKLIAAQFVKPYVKSNKNDRLDAEAICEAMGRPHMRFVAVKSVAQQDVQAAHRIRSELVQQRTAKANQIRGLIGEYGLVAPTGIGQLRAALPRWLEDAENGLTDDFRVLLAGLAEDLRHLDDRITLVTERIERHAQTDPVAKRLMTLRGVGTLTASALAGALGDAQAFKCGRDFAASLGLTPRQHSTGGRDRLLGISKRGDSYLRTLLTHGARAVLRYSEGKEDSLSHWVRRLAERKHANVAVIALANKTARIAWAITRHDSTYDPALAAQAA

SEQ ID NO: 473207 - protein, 326 aa, unidentified
MSSILGIDVSKESLDVVLIKDGRQMHKVFSNNSVGHTQLEHWLAAQRAGQMHACLEATGQYGEAVAEFLFQRGFQVSVVNPARIKRYGESKLHRNKTDKADAALIAEFCQKESPLLWEPLPEPVKHLRALVRRLSDLQSAYQQERNRSLCGEQDGWVIDDLLAHLSYLQERIRAARQAMQQHIDLHPYLRSQQELLTSIPGIGKLTAARLLAEIGDISAFDNAPQLVAYAGLNPKGNRSGTSVHKKTRISKEGRAFLRYILYMPAIVARKHNPVIVQFCQRLSDRKLPEMAIVVAAMRKLLHIVFGVLKNQTPFDPVYGFQFSFSP

SEQ ID NO: 473208 - protein, 347 aa, unidentified
MDQQCHYVGLDVSLETTSICVIDDAGAIIWRGKCSSDPDTITAIVRQHAPGAARVGLETGQLSNWLTLSLRRRGVPVVCMDARHAKAALSLQINKTDANDAFGLAQVVRTGWYREVAVKSMDAHALRMLLVARSRLVSQRQATANTIRGLLKTFGLVVAKGSKGLFPVRVREQIVGNPALIAIIEPLLAVWYAIGDQVVMLDRQMLARARNDQVARRLMTIPGVGVVIALAYTAVIDDPARFRRSVSVGAYLGLTPRRYQSGEVDTTGHISKCGDSLLRGYLYEAAAVLLYRDGRASVLKSWGLGLAKRIGMRRAKVAVARKLAVIMHRIWSDQSEYRWMAIPSTTA

SEQ ID NO: 473209 - protein, 397 aa, unidentified
MYIVGIDIAKRKHEAAVIDGEGTVIIKPFSFTNNCSGYNRLLAMLARAKLPLDEVSFAMEATGHYWLALFTRLQKEGFRVQVINPVQTNSIRSFYIRQAKTDPRDALLIAEVIRFGHFSESALHPENIYELRELCRGRHAIVSMQADVKRKVVALLDQVFPEYETAFTNLFGDTSMAILQACPTPKELSEMPLEELCYLIEVSSRKRFRMAKAQELQELARNSFGFVMVGDVFSTMIRLYAKHLVFLKQQVQEMDRKIAEIMDTLDTPITTITGIGPTLGAYILSEIGDINRFSSAAKLAAYAGIDPTMRQSGEYNGVRNRMSKRGSPYLRHAIWLAASSAVLHDPALKLYFQKKRDEGKPYMASVGHACRKMVSIIYAVMRDNKAYTPCIPNEISA

SEQ ID NO: 473210 - protein, 349 aa, unidentified
MKEYISFDSHKHYTLMEREEIQTQVARQSRIEHAPGAIRAALRGCEARTAVAVEATGNWYWIVNEIEQMGLHPLLVHPRKAKLMMGLINKTDKLDVHGLNRLQRNGTLPTVWIPPAALRDLRELTRTRLVLSAQRTRLKNRLTATLTKHGQQRSQFSDPYGPGARPELYERLECLPVQTRFVSALLLQQLDFVQQQIHTVEQRLQELVQISPAMELLRSLPGIGVILAASIALELGEIERFGSAPQLASYAGTTPRVHASGDKTRYGALRTDVNQYLKWAFAEAANSTALHHRRRPQRHVSQLYRRVRLRKGHGKAIGAVARHLAEATFYVLSRREPYREPTGGRSRAA

SEQ ID NO: 473211 - protein, 327 aa, unidentified
MSKSILGIDVSKDTLDVMLLRQDKMHHAVMENNEAGFIKIHQWLRKHKAEEVHACLEATGQYSTPIAEYLFAKGHQVSVVNPLRIKAYGQSRLIRNKTDKLDAYLIAEFCLSQKPPLWTPPEPDVREVQELVRHLEDLQSMYQMERNRLKSGVRSRLVIDNLKKHIAYLEMQIKEVKKSIQDHINQNNELQRQQRLLETIPGIGKLTAAKLLGEIQNIRSFESAPQLAAYAGVTPRQRRSGVSVRGKSRFGKTGNANLRKALYMPALVAKKHNPIISAFCLRLEKRGKKPIVIVGAAMRKLLHISFGVLKSGKPFDPNYLNNLQFAS

SEQ ID NO: 473212 - protein, 346 aa, unidentified
MDTMARITGGVDTHLEVHVAAALNDVGGVLGTASFPTTAAGYRQLLEWLSSFGQVVLVGVEGTGSYGAGLSRFLHRHDIAVVEVDRPNRQKRRLSGKSDPIDAISAARAALGGNANGAAKTRDGNVEAIRVLRVAKISAHKARTQAINQIHSLVCTAPDELRDRLRTLPTPALIEACAGLRPGAAGDVTAATKTTLRALARRVHHLDAEIAEIEALIRPIVTATAPALLAHSGVGPDTAAALLVAAGDNPERLRSEATFARLCGAAPIPATSGKTQNRHRLHRGGDRQANSALWRIALTRMSWDPDTKAYVERRTKEGLSKREVMRCLKRYIARELFADLPRELLA

SEQ ID NO: 473213 - protein, 365 aa, unidentified
METQSETRRRSPVTEYVGIDWAYRRAAWCAKSAGGEITGEGFTPADEDGLARLVLGLGTDVKACVEMMSGAVWVRDRLRSAGWQVEVADARRVKGIAPLACKTDRVDARVLAELCRRDLVPALWIPSLEERELRERLRRRMHLVRLRTSAMNRVFGLGTQWGLRLGADRLRKPGGLELLAQSGMPAVWQRSIEEALAVVELLDERIAPLEKELAPIARADRDVALLVTIPGVGDLLALTLAAEIADISRFPSPRKLVGYAGMAPGVKQSGDRSKSGLPLSKAGSRTLRWAAIEAAQHAWRESNPWHELYTDLAKRGSGNAAKSAVARKILTATWHMLSLQQPFKPSRPRGGASTVPASSISVLAA

SEQ ID NO: 473214 - protein, 379 aa, unidentified
MCILAENGQSFVKEFGANTPDISAMRDLLKANQVHEVAMESTGIYWIPIWRIFQGHFELKLVNPYFIKQVPGRKTDVKDSEWIATCLQKRLIKGSYIPGKNIQELRQYERRYVHLVGQVTRIEQAIDRQLHRCNIRITNYTSRIGSVSVMNVVRAIIHDEATPEELIKHIHGRIANKHKENIKAALTGYISDSDRMIFRQNYEELELVTRQQQECVKEMERICDTLYKQEVELLCTVPGIQKLSAMTIIAEVGVDLKSFATAASLVGWAGLRPRNDESNKKVKSRKITKGDKYVRRILVQCAWAMTRSKKSWISKKFNDLAKRISKKKALIAIARKLLVIIWNILSKHESYRDYKPIISKDQKKRRIAWLEKQLLELQP

SEQ ID NO: 473215 - protein, 351 aa, unidentified
MTTSSLAHEVIVGVDTHKDVHVAVAIDIHGRRLGERMVPTTELGCTELHRWALGFASRACYGVEGTGSYGAGLSRYLQAQGSQVTEIRGPNRKLRRDRGKSDTIDAEAAARAVLAGTSTISPKAGNDWVEQLRILRVARRSAVQARTQAINQMHAVVVGAPQELRDLLQPLPGHELIKRAARFRVADASDAQTTVRWTLRLLALRHQALTDEVAAIDQAIAPLLEQHAARLLELPGVGPEVAGALLVVAGDNPQRLHSEASFAALCGVTPLPASSGKTSRHRLNRGGDRQANCALWRIAMSRLSFDKRTQLYARRRTTEGLSKREILRCLKRYIAREVFTALPMSSTLDMA

SEQ ID NO: 473216 - protein, 497 aa, unidentified
MVPGRQLNIGEAPGSSPLGQNPQTANLGERAQKEGKMPRDDTETFENNRRQLGGLPLVRRNVAGVDLASERHWVCAPTQDGSGREIASFGATTAELMRLAEWLKARQVESVAMESTGVYWIAPQEVLEGQGLQVLLVDTRQLARVPGRDKKTDPSDCEWIQRLHSCGLLRGSFRPEEAVCMLRTLVRDKANLVAESGDWLRRMQKSLDQMNVRVHRAVSDIDGATGMAILRAIAEGERDAQKLAKLRDRRCSKTEQEIAEQLSGHWREDHLFSLQQALKMYDAVQERIAAYEQEIVRKLGEMEREEQRGQIAPPLPNSNKAKMIKKRGQEAKRQALYRMSGVDITQIDAIGVETVEVVLSEYGSNLSRFPTEKQFVSHVTLAPHVPKSGGKAVKKRKRNSASTRVAAALRMAALSLRHSQTALGAYYRKLAQRIGGDIAVFATARKLATLIYRLLRWGQPYLDEGAAAYESRYLQQRIKSLSAKAKQLGYELSPASG

SEQ ID NO: 473217 - protein, 403 aa, unidentified
MKSVGIDISKGRSTIAVMRPFGEVVISPFEVRHTGSELSKLAKQLKSLDGETRVVMEATGNYHASVAKLLHNAGLYVSVINAKLVHGYGNNELRRVKTDRKDAVKLANYGLDRWLTLPRYIPEEDTRLLLKNCYRQYRQYSKVQTVLKNNLISLLDTVFPNANRLFSSPIRGDGSEKWVDFVAEFWHCRCASEKSERAFTSKYLRWCRKHGYNFREAKAHTIYAEASGHIGVMPKSETTKLLVKQAVSQLRATSTALAALKQEMQSLASVLPEYPVVMDLFDVGPTLGPQLIAEIGDVRRFYSKKALVAYAGLDAPPNDSGDVTGRHKSMSKIGASSLRRTLFLVMSVYLQTAPLDEPVCQFMDRKRAEGKPYRVYMMAFANKFLRIYYATVKAYLESLEHTV

SEQ ID NO: 473218 - protein, 355 aa, unidentified
MNDSKFIGLDVHKTSISAAVLDHDGKLVMQSIFATHAAAVLSFIHGVRGSLRVTFEEGTHSSWLYDLLRPQVSEVLVCNPRKNSLLKSGNKSDQIDARKLAELLRAGLVSPVYHGQTSTVTVKELGRTYTALTEDTTRVMSRLKALYRSQAIATEGKKLYTKRRREQWLNELTQAGRRYRAERMFEQLDALQGFRRQARRDLFVECRKHAATAILTSIPFLGPIRAALLIARVQTPFRFRGKRQFWAYCGLALETRSSADYRLVEGELHRAKKPVFIRGLNLNHNHDLKNIFKAAATTASACPGPFRDYYETLLGKGMKPEMARLTLARKIAAISLIVWKKGERFDPEQLKAQAA

SEQ ID NO: 473219 - protein, 396 aa, unidentified
MLTTNLHNSIDFTGQIFHIGLDVHKKSWVVTIRSMGVQVAHFTQPPGADALARYLQKTFPGGSYHSAYEAGFCGTGIHEQLCKLGIKNIVVHAADIPSTDKQKKNKTDLHDSRAIAEHLQKGNLEGIYVLSREQQELRSLFRLREGKVKDVTRANNRLKSCMAFFGLVLPESINKKEYLSLRALAWLDNYQMVTPAGRITLQQYTRELKYQRTQLYQLTCLLRKQIQDTDTKSYEYLLSAPGIGGITAMGLMAEIGDFGRFDDPDEYCSMLGLCPWEDSSGDTIKTKGMQPRCNRHLRPLLIEASWKAIRKSPLLFAYYSKHAARNNKAAIVKVARRLALIARALVIKQQLYQPDYLKEKNKEPKPVKTASKRFFSGITEQHEIKQPGNVLMSWPG

SEQ ID NO: 473220 - protein, 387 aa, unidentified
MPQPNDLSRSLVALDQNSTIIAVIEMSQSSWLVAGMLPGIERQPRKKLEPSPERLLALLQRWQDEAIRAGRTITRIALAFEAGRDGFWLARWLEARGVEAHVIHASSVAVSREHRRAKTDRLDTELLKRGFLGWLRGERGHCSMARVPTIAEEDAKRPNRERDCLVGERTRIVNRIKSTLARLGVRNFKPTLRKAAERLATVHTPEGMPLPPNTLAELQRDMARLGFVVSQIRQIEEARRKRLEQQPESGPHAMVRLLARIVGVGVETADLLVHEVLSRPMRDRRAVARYAGLTGSPDESGARRREQGLARAGNARVRRGMIQLAWRFLMFQKESALAVWYRARTADSRSGTRKTMIVALARKLIIALWRFVTAGEPLEGVVLRPAS

SEQ ID NO: 473221 - protein, 350 aa, unidentified
MVYIGVDLHRKKSQIAALDQDGQLLFNRKVRTGPGEMQQLIDELRPQPIEVAFEATFGWGWFADLLAELGIPAHMAHPLATKAVSSARVKNDAVDAKTLAHLLRTNLLPEGWIAPPEVREARRLVRMRASLVRLRAKLKAQVHALLGEHGIQPDVVDLFSNKGRALLRQLQLPTVSKSRLETCLRLIDEFSLEIVIAEREIYQTIKGDERIKRLLPIPGIGPIIAATILSEVGDIARFATADKLCAWAGLTPSEHSSAANIRRGHISKQGSRWLRWVMVEAAVHAFRDVELRQLFIRIARRRGAKIARVAVARRLLTLVYYALRSESGCRSYPISSNPKVEARSLAVMAS

SEQ ID NO: 473222 - protein, 429 aa, unidentified
MTQDGEAVWLGIDWADEKHRWAMRIDGETRIQQGELEHTPEAVEQFVSALAVRFPGRQVAVALEQSRGALMFMLGKYAHLVLYPIHPNTVDHYRKSAFPSGAKSDPGDAALILDLLYRHKERLRPFHPDTVETRTLQLLVEARREAVDDKTRYLNRLTSQLKMFFPQMLDWFSTPDTVVVGRLLLNWPTLKDLQQARATDVADFLGEHRIPDSRIDTLQQLIAQAVPAVKDAAVLEASVLIVRRIVHQLETLREAIAEHDKKIADTAKSHPDYGIFSSLPGAGPAMTPRLIAAFGTQRDRYPTASAIQCYAGIAPVTESSGKQKWVHWRWACPKFLRQTFHEWAWMSTRKSIWARAFYEQQRERNKSHHAAVRALSFKWLRIVFRCWKDGVPYDEARYASTVQKRTPTRNVGVHGKNVLGFTKFDGLSC

SEQ ID NO: 473223 - protein, 397 aa, unidentified
MYIVGIDIAKRKHEAAVIDGEGAVIIKPFSFTNNCSGYNRLLAMLTKAKLPLDEVSFAMEATGHYWLALFTRLQKEGFRVQVINPVQTNSIRSFYIRQAKTDPRDALLIAEVIRFGHFSESTLHPENIYELRELCRGRHAIVSMQADVKRKAVALLDQVFPEYETAFTNMFSDTSMAILQTCPTPKELSEMPLEELCHLIEVSSHKRFRMAKAQELQELARNSFGFAMAGDVFSTMIRLYAKHLDFLKQQVREMDRKIAEIMETLDTPITTITGIGPTLGAYILSEIGDINRFSSAAKLAAYAGIDPTMRQSGEYNGVRNRMSKRGSPYLRHAIWLAASSAVLHDPALKLYFQKKRDEGKPYMASVGHACRKMVSIIYAVMRDNKAYTPCIPNEISA

SEQ ID NO: 473224 - protein, 341 aa, unidentified
MNFIGLDIHKKTISYCVKDAAGEVLAEGTILSTRQSLDVWMRTLCEPWTVAMEATMFTGWIYDYLFPHAAAVKVAHPLMLRAIAAAKKKNDRIDACKIADCLRCNFLPECYMASTEIRERRRTLRYRKLLVRQNVQLRNKVSQMLMESGVVYNKQKLHKVGYFKELMTTNPDIREGLRPLLTICRETIVRIGKTEGALVRSLARDPLLSDRVQRLMTIPAVGPITALTWVLEVDDVARFGSVKQAISYCGLCGAERSSADMVKRMPISKQRNKHLQSVLVEAAKLGPRLSPDLALVYETEKQKGHANRATIAVARKLVAYLLAVDRSGREFVVAGERREAA

SEQ ID NO: 473225 - protein, 343 aa, unidentified
MKHYAGLDVSVKETSVCIVDETGKICREIKVVSHPEDLLQLLQDPVWRLERIGLEAGPLSQWLFEGLAQAGLPVVCIETRHAKAFLRAQINKSDRNDARGIAQMMRVNLFRPVHVKTLSSQKRRALLTARKLLQEKALAVENDIRGLLRNFGLKVGAVGTVRFEARIHELIESMPDLIEVIQPLLQARRELREHFATLHRKLLALVRNDEVCRRLMTVPGVGPVVSLAFVATIDTPARFRSSKAVGPALGLTPILHQSGESSRVGRISLCGDAMMRTLLFEAAQIILTRASRWSWLKAWAMKVAQRRGRGKAVIALARRLATILHRIWCDGTEFRWTREAQAM

SEQ ID NO: 473226 - protein, 392 aa, unidentified
MYIVGIDIGKNHHEASIVSPEGKQIGRSLRFATTHKGADSLMSFIFKNIGNSPCVFDMEATGHYWYPIYSFLKAKGYTIYVINPIQSDSLRKMYIRQTKNDSIDSFLIAEVIRFGQFGTTSMADENILAMRQLCRYRDSVISSRTEIKLRIGTIMEQIFPEYEKQFSSLWVSTSMGILEKYLTPENIENAPIDELFEIIKDKSHNRLTRAKAISIKEAAADTFGIKIAQDAFSFQLKQLIDRMNFLDKQIEALDCQILEYYEKFDCYLHTIPGIGIIGAATILAEIGDISRFKNSSSLIAFAGIDPTVRQSGEFNSTHNHMSKRGSPYLRHAIFLAATTCSFHNSPLNAYYKKKRDQGKHHLTATGAVARKLTTIIYAVLRDSKPYEPKKFC

SEQ ID NO: 473227 - protein, 338 aa, unidentified
MAIVGAFDVHRRQITFDYTDMDSGQVWRGRIVGCREMLRSWLARFAECDDVVFAVEACTGWRFVTEELQRAGIEVLLAEPAETAAARGRKQRAKTDRTDARHMRQLLIEHRLPLSWMPPEQVLEMRGVLELFKDLRQDHTAWVQRVQAVLFHHGVAAGKLDDPATRQRLQAGIGLSAAGHQAVLTGLRVLDGLDAELVGLRRQITAFARRQPGCAALQQQFGVGAVTATAIWSQFGDTRRFSASRKAVRHTGLDVTVYSSDGKRSPGHLSRQGSPLLRWALFEAGKCAARPASPDYAYYTQVKQRCGGNRAALSVARKIARRSHHILRELGDRALTPV

SEQ ID NO: 473228 - protein, 369 aa, unidentified
MEHRSMFVGLDVHKETIDVSIAESHRDGEVRHYGVIASDLEPLDKVVRALRAPDRILRFVYEAGPCGFGIYRHLTKRGEDCVVVSPSMIPKRSGDRVKTDRRDSLMLARLHRAGELRAIYVPDDGDEAMRDLVRTREDAVGVGTQAKYRLKAFLLRQGRRYPGREGWTLPYRRWLTDLSFPSAAQHIALQEYRDAIGETEQRIERLTEQLRQLAPTWRWAPVVAALQALRGVSFITAIALVAELGDLTRFRHPRELMAYLGLVPSEHSSGPSVRRGGITKAGNPHVRRLLAESAWAYQGIPRIGRPHAYRQEALPKVVCDIAWKAQLRLTARFKRLVARGKPKPKVATAIARELTGFIWAIAREVSPAP

SEQ ID NO: 473229 - protein, 437 aa, unidentified
MTRPTGPRWVGIDVSKATLDVAILPDEVTFQLTNDATGWEQLVTRGELATVQGIVLEATGSYHLGVTLALAGADHPPAVINPQRTHAFMVSEGMRSKTDRGDARLLARFGQQKQPAPTPVLSENARILRDLVGCRDDLTKHLVMEKNRRGIASAHVRDVHDTMIAFLIQQIAEVDQRIAALIAADAELTARAAVLRSAPGLGPVLSAVLLARLAELGQRDPKTLASLAGVAPHARDSGTRRGARTIGGGRPAVCKALFQMAQTAVRSNAVMRALPAPAAADAPQTRRDRLCPADAGHPQCDGPQGIDLAGDRGRAGPVSARSGLTPNTVTTNTRRRGGGRALFDATRPRPVSSRGSKATRDRPVPQDRSLWRHTPRGFVGCTYEAPKAATRRGSWDDMGRKWRLGSAACRVDRSQSIRPIRGPPARRGSPPRMHRCG

SEQ ID NO: 473230 - protein, 325 aa, unidentified
MDIPAIGIDVSKDTLDVSVVTGGKPVGKQFANTEQGWAQLAGWLAHRKLGQVHACLEATGRHSLGVALALHAAGHVVSVVNPAQIRDFARTRLGRNKSDAVDAGHIREYGALFRPAAWRPPSLALRRLCELQTMRAGFMASRIEWQNRAGSLGGDAAAHDLATATIAHFVAQIAAVDRAIADTIDNDDELRGKRDLLLSIDGVGETLAALVLAELPGPDVIARSAQAVAYAGLNPRQFQSGSSVNRPTRISKIGNATLRTGLYMPAMVAMRHNAAVAALAARLRAQGRLTPKQILIAAMRKLLVICFGVIKTGARFDAARAMPAA

SEQ ID NO: 473231 - protein, 382 aa, unidentified
MTQPAKQHFIPLEFDLFAGLDVDKTSLSVTFTDHGNTYRSLKMPYGADSLLNYARKQYPGQKMAFVYEAGPTGFGLFDDLTAQGQVCLVVAPSMVPRAPGQRVKTNRLDSRQLSEGLRGGQLRSIHVPSSTYRQLRHLVQLRDSHVGQLKAAKLRIKALLLYEGIAFPDAPPTNPWSNKVLRQLGQLECNPTVRFKLNSLLGGLDFHRLQAAATHKEIRRFCQQDPDLKASLRYLTSIPGIGWIVASHLVARLGDWRQIQNVRQIAGFLGLVCTEHSTGDRVQRGAITRAGDARLRNKLIQAAWRATRKDPELDRFYWRIYNRHPKPVAARKAIVAVARKLTTRIYAVLKQQRPFAVRSAPLTPEETTAPGDASTDLRRQTE

SEQ ID NO: 473232 - protein, 373 aa, unidentified
MPKYSTAFGMDVHLRSTTVCALDADTGEAVARRFPGNPWGEIAAWMDGFPGPSLAAYESGYLGFAPQRELSALGVDCAVAAVSKIPRSAADSASKNDRNDAARMAKAILAHDISPVWVPSPEVEGIRDLAGAYDGATARLATAKQRLLAFLGKRGFAYGGTTPAGNPRRCWTYDFLRWLDKVRPEDDGGVRTLAALRNEVEAAAEARADLLSEYRAAVDASPIAAEVAALQSIKGCAFALAAAFSAEVGDFTRFRSGRQVTAYFGLAPSQRSSGDSVRLGGISGAGNALVRKLAVEGSWCYAAARHQPKLMPRDAGVPLEIRMHGRKGSERLLRRREEMLARGMPAAKANAATAAELVRWLWALGMMCREGAE

SEQ ID NO: 473233 - protein, 341 aa, unidentified
MVHVGLDLSRTRLDVHVMDEAGTPLAVTTAVPDNGGLAALACRIAGFNEPVHAAIESMNGARFVHDQLEMAGWQVTIADAQKVKGLAPLACKTDKIDAWVLAELSRRDLVPAIWLPTPAVRAERERARWRLHLVRHRTALKNRIHATLLAFGHPCPVSDLFGVGGRQLLHRLELPEPWAADTVAAVHLIDQLDAEIAGCERALRKMGADHRYVPLLMTTPGIGWVLGYTIAAEIGDISRFASPTKLAGYTGLCPRVYRSGGKDHRGPLAKNGPKYLRWALIEAAVHAARHPVYAERYRRTKTRLGRQRGPKVAQVDLARRLAEAIWHMLSTNQPFAPAGAA

SEQ ID NO: 473234 - protein, 502 aa, unidentified
MVPGRRLYIGEALRSSPLDQNPQTASLGGRAQKGWGKEMTGKHEVESSEGSRRQLQGLPVVRRNVAGIDLGSERHWVCAPTVDGSGREITSFGATTPELIRLAEWLKQRQVESVAMESTGVYWIAPHEVLEAQGLQVLLVDTRQLARVPGRDKKTDPTDCEWIQRLHSCGLLRSSFRPEEAVCMLRTLVRDKANLVAECGDWLRRMQKSLDQMNVRVHRAVSDLDGVTGMAILRAITGGERDALKLAKLRDPRCSKTEQEIAEQLSGHWREDHLFSLQQALNMYDAVQERIAAYEKEILRKLGDMEREEQRGQTAPPLQNANKTKAIKKRGQEPKRQALYRMSGVDITHIDAIGVETVEVVLSEYGPDLSRFPTEKQFVSHVTLAPHVPTSGGKPLRKRKRNSASTRVAAALRMAALSLRHSQTALGAYYRKMAQRLGGDIAVFATARKLATLIYRLLRWGQPYVDEGAKAYETRYRQQRIGRLAATAKALGYELAPMLESA

SEQ ID NO: 473235 - protein, 355 aa, unidentified
MDSTKYIGMDVHKESISIAVRNDVGKIVMECVIETKANIILDFIHGLRGELQVTFEEGTWAAWLYDLLKPQVTKLVVCDPRKNASMREGNQSDKIDARRLAELLRLNHLSPVYHGEHGLRSLKELVRSYLTITKDLVRVMTRVKAIYRSWGIPCTGKQVYAPRHRAEWLGKISELGVRRRAEFYYQQLDALRALRQEVRRDLLRESKKHPAWKRLCQIPSMGPIRAAVLLGVLQTPHRFRTKRQLWTYIGFGIETQSSADHRSVNGQLQRTKKQICIRGLNRNCNHDLKNLFKSAAIVASSKPGPFQEFYTALLTKGIRPEMARLTLARKIATIVLIVWKRGVSFDAQHLKPQTA

SEQ ID NO: 473236 - protein, 340 aa, unidentified
MYYIGLDVHKRTISYCVKDAAGHVHQEGKIGSTRRELDAWIKTLPQPRTIAMEATIFTGWIYDQLLPHAEKVKVAHPLMLRAIAAAKRKNDRIDAGKIADCLRCDFLPECHMVSTEIRDRRRTLRYRNLVLKQMVQMKNRVSGLLMETWVSYNKHKLGYFTELMSSNDEVSESIRPLLKLSRETIVRSQKLDYALVSSLERDPLLGERLERLRTIPGVGPITALTWALEIGDVSRFQSIKQAISYCGLCSAERSSADKLVRMPISKQRNKHIQQVLVEAAKLAPRYNHELALVYEREQQRGNKNRATLAVARKMVAYMLAVERRKQDFVPAEQLGGTAAA

SEQ ID NO: 473237 - protein, 388 aa, unidentified
MNRIIKIGMDVHSKNYTLCAMEPTIGAKDRIFGEVQVAPDYKEVICFIESLKMKLGFCDDYSIECGYEAGCLGYTLYHQLTGAGVKCVILAPTTMLTQQGKRIKTDKRDARLIAQCLCYGGYHPVYIPTGEDDAVKEYLRMRDDHKLALKKLKQQINAFVLRHGQQYSGTKWTIKHVTWLKKLELDPMYRETLDEYLASCEEQEAKIERYDKRIEEIASEARYQENAKKLGCFLGIRTHTALSLIVETGDFKRFAKGNTYAAFLGLTPGEHSSSDNVNRLGISKAGNTHLRCLLIEAAKGICKGAIGHKSKELRARQSGQPAEIIAYADKANTRLRSRYYKLIRHGKKKNVAVAAVARELACFIWGMMTGNISIRPKGDTSGPAVSQG

SEQ ID NO: 473238 - protein, 398 aa, unidentified
MISVGIDVSKGKSTVCIMKPGGEVLSAPFEITHTKSELLDLINIIKSQNEEVRVVMEDTGHYHLPVATLLVDNDIFVCSVNALRMKKYCSQSIRRAKTDKIDSVHIASYGIAYWNELQSIPCSDDIYKELQLLARQYYQSVALLVKAKVNFSNLLDRVMPNIQSIITDNSSNSKLTDFVARYWHFSRILEMGEKRFISDYCKWAKKKGYRMREIFALAQNGIPVLPSSQSTKIVITEAVRVIHELESSRDTILAQMQSFAKTLPEYSVVREMPCIGDVLAPRIIAEIGDVRRFKNKHSLIAYAGIDAPPYQSGSFNATERHISKRGNSYLRKTGYEIMQSLIKHKPENDSVYDFIVKKRCEGKCAKEVMIAGLNKFLRVYYGKVTELYDNLEYCNLTA

SEQ ID NO: 473239 - protein, 350 aa, unidentified
MVTLGGDSHKRTHTLVAVDDNGRQLAQRTLLATRAGHLEALQWAGRWPERRWALEDCRHVSRRFEADLLVAGEVVVRVPSKLTGAARKVARTTGKSDPIDALAVARAALREPDLPVAKLDGPGREVRLLLDHREDLVGERTRTQNRLRWHLHELEPEIEIPARTLTRYHTLAEVEQRLNSHHGVVAAIGHELVIRVRELTRRINELEGEIERRVSGLVPTLLQLNGCGALCAAKVVGEAAGVSRFRSRAAFAMHNGTAPVPVSSGNQQRHRLNRGGNRQLNVAMHRIAVTQLKRPGPAQDYIAKRMAAGNTKTEALRALKRRISDEVYRRMLQDERASLGSKVGACEAAA

SEQ ID NO: 473240 - protein, 343 aa, unidentified
MSYSVGLDVSQKTTAICVIDANGERFWRGVCPTDPDLIETSVRRHACDDANIGVETGAMTPWLVHELRGRGLQVICLDARHARAALKMQINKTDQNDAEGLAQIVRTGWYRSVHVKSLDAHRARALLGARAQLVGMRTRLSNNIRGILKTFGVLPGGVRGMRFDRRVEAQLVERPDLEPIVAPILTIWRSLREQIAAFDKMIRALVKESPDCRLLMSVPGIGPLTGLAYVSTVEDPRRFGSSRSVGAHFGLTPRQYQSGEIDRSGRISRCGDGLARTLMYEAAVVILTRLKRPCSLKDWALTIARRSGIGKARVALARKLTVILHSIWRSGEPFSWSTPASAA

SEQ ID NO: 473241 - protein, 358 aa, unidentified
MTMLAEKSDGIEEVPLLDAVVGGDTHRDTHQLEMLTGQGVLISTISIDNDADGYERAIAWIVEHAPGRRVVVGLEGTRSYGVGLSRALQAAGLDVVEVEQPKRGQRRRGKSDPIDAHLAALAVLRMPVDRKVLPRNDGDREAMRILLVARKEISTVRTGQINRLRALLLLGDDEDRALCRGAMSKAHLDQIARRRGRQHETTEQAVRRGEARRLAVAIRAADLELTANEKGLRALVKAFAPGLLDRKGVGPFSGAQAIVSFSHVGRCRNDAAFAALAGASPLLASSGRTNRHRLNRGGDRQLNRALHTIMLTRWRDCPRTRAYIERRQKQGLSDRDIRRCLKRYIARELFRALTVAGG

SEQ ID NO: 473242 - protein, 478 aa, unidentified
MLGLRRAVGTEVVYWLGANKPAHKLDPGFLEHPRLSPRAVIGPGARFLDFLFTGAPRRRRSPEEEEMELLHRRCCGLDVHKETVVACLRLVSDGKVTTEVRTFQTTTADLLRLSEWLAANECTHVAMEATGVYWKPVWHILDDGDFKLVLANAAHVKNVPGRKTDVNDAMWLAELLAHGLIRASFVPDAQTQEMRNLLRTRKQLVREQSSHVLRVQKTLEDANIKLDSVLTDLMGKSGRAMIEALIAGETNPAKLASLADRRVKASPEEFREALRGRVTKHHRFLLRLHLNQIDALDTAMATLDAQVEANLGPFRTAVELIMSIPGIKNLGAHVIVSEIGIDMSRFPSDAHLISWACICPRNDESAGKRRSNRVRKGGTWLKTTLVQCAWAAVRKKDSYLQAQFYRIKARRGPKKAIMAVVASILTAIYHMLKDGTMYKDLGSNHFNRRSTDQQKTHLIKRLADLGYTVEIKPTMAMA

SEQ ID NO: 473243 - protein, 321 aa, unidentified
MRCHTSSLVTDGIVIHAALELGKNSWLLAIEASEHNRPSLHHVKGGDSSTLLAKLHKACEQFERRTGKPAKIVLCYEAGYDGFWLARLLESHGIDCLVVDPASLQVDRRARRVKTDRIDVEAILRTVIAWRRGERHACSLVHVPSRDEEDLRRSHRERDRLVKERTAHTNRIKGLLFTQGIRAINLRRRRKPLAIDFADLVTGDGRSIPPRLKCEMERELQRLALVDEQLAITESERDQVTRQCEDSEKKRHQLTLLRGVGETGAAILAREVFYRTFSNRRQVGSYLGLAPCPYDSGNSTRSQGISRAGNARARSTMIELA

SEQ ID NO: 473244 - protein, 306 aa, unidentified
MRSTVAQSVGVDISKDALDVAIHPSGESFRVTNNSEGHRALIKRLKEFDIARIVFEATGAYHRLLQQALVEAGLPWVKVNPRQARRFAQATGKLAKTDRCDALLLARMGTALDLEPGAPASKTVEAMKELVNARDALVKDRVAALNRQAIAVSPLIKRQLAQRLRQINGQIEAVDKHLKMLRDADSDLCQRFDILTSIPGLGEATANVLVVETPELGRLENAQAASLVGLAPLARDSGKTHGKRSIRGGRPRARQALYMPALNAIRCNPEFKAKYKAMVKAGKPAKVAIVAIMRKLLILANALICD

SEQ ID NO: 473245 - protein, 330 aa, unidentified
MEYGAIDLHKRESQIRIVMEGGEIVDRRIATTRERLTSVFWGRPRMRILLEPATESEWVAQHLETLGHEVIVADPNFTAMYGHRSRRIKTDRRDVAALTEACQRGCYRVAHRRSAARRTVQAQLNIRRELTEARTRAISLTRALVRGAGFRIRSGSTDSFLTRVAALDLPPSIANTLAPVRRVIELLNTELTQADGTFATHVVEDPVVRRLTTLPGIGPITASAYVAALDDAARFGGAAQVTSYLGLVPREYSSGEQQRRGRVMRSAHPYVQSLLVQAAWRIVRVKDPRTAAPHVGRRDRTTAGKEDCHGGLGATPGAAALCHVARRGRV

SEQ ID NO: 473246 - protein, 418 aa, unidentified
MGPYGVRETKPLPREPSFPESQFRDVQVNKNPPKHKGLGGTSTIRVEESTIQLYFTGPVTEIDSPECLRFLGRTPGLSISVAVLNAEGKLMMQSVVATKATAVLDLLKGLRGELHLTFEEGTCSAWLYDVVLRHVAKVVVCNPRKNALLKSGNKSDQIDARKLAELLRAGMLSPVYHGEQSTRTLQQLVGSYTALTEDTGRAMRRIKALYRSQAIACAGKKPFGKRHRGEWLARLTDSGQRRRVEWLYQELDAVQILRREARQAVMVECHNNPAAKLLRSMPFFGPLRAAVLIARVQTPHRFRTKRQFWTYCGLGLETRSSADDVEKDGQIMRRRKPVYIRGLNWNYSHELKNVFKSAATTASAMEGPFREFYEARVASGMLPAMARLTLARKMAAIALILWKKGETFAAEHLKLQAA

SEQ ID NO: 473247 - protein, 337 aa, unidentified
MKYCGIDLHGNNNWVVIIDEQDRVLYSRRHANDLPRLLAVLTSHRSELCGIVVESTFNWYWLVDGLQEAGYRVLLANTAAIKQYDGLKHRGDESDARQLAHLLRLGLLPEGHIMPKAARAVRDLARKRMQLVQQRTAQILSIESSLSRHSGWKLSSNRIKCLRQADLDEMRLDEMPMLGLKANVAVMQALQTQIDGLEKVLADYCRAEPGYQLLRTVTGIGEVLATVILLETGGIERFAEAGNYASYCRCVGSAHLSNGKKKGEGNTKNGNRYLAWAFVEAANFAVRHCEAARRFYQRKKAARNSIVAIKAVAHKLARACYHMLKTQTPFCVERCFA

SEQ ID NO: 473248 - protein, 331 aa, unidentified
MGLYIGIDVGSRSCAMSWRDKGRVAGSWEIIQTPKGRKAAVKKLLSLKPVAVVMEATGVYYLDLAIELAAAGLPVSVINPKSFHNFAKLTLTTSKTDGIDAQLLAEYGERMTPRLWVAPTPMQLELRAIGRHINRLTCHRTRAKNELHALQATETSMALLIEDEEEAIAMFDKRIERFRVAGRALISTCPTLSAQFKHMVAAPGMGEVSVFAALAELTTLPTTLKSSQVSRHAGLDVRLTQSGTSINKPGRMSKAGNAYLRSAMFMPAMTAVRCDPYVKAFFEALVGRGKRRMQAICAVMRKYLTGLWACMRSGEDFDTAKLFSEKHFVKA

SEQ ID NO: 473249 - protein, 372 aa, unidentified
MSQSSTLYIGMDVHKESIAVAYVAQAHGAEVISLGTIGTRQCDIDKLIRQLRSKSKQLVFVYEAGPCGYWLYRYLMKQGYVCWVVAPSLIPKKPGDRAKTDRRDAMQLARLMRSGDLTPVDVPAVDDEAIRDLSRAREDTLRDLKAAKLRLKAFLLRHDIRYTGRANWSPAHLRWLSEVVCPTPAQQIVFQEYVQTVTEQTERLGRLELELHEQVQTWRLAPVVEALQALRGVQFTVAVTTVAELGDLTRFDNPRQLMNYLGLTPSEYSSGGRRQQGSITKTGNTHARHALVEGAWAYRYPATVSRHLQLRLEKLPTAIQAISWKAQVRLCKRYRQLMAKGKNANQVVVAIARELSAFMWAIAKQVTVPPKA

SEQ ID NO: 473250 - protein, 420 aa, unidentified
MKTIPAKKMKFVNEKTLIVAVDIGKVSNQGYGRCPNGEEVKPFEFFNNGEGFKKFWERIWQAKEIYHLEAVVVGFESTGPYGEPLVQFLSKRPVRLVQVNPMHTKRLKELEGNSPEKTDRKDPKVIADIMGLGHALTVIIPEGSAAELRRLTQARERAVQRKTVLWNQLQSLLALLFPEFLQVMKDMKTHSARYLLGHYPTPQEICRLGLEGLTALLKRVSRGKLKGERARAVYEAASESVGLQEGQLAICLEIRELLGAITATEGFIAVVERGMAQGLEQIPYSPFLLSVRGVGKVTVAGLIGEVGDFRKFHTLSEIMKLAGLNLFEISSGQHKGRRHISKRGRPLLRKLLFFAAINMVRQNGLMRPFYQRLVGRGMRRIKALVAVARKLLGILFALVRDHQVYIPDYGKKGTVELEAA

SEQ ID NO: 473251 - protein, 418 aa, unidentified
MEQERTYRRAAGIDLGKRVMSVCIRTPGRAGAVDLDQATYATITSQILALRDRLADARVQVVAMEATGDYWRPVYWILQATLPGVELLLVNPAHVKILKGRKTDRADAAFLARQAAAGNLRGSFIPPAPVREVRDLARRRTTLTTLCASEVQRLEKTLEDTGIKLSSVISNLVGATGRAILAALSAGTRDPAVLAEMADARIKASREELIEALTGHFTDHHAYLVTDHLEEIDHYTGKIRALDQRITQLLDDPDKHRDLENLDTIPGIDTTAAQIIVAELGHDMAPFPTPGHLSSWLGLAGGHNESAGVKRKAKPADGNSAMRRILGIAAFTVMGHKGTYPNARYHRLRGHMDSRKAQVAIMHDIAIAIWFILHDKVPYRELGPDYFARRDPNKITRRIHALARSIGATIEIHPTPTT

SEQ ID NO: 473252 - protein, 411 aa, unidentified
MEVVYRRCSGVDVHKESISVCVLLMEEQGGKKQIRRFGTMTRDLLELRLWLQQLGVTHVAMESTGVYWKPVWNLLEGQFELLLVNAQHIKQVPGRKTDIRDCEWIADLLQHGLLRGSYVPKQEQRDLRDLTRYRVRLNEDKTRLANRIQKMLEDANIKLASVATDVLGASGRTMLQAIAAGEDDPERLAQMARKGLRKKLPQLRLALQGRIRDHHRFLLRQLLEELRFTEDKINELDQRIQQCMLPHHHAISLWTSMPGIRMTTAWSLVAEIGTNPEQFPQGSNLASWAGMCPGNNESAGRRKSGKTRRGNRWLRRALNQAAWAAARTKNTYLAARFHRLAARRGSKRAIVAIGHKILVLAHYMLQHNTPFRELGAEYCQRLRTPSLSQSLVRRLQRLGFQVTLTPTQQVG

SEQ ID NO: 473253 - protein, 426 aa, unidentified
MPYRIAGVDVHKKMLAVVVADVEVEGEWRFDRRQFGTTPSQLRALAEWFVEREVEEVVMESTAQYWRPVWDTLERVWQPARRRAEAGPMAGALHLAQAQSNNAPHGRKKDFPDAERLVKRLVARELTLSFVPDATQRLWRTVTRRKYQVTCNRVQLQNRLECLLEEMHIKVSSLVADLIGPSARRMLHAVASGETDPATVAALGSPRLRATPEQLRDALGPCADLNRVYRRLLAMILDELDVIETHIQALDEELAGLLRVHQDAVQRLAAVPGLGVDSAQQIIAEVGPTATTFPTAKRMASWVGACPGHDESAGINHSHRSPSGNRQMRRLLNQAANAAAKTKGSVFESVYRRLVIRLGHKQTIGAIAHRLCRLVWKILHDGVTYEERGPAVTRARAQRRAAKMVRELRSLGYRVERELSPASASA

SEQ ID NO: 473254 - protein, 391 aa, unidentified
MIFVGIDVAKDKHDCFILNSEGTVLADVFTIANNRIGFETLLSRIQSCSQGESKIKVGLEATGHYSYNLLGFLLDSGLATYVINPLHTNLYRKSLSLRRTKTDRIDARTIAMMLMSDVDLKSYSNTAYHNEELKSLTRYRFDKVKERAKLKSSVARLVNILFPELEKLVSSLHIAVVYALLSNYPGASYIANANTEELTETLCTASKGRYTKSKTAEIQVAAGVSIGSKMPAKSMELKHTIALIRELDKEISEVESAIDKITSQMDSPIFTIPGIGRHMGAMILAEVGDFSNFASADKLLAYAGLSPSTYQSGQLQNCYAHMEKRGSRYLRYALFNAAKYVCLWCPTFSAYLEKKRSEGKHYNVAISHAAKKLVRLIFAMQCSGKAFLADY

SEQ ID NO: 473255 - protein, 406 aa, unidentified
MKSLSGGIDIGSEHHHVIIMGDEEKILYDQKVSHKFSEFHRAVKEFREIEEREEGKISFAIEGKNGYGAPFDRILIDRILIENGFTLYNVDNLKLKRFRDVFGVEWRNDQRDAKMLAKMLRLRDYLDVKDEKAFIRVEKVSEVNERLKILSRHQQTLIDEKVRIQNRLRKRLLEVCPDILEVGDVDSKKMLRFLVKYPDFSSYKRLTMKALLKIEMIGEKQAFLMLESLRKIKYVEELADTYRTIILSYSRRILELKEEIEILDKKLEEIGERSFDVKRLKTIPGVGTKLSSRLIGEIGDINRFKTERQLAVYCGVACVDNISGKQKMTKVVYKANKIGKAAMIGIAGCTIRYVAESRAYYAKKRAEGKKHNHALRCLARQLIKVIFKMLKEERDYILKEEMKKAA

SEQ ID NO: 473256 - protein, 378 aa, unidentified
MPSENTIRIAIELSVSSWLVAVRLPGAEKSRLHRIDGGDTTALLALIVKLRSRTSAKLGQTVDVACCFEAGRDGFWLHRWLTAHDVVAYVLEPTSILVNRRARRAKTDRLDAEGMLRVLATWLGGDRQVCSMVRVPTPEEEDAKRPHREREHLVQERLRIENRIEALLFTQGIRGRPSLRSWERDMAELRTGDGRALPSLMQAELNRLRRRLVLTLELIREMEAERAEAQAATIEDTVTRKITALQRISGIGANFSTVLVREVLYRSFANRRQLASYVGIAPMPYQSGGMDRDRSISRAGNPRARTTLIQLAWLWLRYQPGSALAAWFHKRVGTLQGRTRRIAIVAMARRLLIALWRYVETGVMPDGVEIRAAAEAAA

SEQ ID NO: 473257 - protein, 356 aa, unidentified
MTTSDGVAVVGGVDCHSRVHHAVALDETGRRLGDRGFPATSAGYADLLGWLRGFGTVTVVGVESTGSYGAALTHFLLQAGVRVVEVNQPHAHLRRRRGKTDAVDAEAAARKALSGEATAIPKEMSGAVEAIRQLRIARRSAVSARSIALCQLGDLIVTAPAALRAQLTRKTLPGQAAICVRFRPDRRWLTDPMQAAKFALRTLARRIAALDAEIAQLDEHLERLVRAVAPRTIALLGIGPQHAGQLLVTAGQNITRLQSEAAFAHLCGADPIPASSGKTIRHRLNPGGDRQANSALHRIAIVRLRYCERTQKYAKRRIAEGRSKREVLRCLKRYIAREVYRTLCADLARLDAAPAA

SEQ ID NO: 473258 - protein, 353 aa, unidentified
MTSTKYIGMDVHKESISIAVRNDGGKIVMECVIETKANIILDFIHGLRGELHVTFEEGTWATWLYDLLKPHVTKLVVCDPRKNSRQGNKNDRIDASELADRLYMNKLSSVYHGGAGVRTLKELARSYLTISKDLARVMTRVKAIYRSWGIPCAGKQVYAPRHRAEWLAKITEVGVLRRAEFYYQQLDALRSLRHEVRRELLAESRNHKATKLLCQIPSIGPIRAALLIALIQTPHRFRTKRPLWKYSGFAIETHSSADYRKVQGQLERTQKQVSVRGLNRDCNHDLKNLFKSAATIASVKPGPFQEFYAALVAKGMRPEMARLTLARKIATIVLIVWKKGVSFDAQFLKPQTA

SEQ ID NO: 473259 - protein, 386 aa, unidentified
MKTVAGLDVHKDSVYLCILRENGEKIERVYGVLTPQLDSMRDFMAKNKVSEVAMESTSVYWIPIWRVLVDSFELKLVNPYFIRQLPGRKSDVKDAQWIAECVMKELIRGSFIPSPLVQRLRLYDRRIFEINAELVRKYSKIDAILQRCNIRLSNYVSNTDCKSYKAVVKQISEGVTSPQELLRHVHKRIINKHGEDTILAALTGVVSDAEIDMLAQYVAESAILEDNKNKCIEKMREICNSEFKEQMKNLQEIPGVSERSALTVLAEIGPDVNAFPSAKHLVSWCGFNPRNDESNKKIKSNKITHGNRFIRIASVQCAWAASRTKDCYFSKFYAFHTQVRKKFKLKVVVAVARKVLVCIWHILKFNVPYKDFEPQKSVTKDCIQFA

SEQ ID NO: 473260 - protein, 344 aa, unidentified
MDHFVGLDVSVKETSVCIVDDTGRIVKEVKAASEPQALLKVLGNPAYRFKRIGLEAGPLSQWLCSGLAEAGLPVVCVETRHMQAVLKAQINKTDRNDARGIAQMMRAGLYRPVHVKTLRSQKLRMLLTHRKLLQSKAIAIENDLRGTLRNFGLKVGMVGKVRFEARIKELVESLPDLTELVEPLLIVRRSLREQIVILHRRLLAIVRDDEVCHRLMTTPGVGPVVALTYRATVDVPARFRKSKAVGAVFGLTCARYQSGEIDWSGRISRCGDEMMRVMLYEAAQSMMRSKKWSWLKAWAMQIARRRGIKKAIVALARRVAVIMHRIWVDGTEFRWTREQAAAAA

SEQ ID NO: 473261 - protein, 395 aa, unidentified
MLLSEPSGPPQREVRTFGTFTHELLALADWLAEQQVTHIALESTGVYWKPIWNLLEDRFALLLVNPRHIKAVPGRKTDVHDAEWLAELLRHGLLTASFVPDRAQRELRELTRYRTSLINERSAAVNRLQKTLEGANIKLASVASDVLGVSSRQMLAAVVDGTTLEASALAELAHGQLRDKVPQLEHALSGRVGPHQRFLLAEQLAHIDALDASLERLSTEIAERMRPFDELIERLDAIPGVGRTIAEVLLAEIGADMTRFPTANHLVSWAGMCPGHNESAGKKRSGKTRKGSPWLRAALVQAAHAAARAKQTYLAAQYRRLTARRGTKKAAVAVGHSILVIVYHLLTDPDCTYVDLGPTYFDQRDPGTAQRRLIHRLEALGYHVQVTPLAESSAA

SEQ ID NO: 473262 - protein, 326 aa, unidentified
MEHELHYIGIDTAKEKLDVDVLRPDGRHRTKKFANTTKGHDELVSWLKGHKIDHAHICIEATGTYMEPVAECLYDAGYIVSVINPALGKAFSQSEGLRNKTDTVDARMLAEFCRQKRPAAWEAPHPLERALRALVVRHQALTDMHTQELNRTETAREVQRPSIDAHLLWLEAELKRLEKQIKDLTDDDPDMKHRRKLLESIPGIGEKTSAILLAYIGLKDRFAHARQFAAFAGLTPRRYESGSSVRGASRMSKAGHVSLRRALYMPAMVATSKTEWGRAFRDRLAANGKKGKVILGAMMRKLAQVAYGVLKSGVPFDASRHNPVAA

SEQ ID NO: 473263 - protein, 351 aa, unidentified
MRKIAYLAMDVHSKHCVLGDMDYKGNFKGTQTFPTSEQNVIKAVKAIKAKNKYLTLEEGNLAYWAAQVAAPYVTEVIPCDPKENALIYRGPNKNDKVDTRKLCRLLRLGELKQVYHPESDERAIFKAAVQHYMDLRDQQIALKQKIKAMYHHWGVIDVAGEAVYSTAKRNDYLCQIKHLEIRNQVSRLYYVMDQTESMQENALKAMKQLGRKYPEIKQFQKIPGIGEILAHFFDAFIQTPHRFANKSRLWRYCRLGVTDRTSDGKPLGFKRLDRSGIPELKSLSYQAWMSALRGDNEVRRFYTTSLQRTFSRVHARLNTQRKILATMYGMWKRGEPYNPKLFLDSPQSDAV

SEQ ID NO: 473264 - protein, 411 aa, unidentified
MEQIHDRVAGLDVHRDEVAVCVRRPGPRGGVHTDKARFSTTAGGLAAMASWLAECEVTLAAMEATGVYWKPVYYALEGRFELWLCNAHHVKNVPGRKTDMSDAEWLADVAAHGMVRPSFVPPPAIRELRELTRYRKTQIDVRAAEIARLEKVLQDAGIKLTSVASKVLTQSGRAIIEALIAGQRDPRALADLARGKLRPKIPQLTAALAGHFGAHHAAVAACILGHLDFLDAAIARLDEQVAARVADGYQPAARLLADVPGLERRSIEVIIAETGADMSRFPSPGHLASWAGLCPGNHESAGKRRRVATTPGNQWLRRTLIESARAAARTKGSYFGAQYRQIARRRGPNKAAVAVAHSLLDVIWHIFTTGEVFTDLGEDYFTSRQDKEHQARRLIGQLEKLGFTVQLTEAG

SEQ ID NO: 473265 - protein, 412 aa, unidentified
MNIVYERCAGIDVHKRSVVVCTITPDQQGQRHKQRDTFSTMMPDLLRMRQWFQSLGVTHVAMESTGSFWKPIFNVLEGHVEVLVVNAQHLKAVPGRKTDLKDAEWIADLLQHGLLRPSFVPPAFQRELRELTRYRGSVVEERSRTINRLQKILEDTNLKLSAVATDLMGLSAREMLAALLAGETNPTALAELARGKMRAKRDLLVQALQGQFKPHHRLLISEQLTHIDALDEEIERLSTDIAQRLLPYEAQLKRLGTIPGIKRRLAEVILAEIGPDMQRFPSARHLASWAGMCSGNRESAGKRLSGKTRKGDPWLRTALVEAAHAATHCKDSYLSAQYHRLVLRRGGKKATIAVGHTLLVIVYHVLADEKAYQELGGNYFDDYDRQAVQKRLVHRLEKLGYEVILAPTSPAP

SEQ ID NO: 473266 - protein, 402 aa, unidentified
MNAVGIDVSKGKSTVAILRPFGEVVASPFEVGHTGQELRALTKRLLALDGETKVVMECTGSYYLPVAYALQEAGLFVSAIHAKLIFSFDNDSIRRKKTDRADALKIANYALSKWLKLPLYVPEEDIRKLLKICSRQYSKYGKLKTMLKNNFIALTDHTFPGVNELFTSRVRADGHQKWLDFATKFWHCKCVWALSQKEFTERYRRWCKREGYRFSEQKAEDIYVSAIGHFCVLPKNESTELLMKQAVAQLNSVSIAQAAMAGEMLRLAQMLPEWPVVSAFYGVGGILGPQLMAEIGDVRRFEKKGSLVQFAGLCDEPYQSGKFNATGLPISKKGSPHLRKTLFQVMESILQNKPENDSVFQFLDRKRAEGKHFYNYMTSGSAKFLRIYYARVKQYLVTLGEQ

SEQ ID NO: 473267 - protein, 384 aa, unidentified
MRGNFIPREYDIFTGLDVSKKSISVTFTNHQGFIRSLNMPHKAEHLLNYVRKHFPDQKIAFVYEAGPTGYGLYDGLAAQAYPCLIAAPSMIPKAPGQRVKTNRLDSKALSESLRGGQLKSIHVPSPTYRQLRHLTQLRDVLVSELAGMKQRIKSLLLFEGIEFPPAPPGSQWSFMVKDKLRKLPCSGTVRFKLDQLLDSLEFNEKQVLKTITEIRRFCRKDPELSQCMKYLMTIPGIGWITASQLLARIGDWRELNNIRQLAGFLGLVPTEHSTGERVDRGSITRTGDERLRSKLIQASWSAIRQDGELRVFFRSVCRNHPREVASRVAIVAVARKLSVRISVVLMKQRPYEMREKVHSAPLTQEETSPQGTTRRLREPGEKNS

SEQ ID NO: 473268 - protein, 403 aa, unidentified
MNSVGIDISKGRSTIAVMRPFGEVVISPFEVRHTDSELSKLARRLKSLNGETRVVMEATGNYHAPVAKLLHDAGLYVSVVNAKLVHGYGNNDLRRVKTDRKDAVKLANYGLDRWLTLPRYIPEEDTRLLLKNCYRQYRQYSKVQTILKNNLISLLDTVFPNVNRLFSSPARADGSEKWVDFVAEFWHCRCVSEKSEKVFTNKYQRWCRKHGYNFSKEKAHTIYVEASGHIGVMPKSETTKLLVEQAVAQLRATSAALAALKHEMQSLASMLPEYPVVMDMFGVGPTLGPQLIAEIGDVRRFYSKKALVAYAGLDAPPNDSGDVTGRHKSMSKVGASSLRRTLFLVMGVYLQKSPLDEPVYLFMDRKRAEGKPYRVYMMASANKFLRIYYATVKAYLESLELTA

SEQ ID NO: 473269 - protein, 309 aa, unidentified
MDAKYVGIDVSKDRLDVHVRPTGEAFAVARDGEGLAALVARLQPLVPHLIAVEATGGFEVTVAAAIGGAGLPLVVVNPAQVRHYAQALGRRAKTDAVDAEVIARFAEATRPEPRPLPDEATQALADLVTRRRQIIAMMVAERQRAGRLPKRLKRSCERVVRVLEKELAALDQDIDDTVRGSPAWREKEDLLASVPSVGDITARTLIAELPELGTLDRRKISSLVGVAPFTRQSGRWQGNSFIGGGRPKVRAALFVATMSAVQHNPTIRAFRERLLAKGKPKMVVMVACMRKLLTILNAILRDRKPWQPA

SEQ ID NO: 473270 - protein, 391 aa, unidentified
MTKRKTETVNDLSRCLDPLDMDATLIGVIEMSQSSWLVGGIIPGVERQPLKKLAIDEHALLKLLTRWRGEAEKKGRRITRIAVAFEAGHDGFWLARWLAAQSIEAHVIHASSVAVTREHRRAKTDRLDTGLLKRGFLGWLRGERGHCKMVAVPTLAEEDAKRPSRERETLVGEASRIITRVKAAFVRLGIRSFNPKLKTAGAHLETLRTPEGESIPPNTLAALKRDLERHRIVKQQIREIEETRLERLAQAPSNGTHAMVRLLARVIGIGVETADMLVQEVLSRNMRDRRAVARYSGLTGSPDESGAKRREKGLARSGNARVRRGMIQLAWRFLMFQKDSALAKWYRQRTANAPSTRKTLVVALARKLLIALWRLVRDGVVPEGVRLRPAA

SEQ ID NO: 473271 - protein, 339 aa, unidentified
MHPASCKDEPTRDSRYAYDLGGMAMSTVKIWVGIDVAKDSLEVHIRPTDQAFAVPNTQEGVDALIEALAPIRPELIVLEATGKLEILVMGALADAKLPAARVNPRQAREFARATGRIAKTDSIDASTLAHYAEAIRPGPRELPEPEALELSDLMARRRQVVEMITAEKNRLKRMRPSLHAHIQAHISWLKNEKTSIEHKVEEIIKASDIWRELDLVYRSNTGVGKVVSHTLLAGLPELGKVNNKQIAALVGLAPFNRDSGLMRGRRSIVGGRAHVRTALYMAAVTAVRHNHTIKVFYDRLIAAGKPVKVALTACARKLLVILNAMVRDHLLSKAAGMAA

SEQ ID NO: 473272 - protein, 313 aa, unidentified
MARNVIGVDVAKDWIDVRPLGGKGERVAMEAAALRRFAERAAREGARVAFEATGGYDRPLAAALAAALAAAGVEHVRVNPGRARQFARASGVAAKTDRVDAGVLAEMAARLDLRPAVALEPARRALQAIATRRRQLVEMRKQERTRVQQTHDPLACASIGRVIALLDAEIRELEAQMAASVTADPGLAAAAGRMMTAPGVGLIVATGLLAELPELGQLDRRRIAALVGLAPFADDTGHRRGARRIAGGRPVPRALLYIAALHASRHDPVFRAFRERMRKNGLSVKQALVATARKLLTMLNAMLRTGSDYRPAA

SEQ ID NO: 473273 - protein, 343 aa, unidentified
MTKDTMIGVDLAKSVFQAHGASMTGQVRFCKKLTRVQFLRFMGDHPPAVVVMEACGSAYYWSREMVRLGHETKLIAPQYVKPFVKRHKNDAADAEAIVIAAQRPEMRFVEPKSEEQQAHAILFRGRERLIRQRTALVNALRSNLYEYGHIAPKGIGQIKRIEAIIEEPNSDLPDLMREECRDLLEQITEKTARIETKSERLKGLAAEADTARRLQTMPGVGPLTALAIEAFAPDMKTFKRGRYFAAWLGLVPRQYSSGGKQRLGRVSKAGQADIRRLLIIGAMSRLAWHGRRSIPEGSWLDRMMARKPRMLVAIALANKMARAIWAMLTKKEDYRNPAWAAVT

SEQ ID NO: 473274 - protein, 423 aa, unidentified
MCYRIAGIDVHKRMVAVVVADVAAEGDYEFERRQFGANPDELRRLADWLVAQNVQEVVMESTAQYWRPVWNTLERFWSVQCRGAEGAGPMSGSLLLALAQSNRGPRGRKRDFVDAERLLKRLVAQELVLSFVPDAEQRVWRTVVRRKYQLTRDRVRLQNQLESLLEEAQVKLSSLVSDLFGLSARRMLRALADGETDPGALAALGDRRLHASQEQLCDALGAATDLKSTYRQLVGMALDELQLLERHMSKLDQEMADLLSSHQDAVQRLAEVPGLGVESAHQIIAEVGAAARTFPSEKHLASWIGVCPGEQESAGVSASNRSPKGNRLMRRLLNQCAHAAVKVKGSIFEIVFRRLLPRLGFKQAIWAIAHRLARLIWKILHQGVRYEERGPAVNQKSRSARTAKMIKELKSLGYRVEPTQNPA

SEQ ID NO: 473275 - protein, 344 aa, unidentified
MGEVSTIGLDIAKSVFQVHGVDGSGTVVIRKRVSRVKILEFFAELAPCLVGIEACPSAHHWGREVGLLGHTVKLMPPSYVKAYLKRSKNDANDAAAICEAVTRPSMRFVPIKTKEQQTALMLHRTRQLLVRQRTMLSNALRGHLAELGVVSAKGRNGTAELLKIITDVEDDRIPPAARGILDVLARQYGAIGAEIGSIDKSILAWHRSCEASRRLAEIPGIGPIVATALVAEIGDWKAFASGRNLAAWIGLVPKQHTTGGKDRLGSITKQGNRYLRWLLVIGATAVIRYAQKHGTKNRPWLGRLMERRPAKVAAVALANKIARMAWAIMVHGDRYKEPKLLMAA

SEQ ID NO: 473276 - protein, 424 aa, unidentified
MRSRTVKVQGLLPVRIQKGIQPMQKQRSYRRFCGLDVGKSTHTLCIIDAQQNTLTPTRSFHNDQRGFQQLLDALQQTGRKHTVLIGMEATGHYWYSLHHTLTQQGYTVTVLNPIQTSRQAKREVRKRKTDKLDAHRIAVLLKNGQYRSALIPGELAMTCRQVTRLRYRLVRQQTRLKQLVQAHLHPVWPEYETLFNDPFSVTSRKLLAQSPVPTDVLQWDQERLQEFLRKASRGRHGPQLAQDIHQAAQQSVGMQRGLPGSRLAIQVLLEQMDNAKPLLQKLQEQIESLAQQVPTYLKTLPGSTTLSVVSLYGEVDPIATFQTPSQLVAFAGLDPQVYQSGQYDAPQRRISKRGSPFLRQTLWLMAHRAVYQDGDLRQVWLRKRAQQKHHLAAVTAVAGKLCHIIWRIMTDQRDYIPAHRPSQP

SEQ ID NO: 473277 - protein, 333 aa, unidentified
MQPFKIVVGIDVAQDSLAVSIYDGESHEVLEFDYTQTAIRKNLLNRFKKEKESVVFVMEATGIYHTKLAYMLCENTFKISVLNPFVIKKYAEMNLMRVKTDSVDAKLIAQYGYEYQNKLLFYKLKSDARVHVDNMIKAIDDLLQQKTMSKNQHHALKQQAHHSKDILSSYDRHIKFISKEIIKLEKLLEGLLNESFAEEYKLLRSIPGIGLKTSSMIIAIFDSFKAFENPKQACNFAGIAPSPYQSGTSVKGRGRISKRGNPLARKILYMGALSATIHNPMIRSQYKRLIENGKPKMLAMIAAANKLLRQAFGVLKSGIPFDKEYMKVCKIMV

SEQ ID NO: 473278 - protein, 345 aa, unidentified
MNTIKVVGIDLAKNVFQVCVWMADGSVASNRKLSRQKLLDTVRSFPPGTVIAMEACATSHYWGRTLQAMGYTVRLVPAQHVKAFSHHQKNDANDALAICETACRPGLHFVPVKTVAQQDIKALRSARQLMVEQRTALANQMRAFLAESGLIVPAGIQKLQQHLPDILEDDSTNLSCVLRHLLHPLWAEMQHLNTGIHDMDNEIAALSRQQPGYEHLLTIPGVGPLIAAAFVSDVSASPFANGRQLSAWCGLVPRQHSSGGKNRLSSLSKNGHRHLRTLIIHGARAVMRCVQRRDDYLGEWLRKLIDRCGFMKATVALANKLTRIIWRVLRDDVDFNMKKAFLSVN

SEQ ID NO: 473279 - protein, 403 aa, unidentified
MSTFYAGLDWASQTHAVCIVDERCTVREQLEIEHNAGGLAALLRRLRHYGNPPVAIERPSGLIVDTLVEAGLPVVPIHPNVVKATRPRYRSHGAKSDASDAYLLADLLRTDGHRFRPLAPQGDEVRALRALVRGRDDLVATRVQLANQLRSLLESFWPGAAEVFADVDSPIALAFVERYPTPESASHLGPKRMAAFCAQHAYCGRRTPEQLLARLHQAAAPTGSELEIDAKGELARSLARTLQPLVEQIRLLTSRIEHHVESLADGRIFMSFPRAGRLCAAKILAEIGNVRERFDSDEHLAAEAGVAPLTYQSGKSKAVAFRWACNHRLRAAITCMADNSRHAHPWAASIYARARARGCDHPHAIRILARAWIRVLWRAWHDRKPYDPNLHRGAQLAFIAARG

SEQ ID NO: 473280 - protein, 341 aa, unidentified
MMIIGCDFHPRFQQIAYVDQATGEYGERRLSHPAEAEQFYRSLAGRQVRIGAEATGNFRWFRRLMEELKLEFVLGDASAIRASCPRKQKTDKRDARHILSLLVEDRFPAVWQPPVANEDLRQLLMHRCRLVRMRTRIKNQLDSMAKDEGLLSPRVWSPRRRGEIEALPLPGWYAHRRADLLGLLDGFDMQIRPLDKAVQQAAEASREARLLMTHPGVGPIVSLAYVLAIGDWRRFPRGKQVGSYLGLIPAEESSGDKRRLGHISKQGSSLVRWLLVEAATIAQRYDASWHRQYLRLSMTKHHGVAKVAIAHKLAVRLYWMLRSGDDYSKVKERGSHAGQSV

SEQ ID NO: 473281 - protein, 387 aa, unidentified
MARKRILSTLDTSITYDALGLDIAKEDVALAAFGDDHDEPYFVDKLTFDGLYALLADMAPTLVAMEPCSGAHQIAEHIEALGHQVMMISGKHVQAWVKDHCNGQKTDLNDAFAILNLAYDRWLTPIRGKTREECRLLALQASYRQLQGQRTKTLVHVKATLHAWGYPIRTGSFNQKALHELIEANRDLFGDEVAETLHLMINRVRDLDHDIAKVLKLLTEATKRDPRASLLRSIPGFGVLTTSRWCAVMGDIARFESPKQAMAFIGLVPNNRITGHHTETSSGREARGQGKMSKRGDKMLRSLCILGAASLCLMVRNNRLPDCPFVAGIKERLASPRPWFKVLVYVAAKLVRIATALLKYGETFSFKKAGISKAVLKQWELEQAKAA

SEQ ID NO: 473282 - protein, 339 aa, unidentified
MHKYIGLDVHATSCTAAVVDARGKRQGHHVLETNGQVLVEFFRTLSGTLHVCLEEGSQAGWLVEILSPHVEQVVTVRVPESRGAKSDERDAFGLAERLRTGAIEMGVYKQVGPFATLRQLVKAHQMIVRDSARVQSRIKAVFRSRGVRVVGRAVYSPGKREEYLRQLPASSRAAALLLFEQYDALRPVRDHAEKQLVAESHKHAVTRMLESCPGLGEIRVAQLVSAIITPERFRTRAQFWSYCGLGIVMRSSSDWTQTPQGRRVRGTVQQTRGLSRNHNRLLSSSSRAPPRASLATVRSPQRAHGYDPSTSPLMYFSMFVYPVPSKSPLASAGELGFRP

SEQ ID NO: 473283 - protein, 493 aa, unidentified
MTDFFMGCDVSKGYADFVVLNSREQVVERSFQLDDTFDGHNTICEFLNGFFKRYKDAVLYVGVESTGGYENNWFALFSRLGAHDNVKAVRLNPLAVKAHHNASMRRIVTDDISALNIATYLIAYKNRTRFEQDTGFESLRKQWKLTEMLKKQHTQLLNQLGFLMYQSNPQLVHYCKDGVPRWILLLLSSYPTAAKLARAKAATVAKIPYISDQRAQSLINDAAQSVAAYVDETAGFIIKELVKQIMALADAIQTQKNHMENNCAIKEVARLCTIGGIGSYSATGLLINIVAVERFSTVKKLAAYFGIHPVYRQSGDGEFGFHMSKKGRVEPRAILYMAVLSAINSNPVIAQLYKHCVSNGMEKKAAIGVCMHKLLRIIYGMLRTHTDFDPKVDEQNHKNAHRPAATSHLQKKRRFQQIDPMAPISKRQTKTRNEKGKIPEPHKNDVLKCGVIQDLPVEKNIISRHETKSNFHMPVPVASLVAAELERYELVTH

SEQ ID NO: 473284 - protein, 342 aa, unidentified
MYYIGLDVHKKTISYCVKDASGRVHQEGKLGATRCELDSWMRTLPQPWTVAMEATIFTGWIYDHLHPHATQIKVAHPLMLRAIAAAKKKNDRVDASKIADCLRCDFLPECHMASTEIRDRRRTLRYRYLLVRQMVQTKNRISGLLMETGVTHNKQRLHKVGYFRELLASNEEVSESIRPLLRLSRDTIARLQKTERALVSSLQRDPLLSERIKRLRTVPGVGPITALTWALEMGEISRFRSIRQAISYCGLCGDERSSAEKSIRTPISKQRNKNIQFVLIEAAKLAPRQDQDLALLYEKEKQKGNANRATLAVARKMVAYLLAVDRGQRDFVPADDCRCDAA

SEQ ID NO: 473285 - protein, 378 aa, unidentified
MSSSSMIWIGMDVHKDSVMVAVFADGAREPEVVQPLPNDSRKLRRFFERWSRRGEIRSCYEASGAGYVLHRQVREWGHHCEVVAPSLIPVRPGERRKHDRRDATQLARLYRAGELVTIRIPSAAEERVRDLVRCRQCFQREILRSRHYVTKFLARRGFVYREGKNWTHRHRSWLLSLVREGGLEPEDRSVFGEYLALLDYKISRREDLDEQIEKLAFSPAYQSAVNRLRCFRGINTLAAMTLITEIGDWRRFERPGQLMAYLGLVPSEHSSGHREHRGPVTKAGNSRCRHVLVQAAWTYRHRPAVGLQLKARQRGQPPTVVGHAWKAQHHLHKLYHRIAVRKCSAIAVVAVARELVGFLWAVMKELEVEQTPSLTEAA

SEQ ID NO: 473286 - protein, 458 aa, unidentified
MSESLIKAASEPEWAAFAAIDWADQKNFWRLLPAGSQRQEQGELDNTPEAVEVWAAGLQQRFRGRRIAVILEQSRGALVYMLAKYPHLVLFPVHPTTAARYRETFCPSGAKADPSDTASLLDLLLRHRERLHQLRPDTVATRLLQFLVEERRRTVDERTRQSNRLVDCLKLYFPQVVQWFDDLTSPLVGDLLERWPGLEQLQRAHPGTLRKFFHEHNCRGEKRMEERIQAVYQAIPATQDAAVLEAGAMRARGLVRLLATLSHQIAVCDRRIAELVLAHPDGGLFGSLPGAGLALIPRLIVAFGTQRDRYQAAYQVQCYSGIAPVKEASGKTERVHFRLACPKFLRQTFHEFATHSIRRSEWARAYYEHLRDDEKKSHHAAVRALAYKWIRIIFRCWKDSKPYDERVYLDSRRRRGSSPPCSCACRARRRRPSPNRRPARCPATATGPSGSGSCRNHT

SEQ ID NO: 473287 - protein, 400 aa, unidentified
MSLAVGIDVGAYKCAVAVCREGEREAERKVLNITTQRGGFSDLDAWMVQQEAPIDVVVMESSGHYWFNLASHLRRQGYPVAVVNPLQAKYFAKSRLQRSKSDPADARTLAALGTHDQPRISEPLVGAELKEAARFAMRLVREQAQVCQRIQRLVDIGFPELREVWDDPTCVSALAVLRHAPTAVAVARIHQDRLARLKRPGVGGRGIGPLKAAQLKQLAQASVAAPELEQQVRFEMRLLIAQHDLLDTQIASADARVASLLDGEVSQRLLSIPGVGPSTAATLMAEIGDIWRFSDVDQLLAYAGVHPKEQSSGKKGANPETSWTMAKTGNAYLRAAAYRMAVVGVQHNPIIRAHYARKRAAGKSAMNSLGHCMSKALAIVWGVWRGGKDFDPAHGSGAAG

SEQ ID NO: 473288 - protein, 360 aa, unidentified
MLAGSNRPTDVNPKEDHVGYFAALDVSQEQTAICVVDEQGAIVAEGKVSTCPDAILAWFERKKQTLEKLGMETGPLAVWLWNELKVRGMPIICIDARHANAALKMMPNKTDRNDAIGLAQIIRTGWYKEARIKSHGAYVIRSLLKARDVLVGMRVRLENEIRGLLKTFGVMFGNRVGGFMRRAEEIIANELDVAPELRSVFEVLVAARRDLLAHIKSLDSKVRALARRNKVARLLATAPGVGPVTSLAVASTFDDASHFKRSSSAGAYLGLAPRRYESGEVSRNGRISKRGDRMTRTYLYEAANALMTRKIGGDGLREWALAIAKKTGPRKAKVALARRLAVILHAMWRTGTPFEDRVAI

SEQ ID NO: 473289 - protein, 360 aa, unidentified
MINTNIEKLLGRLLESKTETIKIGCDIHARDLAVSIQEDGARPLRPQMMMRVQLVRLVRALVQGGRKVHVCYETGPCGYGLYFELKGAGAHAYVIVAEVLTDGRKQKTDKQDAAALCDKLDRYVRGNSKAMTPVRVPEVVEQQRRSVGRLREQLKQSRHQWEARGRSLMLFYGHHVTGKWWNERRWPQVAATLEAWLVEQLTVMRTMLLQLDQQEKALRAKLEADAPKRLPKAIGALTWGLLWREVCDWGRFRNRRQVSSFTGLCPGVHQSGAKRRDGSINRYGNPRVRALLIELVWRLARWQPDYPPVRALVAGMARGAARRKCAVAAARRLAVDLWRLATHQTTPEKLKLSVPTEVLG

SEQ ID NO: 473290 - protein, 381 aa, unidentified
MTTAVTHHEPENTIEATLFVAFELSEKTWKLGFTTGHGQKPRERTVTARQQERVLDEIVQAKRRLGLPETATVVSCYEAGREGFWLHRLLQGHGITNHVVDSSSIEVNRRRRRAKSDGLDVRKLLSMLMRYHHGERHVWQVVKIPSVEAEDQRHLHRDLETLKQERASTMTRIEGLLSRQGLRVTSLTKLPEQLDALRLWDGSPLPPGLRRRVLRVYAQYTFLSEQIAAVEAERRALLQTSPEASIDKVRQLMQLKGIGINGAWLLVMEFFGWRAFKNRREVGALAGFTPTPYQSGESAREQGITKAGNRHVRWMTTELAWSWVRFQPDSALSCWFRERFGGGGKRLRRIGIVAVARKLLIALWRFLETGVLPAGAVLKEG

SEQ ID NO: 473291 - protein, 339 aa, unidentified
MRLYAGIDLHSNNHYLGIVNEENQVLFKQKLVNNLKETLIVLEAFRKEIEGVAVESTFNWYWLVDGLMENGYRVHLANPAAIQQYKGLKRVDDQRSALWLANLLRLKILPEGYIYPKEERPVRDLLRKRLQLVRRRTAHILSIQNILSRSLGVKMRSNEVKQLDEERVKDLLKEEHLILAVNASVGVMRYLGGKIKQIEGVVKSRVKLRKEFEGVLSLPGVGDILGLTIMLEVGDIGRFPEVGNYASYCRCVKSTRISNDKSKGQGNRKNGNKYLSWAYVEAAHFAIRSYPVVQRYYQRKTAKTNGIVAIKAISHKLARASYYIMRDQVLYDPQKLFQE

SEQ ID NO: 473292 - protein, 367 aa, unidentified
MKKVSTAATKQSRNISQQKLTIGLDLGDRNSWYCVVDEAGQIQLEQRVRTTAKALREVFGAMPRSRIALEIGTHSPWISRLLSELGHEVIVANARKVRLIGESRKKDDRLDAQTLARLARIDPQLLYPVKHRSVQAQADLMMIRARAGLVRVRTGLVNTARGLSKSYGERLRGCNVRNMNPEKAEGLSPELQAALEPLLAAIESVSERIAEYNERIEKLAQESYPQVALLKQVKGVGTLIALTFVLTLEDPRLFRKSRDVGGYLGLQPGRRKSGQTEPQLHISKEGDPYLRTLLVQGAQHILGPFGVDCDLRRWGLKLAERGGRNGKKRAIVATARKLAVLLHHLWVSGEVYEPLHNSCRVAVTAAA

SEQ ID NO: 473293 - protein, 341 aa, unidentified
MQITTIGLDIAKNVFQVHGIDGAEKVIVRKQLRRGQVMAFFEALAPCVVGMEACATSHYWARELTKLGHEVRLMPAKDVKAYVKRNKNDAADAEAICEAVRRPTMRFVRIKSAEQQGQLMLHRARDLLMRQRTQVINALRAHLAEFGITAAQGREGIKELLAIVAQEEGSRLPSDAHASLTVLATQLQAVQTMIGSLEKRIVAQHRSNEASKRLETIPGIGVIGATTIAAVVPDPRVFRSGRDFAAWIGIVPRQDSTGGKQKLGPISKQGDQYLRRILIVGAHAVLRRARQQPETYPWLTQLLARRPFKVVAVALANKMARIAWALLAKGGTYRAPQLVAA

SEQ ID NO: 473294 - protein, 367 aa, unidentified
MKKISTAGAKQIRNFREQKLTIGLDLGDRSSWYCVLDEAGEVVLEQRLGTTPKALKEVFGKMPRSRIALETGMHSPWVSRVLSELGHEVIVAHARNVRLIGESRRKDDRFDARTLARLARIDPQLLAPVQHRSAQAQVHLMVIRARAGLVRARTSLINTARGLTKSYGERLRGCSPHNMNVEKAQSLSPELQAALEPLLAAIESLSERIYEYNQQIEKIATNSYPQVARLKQVKGVGTLIALTYILTLEDAQRFRKSRDVGCYVGLQPGRRNSGQSEPQLHISKEGDPYLRTLLVQGAHHILGPFGADSDLRRWGLKLAERGGKNGKKRAVIATARKLAVLLHRLWVSGEAYEPLRNSRPVPLPAAA

SEQ ID NO: 473295 - protein, 337 aa, unidentified
MKYQWFAGIDVSKLQLDITVYKGSERVFYKAISNTVKEIVLFLRQLIQKEKISMDDCLFCMEHTGIYNSNILKVMEEQKLSVCLESSVQIKQSGGLQRGKNDKIDSDRIALYAYKNKDFLKLWKPERSVIGQLRRLSSMRERLLNAKKQLNAGLSEDKKFGNKYLNKQMAACCRSTIMAIEHDIKKTETAIEAVIESDDQLRNLYRIIESVPGVGKVTATEIIINTNEFKRISDPRKYACYAGVAPFEHSSGISVRGKTRVSKKANLKAKSLLHMTSLVASRFSEDLKAYYERKVAEGKNKMSILNTIKNKIIHRIFACVNQNRLYQKNYVFNLVES

SEQ ID NO: 473296 - protein, 354 aa, unidentified
MIIIGVDFHPEFQQIALLNTTTGEVEEKRLAHPDEAEKYYRALAGAGETVRIGMEASGHGGWFERLVAELQFELWIGDAAVIRAKRGRKQKADRQDAQHILQLMLKDDFPKIWVPNWENRDLRQLLWHRHRMVQARTRVMNQLQAVALNEGLHCKKKLWRERGRQQLESFALAPWASRRRRDLLDLLDLLTPSIAELTQAIEREVENYPAAQRLRTHPGVGVLTALAFVLILGDAERFHCGKQVASYLGLVPLEDSSGNRRRLGHITKQGSSIVRFLLVEAAQVTVRRLPEWRSKYFHLVLRRGRKIAKVAMARRLAVQLFWMMRKEWDYEQLKKFGSHAGQPGNRHGVQSNTE

SEQ ID NO: 473297 - protein, 351 aa, unidentified
MINIGVDYHPSVQQIAWVDTETGECDKRQLTHSDGEAEKFYRGLQLRGVSVRVGMEATGHAGWFERLLSGLGFELWIGDPAQIRAKRVRKQKTDRQDAQLLLTLLVENRFPRVWVPSLENRDLRQLLWHRHRLVQMRTRILNQLQAVAMNEGVRRRKKLWSVAGRAQLESLVLSPWAARRRQDLLELLDQFNPSIDQLSAAIEQEAEKRSEVLHLMTHPGVGPLTALAFVLTIGTPERFPCGKQIGSYLGLIPCEDSSAGRQRLGHISKQGSSLLRFLLVEAAQVAVRCDPEWRRQFVRLAMRRQRSIALVAMARKLAVRLYWMWRKEWDQQQRSKLGSHAGQLGSSHGVQ

SEQ ID NO: 473298 - protein, 400 aa, unidentified
MRVVFGIDVSKVSSEVAILVNGEKVHNYTISNDAIGFARLLGDLKTVHKPEIIFEATGVYSRRLQAFLDEHDYAYTRLNPLEAKKQLDSLRVRKTDKIDAEKLAQSQCVLNRKPPYVQEEVYQNLRDLSRFYQNLTEDIVRAKNRLHKALQVTFPELENILSTPTGEQYWNLIITFPCKDFVLDLSKNELSKSIRQSTSKRISDKRVAYLAEKLTVLANQSYCAVKKTSPILEEVHYYAKELLRLSEQRQAVLDQMVELAQPLPEYDILLSIPGIAETTATSIIGELGDIRRFQSANQINAFIGIDLRHYESGNFLAKEHITKRGNPYARKILFKCIHNIASASHTNPCHIADFYEKRKRQSQTTSTKSHTIASIHRLIRTMYYLIMHNKLYDYASTQNR

SEQ ID NO: 473299 - protein, 449 aa, unidentified
MEQPQEVEDEEYERVYQRVAAVDVAKASGVVCTRVPDEDRPGRRKMHVWTVTATMGAVTELGDHLRCEGIEVVTLESTSDYWRIWYVVLEAAGLTVQLVNARAVKNVPGRAKTDKKDAAWLAKLTERGMLRPSFVPPCDIRRLRDYTRLRAGLVHDRTRQWARLEKLLERALIKISAVASTLDTQSVRAMLEALIAGQRNPTVLADLAIGRMRAKRKELAEALDGRFEDHHAELARILLDQIDALTRQVNALDERISELIAQIPAAWGVDADGTTGPEAGRGPDAAVLPAVARLDEITGCGITAAAAIIAEIGLDMTVFGTPGRLVSWAKRCPQTRQSGQKAGAGKAAKGNPWLNGILGEIAASASRTDTFLGERYRRLARRRGKRKALAAIARSILVIIFHLLADPAARFRDLGPGYYDNRISRERKINNHVRQLQALGLNVTIEEAA

SEQ ID NO: 473300 - protein, 420 aa, unidentified
MEDWSGGGSYFCHVRIGGADMDERKGFRWFLGIDISKETFDACCISGQGEKQFSISTSMDRKGFEELIKQIASLSVPQESVLIGMESTACYHVNLYSFLISLGYPVIVINPLLISNFVKLQLRKTKTDKKDASVIAQFLLLNRDSLGRTVGSSDFTDIRDLSRQRESLVDQMTSNKIEIKRLLTMTFPELEHIACIFTKSMLRLLCQYPSAASIRQAKRSKIARILIPGSYGKQTDASVERIVKVAETSIGTASPAKEVILKQKVSLLMQLEQHLQELTDILTEQCKGKMRRDMDILTSMRGIGKKTAMNFLIEVGRDVKEFESHKKVIAMAGLDPALYQSGKIDRKGKITKRGNRHLRRVIWVMTTKVIQFNARFKQYYLKRIQDGLPYKMAVLATAHKLIRIMFAMLTNETQFNESMN

SEQ ID NO: 473301 - protein, 320 aa, unidentified
MMAQNDLIVVGIDVAKDKVDACIRSLSLRQAFLSTAQGRRKLIAWLRRHKVGKAVMEASGGYERDWAKALREPGIEVRIVDPKRVRSFARSAGRLAKNDVIDAEMIAWFAETFGEAPGQAYDAEREKLAQIVMARQALLDLQTQLQNRDEQTTPEPVQKMHARLLKKIALEVARLEVVIAAMIKATARFAELAELIESVPGLGRITSAGLIAAMPELGQVSNKIAAALLGAAPYDDDSGRRRGERHIKGGRRKVRNLFYMACLGAATRHNPVLNAFYRRLIAKGKEPKVALVAGMRKLIVILNTMIARHQKWDASLYRLG

SEQ ID NO: 473302 - protein, 408 aa, unidentified
MQVTFGIDVSKSTSTVCELIGESKNELTITNNRPGFIQLLHELTAFSKHPQIIFEATGVYSRTLQSFLEDYGYDYVILNPLKAKKEMDMGLRHNKTDKTDAYHLALIQRLYHHPINQLQSQTYKQLNALSRFYDQLTSDLVMAKNRLHQALQSTFPEIENLFSSAKGKNYWQIVVRYPHCDLVRREDKKQLINWLMSLKGIAFKHALRTADKLIELAYQAYPVVSCSSIEVEQVQYYAHRLLNLSDQRENLIARMVKLAKSLPNHDLENLESIPGFAQTTAVRVLAELGDLRRFSNPNKINAFIGIDPGRYQSGEMDSNLSITKHGNAVARKLLYRAIGQIDNAAKTNPCHIADYYESKKLSSQTKGFKKIAIASIHKLIRTIYALIINDQLYDYNVATHNQKDFSCN

SEQ ID NO: 473303 - protein, 342 aa, unidentified
MGEVSIIGVDLAKNVFQVHGAASDGSVLFRKKLSRPQFARFMADQPPCLVAMEACASAHHWAREMTRHGHEVRLIAPHYVKPFLKRQKNDAADAEAIVEAALRPTMRFVEPKSADQQARAVAFRTREQLVKQRTEAVNALRSHLYEFGHVAPEGIGYLPRLAKVVDDPGTDVPELARDICRMLLEQIAHLTDRINALKARIAALSNEAEMTRQLQTMPGVGPITALAVETFAPPMEQFRRGRDFAAWLGLVPRQHSTGGKQKLGKTSKMGQRDIRRLLVIGATAVIRWASRRGAPKGSWLARMLERKPIPVVAVALANKMARGIWAMLTRNESYRGPVLIGA

SEQ ID NO: 473304 - protein, 423 aa, unidentified
MERVIERACGLDVGKKSVHACALLDEGGRKPRIERREFATHAEGLRELREWLIEHRVTHVAMEGTGVYWIPIFAAVEDDVSVLIVNAKHVKQVPGRKTDVTDAEWLATLLQHGLLKASFVPSKEIRPIRDLTRYRRSLIHARTQLRNQVIKLLEQTGVKLASVASDAFGRSGLAMLNALAKGTSSAKEIAALARGKMKSKKPELELAFGSSFGVQHRFILSQQLTRLAALDVDIASVEERITPLVKPYEKELTLLMTIPGVSLRAAIDVLAEVGPDMSSFATDAKFASWSGLCPGNNITGGKARRARRRSGNPYLQSTLFECALGAVRTKGSFFRAKHQRLERGRSKKASIFAIAHKLARAVHRVLTERVDFVDLGEDHVDRRPKEQIARALITRVARLGLPPESVNALFAGLTSPPTAMTFS

SEQ ID NO: 473305 - protein, 361 aa, unidentified
MPNAKISSVSRQVVGGVDTHKDLHVAAVVDEQDRILASESFATTRQGYKQMLTWMRSFGEVVRVGIECTGTYGAGLLRYLEQAGITVLEVTAPDKSYRRKRGKDDTLDAGNTAHAAFAGVRTVTPKKRDGMVESLRVLKVCRKTAIQARRVTLQLIQNTIVSAPDDLRESLRTLTRMQLIRTLAAWRPDLSSYRQVTSAYRIALKSLGRRYLELHDEIADLDVMIAALVDDLAPELVARNAIGYESAAQLLLTAGDNSDRFRSESSFAALCGVSPVQASSGKVTRHRLNRGGDRAANSALHIIAIGRLRTDARTQAYVSRRLSEGHSKLEAIRCLKRYIAREVYGIIQRRNSVINQSTVST

SEQ ID NO: 473306 - protein, 325 aa, unidentified
MSSYQITVGVDIAKRKFDAVRFENGKYKHKTFDNSADGFATLITWLLTFGEIKPLICMEATGAYSIPLAEFLVNSGHSVSVVNPAKIKAFAKSELSRLKTDKADAKLIARYALEKQPSLWTPPPPTMIELQALLRRIEHLLEIRQMEQNRLDTANPVIIESIKTLLTLLDEQLESTRKQIRQLIDQDPVLKHRAKLLESIPGVGSASIAHLLLALSEHHGFTHAKQAAAYAGLEPRISESGDWTGKTRLSKTGDALLRKALYMPALVAWRHNPAIHVFCERLKTNGKNGKAIACAAMRKLVHIAFAILKSNKPFDPLYKTKLALA

SEQ ID NO: 473307 - protein, 320 aa, unidentified
MMSEIILGIDVSKKTLDAALIFENRILCKQFQNSCDGFKELAAWLAFLKITCVHACLEATGVYGEAIALFLHESGHRVSVVNPLRIKGYASANMQRNKTDRLDARLIASFCQTQKPDAWQPPSEEVKQLQSLVRRVEVMAEMLQAEENRLANAASEIKPSIGRIIGFLSEEIKELEQQIKRHVDQHPNLKEQNQLLQTIPGIGRRTANLLLSEIEFERYSSARSLAAQAGVTPRKRQSGTSLKQTNLSKLGNARIRRALYFPAIVAKQHNKIIREFAERLKKNGKTPMQIVCAAMRKLLHIAFGVLKHRRAFDASLAFSA

SEQ ID NO: 473308 - protein, 381 aa, unidentified
MAQQATTQKEWYPTEATLYVAFELSKEKWRVLCSSGGRKRHSGLMAPGSEAELGMILERARKKLGFSEDVRVLSCLEAGRDGFWPHWFLSMQGIENMVVDASSMKVSRKGRRAKTDKIDASRLLADLVRHDRGDDDVWKVVHVPSREDETHRHEHRELEQLKQERKRHRNQVRSLLATEGVKVEGDLMRVLEKTADLRNWNGEPLSQWMLWRLERKTQRLAQVEEQIKEIEQHQVECVKRANTAKLEKIAKLERLRGIGVRSAWVLVMESLGWREFNNRKEVGGSVGLVGTPYDSGESFRELGISKAGNARLRSLLVELAWLWIRYQPESSITKWFNERYGGQGKRSRRVGIVGVARRLMIQLWHYVEHDVDPPGAIIAKS

SEQ ID NO: 473309 - protein, 315 aa, unidentified
MNKQETWIGIDVSKDRLDVAAAPSGERLSVSADELHKLLSWVGRRRPELIVLEATGGYERDAVAALAAKGWAVAVVNPRQVRDFARATGRLAKTDAIDAAVLASFARVVRPEPRRLRDAQTEALRDIVVRRRQLLDMRKAEKNRLETALSPIVRDGVQRHLAWLDSEIAQADDDLDHQIRQSPSWRADEDLLTSVPGVGPILARTVIAELPELGQLNRRQIAALVGVAPFNRDSGKMRGTRSTWGGRRSVRQVLYMATLSAVRFNPALKDAYERLRQAGKPPKVALVACMRRLIVTLNAMLHTRQPWALPQTTAA

SEQ ID NO: 473310 - protein, 366 aa, unidentified
MSDHTATRLPVAGLDVHAASIRLAVVREDELLDERTLPFDCQLVERELRRLGATRVCYEAGPTGFGLARHLRDAGLQCDVIAPGLVPRRGSDRVKTDKRDARKLALLYQGGMLAPIWVPSLEQEAVRDLIRAREDARQDRARARQRLGKFVLRRDRRLPGKGWTLGRRQWLGQQAFEHAAQQAAFDDYLLACDLLDRRIETLERQIDEWATHDSFRQLVGRLRCLRGVDTLTAIGLIAEIGDFSRFKTAPAFMAYLGLVPSECSSGERRRQGSITKTGNNHARRLLIEAAHNQRRRPARSAHLARRQAGQPAGVVARAQQAQLRLHKRWQRMSARGKHSNKIAAGVARELAGFVWAIATDQPLRAG

SEQ ID NO: 473311 - protein, 452 aa, unidentified
MAKKGKRRCDTLPVLHPDAAGIDVGASELYVAVSAERDPDPVRCFPTFTRDLHALADWLEQCGIHSVAMESTSVYWIPIYQILEARGLEVYLVNAQHVKNVPGRKTDVSDCQWLQYLHSVGLLRASFRPPGFICAIRSLWRHRSSLIQMAAEHVLHMQKALDQMNLQIHRVLNDITGVSGLKILDAILAGERDPLSLARLCHGGVKNSEDTIAKSLEGDYRPEHLFALRQSLAAYHYYQKLVLEVDQQIKLQLGELQTAATAEKSTPARTKASAYQRRRYEPKTFDLRGELYRIFGVDLTNVPGISAITAQTILCEIGTDVSRFRNASAFASWLGLCPEKKVSGGKVLFTKSRRVRSRVATALRMGAQSLHHAKDYLGEFFRRITRKLGRPQAITATAHKLARIVYHLLGTKEAYNESVFHKSEADTIRRAEYRLRRQAAQLGFRVVPSENG

SEQ ID NO: 473312 - protein, 347 aa, unidentified
MNTTTVGLDIAKSYFQVHGMDEHGKATLQKQLRRAEVLRFFANMPACLIGMEACGSAHHWARKLGELGHQVKLMPAQFVKAYVKTNKNDARDAEAICEAVSRPNMRFVAVKTVAQQELLMLHRVRQRLVMDRTAKANQLRGLLAEFGIVMPQGLHRLRHLMPEVLADAENGLSCRLRERFSDLFGHLRELDVTVIEWERQIVAWHRENPLSRRLDKIPGIGPLGASALVASMGDVRTFKNGRQLAAWLGLVPRQDSSGGKTRLLGISKRGDRYLRTLLILGAQSVLRQMQRHPPRAQSWLGRLTARSHPHIAAVALANKNARIAWALLAHEREYQADYRGRVALAVA

SEQ ID NO: 473313 - protein, 371 aa, unidentified
MEHGISYVGLDVHKDSIFVSVLNWDGDPVEWKQANDSRAPQRLATRLRKVCSGTILSCYEAGPCGYVLQRELHKRGVTCQVIAPSLIPVRPGERVKTDRRDARKLARELRSSGLTEVHPPTPAEEAVRDLSRCREDAKADLKRAKQRLGKFLLRRGLKYTGGSAWTVKHWTWLRALQFEHAAGQTTFDEYLLTVQHRQERAGEVTKELEAIARSEPYREAVGWLCCFRGIDTVTAISLVAEIHDFRRFPTARHLMSYLGLTPSEYSSGGKERRGGITKAGNSHVRRLLIEAAWHSRHKPYVGATLRRRRRGQPKEIIAIADKAQRRLYKRYWKLVLAGNKPKCKAVTAVARELVGFIWGVLAHAEVNHAKA

SEQ ID NO: 473314 - protein, 349 aa, unidentified
MLHVGLDLSRKRVDVCLISSEGELVDHFRAFADRAGLYGLSRRVAVYGEPVRGVVESMNGARFVHDELVGHGWEVLVADAQRVKGLAPLACKTDKIDAKVLAELSFRDLVPAIWLPTPELRAERERARWRLHLVKHRSILKNRVHASLIAFGHQVPMADLFGAGGRKLLATLEFPEPWRGHVQASLELIDDLDHRIGAIERWLHRSGADHRYIPLLMTAPGIGWVTGFTIAAEIGDIDRFASPVKLTGYTGLCPRVNQSGEVDRRGPLSKHGPRYLRWGLMEAAIAASSHPLFKERYQRTKRRLGRQRGAKVAQIELARKLTEAIWYMLTRNQPFQPFAPAGAVFAVTA

SEQ ID NO: 473315 - protein, 313 aa, unidentified
MAQIVTTVGIDVSKDRLDVCIGPADEQFSVTNDPAGWRQLVRRLQPLMARAIGLEASGGYERGAIDALLEAGLPVRLVNPWKLRKFAQAFGVLAKNDRLDARVIAQFVASAPSREVHRDRAIDHLAELVNTRRQLVDALQQIGNQAQLLRDAALRRLQARRIRQLERDVVRLDQLIGQAIAADAPLSARRDLLCSMPGVGPVLAATLLALLPELGALPNRSVAALVGVVPYDCDSGKIKGLRCIFGGRAAIRRVLFMAAQVAARFNPVLKAFNQRLIGAGKKPKVAIVAIMRKLIVTLNAMLRDNASWQTITA

SEQ ID NO: 473316 - protein, 447 aa, unidentified
MSDRTGLSQGDRNRNSRLARLRVLVPPGNAIVGIDLASVKQAAVVTDHDSRVLARRRVTARAWELGELLDWALARAQAAGFASVTVACEPTGHRWRVLDQLAAGRGLALVCVQPLLVYRAREGEDLTFDKSGPKDAVIIARLAAGLHCYEPERADAVWARLRHLGARRRQLTADATAAVNQVRDLLECAWPAVLDTSGAPFRSATWRAAVAVALDRAHDDLTRVRRLGLDRFTAAVRRELPRWEATRPCLRIVRAVYAAAADQAGVWAQRPGALERASLAIGDWHHTRTLLAQTEALMAAVLDELGLTELVTTIAGLTAVGAAAILAEAGDPNRFATPRSLVKHAGLCPRDNASGGYQGKTSISGRGRPGLRIAAWRAVWAALPNNPVMAARFTHLTTRDHNRLARQQARTACAAALLRWLHVVITRQVRWDPVIAAGGASPLRTAA

SEQ ID NO: 473317 - protein, 316 aa, unidentified
MNVLGIDVGKGEFVCELLGSDQRASKKFNNTARGFEQLAAWLRNRGTRKVHACLESTGGWSEDIAAYLHDRGHIVSIVNPMQIKAFGQSELSRTKTDKADAALIARFCLAMKPDPWAAPTPQEQRLRQLVRRRLALVETRAQEYNRLGAPGTENVEDSIVASIAFLDSAIESLEKKIKETIDGDDDLRGKRNLIESIGGIGPATSSTVLAETPHIESFPTAKALAAFAGVCPQERRSGTSVSSSHVTRIGNRSIRRVLYMAALAAMRCNPIIQAFAKRLKDRGKRSMQIIVAVMHKLVILIFGVLKTGRPFDPLWA

SEQ ID NO: 473318 - protein, 318 aa, unidentified
MERSTIEFEQVIERGCGIDVHKETAVATVKGKGIKEETKTYETFTGSLKEMKEWLMSIGITHIAMESTGVYWKPVFNILEDSFEILLVNARHLKNVPGRKTDKADSRWICKLLLSGLLKGSFVPPENIRELRDLSRYKTKLTREVASEKNRIQRILEDANIKLSSVVSDTSGTVATKLIDGLICGRKDLEALINECYHGKLSATKEELRQALTGRLTPHHVFMLKQMKAHIAYLESQIVLIDTEMDKKMEDFNEELELLQTIPGVAKDGAKGILSEIGANMDVFPDEHHLASWAGMCPGNNESAGKKKVRGHDMGTNT

SEQ ID NO: 473319 - protein, 404 aa, unidentified
MWYAGVDWADQHHDALVINEQGQQVGSIRVDHSLQGFAKLTTFLQQIIGSEPKEQMACIIETTHGLLIAALLEAGWPVYPVNPRTVDRRRSASGAKTDTIDAYLLAKTGRADFADLHRLTPDSAQVAELKTLTRDQDGLIQMQTRLVNQLTACLKAYYPVALELFAKLQQHTTLVFLQTYPTPQAASAASQEQIASVLKQAGHPNPSKAAPAIFATLKLPHLTADAVTTRTKSRLMLALVSQLMPLLEQIAAYDKEITTLFLTHPDHEIFSSLPRAGKRLAPRLLAEVGDDRTRYVDAASLQALAGTSPVLFQSGMYSKAHRRLGCIKPLRNALHQFAWQTTQSEPWAMQYYQRKRAEGKSHTVAVRALANVWVRIIFAMWFHHRCYEATTFEIAQQQHARRAA

SEQ ID NO: 473320 - protein, 343 aa, unidentified
MGEVSTIGLDIAKSVFQIHGVDAAGAVVIRKRITRAKLLEFFAALPPCLVGIEACPTAHYWSRRLQELGHTVRLLPPSYVKAYLKRSKNDANDAAAICEAVTRPSMRFVATKSEQQQSDLMLHRSRQLLVCQRTMLSNAIRGHLAELGIISAKGRNGTAELLEIIADEQDDRIPAAARFSLDVLARQYAVVRAEIVAIEKRIHAWHRSSEQSRRLEEIPGVGPIVATALLAEVGDWKTFASGRNLAAWIGLVPRQHSTGGKERLGRISKQGNRHLRWLLVAGAMAVIRYARQHGTKRLWLARLMDRRPIKVAAVALANKIARMAWAMMVRGERFKEPKLLPAA

SEQ ID NO: 473321 - protein, 343 aa, unidentified
MQAITTIGLDIAKSVFQVHGIDAEGNVVLRRQLKRRYVLAFFQKLPPCLVGIEACASAHYWSRELQALGHVVRLMPPAYVKPYVKRHKNDATDAEAICEAVTRPNMRFVATKTPEQQSCLTLHRTRHLFIRQQTSVINAIRAHLAEFGIVAPVGRHGVAQLLGIAADANDKRLPKVARACVTALGAQLRMLKAQILEFDRMIMVWHRSSEASRRLDDIPGVGPALATALVASIADPKAFRSGRDFSAWIGLVPKQNSSGGKDRLGHISKRGDRYLRSLFTTGALAVIRHAKIHGTGHRPWLTALLARRPTKVAAIALANKIARMAWAMMAKSERYKEPAALAA

SEQ ID NO: 473322 - protein, 412 aa, unidentified
METVVERPAGLDVHKAQVTACVRVPAAEGRGREQHVAEFQTTVAGLLTLRDWLSAHRVTQVAMEATGVFWKPVWAILEDEFDCMLVNARHVKQVPGRKTDISDAAWLCQLLEAGLLAASFVPPKPIRSLRNVTRYRKTQIQERAREANRLHKALEDTGIKLDCVATDILGKSGRLMLDALIAGTTDPEVLADLARGRLRAKIPALREALAGRFDHLHAVWIGAILDHIDFLDGQIMSLTETIAEQIAPFERAVELLCTIPGVQRRTAEVIVAEIGLDMSVFADAKHLASWAGLCPGNHQSAGKRRSGTTRNGSKWLDWALEEAALAAIRTKDVYLAAQYARLKPRRGHKKALGAVKHSIIVACWHMLTTGELYRDLGGDYFRTRDPERLTKRLVKQLEALGHHVTLQEAVAA

SEQ ID NO: 473323 - protein, 343 aa, unidentified
MTKISMIGLDLAKNVFQLHGVDASGAVVLKRQLRRAAVEKFFAQLPPCLVGMEACGSAHHWARVISRYGHEVRLMPPAYVKPYVKRNKNDGRDAEGVCEAVSRPTMRFVPIKSIAQQATLAVHGTRALLVRQRTMVANALRAALSELGIVAAQGYEGLRALMARLEEPSDEIPESMRGALVVLARHWQALDADERVLEQQIAKAVRCDRDAKRLMEVPGVGPIIASTVLAKVPDAKMFRSGRDFAAWIGLTGKDHGTGGKHRPGRISKQGDHVLRALLISGASAHLRQQMARGVSDPWLRDLLARRPYKVAMVALAAKTARIIWAMLVKGEPYRDRASAPAAA

SEQ ID NO: 473324 - protein, 367 aa, unidentified
MKKHTSIDQSLSSADLSACTTVAVDLAKHVFQLAGEDALGKVHYEQRIKSREAFYEFLRQLPPHVVVLMETGPGAQAWARQLQDQGNLARILPAGLVAKHRSGPKNDRNDALAILRAGRDEKICAVPVKTVAALAMQALHRARQGYVRRRTAVSNQMRGLLLEHGIALAQGDVAISQKIPRILEDATQPVPAMLRELIDELLAEWRHLGERINVLTGRLEVAANADKTAKRLMTVRGIGPITATALVAKETKPERFADARMFAAYFGMVPDQHSSGNTVLLGDMTKRGDSYLRSLMIQGAHAVLQQLRPDSQHPDDRRLLRWMSRLGRKDAAIRLANRNLRIVWVLLQNDQTYRRQPADGQQATMSH

SEQ ID NO: 473325 - protein, 347 aa, unidentified
MVTLGTDSHKQSHTLVAVDENGRQLAELRVAATPAGHVQALEWARQWPERRWAMENCRQLSRGLERDLLTAGEQVQQVSPKLMGTSRRASRELGKSDPIDALAVARVALREPNLPVARLEGKSRELKLLVDHREDLVGERTRIQNRLLWHLHELEPGWVIACSGLTRGVVLKEVASRLQAHHGVVAEIASELVERLAELNASGKRLQQRIEAMTTELAPSLLALPGCGGLTAAKLVAETADVRRFHSKDAFAMHNGTAPIPVWSGNQQRHRLNRGGNRQLNVALHRIAITQLRLGGQARAYVVRRISLGDSKTEAIRALRRQLSDEVYRRLRADAHEHAPESAALAA

SEQ ID NO: 473326 - protein, 471 aa, unidentified
MGHDHSRIDQQGGKKRKIVSPSLLKRINRNAAGIDCGSETHYVAVPPEKDPEPVRSFKTFTTDLNRLADWLEACGIKSVAMEATGVYWIPIFEILEQRGFEVVLVNARHLKNVPGRKSDVMDCQWIQELHSVGLLRGSFRPAAEIASLRAYLRHREKLVQGAASHIHRMQKALVQMNLQLHNVISDIMGVTGMRILRDIVAGVSDPKALAAHRDGHCRASAEQIAASLTGNYRPEHLFTLRQNLEMFDAFQRQIQTCDAEVESVLNALAAVSKRKPNASPPPPRCKPRFSDNEPRFEIRDPLFRLSGADITQIDGIGPYTALQLIAEIGTDMTRWRTHKHFTAWLTLAPRNKVSGDRLISSKTQPSANRAAVLLRMCAMVLGRTSTALGAYYRRIAYRIGKPKAITATARKLAVLVYRVLSGDLNYADPGAQAYEESHRARTLQNLRNRARMLGFGLVDLETGETIPGTVS

SEQ ID NO: 473327 - protein, 341 aa, unidentified
MKVSTLGIDLAKNVFQLHGVDHEGHTILRKKLTRAKFVQFVIQLEPCLIGMEACSSSHYFARLFTRYGHEVKLIPPQYVKPYVKTNKTDAADAEAICEAVTRPNMRFVQIKTEEQQAVLALHTERGILIRERIACANSLRATLAEFGITIAAGQSHLTRELPAILEDGENGLSPFVRTSIYRQSKHIRELEEQVKQVEEALASWYRTQEACQRMAKIPGVGMLTATYVVAAVGNARQFSTAKQFASWLGLTPKEHSSGGKQQLGGISKRGDGYFRYLLVHGARALTARVNRNGAVEKNSWLQGLLERKHYNVAVVAMAAKTARIMWSMLSHNTEYQPRQLA

SEQ ID NO: 473328 - protein, 341 aa, unidentified
MPIVTIGIDLAKNVFAIHGVDDAGKPVLIKPRVSRDQLVTLIAQLPPCLIGMEACSGAHHWARVFQQYGHTVKLMAPKLVAPYRMSGKRGKNDAADAAAICEAVTRPSMRFVPLKDEHQQATLCLHRTRQGFVEERTAAYNRMRGLLSEFGVVLPQSPERLRREITPHLDALPGWTRRCISDLLEHVSNIEDRLAEYDRAIGEIARTDERSKRLMKLRGIGPTTASALLASIGAGHDFKNGRQVAAWIGLTPSQYSSGGKERLGTITKTGDAYLRNLLVLGARSVMASLGDRQDRFSRWVRNLIERRGYWRTAVAIAAKNARLAWATLKYGETFKHEPATA

SEQ ID NO: 473329 - protein, 428 aa, unidentified
MKKRTKNLTQIRGVHTLIVGVDIAKKTHWARMLDGRMGVEVDTAFNFKNNIEGFARLLGRISRAKERIGAENIVVAMEPSGHYWKPLAGYLSRAGIRVVIVNPYHVKKQKELDDNSPTKNDRKDALIIATLTWEGRFFRCYLPEGIWAELRGYTQSRWQQRGKLNAARNNLVAILDEYFPEYAEVFKDLLGKASVHILKHLPFPADIIKLTEEELVQQLKVASNGRVGKKRAVLLLSKARESIGVREGLAAARLRLAHCLTEISFWQEQLAQTEAGMADTLALTGLADNLLSIKGVGVVTAASFLGEVGDPTRYEDWRQIRKLAGLNLTENSSGSRKGKTGISKRGRPGLRNLLYQASLTLVAKNPEFKVLYQHLRTRRENPLKGKQALVVIACKLLRVMFILAKENRLYDPEKVLGAYRQQQLRSAA

SEQ ID NO: 473330 - protein, 449 aa, unidentified
MSRPQIIDDEEHERVHERVAAIDVAKDTGMVCTRTPHPARPGARRAAVWTVKARMNAIRVLGRRLRKDGIETVTLESTSDYWRIWFFVLEACGLAVQLVSAAQAKNLPGRPKTDRLDAMWLARLTEMGLLRASFVPPKAIRDLRDYTRARTRLVHERTRCWQRLEKLLEGALIKLSSVASKLTTLSAQDMIKAMIAGQRDPEALAALARRTMKAKHDALVEALDGMFDDHHGELAALLLDQIAALDAKIAQLGTRAAELTAALPEAWGIDTDGATGPSAGTGPGAPVLNAVARLAEIPGLSPGLARAIIAETGLDMTRFPTAAHLVSWAGLCPSARQSGPRSRATKKGQGNTWLRGALGQAAVNAARTATFLGERYSRIARRRGKAKAQVAVARSILVIIWHLLADPAAHFTDLGPGYHQARTDTDRKLRNHIRQIQALGFTVNLTQAG

SEQ ID NO: 473331 - protein, 354 aa, unidentified
MVLRPLSGKDGNRDNDTMIGVDLAKSVFQLHGASMTGQPKFRKKLSRQGFAEFMSKQPPAIVVMEACGSAHYWAREISSLGHEVKLIAPQYVKPFVKRQKNDAADAEAIVIAAQRPEMRFVELKSTEQQGRGILFRARERLVHQRTELMNALRACLYEFGHVVPQGIHQLGRIKGILDEPNSDLPELMREECGDLMKQIAEKTVRIDVRTAKIKALAAEADTARRLQTIPGVGPLTALAVEAFAPPMESFRCGRDFAAWLGLVPRQFSSGGKERLGQVSKAGQSDIRRLLIIGAMSRLNWLGRKSIPEGSWLARIAARKPRMLVAIALANKMARTIWALLTKNEDYRDSAQVAA

SEQ ID NO: 473332 - protein, 334 aa, unidentified
MKKFDFFLGIDISKNTLDYCLLDDQCKVLEKGKVNNEPVSLSKFFLKFENEYCCKTTLLIVFENTGIYSKPVARFLNENKWCYSEVSALEIKRSKGVSRGKSDRVDAHQIAQYGFRNLDKIMLCTEPELIHQQLKILNTEREKMLSAIGSFSRTGEAEEFLGKEVFKVVKTHNRQTLSALRKQLKQLDNKISELLRSNEDLKKKQELLKTIPGIAEVGSLYLLLATKGFTRFKNWRKFACYCGIAPFEYSSGSSIRGRNRVNPLADKKMKSLLHLLALTSIRHDPELKLYYERKKEEGKHSLLALNNVKCKLVSRIFAVIKRETPYVKTHQFAN

SEQ ID NO: 473333 - protein, 345 aa, unidentified
MPIVGGLDIHRKQITFDYLDTVTGQVCRGQISPADRVHLRAWLARFAGCEDAAFAVEGCTGWRYVAEELAAAGVAAHLAEPADTAFARGRKRHAKTDRTDCRHLRMLLAEGRLPECWIPPGHILECRALLELYHDLRAEHTAWAQRIHAVLFHQGAPALGEGALRTEQGLAALRAAAAGCLSPAGQLQVATALEVTEALEARLHELRHHLLDAARHLTGAKVLAARLYGVGPVTALAMTCWLAGEGRFSSSRKAVRFAGLDVTVWSSDRKGPPGRLSRQGPPVLRWAVYEAGKTHARSSAPDHGYYAQVKDRCNGKRAALSEARKILRQACHILTELGDDALSVA

SEQ ID NO: 473334 - protein, 403 aa, unidentified
MFTLGIDVSKKSSRYLLLSPEGRRVKAFTLENSPEGFQILLQRLQEFSIPKGHLRIGLEATGNFWENLYAWLKENEFSVVLLNPFHVKRFREALAKKAKTDDLDALVIAQFLRTGEYVASQVAEETIQSLRETTRLRYELVTEKQNYQRKVLSLLAVVFPEYSQTHLKNPFSISALSLLQKFPTAKDLAQAKPKQIEKIIRAIPGNSFGPKEIETLIAVAQTSIYSGRAQEARALSLRILLNQITLLMGSIEELEREIHKMLSPQGPQDSFPGENLLTIPGIGEKTLAAVLSYLGTNGAHFSSATRAVGYVGYFPKIYQSGETHRENKISKRGPKLLRWALYMAAVACLKHNPEMRTLYHRKISQGKTQKQALIYVGKKLLQIMLAMLKSGEPYNPRMVFVQN

SEQ ID NO: 473335 - protein, 409 aa, unidentified
MKSPILFVGIDVSKHKHDVAIVDENKRIIQKPFIIHENHAGYQNLIQTLNQKQNQCQAQTIAIGMEATGNYWKNLFNFLNKHDNGYHTVLINPIQTRAHAKSQLRRATTDPIAATDIAKFMAERKPKASCPINPAYELIKDLDQHRLALVKQRTANVNRLRNELAKVAPEIEKHIQKITGLQILALLKHYPTAQAICHAGPQTLQKITYGKRQWKLPMPFIRKMKNLAENSIAYKTGPHDGYIVSALISTINHIQKQIQTTQNLIHTIFEQNLNKKSLLESINGISANNARILEAYIGDVNRFHNAKKIVAYFGLNPTINQSGTSKNKKARLQKKGNHSVRQKLFMITLNLIRHKQEPFYAFYLKLTKKGKPKLVAIAATMRKLLVIIYYLLKTKQPFMENKHQQTIES

SEQ ID NO: 473336 - protein, 340 aa, unidentified
MNHYAGIDVSLEQASVCVIDAGGKIVREGKVPSEPEALISWFGARGIGVTRIGLEAGPLSQWLYAALRAAGFAIELLETRHVRTAFKIMPVKTDRKDAHGIAELMRLGWFRPVHCKSMEAQETRAILTSRKLVQKMLHETEMCLRGVLRNFGLKVGKVTVARFEFRIRELVEGHPTLAMIATALLATRATLRREFNALEKRLRAIARNDTRARLLMTTPGVGTIVSLTYAAAIDDPARFQSSKTVGAHFGLTPSRYQSGETDRSGRISRVGDASVRAALYEASHVILTKPIKGCTALKSWAMRIAKRAGMAKAKVALARKLAVIMHRMLADGTTFTTQPA

SEQ ID NO: 473337 - protein, 366 aa, unidentified
MKKTSTVRAKGNMIFKGHKLTIGLDLGDRWSFYCVLDEAGEILLEQKVATTAEAMKQTFAKIPRSLIALETGTHSPWVSRLLRELGHQGLVAHAQKVQLISKSTRKDDRHDARTLARLARIDPELLGPVRHRSAQAQIHLTVIRARAELVRARTSLVNAARGLVKSYGQRLPKCGTEQVNRELAAGLCPELREVLEPLLQEIESLNERIQEYEVRMEKIAQESYPQVALLKQVKGVGTQIALTYVLTLDDPHRFPKSREVGCFLGLRPGRRDSGESQPQMHISKEGDRYLRTMLVQGAHYILGPFGADSDLRRWGLKLAARGGKSAKKRAVVAVARKLAILLHHLWVSGEVYEPLRNSQKAMRAVA

SEQ ID NO: 473338 - protein, 355 aa, unidentified
MSQEKYIGMDVHQATISVAVMDAGGKLIMECLLETKAATIVEFMEGLHGTLWLTFEEGTSAAWLHDLLKPHVNRLVVCDPRKNALLKDGNKSDRIDARKLAELLRTNQVKPVYHGEHGVRTLKELGRSYLTITKDVTRVMNRIKALYRSWAIPCAGTTVYAPRHRAEWLAKIAEPGVRVRAERLYQQLDLLQPVRLEARRELLVESHKHSAVKLVRQIPSMGPIRAALLVALLQTPHRFRTKRQLWAYIGFAVETHDSGEYRYVRGKLQPNRERITVRGLNDNHNNELKNLFKGAAISASTRPGPLRDFYVARVEKGMRPTMARLTLARKIAAISLTIWKKGVEFDPQHLHRQAA

SEQ ID NO: 473339 - protein, 343 aa, unidentified
MDQHIGLDVSLKDTSISVRENGKRVWRGKCASDPKLLADLIRKRAPRAKRVVFETGPLAVWFYHALTAEGLPAICIDARHAKAALDMAANKTDANDADGLAHLAEVGFYREVRVKGFDSMLMRTLISARRQLMKMRVQMSNQIRGLLKTFGLVVPKGAGSVFERNVVSLLEGEDNLARIILPLLKAWGDIRLRVAELTKQLVIMAGADQRCRLLTSVPGVGTVTATAFAAAVEDSINFKNSRAVGAWVGLTPKRYQSGEVDYEGHISRRGDARLRTLLYEAASVILNRSTETNALRTWALALKERLGFKRAAVALARKLAVIMHSMLKTGELFDPNAGAAVPA

SEQ ID NO: 473340 - protein, 389 aa, unidentified
MKIYVGIDIAKLNHFAAAISSDGEIIIEPFKFTNDADGFQLLVSKLESFDKNSLIIGLESTAHYGDNLVRYLVAEFYQVCVLNPIKTCQMRKNNIRKTKTDKVDTFVIAKTLMMQDDLRFVSFYDLDMMDLKALGRFRQKTIKQRTRLKIQLTTYVDQVFPEIQYFFKSGLHQHAVYALLKEAPSPKEIASMHMTHLANLLKVNSHGHFTKEQAKELRVLAQKSVGANDSAISIQITQTIQQIELLDSQLEKIEAEMTDIMKFNDSVIMTIPGIGYINGGMILGEIGDIHRFSNPNKLLAFAGLDPSVYQSGNFQAKTTRMSKRGSRVLRYALVNAAWNVVRNNATFKAYYDAKRAEGRSHYNALGHCAGKLVRVIWKMLTDEVEFNLE

SEQ ID NO: 473341 - protein, 433 aa, unidentified
MKKRIYRTMPVNAFQPCSIRRESIGAKLTVGIDIAKVDMVATLVAADKQVLATLRWKAPAENPALIAILRHFRTADIPVEVAMEPSGTYGDVLRHQIVSDGFPVFMINGKRTSDAKEVYDGVPSMHDAKAAGIIAKLHLDGISRRFSPLSPDRQQLRAAISIMDLHQQRYLQLVGHLEGSLARHWPELPTILELTSASLMALLARVGGPADVAAQPQLAARLLHGQSRGLLASDAITTVLASARTSVGLPLVGLERDALMAIAAEAHRALRSAKAARTVVEKLSHHTPATLLAPVVGQSTAAVILSEVGDATTFSCAAAYAKAMGLNLKEKSSGTMKGQLKITKRGPSRVRQYLWLAVFRWIQTDPIAKAWYLRKKQRDGGRASRAAVALMRKLAKALYHVGRGGVFDSNKLFDLTRLPCTTLPLRKEHHHLT

SEQ ID NO: 473342 - protein, 412 aa, unidentified
MIHPKMRYTYVGVDSHKDTHTAVFLDCFFEKLGEISFENLPDKFEDFLAQAQKYKADGTTFMFGLEDCSAYGRTLAKFLHGSDHHVKHVNPLLVARERKNQNITQKTDSVDAECAARVLLSKFGELPDVEPQDEYWVLRTLVARRNLLIRQRAATKNYLHSVLMQSYPNYRAFFANIDCKTSLAFFMRYPSPHTLDGVTVEELAAFLEIPSNRCIGIPKAKAILGTLQDTTVSFQSTRDSVVQSVIRQIEFIIAEIEQLDASIATFIKQFNCTLTTMSGIDTPTAAQMLSCIGDIKRFSTPAKLARYAGIAPVTYASGKNDKQYANQRGNRELNSLFFWLAVRLSSIQCANHRVMNSFFYEYYNRKMAEGKTKRQALKCVQRRLVNIIWTMLTHGEEYVNPPTFEVEEYEAK

SEQ ID NO: 473343 - protein, 404 aa, unidentified
MNAVGIDVSKGKSMVAVMRPFGEVVATPYEVSHTDADLKTLVDFLKSLPGETKVVMEYTGKYYHPIAKILSEAGIFVSVVNALLIYRYGNNSIRKVKTDRLDAIKIANYCLDRWVDLEPYTPLDQIRQTLKACHRQYGQYMKLKVTLKNNLISLLGETFPDINTLFKSAPRKEDGREKWVDFVAKFWHRQCVCMSSYKSFAEKYQKWCSKAGYNFSEQNAKAIYDHATAQVSTLPKTEATKSLITHAVNQLNTVAETLSSIQQEMLELASKLPEFPVVMKMFGVGDILGPQLMAEIGDIRRFERKQSLIAFAGVDAPPCQSGTFESKNHHISKRGSPRLRKTLFQVMSTLLQHAPVDDPVFQFLDRKRQEGKHYYVYMTAGANKFLRIYYGTVKAYSEQSATQS

SEQ ID NO: 473344 - protein, 432 aa, unidentified
MMKSPATEAFAARIGIDWGDAKHDICLLPEGTTVGERCVLTHSPEAIDEWVRGLRNRFGARPIAVALELNKGPLVYALQKYDGFVLFPINPTTLARYRKAFTPSGAKDDPTDAELALDLLCRHPEQLKALCPQSAPMRALQQLVEQRRSLVADRVRLTNRVSNALKNYFPQPLQWFDEKGTVLFCDFLARWPTLKQVQRARRTSLRTFFFEHNVRREQLITQRIDAIRCATALTHDDAVIGPNALVVETLVAQLRCVIDAIDTFDCAIADTAAKITDYPLFEALPGAGPTLAPRLLVAFGEQRDRYHDAAQIQKYSGIAPVTERSGKSSWVHWRYAAPTFLRQTFVEWAAQTIPRSFSARAFYDQQRAKGSSHQAALRALAFKWIRIVFRCWRDRVPYDETTYLNALKRRGSSLLSSITTPKVLDGAPQGVS

SEQ ID NO: 473345 - protein, 369 aa, unidentified
MSSVASRAGAIHLGMDTSKKTIMVATLMPGEQIPVTERIANEEAAVRRFIARLGDPSQLRACYEAGPGGYDLYWLLTSMGVACEVVAPSLIPKGGSDKVKTDRRDACRQARLHRAGELTPVRVPTRAEEAVRDLVRVRAGLLADRKRAQQRLTAVLMRHGCIWCHGSYWTGAHRAWIAAQRFTEPALTAAIAHYRAALDTREAELAAIEAELAPWAHREPLAGPVARLGCYRGIAELGALTLASEITDWRRFPAARAFMSYTGLVPAEYSSGERTRRGHITKAGSEPVRTTLIEAAWAYQHAPAIGATLRRRQAGAAPGTLARSWKAQRRLHARYRHLISCGKAPGEAVTAVARELAGFAWAEMTADPA

SEQ ID NO: 473346 - protein, 341 aa, unidentified
MNQQFDIVAEERISHSEHGDLDDFFSRFPRGTDVVMEATFNWPWIADLASGRGLSVRLANPVAARRLAAGMPKSDRRDAIWLARLWLSGDLFPGCYVASPADRRRRSLFRQRLLQVRVRTALKNAVHGQLFRLGHRLGAQVSDLFGRAGRQLLECLALPEHERLLLDDKLGLIDEVSARIRSLEERIGAELRDHRDASLLLSIPGVGRIVAYTFLAEIGDAGRFPNGRALASYAGLLPLANESADRDRGRRCSARCNRFLRWAALEAVTGAVRGSARMLSLHSRVKARNSGKAGKARVAVARQILEISWLLLTRGEPYQENPPARGRRRHPNRASQTTLSA

SEQ ID NO: 473347 - protein, 332 aa, unidentified
MLNCIGIDVSKSTLNVHIAKNSQDLKIDNTLAAVKKLYTKLKKIYKNEVEELVFVFEPTGSYSELLKKFCADKSIQCFIINPKQFSNYAKALGVEVKNDEVDARVLSQAIVLAKPSQIKVPCYDKDVEQIKELMSFYKFTCKQTSQLRNHLESLVAKAGDSFSIKELKKSIKASKEREKRIIEQVHQLIQANPTYKKAYENITSITGVGQIGGIALLHLFLKYPEANQRQITSLAGLNPVYRQSGSSLQSSYRISKSGSVLYRGALFMGVMTAVRYDKNFKAFYNRLKANGKHTTQAQIAVMRKIIIVAHSLYKNDAKYVKKEDTLGVESMD

SEQ ID NO: 473348 - protein, 370 aa, unidentified
MGKSVLYVGLDVHKMSVDVAIAEAGSGAEVRYYGRIGGDLEALDKVTRKLQAQGAELRFAYEAGPCGYQVYRHLTGQGWPCLVAAPALIPRRPGDRLKNDRRDALTLARLFRAGELIPVKVPDADDEAMRDLSRAREDAISVERRAKQRTGALLLRHGRRYPGKTTWGRGHWRWLLQQVMEHPAQQIVLQEYLDAVREASARVQRLTGQIRELIPQWRRGPFVAAYQALRGVSVIVAATVVAEVGDLSRFNNPKELMAYLGLVPSEHSSGAAVRRGHITKTGNGHARRVLVEAAWAYRLRARVTRPLLKRQEGLPESIRQLAWKAQLRLCARYRRLLARGKAKQTIVTAIARELAAFIWAIGQAVEPVTA

SEQ ID NO: 473349 - protein, 412 aa, unidentified
MKEVRRRVGIDWGSESHQVCRIDAEREPAQRVFPHTSEGMRALVAFVVEGEIDPEQIAIAIEVNHGAVVEALLAKGLRVYSINPKVLDRLRDRFSPAGAKDDRRDAFVLASCVDSDAHAFRKIEPGNEGNTRLQAATRLREDLKSDLRANANRLWNELREYRPALLTLCPGADEPWLWVLIEKAPSPSEGAKLTRARIGAVLKKHRIRRLTAEEVRTVLLGDVLSLRSVYIESHVACALVLIARLKLAQTQIANVEKQIKTALAERVKSEEQTERRDLTILLSLPGFGSSTVATALGESGDAFERRDYSALRSICGAAPVTKQSGGTRYVVMRQVCQPRLRVALHLSALQAIRVDPKFGDLYLRARARGQTVGRAIRNIVDRLLFLAIQLLKKNQLYDIRLRQIAPEAVAAP

SEQ ID NO: 473350 - protein, 383 aa, unidentified
MRHGGILIEANDSEGEAMKKHTTINQSLSADAAACTTVAVDLAKRVFQVAGEDALGQVIFEERIKSREAFQAFLHKLPVSVTVLVETGPGAQAWARLLQTQGNPVRILPAQLVANHRSGPKNDRNDALAILRAGRDCKISAVPLKSAAALAMQALHRARQGYVRRRTAVGNQMRGLLLEHGVAMAQGELAISQLVPRVLEDATQPLPDLLRELIAELLGEWSQLGERVNVLTGRLETAAKADETAKRLMTVRGVGPIIATALLAKQTEPERFANARLFAAYFGLVPSQHSSAEKVRLGKMSKHGDAYLRSLTIQGAHAVLRQLRPDSPQPDDQRLQRWISRLGRKEAAVRLANRNLRILWVLLQNDQTYRRQPGTGQESAMSH

SEQ ID NO: 473351 - protein, 346 aa, unidentified
MKIAVLGIDLGKNVCSVVGLDASGAVVLRRRVRRDTLIDLVAKLPVCIVGMEACCGAHHLARLFTALGHNVRLMSPEYVRPYVKAQKNDDRDAEGIAEAATRPTMRFVEMKTEAQLDMQTLHRSRDRLVGERTALINQLRAILMERGIVAPQGKRKLEQFLVTMMDEHDGAELSARMRMLVADIRAEWRDLDRRIEAFDAEFVRWAKENEDARRLVTIPGVGVTIATALIAAIGKAETFEHGRDLAAWLGLVPRQSTTGGKPRLMGISKRGNKYLRKLLIHGARAALPHVADKDTALGRWAKNLLSRVHQNVAVVALANKLARICWAVLRSGQRFAPQGIGGLASA

SEQ ID NO: 473352 - protein, 342 aa, unidentified
MNYYAGIDVSVKSSSIAVVNDHGEIVREAKVATDPTSVIEWLRACGLPMERIGLEAGPFSQWLYRGLKEAGFAVDLLETRHVRNAFKTMAVKTDRKDARGIAELVRVGWYRPVHCKSLDAQETRVMLAARRLVDKKLGDVEMTLRGLLRNFGLKVGKTTPTRFADRIKELVSGNATLQIIAESLLAVHQVLLRELKSLEKRVRRIARDSADARLLMTTTGVGPIIALSYAAGVDDPARFKKSKSVGAYFGLAQKKYQSGETDITGRISKAGDASVRTALYQAAHIMLTRPVKASKLRTWALRLSKRVGMKKAKVALARKLAVVMHRMLVDGKPFNPAAGAAA

SEQ ID NO: 473353 - protein, 315 aa, unidentified
MTQTNITTAGIDTSKSKLDIAVYGRAERWQVPNTLPGWRLLVSNLAKTGVTRVGIEATGGYERGVVEHLRAAGFMVLVLQPMQVKAFGRVHLRHAKNDALDAILIAACAAAMGPPRIAPDPRLADLAGYLTFLEQIEEDIARFKTRLEHIDEPRLRSLVGSDIRRLKARRKAQIRTIAKLLRGHDDLASRLDLVLSIPGIGERTALALIIRMPELGQVSREEAAALAGLAPFDNDSGLRKGQRHIAGGRGRLRKSLFAAALPAAFRWNKALIALYARLIANGKAHNAALIACARKLLVYANTVVQRGTPWVENAT

SEQ ID NO: 473354 - protein, 366 aa, unidentified
MRTTLGFSSEPITKEAPHTMLHLGLDLSRKRLDVCVLDERGERLAVTAAPPDDDGLRHLVREVSAYGGPVHAVIESMTGARFVHDTLELHGWEVDIADAQKVKGLAPLACKTDKIDAWVLAELSRRDLVPAIWLPDPAVRGERERARFRLHLVRHRVMLKNRIHASLMSFGKPCAVSDLFGNSGREMLARLDLPEPWTENITTALWMIDDLDEEISSIERQLRALGADHPYVSLLQSVPGVAWILGYTIASEIGDISRFASPKQLVGYTGLCPRVYQSGEKDWRGPLAKNGPKYLRWALIEAAVHAARHPIYVEHYQRTKSRLGRQRGAKVARVEVARKLTEAIWHMLQTGSYFSPARSHSVSGRI

SEQ ID NO: 473355 - protein, 352 aa, unidentified
MDHIGIDVHKRESQIYILAEGGEVIERRIRTEPERFAAVLGTRPRARIVIEASTDSEWVARCLEALGHEVIVADPNFAPMYATRTRKVKTDRRDARALAEACLLGAYRPAHRLSDPQRHVRGRLVVRDALVRTRTRYISIIRALLRQHGYRVPSGSAEHFVHRVQQPPLPGRLRSVVAPLLALMRPLNGQLTYSDATIEHLAVQDPRVPRLRSVPSIGPVTAAAFLAAIDDAQRFHHAHQLEAYLGLVPGERSSGDTQRRGAITKAGHSRTRWLLIQAAVSILRRRPPQAEELRTWALRIAARRGNRWPWSPSPVASPASSMRCCAMAVCSSPSAFGLRAVPRLAAAAPVSM

SEQ ID NO: 473356 - protein, 403 aa, unidentified
MNAVGIDVSKGKSMVAILRPFGEIVYSPFEIKHTSHDINSLVDLIHSVYGESRVVMEHTGRYYEVLAHQLSEADIFVSTINPKLIKDFDNDSLRKVKSDKADAVKIARYALDKWQNLKQYSLMDELRNQLKTMNRQFGFYMKHKTAMKNNLIGILDQTYPGVNTYFDSPARSDGSQKWVDFASIYWHVDCVRKMSLNAFTDHYQKWCKRKKYNFSKSKAEEIYGKAKELVPVLPKDEITKRIIKQAVEQLNSASSTVEELRTLMNDTASKLPEYPIVMAMNGVGPSLGPQLIAEIGDVTRFTHKGAITAFAGVDPGVNESGTFSQKSVPTSKRGSADLRKTLFLVMDVLIKTMPQDDPVYQFLDKKRSQGKPYYVYMTAGANKFLRIYYGRVKEYLASLPQSE

SEQ ID NO: 473357 - protein, 392 aa, unidentified
MIYLGIDVSKEKHDCCILSQDGELLAKPFSVPNSRQGYDKLFSVVSSFENHPENVKAGLEATGHYSFAILGYLLEKGFACFVFNPLHTNLYRKAVSLRKTKTDKVDSKTIALMLLSSVGLKPYSKALYHNEQLKSLSRYRFSKVRERAVLKQQLARLVNILFPELEKLVPSLHLSSVYALLEQFPGASYVARAHLTKLTNLLSASSKGRYKEEKAIRIRDAAASSIGCVMPAKSLELKHTVALIRVLSEEIEEIEAEIKKLMDELHSPITSIPGISYRMAAMILSEIGDFSNFDSPDKILAFAGFSPSTYQSGKLDNAYSHMEKRGSRYLRYALYNAATYVCIWDKTFADYLHKKLAEGKHYYVAISHAVKKLVRVIYALQTTGQTYISAVA

SEQ ID NO: 473358 - protein, 353 aa, unidentified
MNSLTDLGEVVDVVIGVDTHVGTHSAAAVNAATGGVLGEITVEATAHGYAQLVEFADEHAVLRAWAIEGTGGHGAGLARHLAQRQEIVVELDRPKRAKRRNGAKSDPLDAVRAAREALARPRLGTPRSGGDRQALSVLLAARRSAVQAATEAQLQVFSLVIAAPEPIRARFRGQKLPGMLATAASLRVQSSWDVETTTTVRALRSLARRFRALSIEAKEHEKAIRAIVRSWRPDLLEEFGVGAIVAATVLCAWSHPGRIHSEAAFAMLAGVAPIPANSGQVTNRYRLNRYGDRQLNRALHIIVQSRIRYDGPTRDYVARRTTEGKTGREIKRCLSRYIARDLYRLLESGPITA

SEQ ID NO: 473359 - protein, 407 aa, unidentified
MYYCGIDIAKHRHEMSVLDEAGESVLSLHFANSQKGLEKVLDALASLKIEPENVLFCMEATGHYWLALYCQLKELGYQLHVINPIQSDALRNLYVRKAKTDKKDALLLADLVRLGRAPVTQLASETTLKLQTLSRLRLEFVHQIGGLKNRALGILDRIFPEYPECFSNVFIRTSRVLLKSYPEPELLAEADLSELTAFLNQHSRGRIHRDRAEQIQALAKGTFGIRLALDAFTLELKLLVEQIEFIEEQVGILEEAIEQVLEELRTDPEQPYRHVLETIPGIGTVLAAAIIGEIGDISRFPNAKALVAYAGLDATVKASGQFEGTRNRISKRGSPTLRNSLWLAAVSARRFNPELKAFYDAKRAQGKHSGVATGAVARRLTHLIYSIWKDNRPFETDYKWSPPGSND

SEQ ID NO: 473360 - protein, 332 aa, unidentified
MHKDTHTAVVMDCWTNKIGEITFANRPSAYDKFITDVKKLYGNLQPIFGLEDTRGFGRNFASYLLGHKYTVKHINPAYTDAMRSSAPMSKKDDSYDAFCVAKILRDMLDTLPDESHDDLFWTIRQLVKRRDSIVQGIIIAKNQLNAQLTYVYPSYKEYFCDVDTKTAMYFWETYPHPKYLKGVQPEALLEELRKVHRGTTVKKVNQILTLSEENSPKEKDYQDERDLVIKSLVRELKFRKQENEDIDRELERLIQLTGYKLHTMPGINLITAASIISEIGNIERFPNSNKLAQFSGVAPVNFSSAGKGKDQRSRQGNRVLNAIFHFLAIQLV

SEQ ID NO: 473361 - protein, 362 aa, unidentified
MKNIRQCVGIDCSKDTLDTAINFLDENFQTKIHATEVFENNDKGFKRLMKWMHKLCLKDMPCQVVVEATGVYHEQLAYALVNNGFTISIVLPNKIRNYCRSTDIRTVTDKISAKQISEFGLVKKLDNWIIPDKIYTQLKALSRERIQLSDEKTAASNQLHAFKHAALTLSSTAHRSAKRIKFIEQQIQQIEDEMKQLVKEHSTLKEKIEKICSIKGLGFITVVSIIAETNGFNLVRNHRQVVCYAGYDIIVKDSGTSVRSKPRISHKGNKYIRRALHFPALTAVKYNVPLENLYNRIYDKQNIKMKGYVAVQRKLLILIYTLWNKDEAYNPEYVHSSIKNLEQPNKTALTELDHVRSLNFIC

SEQ ID NO: 473362 - protein, 352 aa, unidentified
MEQFIGCDAHKKFSVFVAVNEKGQAGDALRVVHDRQLYREFLARLPPQSAIAVEATGHYSWIVDEMERAGHRPKLANALEAKRRMALTKKTDKLDARGLAILLRNGTLPEVWIPPRELRDQRELLRLRIFLVHLRTRVKNRIHGTLACHNVQVPGADLFGVEARLQLGARLPELPVHSREAIEQELATLDFLETQIDSAEHRLEMIMKVSAEADLLKTLPCVGKILSMVLMLEIGRVDRFPTAAHLASYAGLVPRVHSSGGHTRMGQVCANVNRNLKWAFVETGNLIVINQRGLAGTHVVQLYQRIKRAKNHQKAVVAVARHLAEAAWWVLTKQEVYREPQGPRQALSSTHG

SEQ ID NO: 473363 - protein, 490 aa, unidentified
MVVTAVMVDVFPETKLTWSVGVEPRNVPGLTPWTCSKVHRALRTRVLRPTDRPASATPTGGEPMTNDDLHVVHPRAAGLDVHKMEITATVRLCATPRGEPTCETRTFSALASGLDALVAWLTGHGVEAAALEGTGVYWHAPWRALAAAGIEAQLLHAQHVKQLRGRKTDIEDSRWLARVCQFGLGRPSFVPDEAFCELRNLVRHRRTLVAQRSQTRNRVQKVLDRSGIRIGGVLSDVFGLNGRRILDGLVDRRPRATILDSLSRHVRSRLELLGDALQLTLCETDRLLLADLITAHDDLNRRVQDFDRHIDNALTDYTTQYRLLETIPGIDHTSACAILSEMGPDPSVFGAAGRLAAWAGLCPGNNESAGKRRTGRSRHGSRTLRAVLVECAHAAARTKKCQFQAYQKALTVRRGYKRAVVATAHKLARCVFAVLRDGTPYRDPAADYEALLVKRNAPRWLRTLRKFDILVSNDDGTVSVRWPEKTMPMH

SEQ ID NO: 473364 - protein, 343 aa, unidentified
MQTITTIGLDIAKSVFQVHGVDAGGQVIIRRQLKRRQVLTFFEKLPPCLVGIEACASSHHWSRELQALGHTVRLMPPAYVKPYVKRQKNDMADAEAICEAVARANMRFVPTKTPEQQSCLMLHRTRHLFIRQQTAVINSIRAHLAEFGIVAPVGRKGVTELLRVVADSNDKRVPEIARACLAALGTQLLALKEQIVGFDRMILAWHRSNQTSKRLHYIPGVGPMLATALVASIADPSTFRSARNFSAWIGLVPKQHSSGGKDRLGSISKQGDRYLRSLFVAGALAVIRYAKIHGTGHRPWLTALLARKPTKVAAIALANKIARMAWAMMARGERYKEPVALAR

SEQ ID NO: 473365 - protein, 347 aa, unidentified
MLIIGCDFHPGFQQVAIFDNLTGEIQEKRLQHRADAEGFYRRLAGQEVLVGMEACGHYPWFEQLLEKLHIELWFGDAARVRASVVRKQKTDRRDAEHLLDLLRQDRFPRIWVPSLEVRDVRQLLVHRHKQVQTRTRTKNQLQAMALSFGVQKKRKLWTKAGREELEQLPLLPYAAQRRKRLLEALDALEVEISELDRRVAEEARERPEAVRLMTHPGVGSVTALAMVLTLGPAERFGSAKQVGSYFGLIPSEESSGGKQRLGKISKQGSSFLRFLLVEAGQTAARIDPQLKRFYRRLAVRRNRSIAKVAVARKLATRLYLMLREDWTYAQLSQAVMQVSPSHSVAGE

SEQ ID NO: 473366 - protein, 370 aa, unidentified
MPSILYVGMDVHTTNYTLCCYSVEHDEVFAEVQMEPDYKNIQKYLEQVKRNYGKACEFVCGYEAGYLGYTLYHQLTSKGIDCIILAPTTMPQTKKKGIKTDKRDAKKIAQCLAYKTYSPVYIPTDEDNAVKEYIRMRDDEKAILKTLKQRLLAFCTRNGKHYDGGSSNWTKKHLTWLKQQKFDNVILQETFNEYLMLYFQASDKVDLFDKRIEELSQRDPYRGKVKMLICLLGIGLHTALATIVETGDFYRFPTAQQYAAYLGLVPGENSSGDSKKQGGITKAGNTHVRKLLIEAAHCYNRGAVGKKSKTMLAKQAGNDPKVIAYADKANDRLKRKYYRVLFRSNKNKATTAVARELACFIWGMMTDNIA

SEQ ID NO: 473367 - protein, 408 aa, unidentified
METLYTCCCGLDVHLKTVVACLLKVVGQKVHKQVRVFKTMTQDILALSDWLQAEDCTHVAMESTGVYWKPIYNLLEGHFELLVVNAQHMKTVPGRKTDVADAEWIADLLRHGLLRGSFIPDAPQREVRELTRYRRTLVEERARLINRLQKVLEDANIKLSSVVSNIMGVSARAMLETLLAGQTDPVALAELARGRLREKHDQLVQALVGYFKPHHAFMLTDHLAHLDYLTEAIERVEAEVEQRLQPVALEVALLDTIPGISQQIAHVILAEIGTDLTRFPSARHLASWAGLCPGNNESAGKRYSGKTRKGSPYLRTALVEAAHAAARTKNTYLAAQYRRLAPRRGRKRALVALAHTLLTIIYHMLKRKEPYHDLGGNYFDEHDRQAVEKRLVGRLRKLGYEVALQPTA

SEQ ID NO: 473368 - protein, 343 aa, unidentified
MNATTYGLDVAKRVFQMYWVDAQTGEVVNRRFGREELIAFLARRPAGRVALEAAGSAHWWARKIKALGHEVVLLHAQFIRPFVQTNKTDAADARAIWTAVQQPGMRVVAAKTEDQQAILSVHRIRALLVKFRTMQVNQLRGLLYEFGVTFRAGRQTGLKEIRARMAELEGALPGVMLTSLQEQLKRIDALEQELDRLEQRIGSWQKQEGACRAIADVPGIGKLTATALVATIGEAKAFKSGRELASFLGLVPRQSGTGGKIRLGSISKRGDPYLRTLLIHGARSVMYHTKQPTAWQKDIQARRPANVAAVAVANKMVRTAWAILAHGQAYQKDHVRLKPRVAN

SEQ ID NO: 473369 - protein, 322 aa, unidentified
MYSIGLDISKSSIAVHIPKNNLDLEIENNMQSLKALLSKLKKLYKKETDKLVWVFESTGSYSSLIYRFCAQKGIKVFMPNPKQARGFAKAIAQRNKSDKIDARVLAQSIAIAKETEIKVPHIDALVENFKEMIGYYRLLIKQESQLKNHKESLSAKGNHTTLVKSVDKQIKALKKEQQALLEKMRDIVRKDNVLSQKLDAIASIPGIGELTALILLHQFIRYPHANQRQIVSLAGLDPVIRESGSSIRGKVKISKAGDRIYRGALFMPAMVAIRFNAKLKAYYERLKANGKHTTVAQVAVMRKLLVIAHALYKSGQIYREEA

SEQ ID NO: 473370 - protein, 415 aa, unidentified
MNTADYAAHVALDWGDKTHAFALQIAGADGIETGTIEATPEALLDWLDKLHQRCHAKPVALAVEAGRNALLRVLVAHTWLTVYPVHSATSGRFRQAFIPSGAKDDIPDALVILKLLRHHRDELSALVLDSAELRELAALVADRRGAVDARTRLVNQLSGLLKHYYPQALTLAGEDLAAPLAIAFLRRFPELAAAQKAGANRLRAFYTKHNVRSEQRIDERLALLGRARALSEERAVIEPSLLALARLLDLLEVEARHIAAYDKRIASVFAVHPNAEVFAALPGAGPALAPRLLVAFGDVTARYPNAQAMQKYAGLAPVREKSQKRVWVHWRWAAPKFLRQTFVEWAGQTVPRCAWAHAFYQRQKAAGKGHHAILRALAFKWIRILWRCWKDNVPYDETRYQASLAKRGSPLANAA

SEQ ID NO: 473371 - protein, 361 aa, unidentified
MHYVGLDVHAQQSTYCVLDGNGKVFQRRTVFGSWHKLIGKLDSMPKPFAVCYEASLGYGFLYDRLSKIAERVEVANTSQLRLIFRSKHKNDRADAEKLAKLLFIDQVPVIHVPKPEIRAWRSIIEHRHSLVSERTRIKNGLRAILRSRAIVPPMRLWTKAGVTWLAGIDLDSDLDTLRRDMLLERLCSVEKMVARVEKALDARGTAHPGVRLLMTIPGVGLRTAEAVMAYIDEPGRFTRNKAVGRYFGLVPTQDASSRKNHLGHITKEGSPTVRKLLVEAAWQGKRRSRRIKAFYERILRDDKQRKKIAIVATAHYILRCMLAMLTTGEVWRNRDTDKIYSPPQRLRRVIDKPILAAVAGN

SEQ ID NO: 473372 - protein, 358 aa, unidentified
MPSITPEDAAIIDVTGGVDTHQDPHTAAVIDVVGRVLGSQQFPATAAGYAALLAWMRGFGRLLRVGVEGTGAYGAGLARLLRDEAVDVIEVDRPDRKTRRFQGKSDPIDAIQAAKAALAGERTGTPKQRDGRVEALRNLRVARRSAVDQRADAQRQIKALIVTAPDELRARLRGLAVKQLITTCANLRPDRADAATPATATRIALRSLARRHQQLTTEIADLDELLEPLVAAINPGLLAANGVGADVAGQLLVTAGENHDRLTSEAAFAMLCGAAPIPASSGKTNRHRLNRGGDRQANKALYRVALCRLRWDPHTRAYMERRTKDGLSKKEIIRCLKRYIARELYEFITTSNDHELAA

SEQ ID NO: 473373 - protein, 342 aa, unidentified
MSDTIIGVDLAKRVFQVHGATVTGHVIFRKKLAREQFRIFMAAQPACVIVFEACGSASYWAREMEALGHEARLIAPQYVRPFVKRQKNDATDAEAIVTAARQPEMRFVTPKTQEQQAKAVLFRGRERLVHQRTELVNALRAVLYECGHVFPIGLSHLKRIDALVKDPACDLPALIIAECQDLLLQIAAKTERIDVKTKTLKALAAKADTSRHLQTMPGVGPLTALAVEAFAPDMAQFKCGRDFAAWLGLVPRQRSSGGKERLGRISKAGQADIRRLLIIGAMTRIMGPARHKISANSWIGRMLARKPKMLVGIALANKMARQIWAMLSKKEDYRDPALATAA

SEQ ID NO: 473374 - protein, 366 aa, unidentified
MKKISTVQIFESEIFKEQRLTIGMDLGDRSSCYCVLDEAGRILLEQKVAMTPEAMKQTFSKIPRSLIALETGTHSPWVSRLLTELGHEVIVAHAQKVQLITKSNRKDDRHDARTLARLARIDPELLGPVRHRSAQAQIHLTVIRARAELVRARTAMVNAARGLVKSYGQRLPKCGTRKVSRELGAGLPAELGEVLEPLLKEIESLNERIKEYDERMEKIARESYPHVELLKQVKGVGTQIALTYVLTLDDPQRFAKSREVGCFLGLKPGRRDSGESQPQLHISKEGDRYLRTMLVQGAHYILGPFGEDSDLRRWGLRLAGRGGKSAKKRAVVAVARKLAVLLHRLWVSGEVYEPLRNSQKAMRAVA

SEQ ID NO: 473375 - protein, 308 aa, unidentified
MVAGTLGSLHKAGSKKMADTITVTAGIDTSKDKLDVAVHGTTTCFTVESRCAGWQQQLAAELTKAGVQRAGIEATGGYERGVTRQLQAAGFTMVVLQPLQAKAFARLHLRRAKNDRIDAALIAACAQAVDVPRIKPDARLDALTDHLTFVEQIEEDMARLKTRLEHIQDKRLRRIATTDIARLERRRANELQHIAKALRSDDDLAKCFDLVLSVPGIGDRTAITLIVRMPELGRISREEAAALAGLAPFDDDSGQHKGERHIAGWSMPVVSSRAPKEWHTQRCASACPDWASQSFCEVDAAFPQCDDK

SEQ ID NO: 473376 - protein, 346 aa, unidentified
MCSLPVFVGMDYHDSFVRVVVQDTDGSEMGNADRTNDWQAIAQFAERFGRPVRAAIESCCGAADLAEELVSCAGWSVALAHPGYVQRMKQNPDKTDCQDAQLLADLERIGYLPRVWLAPRYIRELRHVVRYRLQLTEQRRATKLRLRALLREQRCHAPEGLNAWTKAWQHWVRHTAELSAQGRWLVKQHLRELARLAIRIHEVEKRLEHLTANDVEVQRLQQQPGIGPVTAWTMRAEIGHFDRFRTGKQLARFCGLSPRNASSGQRQADAGLIRAANPALRTVLIEAAHRLVQYDPSWQKFAQRLRARGKPGSVVAAAVGNRWMRRLYHEMKTPSGELAVAVGPAQ

SEQ ID NO: 473377 - protein, 401 aa, unidentified
MHDGFGVFVGLDVGKEGHHAVALSRAGRRLHDATLPNTEAGLRRLFDKLGRHGLILVVVDQPASIGALPVAVARACGHQVAYLPGLVMRRLADLHPGTAKTDARDAYVIADAARTLPHTLRRVDTGDEALAELEVLVGYDDDLAGEVTRISNRIRGLLTQIHPPLERVLGPKLQHPAVLKLLSRCGGPAGLRKAGRTKLLEIVKARAPRMGARLVEQILTALDAQTVVVPGTTAAETVLPRLADSLCDLLRQRDQVAEQVEGMLDAHPLAGVLTSMPGIGVRTAARILLEVGDGTAFPTSGHLAAYAGLAPVTRRSGSSIRGEHPPKGGNKQLKRALFLSAFAALADPASRTYYDRKRAEGKKHNAALICLARRRVDVLHAMLRTKAPYQPKPAHESRHAA

SEQ ID NO: 473378 - protein, 343 aa, unidentified
MQTITTIGLDIAKSVFQVHGVDAGGQVIIRRQLMRRQVVAFFQKLLPCLIGIEACASSHHWSRELQALGHTVRLMPPAYVKPYVKRQKNDMADAEAICEAVTRANMRFVPTKTPEQQSGLMLHRTRHMFIRQQTAVINSIRAHLAEFGIVAPVGRKGVTELLRIVADPNDKRMPEVARACLAALGTQLLALKEQILEFDRMILAWHRSNQTSKRLHYIPGVGPMLATALVASVADPRTFRSGRNFSAWIGLVPKQHSSGGKERLGGISKQGDRYLRSLFVAGALAVIRYAKIHGAGHRPWLTALLGRRPTKVAAIALANKIARMAWAVMAKGERYKQPAALAR

SEQ ID NO: 473379 - protein, 365 aa, unidentified
MIVIGADTHKQSHLCGAVDGNSGAVLGELEVPARKRGFATLLDWGKELGGERIWAIEDCRHVSGSFERFLVAQGERVVRVPPRLMGASRRSERRRGKSDSIDAFAVARAALREGPETLPTAHLDEVALEIKLLVDHREDLVRARTQDQCRLRWHLHDLWPEFQIPAGGLDRPKWLERVARKLSHAPQGARIRIARELVREIKARTRRIKVLKAEIASLVGKEAPQLLEIPGCGVLTAAKLLAETAGIERFSSDAKLARLAGVAPIPASSGNHTRHRLDRGGNRQLNAAFHRLAVTQGRLHPDAQAYLARKQAEGKSRREALRCLKRLLVRVIWKALRDTREPETAVSISPNFQKFQILNSAPSLT

SEQ ID NO: 473380 - protein, 345 aa, unidentified
MIIGCDFHPSWQQIAWLNTETGETGEQKLVHAAGDAKLFYQQLAAPVLIGMEATGNSQWFLELVQDLGHEIWIGDAAQIRASYVRKQKTDKRDAAHILKLVVESRFPRLWTPDREQRDLRQLVLHRHKLVEIRSRVKNELQHLSLNKGIQRKAKLWSQAGQKLLRELPLKPWAACRREDLLGLLAMLHQQIGKLDQAVQQAADEHPQAQLLMTQPGVGPNTALAFVLTIGDVSRFPRGKQVASYLGLIPREESSGGRQKLGAITKQGNRLVRSLLVEAAQIAVRFDPGMKKQYLHRCHQKPKGVAKVAAARKLAVRLYWMLRTQKPYPEIVRIESSPRVPLVGAS

SEQ ID NO: 473381 - protein, 347 aa, unidentified
MQVTTIGLDIAKNVFQVHAIDTAEKVVVRKQLRRSQVVEFFKALPACLVGMEACATAHYWARELTKLGHLVRLMPAKDVKAYVKRNKNDAADAEAICEAVRRPTMRFVQVKSAEQQGRLMLHRTRDLLMRQRTQLINALRAHLAELGIVAAQGNAGLKELLKIIAGERDARLPVDAHASLVVLAAGLHAVQRMIGSIDKRIMIEHRSNEASKRLRSIPGIGIVGASAIVATVADPMAFRSGRDFAAWIGLVPRQDSTGGKQKLGPISKQGDRYVRRILVVGAHAVLRYAKQNPEKYPWLTQLLARRPFKVVAVALANKMARVAWALLAKGGTYCRVRALVTAGTAAA

SEQ ID NO: 473382 - protein, 322 aa, unidentified
MQERFITWIGIDVAKDSLDVAWTSADGSQRHSVANSRPGFRSLVDVLPPSAEARVVVEATGGYERALVTALIEAGYRVAVVNPRQVRDFAKALGILAKTDRIDALVLARFGQQVQPRLLEEDPTQRAELMQLVSRRRQLIDLRTMESNRLEQTTARAAQKSIRHVLKLLEKEVDQLEAEIARLLQSDDDWRAKIELLSSVPGVAKVTSATLVAEVPELGRLNRHAIAALVGLAPFNDDSGRHRGTRRIAGGRAAVRQVLYMAALSARRCNPVIRIFAQRLAAQGKKPKVIITACMRKLLVILNGMLKKNTPWKTIPCPLNAP

SEQ ID NO: 473383 - protein, 317 aa, unidentified
MIYLGIDIAKHKFDAALLTQGKFKTKVFANDPAGIGACLKWLAMRAASPVHACLEATGAYGEALACALFDAGHTVSVINPARVKAYAHSLGLRQKTDAVDAKVLAQFAHAQQPAAWTPAPPEVRALQALLRRLDALIEMHTQEHNRQGVAEPTVAASIAEHLDYLKLQIDALKAQIESHIDQHPGLKQQQALLESIPGIGAATSAWLLGELNLRRFDSARQAAAFAGLTPRMRESGSSVPGKPRLSKQGNSLLRKLLYFPAISAMTHNPLVRALCVRLKAKGKHTMAIIAAAMRKLIHIAFGVLKSGKPFDPSFANS

SEQ ID NO: 473384 - protein, 430 aa, unidentified
MEVIYPKACGVDVHKSFIVAVICDSTSVKPQYLRKRFSTFNNSLIDFRNWLLANDCQNVCMESTGKYYVPVYNALEGHISNVVVANPKWVRCIKGEKDDNKDAKWIADLFKLGIVRSSFIPNKDIRILRELTRYLYKLTNMRTSEKNRFTNALTVGNCKLDMVFSDIFGKTSSAIINTILSQNEYNDEDILKNIDKHCKSSNEDILNSISGISWQDAQKQRMNVIQEHIDYLDKSIKTVREIIDSIIAPYESAINLLCSIPGIDRKSAITIISEIGTDMSQFSSHYRLSSWAGLAPGCNESAGKKKSVKISRAGVYLKPALVEVAHCAVKDKENPYYTNKFNVLSKRRGKKRAYIAIARKILVAIYHMLSTGEFFNPTDLSKVETSDKDKIKFTKNNFMQSTKQLISLGLTIDDLQTLMQSKISGSTPVI

SEQ ID NO: 473385 - protein, 340 aa, unidentified
MDEYIGLDVSLKETAVSIRRDGKRVWRGKCPSDPQLLAALIRKHAPAPKRVVFETGPLSVWFFHALAAEGVPAICIDARHAKAALDMAANKTDANDADGLAHLAEVGFYKEVRVKSFDSMLTRTLVAARTRLVRIGTELSNQIRGLMKTFGLVVPAVTGSKFEHHVHALLADNTDLGQIIRPLLEAWHAVRLRSAELGRKLLADARRNAACQLLMSIPGVGVVTATSFVSAIEEPANFKHSRSVGAFVGLTTRRYQSGEIDYDGHISRRGDSHLRGLLYEAATVLLTRSRSECDLRKWGLQLRERLGFKRATVAVARKLAVIMHSMLITGEPFREKSAAA

SEQ ID NO: 473386 - protein, 331 aa, unidentified
MYVCGIDVAKRKHMAAILSAGGQVTQAPFNVTNTRAGFEQLHQALTSLDGPVTVGLEATGHYWLALYDDLTRQGYPVVVFNPLQIHAFRKSGVRKVKNDRGDAVWIAEYLRFGGHPPTGPALPVWLQLKELSRFRYHLTDQIGDVKRKLLSVLDRVFPEYETAFSSVFLATSRRLLAEAASAHEIAEFDLAELAQLLQSASRGRFGQAQAEALQQLARQSVGVTFLADAAQVEMRCLLAQIDLLEDQRRQVDQAVEQLMAQVPQSLTTIPGVGPVTAAAILAEIGDVNRFATVEKLVAYAGIDASVYQTGEFEATQRHMSKRGSPYLRHAL

SEQ ID NO: 473387 - protein, 337 aa, unidentified
MTPEVKNFIGLDISKHTIDAALIVNLQKEQMLHARFQKNKTGLKQFIEWLQSCKVTLNEETVCCMEHTGLYNRSLLLFLSHYPLRIWVERTHHIKHSLGLQRGKSDKIDAERIALFAYKNRDDIKVWEPVDKDIQRLKDLLAQRERLCQARVKLSVGIKGLKEEGLKEEAKVMEQLQKPALDGLEKSLERVEGLIRKIIAQNVTLERKIKCITSVTGIGEVIAWHFIVFTNGFKRLSKGKQLACFCGVVPFKHESGKSIRGKTRVSHMANKKLKCLLHMGAMAAITYDEQMKTYYKRKVLEGKNKMSILNAVRNKLVLRIAAVIREDKEYVKVPLVA

SEQ ID NO: 473388 - protein, 372 aa, unidentified
MKQSTTTYVAMDTHKKTISVAIAEGGRRGETRFLGEIPSQPEAVAKLVDRLAKKHSKLAFCYEAGPCGYGLYRQITALGHECVVVAPSLIPTRPGDRVKTDRRDAVTQASLFRSGELTPVWIPDDAHEAMRDLCRARQAAVEALRRARQQLLGFLLRHGRVYSGGENWTRKHRLWLAAQRFDHPARQIAFEELAKATDEAQARRDRLAEQMQELLPSWSLAQIVAAIQALRGIAMISAITLVAEIGDFKRFANPRQLMAYLGLTPSEHSSGAKTARGAITKAGNTRARRMLVEGAWTYRLPARMGADILKRNEALPQAVKDIAWKAQARLCARYRRLGKAGKPTNVICVAIARELAAFVWAIATNDAIVAVV

SEQ ID NO: 473389 - protein, 343 aa, unidentified
MERYVGLDVSLKQTSICVVNQTGSVMREGVVDSDPEAIAAFVRSQAPGVVRIGLEAGPTTTWLWTELKRLGLPVICIDARHAKAVLKMQINKSDRNDAAGIARIMQTGWFKEVRVKNLDSHAIKALLTSRALLVKIKRDLENQIRGLLKNLGLVIGRAKFNVFAVRAGELIADRPELVAAVRPLLAARLSIEQQIGDLDRKVLKLAREDAQVRRFMTVPGVGAITALSFKATIDDPARFKRSRSVGAYVGLTTRRHASGEVDWSGRISKCGDAMLRMYLFEAANVLLTRVPKWSALKAWGTKIAKRCGLRKAKVAVARKLAVILHRLWIDGTEFNWSSNPAAA

SEQ ID NO: 473390 - protein, 347 aa, unidentified
MKFYTRQHKHYCGIDLHARTMYLCILDAAGKVLLSRNLECSPQALLGAVKPFRDDLVVAVECMFAWYWVADVCAREGIAFVLGHALYMGAIHGGKAKNDKIDAHKIAGLVRGGMLPQAYVYPPSMRATRDLLRRRCHLVHKRSELIAHIQNTVSQYNLPALERRIDKRCDREGLLGHFPDPQVRNSVALDVAMIDQYDALLPKLERHIRACAKEHDRKAFTLLRSMHGADLILPLVILYEIHSVERFPRVQDFLSYSRLVKPGRESAGKLLGHAGGKIGNAHLKWAFGELATTFLRANPPAQALHERLKKKHGKGKALSVLAAKLARAVYFMLKRGQIFDPKKFYQD

SEQ ID NO: 473391 - protein, 520 aa, unidentified
MASTRTRRRCSRRRTPVSVGKPRGVLHPRVQQVGPEHFGIVCFDCAKARSKFLLADFYGRVLIPPTTVGHNRPDLDAAVAQVRHAFASHQLQDGLVAIERTGRYHRLVQRTFAAAGFETRILHPFVTKQYRQPVDPGTKTDDTDLAAIHRATVTGCALLEATRDEAWTTLQLVIRHRRDLVGKGAALNCQIRDHLEAALPGYAACFDKLWESAIPWHLLRHFPTAEQLRTAGLTTLCHSLRQAGIRFQQRTVQAVLDWAEQAAPGDVAASQHRRIALALYDDRQRKTQEIHALERDIAGRLVQTPYVLLLSFPGINVVSAADYGGEAGPMEHYANPKSITGRAGLRPSRYQSDAVDKANGPLVRNCNRALRAAILGIADNLIVCNHHFQHLARQWARQGKDPRDIRVRVADRFCRISFQMVAGRQVFRHPCIQGRHYILDKLMAFHRAHDTPMPEVLQDLQAAIGHLSPREHAAEARPLHEELQRIQQGRRRGPQLLGDILPIVLARLGVGAVQSTESGE

SEQ ID NO: 473392 - protein, 389 aa, unidentified
MSQPFDASKSLATLEQDNTVIAVIEMSQSKWLVAAVVPGVKRQPLKKLQADEEALLKLLNRWRTEAGQTGREIKRVVVAYEAGRDGFWLARWLRTRGVEAYVIHPASNAVSREHRRAKTDRLDTELLMRAFLGWLRGEKRHCSMAAIPAAEEEDARRPNRERENLVTERTRIANQMKAILARFGIRSFKPTLRKAAQKLDGLRTAEGTPLLENTRAELSRHLARLRVVREQIRAIEQKRLHKLAAAPAEENGPHVMVRLIARVFGVGVETADMLVNEVFARHLRDRKAIARYAGLTGSPDESGKRRRERGLARAGNARVRRGMIQLAWCFIKFQKNSALAKWFDARTADGRGSTRKTMIVALARKLLIALWRLVTTGEVPEGVILRPAA

SEQ ID NO: 473393 - protein, 405 aa, unidentified
MFVGIDWASQTHAVCVLDDAGTKHANFQVGHTADGLDQLIARLGRLGDPATLPVAIERPDGRLVDRLLEAGHPVVAVQPNAIKAWRDAEILSGAKNDPGDAHLLAEYLRLRRHRLRVLAPFSAETRALRAVVRTRGDLVDQRVATANQLGACLEAFWPGAKGIFADLATPIALDFLARYPTPESAANLGERRMAAFLTKHGYCGRRPPAQLLTRLRAAPPGLCGTVEVEARRDAVLALVGVLRALLAAIKDLDRSVVAHLGEHPDAEIFTSLPRSGQINAAQVLAEWGDCRPAYADAEAVACLAGATPVTKQSGKHTAVSFRWACNKRFRQAICTFADNSRHASPWAAKVYADALARGHDHPHAVRVLARAWIRVIWRCWIDQIPYDPAKHGAAQKLTEIATSAA

SEQ ID NO: 473394 - protein, 354 aa, unidentified
MKMAAQAGKGSYAGEQVFVGIDVHKESWHVTVRSSGEEIFNGRIPGQYQSLKRILDRYRDSRIKVAYEAGPFGFSLLDRLTLDGVETIVVPPSLIPVESGNKVKTDKRDSRKLATLLESNMLKHVHVLTPEEREHRDLLRTRRQIVEHRNDVARQIKSKLMFYGIRSPFTSTARWSLQYVAWLKTITFETSYLKEAFELLIQTYEYLTRQIARINRTVVLLCRDKRYRGRIKLLCTAPGIGRLTAIELLVELQDMTRFKSAEELASYIGLTPSEYSTGERTRQGRITRCGNKRVRTYLVESTWVLITKDAQLRAKYLRLKNRRGGKRAVIAIARTFLIRLRRMLLDNVPYRMAA

SEQ ID NO: 473395 - protein, 338 aa, unidentified
MQITTIGLDLAKQVFQAHGVDARGHTVLVKQIRRDQMPTFFANLPPCRVGMESCAGAHYWGRELTRLGHDVRLMAPQFVKPYVKSNKNDAADAQAICEAVGRPTMRYVAIKSVEQQAILSVHRARDGLVRARSALANQIRGLLAEFGLVMPIGVSTLRQRTPTLLDEARDRLPPPFVHLIEELLAHMGEQDRHIQAFERQIMQWHRTNPISLKLAQIPGIGPITASALVASVGDARLFKNGRQMAAWLGLVPRQHSSGGKPTLLGISKRGDGYLRKLLLLGAHSALLRIRKFGDGQSWANRLLRRRPVNVVATAVANKNARIAWALMTGESDYDPALV

SEQ ID NO: 473396 - protein, 371 aa, unidentified
MPSLKVGLSATAPIGGKERHMPLVVLGVDPHKQSHTATALAVGSHQQLASLRVPASAAGYQQLLGWAEQFRQRRWAIENARGLGCHLAQWLIAHGETVQDVRTTATARVRELSRGRGRKTDALDAAAAAGIAALQGDAGQLQPEDVTVVLALLEERRSNLVGQRTRTVNQLHAVLRELIAGGAPRKLSADKAAVLLSGLRPLTLADHTRKQVARDLVAEIRGLDRRLAAIGKRLHDTVTALGSRLPQTVGVGPVIAGRLLGRTGRASRFPTAAHFATYTGAATLEVASGQHARHRLPRAGDRQLNHALHLIALVQVRTPGCAGYHYFRRKLGEGKTTREALRCLKRRIADHVWRVMLADEQARDRRQLQAS

SEQ ID NO: 473397 - protein, 370 aa, unidentified
MLDTTTFIGLDVHARSIKAVSLDVMTGEVRAATFGYDAGAVAEWVRSVDPRARCVYESGVTGFDLQKRLSGLGVDCAVGAVSKMIKPSADRRRKNDRNDAEFLARMLSVGNVVEVWVPDDECEAARDLTRALEDARDDLSRSKQRLSKFLLRHGLVFDERTPTGRRKGNWTRAHWSWIESIRFAERADNDVLAYYVDAVRRAAEEKARLEGLGEAEARKPRWRKRVDSLRCLKGVDTASAADLVFEAGEFSRFRNARSFAAWVGLTPSEHSSGESDRRGAITKAGNKHLRKTLVEAAWHYLTCSGRPKGLAKGQAPDRGARRHAAKGVRRLVERREALLARGVHGNKANVATARELACWVWAVGLMAEEA

SEQ ID NO: 473398 - protein, 414 aa, unidentified
MEVLHAHCAGLDVHKKSVVACVLHSAQAGATERQTRSFSTMLPDLEKLRDWLVAEGCTHAVMEATGVYWKPVYNVLESHLTLLVVNPEHVKVLSGRKTDVKDAEWLADLLRHGLLRASFIPDRDQRDLRELTRFRAALIQDRVSAVNRLQKSLEGANIKLASVLSDVMGVSGQRILDALLQGEDDPEILVGLSHGRLRPKHEALKQALMGQLRGRLRFVVSQELAQIRSLEDQIAACDEEVAKEMHPFDPEIEMLDEIPGIARRGAENILAETGIDLSRWQTAPHFTSWSGVCPGNKASGGKRRPARTRKGNPWLKRAATEAARAAAHTKNSYLGERYRSLAARKGEKRAIVAVAHEILTIIYYMLTRGRRYQDLGVSYTEERNRKAIERQALGQLRHLGYEVSLSPTLQAQPA

SEQ ID NO: 473399 - protein, 314 aa, unidentified
MRTPVFVGIDVSHAQLDVAVRPGTRFSASNDEPGIVTVVEELRALAPTLIVLEATGSLEVPLTSALAAARLPVVVVNPRHVRDFAKAAGQLAKTDALDAQILAQFAQVMRPAPRPLPDEQTQALAALLTRRRQLVEMLTAEKHRLSLAPRPVRNSVRAHITWLERELLHTDTDLAQTIRQSPVWREKEDLLRSVPGVGPVLTTTRLANLPELGTLTGKQIAALVGVAPLNRDSGALRGKRTVWGGRAQVRAVLYMGAIVAARFNPVIRVFYHRLRAAGKAKKVALTACMRKLLTILNAMLKHRTPWCAEVAQHA

SEQ ID NO: 473400 - protein, 413 aa, unidentified
MTIFVGVDWSEAHHDVCVKDNSGGTLAKRRVLDGIAGVRQFHELIAPFIEEPAEALVGIETDRGLFVGALVAVGYRVYAVNPFSSSRYRDRHSSSGAKSDPGDAEVLADLVRTDAQHHRQVAGDTDLAEAVKILARGHQSMIWTRGRQTNTLRSTLREFYPNALVVFGEDLDADEALEILIMAPTPALGRQLSRSKIQAGLRRAGRQRRLDERAFEIQEALRREELEAPPVISEAFGSSVAASARVLVELNRQIEALETAMAERFEQHPDSKIVRSLPGLGTVLGARVLGEFGDDPERYANAKSRKNYAGTSPITRASGTKRVVLARFARNRRIADATYLWAFSALTKSPGARALYDRHRAAGDSHHQALRALANRLVGILHGCLVTQTLYDEEIAWEPPSPRPLDGLRAWDV

SEQ ID NO: 473401 - protein, 388 aa, unidentified
MIYVGIDIAKLNHFASAISSDGEILIEPFKFTNDYDGFYLLLSKLDPLDLDSIIIGLESTAHYGDNLVRFLITRNYKVCVLNPIKTSTMRKNNVRKTKTDKVDTFVIAKTLMMQDSLRFSSLEDMDYIELKELGRFRQKTIKQRTRLKIQLTSYVDQVFPELQYFFKSGLHQKAVYALLKEAPMPKDIASMHMTHLSNLLVKNSRGHFTKEMARELRILAQKSVGLNDSSLSIQITQTITQIELLDSQLFETELEMANLVTCLHSVIMTIPGIGFVNGGMILGEVGDIHRFPTPNKLLAFAGLDPTVYQSGNFQAKRTRMSKRGSKVLRYALMNAAHNVVKNNATFKTYYDAKRAEGRSHYNALGHCAGKLVRVIWKMLTDNVEFNLE

SEQ ID NO: 473402 - protein, 338 aa, unidentified
MTLYCGIDLHSTNNFISVLNETDKPLFEKRMPNDLERVLLALAPYRDELQGVVVESTYNWYWLVDGLMDAGFHVHLANTIAMRQYDGIKYTDDLSDARFLAHLLRLKILPEGYIYPKEERAIRDLLRKRLSLVQQRVRQHLSLQSHIARHTGERLSAVKIKQLTHEGLQELLAEPNVYLAAEANLSVMQSLSETIEQIEQSVLEQCRTRSTFRYLKSIPGIGPILGMTIMLETGTIGRFPNAGHFASYCRCVKSEKLSNGKRKGSGNRKNGNKYLSWAYLEAAVKAARFNAEIKAYYQRKMAKSHRFVALKAVANKLAKASYYILRDQVPFDVKRCFG

SEQ ID NO: 473403 - protein, 387 aa, unidentified
MQALTVDTPTVDHCGTIFVAIELSQKTWLVTLHSPDKGKMSRHKLEGGDHAELLALIGRERDRAGRALGAIPAVVSCYEAGYDGFWLHRLLMAAGITNYVFDPASIAVDQRARRVKTDRIDGEKMLRTLMAYLRGEPQVVRIVRVPAPEQEDARRASRERGRLIKEQTAHTTRIKALLRLVGMAVGNPRRRDWLSWLTTQRDWQGQAVPPRMLAEIKYEHARLMLVREQLEGLAQASAQADPAPAAVQMTERSELLLRLKCLGPAFATTLTSEVFYKDFRNRREVASYFGLTPSPWQSGGIDRDQGISKAGNPRARCAAIELSWLWLRHQPESALTRWFRSRTHNNASKRNKRIAIVALARKLMVALWRYLTTGMVPEGALLKAAKA

SEQ ID NO: 473404 - protein, 458 aa, unidentified
MSTRNIGIDLGVTSKHKADIRDDRGKKIGRNFSLSTTKEDLDALSRYALKDAPEETKLRFIFEATSMIWLPIALYGKSEGHEVVRVKTQQAHDLRKYYSRHGKSDKIDAKTLAKMPVVDEEALEEVFIPDKRIFALDRRSRQKNKITETIAGLKKRISSFFHWVIPGLLDCFENRYGEVARAFYRQYANPFRAKESGLEGLTLFLKGAGNEDLELPQKLYQAVLRACELYQDALEYVDFDELQNELIEELDHLEERERALARVNAQIERLYEEVHPSKNLETISGIRDGLAPEFIGIIGDPHRFSSNSKLVGYSGMYPEQDESGERSKKGLSITKEGPPRMRRAAYIASDIARQWDPQLAKLYYDQMVHKGNCHTQALCAIAPHLLARVLTVLKEDRPYELRDPDGNPISKRDAKLLIEREYTVPEEVRERTRSRRRKQRRQRGGRTTHTNESRQSRS

SEQ ID NO: 473405 - protein, 398 aa, unidentified
MKNNIHIYIGIDVSKDKHDVCLKNNNGDVLKRIQIRNTKSDLKKLYTTVNKLNSGSGDNTGVLFGMESTGIYSLPLSSALKRDGYLVKLYNPIQTSGYRKMEIRKTKTDSIDSAIIADMLRHQEPPVSSAIDNLTLYQLRELCRVRQRNIEKRTKCKIQFIRDIDTVWPGYKSVMKSVYGKTSIALLKEYSVPSNVTAKSFKDIYEMIKRVSRSQITKSQAEEIYKHAGNTLTVPEIDSVVSIEIKGLISEIELYNEQILAIVTMMEQTMKKMDSKITTIPGIATITGAIILSEIGDINKFSSAKKLVAFAGLDPITTQSGKFENKSGHISKRGSPQLRHALFMSANVVRQNDENFRKYYDDKIKRGKHHYSALNATAAKLLRVVYWVLKNDKEYKVQ

SEQ ID NO: 473406 - protein, 432 aa, unidentified
MERIRENAAGIDIGARKVFVSVEGKEVKCFFTFTEDFEKLRDYLLENAIETVAMEATGVYWNILYEILEEAGLDVWLVDGGQTKQVPGRKTDVKDCQWIQQLHSYGLLNRCFVADSDIKELRIYQRLREDHIRSASMHINHMQKALTEMNIRLTEVLNQIHGASGLAIIEAILKGERDKEKLLKLCHIKIIKNKKDEVLKSLNGRYTKSGLFALKQAFDSYYFYQNQIKQCDAMLEEVLKRISKGKPNQTISAHRKPIRHNKPDIDNLGTVMLKIFDGKDATALSGITDYTWMQLLSETGTDLSRWESEKHYTSWLGLAPGQHTSGKMKKNKRKLGRPKAGQIFRQIAQSLLTSKRIALGAFGRRLSSRKGSPVAIKAVARKLAALYWRIMVKGMDFVEKGIQKYEDQLMVQKQRSIIRLAKELNMQITYNV

SEQ ID NO: 473407 - protein, 409 aa, unidentified
MEVLYSHCAGLDVHKETVVACVRHMEGHVRTTVKTFSSTTRGLLDLSAWLSEEGVTHVAMEATGVYWKPVWHLLSDGEFHLLLANAAHVKNVPGRKTDVHDATWLADLMAHGLIRASFVPDEGTEQMRNLLRTRKQFVRERASQVQRLQKTLEDANIKLESVISDGVGVSGRRRIEALIDGQSEPQQLAALADGRIRASGAQLEAAVRGRVTAHHRFLLKLHLDHLDAVDAAIARIDKEVDGHIEPFRTAVERLSSIPGVSSLSAEVIVSEVGLDRSRFPTVGHFISWAGLCPKNDQSAGKRRSTRMRKGAPWLKTVLIQCAWAATRVKGSYLQAQYLRLRSRRGAKKAAGAVAASILTAAYHMLRDGTWYQELGASHFDRRSTTQQISRLVKRLHHLGYDVHIAPLAA

SEQ ID NO: 473408 - protein, 355 aa, unidentified
MQKYKVSFKGQNIYVGIDVHLKTWHVTTLTESGCKYSFSQHADAKELFDRLNKKFPEAHFKSAYEAGFCGFSAHYALTEQGIENIVVHAADIPTTGKEKALKTDAVDSEKIAWALKRGELTGIYIKDKRYMDDTNLMRLRQRFIMDLSRQKNRTKHLLYTQGVTYPERFRKNSTHWSRNFMKWLREEVELLSEQKMSLILLCEQVENTRKAILKVTREIRRLSNTDRYKENYNLLITVPGLGLITSMSVLTELDNNIMRFPNERSFVAILGLIPTCHDSGDRKVSGEKINRGNKHLGPLIVESCWIAIQRDIELSAYYSKCCQSMKPHKAIIKVARKLACRAYAVLKTKARYALP

SEQ ID NO: 473409 - protein, 389 aa, unidentified
MSRALQRVGSMLLIMIEASPSAYPSGMLAVGTSRLTKEGGDLMRFYTNPHKFYCGIDLHARSMYVCILSHDGEILLHRNMQAAPEPFLKAVAPYREGLVVAVEGLFTWYWLADLCAAQAIPFVLGHALYMKAIHGGKAKNDKIDSHKIAALLRGGMLPQAYVYPAEMRATRDLLRRRTHLMRKRSELLSHVQNTNSQYNLPEIGKKIAYKANREGVAERFNDPAVQKTIEVDLALITYYDELLRDLELAIVTTAKQHDAHTLYLLQTVPGIGKILSLVLLYEIHDINRFPRVQDFASYARLVKCSKESAGKRLATSGKKIGNAHLKWAFSEAATLFLRNNPNGQKLLTRLEKKHGKGKALTILAHKLARAVYYMLRRKTAFDLDIFLRA

SEQ ID NO: 473410 - protein, 459 aa, unidentified
MAQQRSKRNRRRKFKAKSLPQHLQHINVNAAGIDIGAEQHMVAVPEGSDEMAVRAFGTFTADLVALADWLEQCGVTTVAMESTGVYWIPVFELLERRGFEVKLVDARHVKNVSGRKSDVLDCQWLQQLHTYGLLRGAFRPPDEICVLRSYLRQKEMLVQASAQHIQHMQKALQQMNLLLHNVVSDITGVTGMKIIKALLGGERDPHVLARNRHGTCHHSEATIAKSLVGNYRDEHLFALRQAVELYDIYQSKINDCEKAIIEQLDAYPDTTTGEPPASTKPSNRSARIRNDVDVRELLYKKSGVDLFAVPGLGADTLLTVTSEIGFDMSAWKTVKHFTSWLSLCPGTRISGGKELKKRGQRKANRAAQAFRLAASTLARSQSALGAFYRRIKARYGGQHAVTATAHKIARFYYAMLTKGSAYVEVGQTAYEQKYQERRFAHLQKQAQALGLQLVPTQTK

SEQ ID NO: 473411 - protein, 381 aa, unidentified
MDEDRTVCVGLDTHKAKIAVAVAEPGRSGEVRFRGEIANRPEAVRQLIERLAERHGELRVCYEAGPCGYGLHRQITALGHDCTVVAPSLVPRRPGDRVKTNRRDAVTLARLHRAGELTAVWIPDPTHEAMRDLVRARTAAMEAVRRARQQLQGFLLRHGRVFTGRKTWSPAHRRWLAGLRFAHPAQQVVLQEQIDAVAEAERRRDRLGQQIRELVPGWSLAPVVAALQAMRGVALLSAVVLAAEVGDFRRFASPRQLMAWLGLVPSEHSSGAKVERGGITKSLPRTRSGAGNGRARRVLIEGAWSYRFPARVTAEIQGRLEGVPDAVRAIAWKAQLRLCARYRRLVAAGKNANLVTTAIAREMAAFAWAIACRVQPTGAAA

SEQ ID NO: 473412 - protein, 317 aa, unidentified
MNKTSIFAAGIDTGKHRLDVALQGCAQRLEVGNDAVGYGQLCAWLESFGVKRIGIESSGGYEKAAVRHLRAAGFGVVVFQPAQVRAYAIFRLQRAKNDRIDAAMIAACAGAVESVREAPDARFEALAERLTFLEQIEEDLARAKTRREGFRDARQQTLLDQEIKRLKLVRKNEIAALGRALRCHDDLARRLDLLHSIPGLGARTALCLVIRMPELGALSREEAASLAGLAPFDDDSGQRQGMRRIWGGRSRVRRSLFAAALPAAFRWNSQLIAFYRRLTGAGKPHKLALIACARKLLIYANTVLMRATPWTNAHAAT

SEQ ID NO: 473413 - protein, 344 aa, unidentified
MKKISTIGLDLAKNVFQVHGVDASGAMVLRRQLRRAAVEKFFAQLPPCTVGMEACGSAHHWARVIGRYGHQVRLMPPAYVKPYVKRNKNDGRDAEAICEAVGRPTMRFVPVKSIEQQATIAVHGTRALLVRQRTMIANALRAALSELGIVAAQGYEGLRELMAKLQEPSEEIPEMMRGALLLLAQHWQALDADERVLERQIAKAARCDGDARRLMEVPSVGPIIASTVLAKVPDAKVFRSGRDFAAWIGLTGKDHGTGGKHRPGRISKQGDRMLRALLISGASAHLRQQKARGITDPWLRDLLARRPYKVAMVAFAAKTARIIWAMLVKGEHYRDRASAPAAAC

SEQ ID NO: 473414 - protein, 454 aa, unidentified
MPHRPKKKVQTQPVVFQPDSAGVDIGATELFVAVPPDRAEESVRSFNTFTEDLYALADWLTACGIKSVAMESTGVYWIPVFQILETRGFEVCLVNARHVKNVPGRKSDVLDCQWLQYLHCVGLLRGSFRPPDQVCALRSYLRHRDMLVKTGARHVQHMQKSLTQMNLHLHHVVSDLTGVTGLAILDAILTGERDPQKLAALRDRRIKASEATIAKALVGDYRPEHLFTLQQALALYRVYQSQILDCDRAIERHFGSMESKTSQPTPAPVGRQRKKPERNQPQFDLRGHLHRILGVDLTALPGLSTINVHTLFAEIGGDLSKFPTAKHFSSWLGLCPDHRISGGRVLSAHTRTVKSRAAYALRMAAYSAGKSYSALGDYFRRMRARLGAPKAITATAHKLARIIYHLLKTGTAYDDTVFARNETRYQQRREHHLRQQARDLGFTLVPLPQSQEVS

SEQ ID NO: 473415 - protein, 447 aa, unidentified
MQQKGFLGIDVSKGYADFLLLDEHKKAIEESFQLEDNQKGRQRLSSLTQEWFSKGMEELCCGVESTGGYENNWYSYLKGLSVEMNIRVARLNARAVKAVSDATLKRTITDAVSAHNIASYLISFSEKVNYDKGSQQETQFKEGRQHYSYIRMLQKQKVQLSNQLEKLLYQDFGEILVYCRHGIPAWLLRMLSQYASAETVVKAGLERLSDIKGISADKARALLDKASRSVQVISGQSRHVIAATSKEILHKSGLIQKEKEYLAKMYEQEEAVKLVASIQGIGIESAVALMLEIEDVNKFALAKKITAYFGVNPTFKQSGDGTWGSHMSKKGRSEIRAILYMASLSGIRCNSILKPLYARYRAKGMKHYQAMGVVMHKLLRIIYGVLKNKRSFDPAIDELNAGKAKEKQKKEKQENNNEQKKHRHQAISIDAPLSNRAVQKRKKQIAS

SEQ ID NO: 473416 - protein, 422 aa, unidentified
MNDQEAVVYSVYVGIDWADSKHDVCIQPTTSDERVFDVIPHRPEAIDVWVKDLHQRYGDHIAVAVELTKGPIVSALQKYDFIDIFPVNPSSLAKYREAFKPSRAKDDPTDAELALDMLQRHPEHFKVLKPQSVEMRSLAALVEQRRSLADDQVRITNRLRCALKQYYPQVLEWFEHIDTPLFCAFVKRWPTLMQAKRARANTLRRFFHEHHMYRKSVLDSRRSAINSATPLTLDAAVIEPYRLQTLVLVDQLELMFGAIHQFDDEIAKLASQHPDYALFQSLPGAGPALAPRLLVAFGEQRERYKSAADIQKYSGIAPVTERSGQKHWVHWRLQCPTFMRQTFVEWARQTINKSYWAGEYYRQQREKGSTYQAAVRSLAFKWIRILYRCWQTGVAYDEIRYLKALERHGSPLLKRQSMPKTT

SEQ ID NO: 473417 - protein, 344 aa, unidentified
MDHFGGLDVSVKETSICIVDDTGRIVKEVKVASEPAALLKVLGNPTYRFKRIGLEAGPLSQWLFSALAEAELPVICVETRHMQAVLKAQINKTDRNDARGIAQMIRVGLYRPVHVKTLRSQKLRMLLTHRKLLQSKAIAIENDLRGTLRNFGLKVGMVGKVRFEARIQQLVENIPDLAVLVEPLLIVRRVLREQIVILHRRLLAIVREDEVCRRLMTTPGVGPVVALTYRATVDVPARFRKSKSAGAVFGLTCARYQSGEIDWSGKISRCGDEMMRTMLYEAAQSMMHSKKWSWLKAWAMQIARRRGMKKAIVALARRLAVIMHRIWVDGTEFRWTREQATAAA

SEQ ID NO: 473418 - protein, 346 aa, unidentified
MLIIGCDYHPSWQQVCWVDTGSGETAEQKLEHMSGDAEKFYRQLPGPVLIGMESTGNCQWFVEMVTTLGHELWIGDAAKIRASDVRQQKHDRRDAALILKLLLEGRFPRIWVPSGQEKDLRQLLIHRYKLVRVRAQVKTELQHLAMNQGVTKKHKLWSQAGEKVLRELPLAPWASRRREDLLKVRRMLDEQIAPLDQAVVEMAEKNEKARLLMTQPGVGPITSMAFVLTMGDVSRFRRGKQVASYLGLIPREYSSGGKQRLGSISKQGNRFLRMLLVEAAQGAVRCDPGFRNEYLHRCHRKAKGVAKVAAARKLAIRLYWMLRTNTGYPEVVRVESSSRVPLASAS

SEQ ID NO: 473419 - protein, 398 aa, unidentified
MTESSDYESVQVFIGVDVGKDTHHAVAINRSGKRLFDKALPNDENKLRSLISDLKQHGQILLVVDQPATIGALPVAVARSEGVLVGYLPGLAMRRIADLHAGEAKTDARDAAIIAEAARTLPHALRTLKLADEQIAELSMLCGFDDDLAAQTTQASNRIRGLLTQIHPAPERVLGPRLVHPALLDLLQRYPSPEKLASLGEKKLAAQLCKLAPRLGKRLAADIAQALAEQTVVVPGTNAAAVVLPRLALQLITLRKQRDEVALEVEQRVLAHPLYPVLTSMPGVGVRTAARLLTEVACRAFASAAHLAAYAGLAPVTRRSGSSIRGEHPSRRGNKALKRALFLSAFTALRDPLSRAYYTRKMSQGKRHNQALIALARRRCDVLFAMMRDGTFYTPQGS

SEQ ID NO: 473420 - protein, 391 aa, unidentified
MIYVGIDVAKDKHDCFITNSDGEILFPVFSIQNNRDGFDDLFSKIRSISTDLSNIKVGLEATGHYSYNLLGYLIDKGLPTFVINPLHTNLYRKSLSLRKTKTDKVDARTIAMMLMSDVNLKSYSDTSYHNEELKSLTRYRFDKVQERAQLKQSVSRLVTILFPELEKLVATLHIASVYALLSELPSAGKIASCHLTHLTKLLENASKGRYSREKAVEIREAARVSIGSNMPAKSLELRHTLKLIGELDSEISEIESEIKRIMDQISSPILTIPGISYRMDAMILAEIGDFSRFDSPDKILAYAGASPSTYQSGQLESSYSHMEKRGSRYLRFALINATKYVCHWDKTFGTYLQKKISEGKHYNVAITHATKKLVRLIYAMERSGKPYKKMA

SEQ ID NO: 473421 - protein, 428 aa, unidentified
MKQEDGIRLEEFRQFRKEVRGSAEYLLVGIDVAKDKHHAFFGTASGKALLRRLVFENNLEGFRKLLVQAEALKVQEGFKKVIFGMEPTGNYHKPLGEHLIRCGHGVVLVSGVAAHENRKTLDGRWDTNDTRDAANVADLVSQGKCLFYEFPVGGLQALRGLLSLKRRLKRMEHGYRVRIRNHLVAKYFPELDRYYEQSESTALAIVRWCLDPSVIAGLEYKRFVQMVGSVRGRSSQERRLRAIWQRAVDSVGCEAGPVVEFEAQVMVEGLKQIRKSIQEIEEKIQEVCSQFPEYEFLLSIPGFGPDVSSKVLGAIGDPFRFQNGRQVLKMAGLDLSAERSGKSSQSAVPVISKKGKADLRYALYQAAFIASIRDRHFIVYFTNQLRGREREPGIKTKMRVKLAAKLLIIAWTLMKKKESFNPDYLNLE

SEQ ID NO: 473422 - protein, 413 aa, unidentified
MSQIDDLSGCLVTFDQAKSMTVVVELSEASWLVAAMVPGLVRHPLKKLDPDPDALLRLIERWRMEAVKAGQTIDRVALAYEAGRDGFWLARWLQARGIEVHVIHSTSVAVLREHRRAKTDRLDTAMLMRVFVGWLRGERGHCAMVAIPTLEEEDAKRPSRERESLVGERTRIGNRMKSTLARLGIRGFKPHLRKAPERLAALSTPEGCALPANTLEELRRDMARLAVVRGQIDEIERARLERVEHAPAEEGPNAMIRLIARIRGVGVETADMLAQEVLSRHLRDRRAMARYAGLTGSPDESGSKRREKGLAKAGNARVRRGMIQLAWRFLMFQKDSALAHRYRSRTEGPKGVRVTICSLSPALHAISKSPRRIRLLLGHHSLSTTARYLHVATSAVCAAPSTLDRLNLAIPPA

SEQ ID NO: 473423 - protein, 428 aa, unidentified
MADPANATPACNLVAIDIGRYGNAVLIEATSGKRHRFKMANTAADFGRLLGFLHGLPGNCRVGLEPTGDYHRPLAHRLLRAGFEVVSINSVALSRYREAIFNSWDKNDPKDAGVILEMLRRGDVQRYVDPIMVGTHDLQELAKTYYQVSRARTKVQHSLINHGLTLYFPEMHRYWCTTRNDWFVRFLLQFPTPAHVRSLSCAEFVDAAWDVVGRKVNKRAKLEEIWEMAGATAALPHAPDSLAVETFRITLRRYQQLNALRAELEVRAEQALASNEDFAHLKTLPGIGSVIAMTVLAEGGDLRRFGHHRQFLKYCGFDLAKNQSGTQRGKEQLSKRGNARLRLAFWLAAVAAVHMKENSFRAKYERYIRAAPEDPDLRRKALTAVAAKMARVAHGMIKKNQPYRQFFEQSLPSASIPLSAAVGAHATP

SEQ ID NO: 473424 - protein, 316 aa, unidentified
MTKAERFVGIDVAQETLEIAVRPTGESWQVANDEVAFGALVDRLRELAPTLIVLEATGGVQLPVVGALAAAGLPVVAMNPRQVRDFAKATGKLAKTDRIDAQVLAHFADAVRPEVRPLPDAATRELAILVARRRQLLEMRVAEQNRSRGVPPRIRAQIREHITWLNRCLAELDRELGQLVRSSPVWRERVDLLRSTPGVGAVLSATMLADLPELGTLSHKQIAALVGLAPLNQDSGKKRGKRVVWGGRASVRGALYMATLVATRHNPMIRAFYQRLLATHKPKKLALTACMHKLLTILNAMVRSQTRWAPPVALVG

SEQ ID NO: 473425 - protein, 414 aa, unidentified
MLFIGDDWAEDHHDVELVNDSGRKLAAARLPEGMEGITKLHELIAAHHLRASDSGNLAPASEVVIGIGTDRGPWVAALMAAGYLVYAINPMSAARYRERHSTSRAKSDAGDAHLLAEIVRLDRDHHRPIAGDTAAVDAIKLPARAHQNAVRERARQTLRLRSTLLDFFPAAVQAFPDLTARDALALLERAPDPDLAARLSTTRIVAEFKLAQRKNKEAKAVELQELFRVPELRQPTTLQGAYAQLVVSLVRLIRAVNEQIAHLAAAMDAAFSAHSASDIYLSQPGLGPVLGARTLGEFGDDPNRFVNAQARKNYSGQSPITRASGKKTVIMARRSGNRRLNDALHAQAFSALTSSPGARGYYDRLKARNIGHHAALRQLANKLVGILHACLKTGSPYDEDLAWQVHSAPGQLAT

SEQ ID NO: 473426 - protein, 338 aa, unidentified
MKAYAGIDLHSSNNFTAVIGDQDQRLYGRRLPNTVDAVVSALQPFREHLEGVVVESTYNWYWLVDGLQAHGYKLHLANPSAIKQYEGLKHTDDKWDSFWLAHMLRLDILPEGYIYPKEERPVRDLLRRRLLFVRHRTAQILFLQSSITRNLGYTMSARDIKKLDQSNADTLFDNPFLTLAAGNTISTIRFLKTRIAEIEKAVKAHIKLTPEFRYLLTTPGIGEILGLTIMLEVGDIRRFPKVGNYSSYCRCVKSERFSNSKKKGEGNRKNGNKYLAWAYVEAANFAIRHYPEIQSFYQRKKVKTNGIVAIKALSNKLARASYYIMRDQVPYDKGKFFR

SEQ ID NO: 473427 - protein, 430 aa, unidentified
MEVPKMNFTQNIKISQITEETLIVGVDIGSTLHYARSFDWRGIETGKVYKFANSRDGFEMFSNWIKKQQEKTGKRAVLVGAEPTGHYWFSLGNYLEELGIPLVMVNPYHVNRSKELDDNSQTKSDMKDPKVIAKLVIAGRYSQPYIPKGVYAELRILTANRHRITQELINCKNRISRWFSIYFPEYEQAFGDYEAKSSIMILKVACTPEDIRKLGVEGINKVWREAKLRAVGEKRAKILIAAAETSVGQKEGLTAAKLELRLHLQDYESKKAQYDEIMEQLAVLCEEIPESKQMLVIKGIGLITVAGFLSEVGEIRRFDSPKQIQKLAGLSLRENSSGKHKGRTTISKRGRARLRGILFNAVIPLVAKNEEFRKIHEYYTTRQKNPLKKKQSIIAIGCKLIRIFYAILTKGIIFDSQKMMSDIRREAVAA

SEQ ID NO: 473428 - protein, 314 aa, unidentified
MDGAILVGIDVSKRTLAVALSSGESFSVSNDEPGLVTLLERLSPGTVELVVIEASGGYERAAYLALWAAGVPTALVNPRDTYHFAQAGRHLAKTDRLDARGLCEFAERMQPAPTPVPEAANEELKALVMRRQQVIKMLSAERNRSQQAARSIRPSIARVIRALERERAALDHQIQQRLRDHPPLSQRCAQLDQVPGIGAVTAAIIVARLPELGHLDRKQIAALVGVAPFDQQSGAWRGRSTIFGGRADVRSALYMATLSAIRCNPALRSLYRRLRDAGKPKKVALLAATRKLLTILNAMLKHQTPWNPPCPNPA

SEQ ID NO: 473429 - protein, 439 aa, unidentified
MKTSTTSVNTGMAREHLVAWIGLDWADNQHQISIHDIGSGQVESYALKHSPETLQRWLDDLRKRYSGGKVAVVLEQSRGSVLYALMNCDFVVLYPVNPLALASYRKAFYTSGAKDDPRDATLLMEMVSKHPERFRAWEAEDPDIRSLRLVVEARRKLVNQLTRCTNQLTSHLKSYFPQAIEWAGDLDSRQACDFFEQWPTLEALQQARPSRLRKFYFNYGRPRVEIIEARLGQIKQALPLTQDPAAILAGSLMVRALAAQIRPLLATIEEFDDEIKRLFQKHPDRQLFESLPGAGTVLAPRLLAAVGADRERWTSAAEIQTFSGIAPVTEQSGKKRFVHRRFACPKFVRQTFHEFAGSSIVWCDWAKAYYDHLIAHGKGRHAALRALAYKWIRILFACWKNRTPYQEEIFLKALAQRGSSLSQLAQAAQRTKTAKKRVA

SEQ ID NO: 473430 - protein, 337 aa, unidentified
MRIIRIGLDTAKHVFQVHGVDEKEQPVLRRRLSRKEVERFFAKLPPTRIGLEACGAAHYWARVMRGLGHEAVLLPPQYIKPYVKRGKNDALDAEAICEAMSRPGMRFVPVKSAEQQAALMLLRTRELLVKQRTMLINAMRGHAAEFGVVAAKGLGKVSELLQRAHAEAAGVPALALQMLDLLASQLDALDRKLKTIEARLMAWHKADPVSQCLATQPGIGPIGAVSFALKVTDPKAFRSSRHFAAWLGLTPKENATGGRSRPGRISRQGDESLRRLLVLGATTVIQFAKPGRASPWLIQLLARRPRKLAAVALANKMARILWAMMVSGELYRRPQPV

SEQ ID NO: 473431 - protein, 356 aa, unidentified
MAVYVGIDVHKKYCQAALMNNSGRVLQELRFDNNSEGATSLVTLAKSVDPQIKAVLEPSANFWIRIYDKLEEEGVEVKLSNPLRTKAIAEARIKTDRIDAKTLAFLLRGDLVAESYVPTRKNRERRALIRHRASLMRMRIELKNRIHALLDKHELTHSYSDLFGKEGTEWLRSLQLPTPDHQILQSNLQVLETVNAEVRNADIQIAKDATTEDQAKLLMTMPGVDYYAAMVLLSEIGDVHRFNSDEKLVSWVGLAPQVHQSGETNWTGHITRKGSKRARWILGQCAQSARQHDPRMREFYERIERKHGHQKAIVAVARKMLAIMYVMLIRNEPYHGENPQLTEQKHKRLDTLANSA

SEQ ID NO: 473432 - protein, 342 aa, unidentified
MQITTIGLDIAKNVFQVHGIDAAEKVVVRKQLRRSQLLAFFKALPPCLVGMEACATAHYWARELTKLGHQVRLMPAKDVKAYVKRNKNDAADAEAICEAVRRPTMRFVQIKSPEQQGRLMQHRARDLLIRQRTQVINGLRAHLAELGITAAQGNAGLKELLAIIASDEDARLPADAHAVLIVLAAELQAMQTLITSIEKRIMAQHRSSAESKRLETIPGIGIVGATAIAATVTDPKAFRSGRDFAAWIGLVPRQDSTGGKQKLGPISKQGDRYLRRILVVGAIAVLRRARQQPERHPWLTQLLARKPFKVVAVALANKMARIAWVLLAKGGTYREPALAAAA

SEQ ID NO: 473433 - protein, 435 aa, unidentified
MAQSYSTRPVEAVSAAELVKGWDGQALAIGVDVSKADLRLVPRWADGTFLRPIRVRQPSQIGQGIELLRSLGAGRDMIVALEPTGRYGDVFRQACHRAGITVHRVSAKVSHDYAEVFDGVPSQHDGKDAALIAELAAIGKSRPWPWPAADDWEQRLSLAADLGDAYQRQMIAWFNRLEAWLAAHWPEIQKDLWLTSQTLPRILLHYGGPQGLAADPDAADRVKRWGRNMIPAERITRILQLARETVGVDVSEPEAQRVRHYAAEAVRAKRVMRRYKAELAELAMQHPVVKRMATAVGAATAGVLWLEGGDPGQYSCGRAYLKALGLNLTERSSGAVQGPQRISKRGSSRARRWLHFAAMRLTMEEPINRWYAAKIERDGGIKKKGLTAIMRKLGLALHRIAKDGVDFEPQRLFAGRRQRRRSQRSAGQEDHSLEA

SEQ ID NO: 473434 - protein, 483 aa, unidentified
MAAQQKAETGTRPRKSNRKQRREQQRKVWTDNPGLDVVHPHAAGIDVGNSEHYVAIAPAKSVEAVRRFGCFTADLRDLAEFLKAHGIVSVVMQSTGVYWIPLYDVLEEAGFQVYLVNARDTKNLPGRKSDVQESQWLLKLHTYGLLRNSFHPSSEIRVLRTYWRQRSEHVHTAAECVQRMQKALTQMNLQLANVITDIMGMTGQKILRAILAGERDADKLAEMRNWRIRASHEEIVASLTGNWRPELLFALKQEVDRYDFCQRQIAECDQEIEKQLNALPSRPRETVSPLEPAVPPRNSKKSKKAQGNSPEFDLEQELVRIAGVDFTRIDGIHVLTAQTILSEVGLDMERWKTEAHFASWLGLCPYNAVSGGKVLRRGTRKVVNRAATAFRIAAFTLRRSDSYLGAQYRRFRSKLGAPKAITAMAHKLAVLFYRMLRFGQEYVDRGQQFYDAKYRQQQISLLNRKAAQLGFSIIPAANPLPPP

SEQ ID NO: 473435 - protein, 408 aa, unidentified
MNTLYVGIDVSSKSNVIYLMLPNGDKHSNFSVANSHEGSTQLVKRIHSALTSHSLDTVLIGLEATSVYGDNLVYFLREDATLAPFNRKIHVLNPKQVKKFHDTYNDLPKNDYVDSFVIADCLRFGRINKEVYMGDYRYKALQNLTRARFFAVQNLVKEKQRFMNVLFKKYSTMTQEKVFSDTFSTTALAVYDEFESAEALANMDLHELTDFIMKKGKNRFPDPDAVAKAIQKAARSSYRLPKTVNDSVNQVLSISITSMKALESQIKEFDKAIKAQMELLPNVLISIPGIGPVYSAGIMAEIGDINRFNSQAALAKYAGLAWKQHQSGGFEAEVTRLIPSGNRFLKYYLCEAAFSLVRCDKEYSDFYHLKYKEVNRCQHKRALALTARKFVRLVFRLLKDNRLYCPAK

SEQ ID NO: 473436 - protein, 316 aa, unidentified
MDQTKPRIVGVDVSKHHLDVAVHDACEVARYANTAEGVSLLLEALGDVAPGLVVAEATGGYEIGLVRACQAALIPVAVVNPRQIRAFARAKGTLAKTDGIDARIIAEFGCVLRPRPLPQVATGRQAFGELVARRRQLVEMAIAEKNRLEHATSAVRLSIEEILCVFKSQLAGVDAAIALAIDADAELSHRRAILTSVPGVGELTAAVILAELPELGSIGSKQAAALTGVAPINHDSGTHRGQRHIGGGRPGVRCALYMATLSAIRCEPGLKAFYQRLRQAGKKPKVAIVAAMRKLVTLLNVLLQHNQLWRPQQHGC

SEQ ID NO: 473437 - protein, 424 aa, unidentified
MRFIGLDVHRDFCEVAIAEAGVVRLAGRVQTEPAALELFAQSLGGDDEVALEATGNALEIARIIEPHVGRVVLANPKAVKGITHAGAKTDKIDARTLAQLLAGGFLPAVWLPDEQTRILRRRISARAQLVRQRTRAKNQVHATLIRNLKGRPPVSDLFGARGRRWLAAQDLPADEQETVAACLRQIEFLDSEIALIDRALAEQVLASAEMRRLLTLPGVNFVTAAALMAAIGDIRRFPTARQLVSYLGLDPRVHQSGTEPARHGRISKQGRGETRHMLVEAAWHATRAPGPLRAFHQRVAVRRGGNIATVAVARKLAVIAWHMLSRGEDYAFARPSLTREKLRRLELMTGAKHQKGKRIGVFATKEQHRLDKELAAQAELAYRRLVQDWQPAINKGAGAAPGRASRRPSSGQAARQETAPPPAL

SEQ ID NO: 473438 - protein, 354 aa, unidentified
MKQYIGCDAHARYSVFVSVNEQGVVGPAVRVEHGSRELRDYLAGLEPGTPVAVEASGGWYWFMDELEAAGLDARLVNPLEAKRRIGGRNKTDKLDARGLAILLRNGTLPEVWIPPAALRDLRGLMRARLATRRHTTVLKNRIQAALRRYGTLRDESPARDLFTKKNRLMLSVAVGRLPEQTRVATVHEWELLDIVERHIGELEARIRSSIGCVGWVRLLKSMPGVGEILGCTIHLEIGDVQRFPTPEHLASYAGLVPTVHASGGRSHHGPTSRQANHYLRWAFVEAADSVLMHRHTYQDQHVLELYDRLKKHKCHGKAAVAVARHLAESSWWILTKREKYRQPHALAVASSKNG

SEQ ID NO: 473439 - protein, 349 aa, unidentified
MASMVGGLDLHRGQITFELADAASGEVWRGRLWSPDRQRVRRWLAEEVAPRAQGGEVEVAVEGCTGWRFVAEEITAAGFGVQVAEPAETMARRGRKRRAKTDRADAALLRQLVAAGDVPQSWIPPPIILEWRERVGLYMTLAEQRTAWVQRIHAECYQHGVAVPEAEIRSPTTRSWLQGATLELSAAARQRLATAYCMIDALDAQAQPLKKQLTVFGTHQPACRTLAATHYGIGGLLAVAIWSELGDCRRFSRSDQAVRHSGLDITVDQSDRRRAHGHLSRQGSPLLRWALFEAAKNSSRRTAPDHPYYAAVQDRHDGKIATLSIARKLARRCYHTLRALDPPEVYALP

SEQ ID NO: 473440 - protein, 359 aa, unidentified
MYDSTTTVTVGLDVHACSIRLAAVRADELLEERTLAYDEEAVERVLRRWPGVRCCYEAGPSGFGLYRHLIGCGIDCFVVAPGLVPQRPGDRVKTDPRDARKLARLLAGGLLEPIHVPSRELEAARDLVRAREDARLDRMRDRHRLSKFCLRHGRVLPTSSWTVIRRKWLGEQRFEFAAQQITFDSYVHTVGLVDARIELLERAIRETAEQEPWCGLVARLRCLRGIETLTALALVTEIGDFDRFKTAEELMAFVGLVPSEHSSGEKRRQGSITKVGNSHVRRLLVESAWHYGREPRIGATLENRQAGQPAHVLQISNRAQQRLHRVYRSMKARGKHHNVVVVAVARQLTGFLWAAATAD

SEQ ID NO: 473441 - protein, 413 aa, unidentified
MNYNPCITIDVSQSKSHIQGFTHFNSTTKKPTNITQPKSMRHTKHGYNQILELINFIYSKTGTIPLIVFEYTGVYHKTLEKFLLKHGIKYHIVAPLRAAKSRKNKLRSVKTDKRDCLSLAKMFYNDDLGDFYHENEYYEELKHLNRFYENILLRQQELKVNFRELLAVIYPNFKISKSNPEGAFRNVYTKEALGFLKEFSHPDLVVNSTIDEIACKLTKYISRAHQRYLKSISEHLYNYCSNLISGCSSTSNRVSSLLFYIEQIEKYEDILQDTLDKIHLLVKDSYMFNLLMSIHCVNKNLASRFICEIGDILRFKSYKAIIAFVGTDPQILQSGDNDGLHKHITKKGNKHLRTILYLIVQQMTKAKNIESSIKSFYKKKTQQGLRKLVALIACCNKLIRIIYYMSKTGTAFE

SEQ ID NO: 473442 - protein, 339 aa, unidentified
MSEQIRFDRNLATYVGIDVHPATHTAFAMNRFEEGRGSLRFENTHNGIQQFLSWLSCVDGERSNIIVGVEGRGGNGHALVGQLLDTYDKVYEVNPLYTKHRRSFGTKQEKTDERDAKLIAEVLTRKLDELPAITKQEYLPRQVVLKKSVEFYDEATLTGARFKNQLHRLQRELTLTTNKQEKHILTLAIKEKQADILRFAKRQKAFVKQFEVLLEGNGKNLTTFPGISTIAAARIVAHVNGVSRFHSLDGFIRYTGIAPIERSSGKTTKYKQNYGGNRQLNSVLYIVALSHLRWDPKGKAYFEKKVQEGKTKKHAIRCLMSRIACIVYAMLKSGEAYRG

SEQ ID NO: 473443 - protein, 427 aa, unidentified
MNQNKIATKFAATIGLDWADQKHDLWIQAVSGGKPEHQEIQQTPEALHEWVAKLRARFPEKPIALAVETSRGPVISALGAYDFIVLFPVNPALLCRYREAFCVSGAKDDRTDAMLLEEYLRLHGDKLRPLEPDTELTRKLGGLVEKRRGLVDERTRLVNQLHSLLKTYFPLVESLFDDLSAPLVAHFLLNWPDLASVQKAGTAALRKFFYGHNCRSDKIMEERLQAIAKAQPLTQDPALIEPAVLQAQALAGMLQVLHQSIEQMEKRIEQTTDAHPDAAIFRSFPAAGPALAPRLLVAFGTNRDRFASAQEVQQFYGIAPVTKQSGQSKVISMRHRCPKFGRQTFHENAGHAIRTEDWAQKCYEQQRKKEKGHHASVRSVAFKLIRIYFRCWKDRKCYDANLYEKALENHGSPLASQLKKAALAKSE

SEQ ID NO: 473444 - protein, 346 aa, unidentified
MTIVGCDFHPGWQQVAVLDTETGEVTECKLVNGNGEAERFYRRLPAPSLIGIEACGNSHWFLDLLQQLGHEVWMGDAAQIRASYVSKQKTDRRDAAHILKLLVEDRFPRLWMPSVKQLDLRQLLVHRHKLVEIRTRIKNGLQHLALNRGMQKKRKLWTEAGQKALRELPLESWAACRREDLLGLLASLEKQIDRLDVAVKQAADEDPQAALLMTQPGVGPITALAFVLTLGDVARFKRGKQVASYLGLIPREHSSGGKQRLGAINKQGNSFVRMLLVESAQTVTRLDEGFRKQYLHRCHRMAKGVAKVAAARRLAVRLYWMLRTKTGYPEIVRIESGPTLAVVDES

SEQ ID NO: 473445 - protein, 329 aa, unidentified
MSNYIGIDISKSTLNIHITKNSLDLQINNTIADIKKLYSKLKKIYKKEIKDIVFIFEPTGSYSEVLRKFCFEKEIKCFIINPKQFANYAKALGEDIKDDKIDARVLASAITLAKPNQIKVPSFNKDVERIKELMSFYKFTCKQTSQLKNHLESLEAKDGDSFAIKELKKSIKASKDKEKLILEQVLKLIDSNDEYKKAYKNITSITGVGKIAGIALLHLFIKYPEANQRQITSLAGLNPVYKKSGTSLQTLPKISKKGSVFYRGSLFMGVMTAIRFDERFKAFYERLKANGKHTTQAQIAVMRKIIIIAHSLYKNEQEYVKDFNAAKKA

SEQ ID NO: 473446 - protein, 393 aa, unidentified
MFFVGIDIAKKSHEATVIDSNGNYSVKPFKFANSIDGLTKLLNALSSVSESISDFEFGMEATGHYWLNLYTKLTELGATVHVINPVQSDALRGLYIRQTKNDAKDAFIIAELIRFGRYSETSISDSDLLCLREMTRQRFYLVDCISDAKRKVISCIDKLFPEYQSVFSDTFGATSVELLSTYTSPDVIAELDTELFATFLKSVSRGRFGLAKAQELQTLAKNTFGSFLFADSASLAIRQFLQQIKLLEEQVDELDEFIAEKFAQFDNQLTSINGIGNTLAASLLAEIGDINRFDAPEKLAAFAGIDPSVKQSGEFNGTKCHMSKRGSPYLRKTFWLAAVAGIKFNPAFRALYDKKRAQGKAHNVALSVVMRKICNIVYVILKTNKPYRIVLPN

SEQ ID NO: 473447 - protein, 449 aa, unidentified
MNQNQLDQKREWIKGKFIVGIDPARDKHQAFMIDGSGYAVGKTFSFTHNAKGFHEQLWFKLSKYLEPEFIHPDHLIFAVEAAIDFWQQLVDYLYRQGYSVVIVSPLTTKRSRSLPGHDFTKTDPKDARLVAESAFRGHYHRYVDYSDQIKAMKTLSLTYNKMRKDLAKTHLRLRSMINRVFPEFLSIVPLDTDTAHFLLSNYLHPEDFVNLDVSGTVAEMLKVSKQQHGMESLSDLQKAAPTSIGIPRDTQEIICDRLTVNSWLTLITTLKQQLKIISNQLIELAKQTPWFDILVSIKGISDLTAALFIAEVKDLSNYHHYKQIQKLAGLNLRLNDSGRSRGRHKINKIGNRRLRWIIYLMTKETIKYTPEVRIKYLKRQMKRYNYTKNIIACSSQLLQLIMALIKDNRHYEYFPENQLLVWELEYHYDKIKKDRNSKMKTPVSVPVTV

SEQ ID NO: 473448 - protein, 343 aa, unidentified
MEYYAGIDVSLKESSVCIVDAKGKIVREVKVASEPEALVRYFDDLELPVCRIGLEAGPLSHWLHAGLVAAGRDVVLLETRHVKAALSAMTVKTDRKDARGIAQLLRMGWYRPVHAKSVASQDTRAVLVGRKLLQSKLLDVELSIRGILRGYGLKVGEVSRGRFEARIEELIVGHATLETVIGAMLAARAALWGEFTRLHREMLKIARADKICHRLMSTPGVGALVALTYRSAIDDPTRFGKSSTVGAYFGLTPKKYQSGETDRDGGVSKVGDAMVRTALFEAAHIMLTRATRFSSLKRWALEVAKRRGMKRAKVALARKLGVVLHRMWMDATDFRWGATAMAA

SEQ ID NO: 473449 - protein, 343 aa, unidentified
MEHSAGLDVSVKETNVCIVDDAGKIVREVKVASEPEALLAVLTNPAYRFKRIGLEAGPLSQWLFSALAEAGLPAICVETRHMRAALKAQINKTDRNDARGIAQMMRAGLYRPVHVKTLRSQKLRMLLTHRKLLQSKAIAVENDLRGTLRNFGLKVGVVGTARFEERIRELVENLPDLAVLIESLLAVRRVLREQTAVLHRRLLAIARDDEVCRRLMTVPGVGPVVALTYRATVDVPVRFRNSKAVGAVFGLTPSKYQSGEVDRSGAISRCGDDMMRVMLYEAAHIMLVRSTKWSWLKAWAMQIARRRGLKKAIVALARRLAVIMHRIWVDGSEFRWTRQIAAA

SEQ ID NO: 473450 - protein, 352 aa, unidentified
MLNAPTIAVDLAKSVFEVAVSTRPGCVTKRHRLTRPQFARFVATHPPATVLMEACGTAHFWGRQAQAHGHRVVLLPPQAVRPYVPRNKTDRADAKGLLEAARNERIHPVPVKSEAQQALTALHRLRSTWLAARTARLNTVRGLLREFGIGIPVGARRVRPTVAALLADPDTTLPAALRPALLSASEELGDLERRLREVERQIAALAAVTPAVAALRTIPGVGVLTSTALVAFVGDATRFPTARHFASYLGLTPRERSSGRRRRLGAISKRGDPYLRMLLIHGARSVLCHATRTAPPWRLQRWALTLARRRGHNPAAVALANKLARIAWAVWTTGTAFAPRSAPPATLTVIGA

SEQ ID NO: 473451 - protein, 359 aa, unidentified
MIKERTSVGLDVHARSVMATGLDAVTGEVFRQRLVPASEVVIEWLRGLPGPVATTYEAGPTGFGLYRAITAAGIRCEVAAPSKLNRPAGDRVKTDAKDALLLAQLLQVGQIVPVRVPSITEEAARDLVRAREDVRGDLMRARHRVSKLLLRHGHVYYGGAAWTAKHTVWLNSVRFDQPGTQAAYDADREAVDFALIRRDRLDDAISAMAADSEFTATTRRLCCLRGISTLTGFALAVELGDWDRFNGASIGAYLGLVPAEHSSGDSRRQGGITKTGNSHARRLLIEAAWHHKAQYKVGTVLQARWDQATPAARARGHAGNQRLHRQWVRYAARGKKHTIANTAIARELAGWCWSLAILE

SEQ ID NO: 473452 - protein, 423 aa, unidentified
MEIMHERVAGLDVHKTMIVACVRIMSAGKIKRECRTFETSTASLEALLGWLMESGCTHVAMEATGVYWKPVGNILSDGAFELIVANAAHIKNVPGRKTDVNDATWIADLVACGLIRPSFVPDEAIQELRSLLRARKQLTREQTSHIQRIQKTLEEANIKLDSVISDILGVSGRRMIEAIIAGVRNPHKLAALADRRIKAAPKVLYDALHGRLTEHHRFMLELYLGQHDALSQAIAKIDDAVDAAAARMDEEVEAGRATFRSLILLLCSVPGINILSATIILAEIGRDMGRFPTAGHLLAWSGMCPGQNESAGKRKSSRLRKGAPWLKTILVQCAWAATRKKGSYYGAQFKRLRAKRGPKKAICAVAASMLTAIYHMLKDGTHHQDLGADHFDRRSSEAKARHHVAQLAKLGFSVELQPVAQAA

SEQ ID NO: 473453 - protein, 348 aa, unidentified
MVTIGIDPHKQTHTGVAVDALGRELAQRTAPARRVGFGELLEWGRKLDPERVWVIEDVRHVSGGLERFLIDHGETVVRLPPRLMADARRGVRERGKSDPIDALAIARAALREGIDTLPTARLAGPELEIRLLGLHRERLIASRTRLINELRWQLHDLWPDWEVPHRALIGPVWQAKVARRLAHAQPSVRVHIARDMIRRVRELTRTSTQLQKQLAALVTQVAPQLLAETGVGVVLAAKLIGEIAGIQRFTSDAQLARLAGCAPIPVSSGRTDRHRLDPGGNRQLNHAFHLLAFTKIRYDPQTAVYIAKQRANGKTTKDAIRSLKRHLVRRVYHLLHDPNSVPTTVCLT

SEQ ID NO: 473454 - protein, 327 aa, unidentified
MDATSVGADVSQDWLDVHVLPTGQRFRVGNDDAGIAELRERLSRLSPERIALEATGGLERLAVAAMAAAGLPVVVVNSAQVRAFADALGTRAKTDPIGAALIAAYVNAVRPQLRPLPAATTRALADLVARRRHIVQMIMAEQNRLRTASSRQALKSIRRLLAALKRELEAIDADMDGHIRKSPLWQVSEKLLISMPGMGPTVARILLAELPELGSLDRRQIAALAGLAPFTRHSGKWRGKSFAGRSSVRAALFMIALAAIRNNPHPQGTPRPPRPRRQGQDRRRRRHYAQTAHKPQRHDPGPKTLANRLTAKKVALASDQPMISGPG

SEQ ID NO: 473455 - protein, 432 aa, unidentified
MEAAQQGGRRSGRLKRRSTKKRSPRGWRENWVLPPLRPQDFNPWLDNMEEEEEFMQIHCQELTNAQLVEPQPVVQLPAMEDLPMLSNSTISGAMYAGIDYHKKTVAITFGDKSGNILEQVDVNNSSGLLEGLFGQFEKLECVVESCRGYEWLVEMLQDQGHTVHVGDSRSIKLIACSRCKTDKIDSKILMELLAKGFLPTTYIPSARERMYRELLRHRSSLVRTATRSKQRIHAVLAKENVQIRYPFSAKGRQQLEQVELADHRFEILAQELAVVDFAEERAHDQYLQISHLAKEEPDVARLRTLPGFDMLMAMAFLAEIGDERRFKNADQVAAYLGLVPRVYSSGGTRRCGRITKTGSKFMRWMLVQAAWAAIKASPNLRKQFGSIGRRRGQAVAIVAIARKLATIAFRVLRDKSEYKEEMLDAGLARAAF

SEQ ID NO: 473456 - protein, 339 aa, unidentified
MKFIGLDAHSKTCFFVVLGKTGRMLTKKRVTTNESELLAFVRALKGPKKLTFEEGVLSQWLFLLFKDEVDELVVCQPTEHDGPKNDEQDAWNLADLLRVGRLKSVFHADNELMNLRTLVSGHDDLIGEITREKNRLKALFRQVAIPTGTKFYQSPEMVWQLPTDTQQYVACTLFEQLDLLEEQRLGYHERFESNAKQFKDIQRLMSIPGIGVVRANQLVAIMVTPHRFPNKYHLFSYAKLIRHGRESDGKQYGKKPAKGQPMLKAVFKSAVDGAMKSNTSFRRKYEDKLANGADKRTARHEVSKAIAATVLAVWKSGKKYDDKHREVTRRRHQKSHSDT

SEQ ID NO: 473457 - protein, 346 aa, unidentified
MEHYAGLDVSLKEISICVVDRDGNTVARGTCPADPEGIAGWFRNRSLEPNRIVHESGMLSIWLQRGLERIGLAATCIDARKAHKSLSARLNKSDAGDAEGLAQLARTGWFTPVHIRTEASDRLRALIGARERLFRLRKDLEGHIRGVLKTFGIRMTGISQGRQRQAFRDQLAAAGETDPVLRVIADGFITAHATLCQAAADLDAALKRKARDHSVARRLMTIPGVGPVNALSFIALIDDPSRFGRTSDVGAFLGLTPKRHQSGEIDWSGRVSKCGDSAMRGLLFEAAASVIRQVKRFSALKSWAVRLAGRRGFRKAAVATARKIAVLMLTLWKNETEYHWTKEATA

SEQ ID NO: 473458 - protein, 336 aa, unidentified
MLIIGCDFHSRFQQIAMLDTQTGEIVERRLEHENGEAEQFYRSLPHPVRVGMESSGHAHWFERLLAELGHELWVGDAARIRAAVVRKQKTDPRDAAHILDLLVTNRFPRVWRPLPAERDVRQLLVHRQKLVWARISVKNQLQMLAMNQGVCIRRKLWANAGRRALEGLPLGPWTSRRREELLKMLDQLNGSVEELDRAVEQEAGKRADVVRLMTHRGVGPVTALAFVLTLGPVERFRRSKQVVSYLGLNPQEHSSGGRQRLGSISKQGNTMMRYLLVEAAQTASRFHPELRRSYQRLKSRRGSAVAKVAIARKLAVRLYWMLRETTDHAQLVRNAR

SEQ ID NO: 473459 - protein, 418 aa, unidentified
MLSIKHFVCCGMDVHKKFVVATIALTDYRGVTSYVKKRFATFNSDLKALEKWLLSFNCTEVCLESTGKYWIPIFNILEGSCHVVVANPKYVRAIKGQKTDDKDSAWIADLFKFDIVPSSYIPCKEIRMLRELFRYRQKLIGHRSSEKNRLQNALTVSNIALASVLSDTFGKSATAIVDYILTCEVFDPEYCKSLFLKKAKDKADDVVSSIIGYELRRDQSVKIKVCRKHFDEINECVSTLEETISDLAKPYHNFIELATTIPGITEQSATFIIAEIGVDMAVFKSSKRLCSWAGLTPENNESAGKKKSVHVSRAGVYLKPLLVQCANAAIKSNNPYFKYKYDRIKKRRGHKRAIIAIARMVLTCIYHMFQKQEVFNPADMDYSAIPEEMYQKFQEQYDRNAIKRLEKRGYIITPPAMA

SEQ ID NO: 473460 - protein, 323 aa, unidentified
MQGKVSFQEDAMPVVYAGVDVSKEWLDVHLHPLGESRRFSNDKTGIRQLKRLLARHQPKSIVMEATGKFHRPAHRSLWLDGFAVAVVDPLRARMFARACGYLAKTDRLDARFLALLAESLRPPADTPPSPHVEALQELVNARSAAKCDITALQNRSKTATTALLRGELNRLVRRLEQHVERLDKEIERRVGEDPQLYRKAEILTSIPGIGRVTALALMAGMGELGTCSGKQAAMLAGLAPIANDSGARTGRRSIRAGRPAPRRALYMAALSACRYNPALARFADTLKAAGKPAKVILVAVMRKLLVLANCLLSQDRLWTPTPP

SEQ ID NO: 473461 - protein, 352 aa, unidentified
MKAQSKEINFNGVNVYCGIDIHKKTWSVSIEVEDTPYRKSFTQPADKEALVRFLKSHYPGANIHAAYEAGYFGFGLYRYLTEQGIKCSVLNPADIPSTHKEKDQKRDKLDSKKIIRSLREEPVQMVWVPPVSVEQDRQLLRTRRAMVKNQTRTQNQIKALLQIHGVSYPEEFKKDKTSWSKKFISWLESVELAESSATYALRLHIQTLLHTRSTILEATKMIRAMSQSERYAEVYQRLVQIGGVGTICGMTLLTEIGDVNRFKNPDTFRSFIGLIPRSNSSGEKDHHGRITQRANGHIRFLLIQSAWRAIACSSHFCAIYTAYIKRMPANKAIVRVAAKMANSIYYAMKTEK

SEQ ID NO: 473462 - protein, 340 aa, unidentified
MKVRTLGIDLAKNVFLVHGVDGRGKTVVHRELRRRQLLPFMTQLQPCLVGMEACGGAHHWAREMAKLGHEVRLMSPQFVRPYVKSNKNDARDAEAICEAVGRPSRRFVAIKSQAQQDMMALHRVRSLLIRERTALMNEMGGLLAECGVVAAQGATVLRRLIATILADHDSRVSELLREILSEMSERLRLFEERLKRYDLRVAELARSDERAGRLMAVEGVGPLTATALIAAVGDARQFRSGRELSAWLGLVPRQHSSGERVMLLGISKRGDRYLRTLLIHGARTTLRYVGRKRDPRSRWAGKLKERRGPNIAAVALANKNARVLWALLTRAEEYRVPAAA

SEQ ID NO: 473463 - protein, 389 aa, unidentified
MKIYVGIDIAKLNHFAAAISSDGEIIIEPFKFTNDADGFQLLVSKLESFDKNSLIIGLESTAHYGDNLVRYLVTELYQVCVLNPIKTCQMRKNNVRKTKTDKVDTYVIAKTLMMQDNLRFVSFFDLDMMDLKALGRFRQKTIKQRTRLKIQLTTYVDQVFPEIQYFFKSGLHQHAVYALLKEAPSPKEIASMHMTHLANLLKVNSHGHFTKEQAKELRVLAQKSVGANDSAISIQITQTIQQIELLDSQLEKIEAEMTDIMKFNDSVIMTIPGIGYINGGMILGEIGDIHRFSNPNKLLAFAGLDPSVYQSGNFQAKTTRMSKRGSRVLRYALVNAAWNVVRNNATFKAYYDAKRAESRSHYNALGHCAGKLVRVIWKMLTDEVEFNLE

SEQ ID NO: 473464 - protein, 314 aa, unidentified
MKKAVEVYVGIDVSKAWLDEAVHEQKGVNRFSNDDAGIANLVKVLKKRKPKLIVLEPTGGFEMLVVAELSQAGLPVAVVNGKRIRDFAKATGQIAKTDKLDARVLAHFAAAIRPEVRPLRTEEEEQLTALLTRRRQILDMLTIEKNRRVSVRAKVRADLEAHIHWLSDNLKELDQEIEEFVKGSPAWKEKDTLLQSVPGVGPVTSATMLGMLPELGLLNRQEIAALVGVAPMNKDTGNKQGKRRIYGGRADVRSVLYMAALSAKKHNPFIRKFYQRLIQHGKEKKVALTACMRKLLVILNAMVRTNQPWRSHTA

SEQ ID NO: 473465 - protein, 343 aa, unidentified
MEYYVGLDVSLKQTSICVVNQVGSVVREGVVDSEPEAIATFVRSKAPGAVRIGLETGPTATWLWTELKQLGLPVICIDARHAKAVLKMQINKSDRNDAAGIARIMQTGWFKEVRVKDLDSHSVRALLASRALLVKIKRDLENQVRGLLKNVGLVIGRAKFNVFAVRAEELIEDRPELIAVVGPLLKARKAIEQQTDDLDRKVLKLARYDAQVRRFMTVPGVGPITALCFKATIDDPTRFKRSRSVGAYVGLTTRRHASGEIDWTGRISKCGDAMLRSYLFEAAGVLLTRVPKWSALKAWGMRLAKRNGLRKAKVAVARKLAVILHRMWIDGTEFNWSKKEVAA

SEQ ID NO: 473466 - protein, 453 aa, unidentified
MAQCNRSIPPKPPKSRQALSLTHPNAAGIDIGSASHFVAVPPDRDDAPVREFKSFTADLAALADWLAACGVEIVAMESTGVYWIPLYELLDRRGFKVLLVNARHVKNVSGRKSDVLDCQWLQQLMSYGLLRGAFRPADAVCALRSLSRQREMLLRSQARHVQHMQKALTQMNIQLANVISDVVGETGQKILRAIIAGERDGHVLAAMKNVRIRASADEIAKSLEGNWRTEHLFALKQALALFDFHATQLAECDREIEAQLASLAIHEGTPEKGKKRGRARNAPKFDLRERLFQMCGVDLTRIDGIDVTTALAVVSEVGTDMSRFPSAKDFASWLGLCPGTKITGGKVMSGKTKRCANRAAQALRLAAAALRTSQSALGAYFRRMCSRMDKPKAVTAAAHKLARLIYSMLTNGEDYTDQGQDYFEERYRQRVLRQLAIRAEKLGMKLVASEQPA

SEQ ID NO: 473467 - protein, 343 aa, unidentified
MQSISTIGLDIAKSVFQVHGVDAAGQVVLRRQLKRRHVLAFFQKLPPCLVGIEACASSHHWSRELQALGHTVRLMPPAYVKPYVKRQKNDTTDAEAICEAVTRPNMRFVSTKTVEQQSCLMLHRVRHLFIRQQTAVINSIRAHLAEFGIVAPVGRRGVEQLLEVVADTADRRLPEVARACLAALGSQLRALKAQILEFDRRIMVWHRSNATSMRLDAIPGVGPALATALVASIAEPGAFRSGRDFSAWVGLVPKQNSSGGKDKLGSISKQGDRYLRSLFTAGALAVIRYAKIHGTRHRPWLTGLLARRPTKVVAIALANKLARMAWAMMVRNERYKEPAALAA

SEQ ID NO: 473468 - protein, 408 aa, unidentified
MIYVGIDVAKDKHDCYITNSEGEALFSAFTIRNNKYGFNELYENIMSVASSTEDVRVGLEATGHYSYNLLSYLVKKNFKTYVINPLHTSFYRKSLSLRRTKTDSIDAQTIASMMMSDVDLKSYSDTLIRTDELKSLTRYRYDLVRERAKLRTSVSRLITILFPELEELVSCVHTASVYALLIKYPCADMIAMTHLTKLTNLLTDASHGHYGRNKAIAIREAARNSIGTNMPAKSMELRHTLQLILKMNEGIEEIEKEIQKIMDEINSPILTIPGINYGMGAMIIAEIGDFRRFESPDKILAYAGLSPSTYQSGKIDSPYAHMEKRGSRYLRYALFNATKYVCKWDPDFAAYLCHKLEVGKHYNVAISHAAKKLVRVMYHLAISGEEYEGKGQKQERDRSMDLIEENME

SEQ ID NO: 473469 - protein, 348 aa, unidentified
MTVYIGVDFHARQQTVSYLTTEEGEIHQLVLVHEKPAEVRAFYAQFASQQVVVGFESSGYAAWFEELLEELGCEIWIGHAADIRRFARRRQKNDRRDADLILDLLVAGDFPRIHRYTAASREVLQQLRYRQKLVKMRTMVVNGLLFMASSRGVTLRSQLQSKRGQARMRALALPAPLAQQRDELCQLLLELSTKIATVQAWLEARAEQDVRVQRLRTQYGIGPLTGLCLTATLECPERFANGRKVTAYAGLDPTEDSSAERRRMGAISKQGSRLLRFYLVEAGQVAMRKDADLARAYKRVLLRGGHAKAKVAIGRRLLIRAFIMLRDEIDYAEFQRRGVAARSSRGTA

SEQ ID NO: 473470 - protein, 338 aa, unidentified
MNKFSGIDLHSNNSVVVVSDDADRVVYQRRLPNDPVQIRAALAPHREDLVGVVIEATYNWYWLVDQLMNDGYRVHLANPAAIRQYEGLKYSGDFTDAAHLAQLLRLGLLPEGYIYPAEERPVRDLSRKRIQLVQCRTAQILAIENLFSRHSGGQMQGERVKRLDETQVNQFGFAPDVTLAMQANLAVMQTLQEEIEIIEKRLMERVKLRPDYALLNSVPGIGPVLATTIMLETGTISRFTKVGNFSSYCRCVDSRRESNSRKKGEGNTKNGNKYLAWAFVEAANFAIRSCPEARRFYERKKRARNGIVAIKALAHKLARACYHMLREHKPFDITRCFG

SEQ ID NO: 473471 - protein, 351 aa, unidentified
MTCKKDVAVVRTIGIDTGKNTLHMIGLNEKGAIVLREKVSRDRIAARLVNIPPCLIGIEAGMATHYMSRDLLALGHEVKQVPPAYAKPFRQGHKNDFRDAHAVAEAVQRPSTRCVPIKTDDQLDLQALHRVRSRLIGDRTAVINQVRGFLLEHGIAVRQGPRSLRQQLPQILATRTDVLSPRMLRIIEDIVHDWRYLDDRIERVTDEIEGLARTDVNCGQLISVPGIGPIIASATVAAVGNGTAFAKGRDFAAWLGLVPKQMSTGDRTILGRITKRGNRYLRMLFVQGARAILLRPKSWAKYSFGPWLMAAARRLHRNILTIALANKLARIALTVLVQGRSYESRIVPAAA

SEQ ID NO: 473472 - protein, 423 aa, unidentified
MDILHERVAGLDVHKNTVVACVRVVIGKETSRECRTFATTTDGLLALRAWLSDSQCRHVAMEATGVYWTPVWRILSEGDFELIVVNAAHIKNVPGRKTDMNDAMWLADLLAFGLVKASFVPTEPMHELRSLTRTRKQLVCEQTRHVQRVQKTLAEANIRLDSVISDIMGASGRRIIEAMIAGVHQPSKLADLAGKQIKASPKELYDALHGRLTDHHRFLLKLHLRQWDELDVSIRTIDLEIDQRIGRIDEQRSASDPPFRTLIENIDTVPGISKVAAPAILSEIGCDMSRFPTAGHLLAWAGMCPGQNESAGKRKPSRLRKGAPWLKTMLVQCAWAAIRKKGSYYQAQFLRLRQRRGPQKAICAVAASILTAIYHMLKAGTEHCDLGASHFDHRSTEAKAKSLVTRLKKLGFVVQLEPTAQAA

SEQ ID NO: 473473 - protein, 358 aa, unidentified
MQSNKKSFKGQKIFVGIDVHAKTWAVETLTESGFTKRHAQEASAKVLFDFLSKNFPDGEYHAVYESGFSGFSTYYQLKEYGIHCVVVHAADVPSTQYEQVMKTDKIDAGKLARALRKGDIKPIYIRERENLDDRAVVRLRKTIQKQLSGYKTRVKHLLHTNGVKLPARFDKPGTHWSRAFMNWLKDEVVLLSSTRLSLDLLVNQVESIRKNLLEATRVMRILAATDKYKVNYELLLSIPGIGFNVAMCLLTEIYDFKRFGNENCFAHYLGLVPTCHDTGDKHSTGGKTFRGNKLLGPMIIEACWVAIHKDYGLSQAYCSYKQKMKPQLAIVKVARKMSNIIFSVIKNGKKYEPYKWEE

SEQ ID NO: 473474 - protein, 326 aa, unidentified
MTSWIGIDVSKAHLDGVLLNAQGHQHTQVSNDKHGFRTLENFLKKRCPQGGHVCLEATGLYGDAVAEFLFQHSYVVSVVNPARIKAYGDSQLKRNKTDRADAALIADFCRTQQPDPWQPPAPQVKELRALLRHLDDLQAMRQQESNRAQSGEQSLTVLGQLQQHITFLDTQIQALKHQIDDHFDQYPDLKRQRDLLTTIPGIADLTAGRLLGELSERRGFHSARQVAAFVGVTPRQHRSGSSIHGHSRISKQGNAALRAALYMPALAAKRYNPILKAFAQRLHARGHSKQSIVVAVMHKLLHLAFGVLKSGQPFDPLYLDKRLVTP

SEQ ID NO: 473475 - protein, 411 aa, unidentified
MHHRQNYLYVGVDLHKEQHTAVIINCWQEKLGEIQFDNKPSAFSKFLLEVETYVSAGITVVFGLEDVGGYGRALAKYLVDHEQVVKEVNPALSFLERKSHVTTQKSDSWDAECVARILINKLNQLPDAKPNDLFWSIQQLVSRRNALVKAQSALKNQLHIQLNHHYPSYKKFFSELDGKTALAFWQQYPSPFCLEGANIKQLTAFLLDVSNNTCSVKKASDILKLVKEDGQTMKEYQETRDFLVRSIVRDIEFKKKEMKYIERELKRLVNLLDYQLETMPGIELVTASALIAEIGDVRRFPNANKLARFAGIAPVYFGSGGKGKTHKSKQGNRALHALFYNLAVQQVQVAKGSKMPRNPVFHAYYQKKLKEGKTKGQALVCIMRRLVNIIYGMMKYKIAYELPIVEEKEVV

SEQ ID NO: 473476 - protein, 420 aa, unidentified
MTRGDDSRIIGIVHPICCGLDVHKESISACVIFPDKDGIDQYDIKEFGTFTDELMRLRLWLLDHECPVVAMESTGIYWRPVHNVLEDAIRVVLVNARDIKNVPGRKTDIGDSKWLAGLLRYGLLKSSFIPAQDVRQWRDLTRLRKKYVQSVGDYKKRTHKLFESANIKIDSVVSDLFGVTGRNLMHLLVTDRERLTLSDIQFCVRGKLKGKEAELFRSIQGFFTDHHRFILNELLSTIDTLEAQIEALDHEIRCAMKEHDPLLDRMKKAAGIADVSSREILAEIGPTLDTFPNAASLASWSGLCPGNNESAGKRKSGRSSVMKHHLKTIMIEVAWAAVKKKGSYFKDKYYRLKARRGAKKAIVAIAHRILLGIYHVIKDGVDFRDLGEGYLTLRNKSQKVFHLRKQALALGFDLVPQPMS

SEQ ID NO: 473477 - protein, 352 aa, unidentified
MATTAQSAIAVIGIDIGKNSFHVVGLDGRGAIVLRQKWSRGQVEARFANMSPCLIGMEACVGAHHLSRKLKALGHDARLMPARYVRPYSKGQKNDFRDAEAIAEAVQRPTMKFVVTKTADQLDLQALHRVRERLVSQRTGIINQIRAFLLERGIAVRQGQRFLRVELPRILATPPDVLSPRMVRVIEGLASDWHRLDERIEVLPSEIEELAKRDAGCERLMSIPGIGPIISSAMVAAIGTGDSFSKGRDFAAWLGLVPRQISTGDRTILGKISKRGNRYLRVLFVQAAWVVLVKVKPTRWEGHGLRPWIEAAKKRLHHNVLAIALANKLARIAWSVLAHGRAFETNKLPAAA

SEQ ID NO: 473478 - protein, 315 aa, unidentified
MNEEKQQVFIGIDVSKKELEVALRPMGTRSVFSNDEDGISSLVDFVRSFSPVLVVLEATGGLETGAVGALAAKGCPVVVVNPRQARDFAKATGKLAKTDSLDAHVLAHFADAVRPKVRALKDAETQNLDALNTRRRQIVEMLTAEKNRLLMAPSWTRKDIKSHIDWLEKCLHKVNKEMDKLLKKSPVWREKDNILQSTPGVGPVLSITLLADLPELGTLNGKQIAALVGVAPLNRDSGMFKGRRAIWGGRAGVRSVLYMSAMSAIRFNPVIRVFYQRLRAAGKVYKVAVTACMRKLLVILNAMIRNGNCWNAACS

SEQ ID NO: 473479 - protein, 399 aa, unidentified
MTNPQSGIGGVDSHKDTIHVAVISVIGQPVADHEFPTTEGGYRRAVAWLIEHGPLQAVGIEGTSSYGVGITTAVTAAGIRVVEVNRTRPAERRRQGKTDQLDAYRAARSVLTGEASTDPKSATIEPLRALTIARRSAVKAQQAAWRQIGALLVNSPTRLRDRYRDLPEAKLVAILTNIRPDQQADPDLADTMHALRALARRHRDLGHEITDLEARMAARATRANPALLAIKGVGSVIGAQLLITAGDNPDRLRSSASFAALCGTAPIPVSSGRTDRHRLSRGGDRQANAALHHIVKVRLSYDPATRAYRDAHLAKGWTPKAVFRALKRAVAREVFQALAGHCAVPDYSDLRPARRAKNLTLTAAAHHLGVWPARVGELELGRRPNNELATRYRAWLNAA

SEQ ID NO: 473480 - protein, 344 aa, unidentified
MEITTVGLDLAKNVFQVHAINTANEVVVKKTLRRVQMRRFFEQLDPCLVGIEACGTSHYWAREITKLGHEVRLMPPAYVKPYVKRGKTDAGDAEAICEAVRRPTMRFVAIKAPEQQAALALHRTRDLFVKQRTQLVNMIRGLLAEFGIEIRRGIEQALMLAKRIAALEVPDIPPLAAKVIAGLAGQVLDLQARLGEIERELLAWHRSNAISKRLATIPGIGTVCATALAASVTDPHQFRSARQFAAWLGLTPLQHSSGGKERLGRISKMGDKYLRRLLVVGMTSLIRRAKYKPEAVDPWLADLLSRKPARLVTVALANKAARVVWAIMVRGGVYRMPAGVTTPV

SEQ ID NO: 473481 - protein, 341 aa, unidentified
MKNKSFIGIDISKNVIDASIFCEGTPIKDFSHDVFNNSRKGFGEMCTWLKKNHVVLSNCLFGMEFTGSYSMELEKFLNTRNYQFCMLSTHVVKHYPMGPKDKSDKIDSAKIADFLYRYNGTECVKPYNMPDKTMQRLKALMNERKFLVEQRTCFMNRRQLCTTKEDTQLYDGYIKKLSRDIENIELEEQKLLATDDSLLSTYKNLLTIPGIGFVNAINVIVITRNFTAFETARQYASYVGVAPHFRTSGTSVKWRPRPSARCDGQAKADLSMAATVVVQYDAELQSFYNRKLGGKQDSDTKRKALNAVKFKLVLRMFAIGKQNRKWEPLDSKSSNEKLAIS

SEQ ID NO: 473482 - protein, 458 aa, unidentified
MARRKQSKQEAMLAKVKDLEALEQINLNAAGLDIGDNEIYVSVPKGRDKGSVRVFKTFTIDLYALADWLQACRVDTVAMESTGVYWIPVYEILEARGFEVYLVNARHIKNVPGRKTDILDCQWIQQLHTYGLLRASFRPPDEIRALRALARHRERLIQSCAREIQHMQKAMQQMNVKLTNVISDITGVTGMLIIRDIVAGERDPKVLAHHRNPRCAKSEAEIAKSLQGHYKAEHVFALQQALEAYDFYQRQIKACDVKIEQCYQDLVSDDHADEPPLLAVKRNTHSKNAPNFDLRRYLYRWAGVDLVVIDGLNALTVHQVLTETGVDMSPWRTEKHFCSWLSICPHNDKTGGKVIKSRTKKTQNRAAAALRIAAQSLSRSKSALGAYYRRMRAKLGGPEAVTATAHKLARIIYAMLKNQTEYFDPGESHYQEQTRQRAIKRLKRKAKDLGYQLVELAA

SEQ ID NO: 473483 - protein, 311 aa, unidentified
MEHPCFVGIDVSKAHLDVHVLPTGESFRVGHDDAGFVTLIARVRPFTPTVVVLEATGGYEVTVAAALAGARLPVAVINPRQIRDFARATGQLAKTDALDARVIALFAEAVRPIARPLPDEQARALGDMVARRRQLVDMLCAEQNRRRLLRDQGLQRHLEAHIAWLEDAISRLEADLTTLIRSTPIWREADELLRSVPGVGRVTSCALIADLPELGHLDRRRIAALAGLAPVARDSGAFRGRRMIVGGRAHVRRILYMATIAAIKYNPVIRAFFHRLVAAGRPGKVAVIAAMRKLLTILNAMLRDRRPWHIA

SEQ ID NO: 473484 - protein, 354 aa, unidentified
MQYIAFDSHKKYTFASVAQPDGGILKEGRIEHKRGAIKQFLSMYQPQSPVAVETIGNWYWIVNEIEQAGMRPQLVHARRAKLMMGMVNKTDKLDARGMNRLQRNGTLPVVWIPPEELRDKRELPRTRMVFSHQPTEVKNRIHANLAKYALQVDEVTDMFRGKGRSLLEARLSELPQHCQATTKQWLEELDFVEQQIETLDAKIEKVFEETPNRALLRSLPGVGPVLSLVILLEVGDVNRFPTPAHLASYAGTTPRVHSSGGKTRHGQIRSDVNRYLKYAFLEAANQVAVRRESHPDRHVSQLYTRVRQKKGHQKAVGAVARHLAEAAHVILSKQRVYQDPVSSRKGSARVAHES

SEQ ID NO: 473485 - protein, 419 aa, unidentified
MKQEAHEEFAAFVGLDWADAKHDVCLQAAGSAKREHFILEHTPEAIEAWVCALRQRFAGKPIALCLELNKGPIVFALRKYDFLVLFPVNPLTLARYREAFTPSRAKDDPTDAELQLELLCIHRDKLQSLTPQSPTMRALEQLVEHRRRVVGDKVRITNRLTSTLKNYFPHVLQWFQDKDTLLFCDFLSRWPTLKAVQLARRSTLETFFREHHVRSADVITQRIDAIKAATPLTTDEGIIAPHALLVQALISQLRVTLHAIQDFDHAIAQRAQSHPDFPLFQTLPGAGPVFAPRLLVAFGEQRERYASAAELQQFAGIAPVTERSGKKSWVHWRFQCPTFLRQTFVEWAAESIRHSFWAQVYYQQQREKGKAPQAAVRALAFKWLRILFRCWQDRTPYDESVYLKALNRRGSALIHNLAQ

SEQ ID NO: 473486 - protein, 412 aa, unidentified
MAVVMNQDSGFDIWCGLDVGKTGHHACALDAAGRKVFDKPLPQDQKRLEELFDKLQTHGRVLVIVDQPNTIGALPIAVARSMGIQVAYLPGLAMRRAADLYPGNAKTDARDAFVIADTARTMPHTLRRVDAGEETLAELKVLVGFDEDLAAEATRLSNRIRGLLTQIHPALERVVGPRLTTKQGLAVIEQLGGPQAMAAASKSKLLRVISKAYPRGTQEFADAITTALAEQTVIVAGTAAAEQVLPQLAASLRQTLDQRHALAAQIEQVVDAHPLAEVLTSMPGVGVRTAAQILLDVGDASQFPTAGHLAAYAGLAPVTRRSGTSIRGEFPARSGNKHLKRALFLSAFAALRSDPTSKAYYDRKRAQGKKHNPALICLSRRRCDVLFAMLKNREPYRAPTPTREPSPLPLAA

SEQ ID NO: 473487 - protein, 399 aa, unidentified
MEQVIIGVDPHKLSATIEVVDHNERMLGSGRFSTDQAGYSAMRAFVKSWPERVWAVEGANGAGRPLAQRLLEAGEQVVDVPAKLAARVRLFDTGHNRKTDALDAHSVAVVAVRTSNLRVLKVDGELEAMRILTDRREALTRRRVQTVCRLQALLAELLPGQAKRDITTGQAKAMLATVRPRDIAGKTRRRIAAEELAELIAVEAKIKKSTAELKNMVLARDSRLMDIHGIGAVVAARILADVGDVSRFADRNRFASWTGTAPLDASSGEQDRHRLSRAGNRRVNHMIHIAAVTQLRLDTEGRGYYRRKRAAGKKPQEALRCLKRRISDVIYRQLIADAKPAVKAVPGGHRGATPESSATDLPPHIGTSEKPLPGPQPRRYAATTTARKRQPAQTLQDAG

SEQ ID NO: 473488 - protein, 317 aa, unidentified
MTQTSMTTAGIDTSKAKLDIAVHNRTERWQVVNALPGWRALLANLTKAGVTRVGIEATGGYERGVVEYLRAAGLTVLVLQPIQVKAFGRVHLRRAKNDALDAVLIAACAAAIDQPRIAPDPRLAELAENLTFLEQIEEDIRRFKTRLEHIDQPRLRRMVLGDIARLKARRVAQIRDIAKQLRCHHDLAARLDLVLSIPGIGERTALALIIRMPELGRINREEAAALAGLAPFDNDSGQQKGQRRIAGGRARLRRSLFAAALPAAFRWNKALILLYARLTAAGKHHNAALIACARKLLVYANTVVQRGTPWSERPLRV

SEQ ID NO: 473489 - protein, 481 aa, unidentified
MKKNPGRQHGKNIRQPQKKIVEQIAGPSCQAADNEDNEGLPVIRPLVAGIDLGSEQHWVCAPRLDGAGREVAVFGATTPELERMALWLKERKVESVAMEGTGVYWIAPHEVLERHGFQVALVNTRELARVPGRKKTDRVDARWIQRLHSCGLLRGSFRPVEQVCILRTYVRGRSILVAETADWMRRMQKSLDQMNVRVHRAVSDLDGMTGMAILRAIVSGERDAAKLAKLRDRRCRKSEAEIAEELTGHWREDHLFSLEQALKVYDGLQERIADYDRKILEKVAEMTEEERRGQQAPELKNKEKARGIKRRGEEPLRQALYRMSGVDLTAIDAIGVGAVAVVLSEYGPDLSRFSTEDEFVSHVNLAPRKPVTGGKPMKKKKRGSASTRVAGALRMAAVSMRNSKTALGAYYRRVARRIGGDVAVFATARKLAQLIYRLLRWGQAYVDEGAEAYEKRYAEQRVQRLKASANDLGYELTPKVA

SEQ ID NO: 473490 - protein, 351 aa, unidentified
METRVTALPKLFIGIDIHKRSWKIHCSTDLFGGKSFTMPPEPEKLYEYVQKHFSDHQVTTAYEAGCCGYSAHRSFESYGWKSLVVNPADIHRKGKERYTKTDRIDAQLISRELKDGRLDGITVPDIEREELRSLFRRRNELVKDFRRIKSRIKMHLLYFGIKVPAEFDNDHWSHAFRQWVDSQEFNYPTAQETMASKMRTFRFIDKELRDVSSQLRAYCRKHFKKDYYLLRSVPGIGGIVAVGILSELGDIRRFNTLKHLAGYVGLAPGIYQSGATSKALGMNPRCHRLIRSYFVEASWQAIRTDPVIQAYYRKHVGKDVKKIIVKVAHKLLSRTLAVIKTEIPYEVGVIA

SEQ ID NO: 473491 - protein, 345 aa, unidentified
MEIRTIGIDLGKTVFHFVGVNARGQVVVRRKGSRTQLLRFTANLPQCLIGMEACGGSHFLGRALREQGHDARLMPAQYVKPYVKTNKNDYIDAEACAEAVTRPTMRFVPIKTDDQLDLQTLHRVRERWVVRRTAVINQMRGMLLERGITIRKGRHHIEESLPGILEDADNKLSGALRVLLTQLRLEMQYLNGQIGETDKLVARICGELEQCRRLVAIPGIGPITATATVAAIGNGAAFKKGRGFSAWLGVVPGEHSTGGKQKLTGTSRRGNKYLRKLFVQGAHTVLLQKTKQSSGLSTWLVNLTSRKRPQVATVALANKMARLAWAVLFKGEAYRPPTAPQAIAA

SEQ ID NO: 473492 - protein, 302 aa, unidentified
MRFYTKQHRHYCGIDLHVRTMYVCILDAAGQVLVHQNLPAKPEAFLEVIAPYREDLGVAVECIFTWYWLADLCAAEGIAFVLGHALYMKAIHGGKAKNDRIDALKIATLLRGGMLPQAYVYPAGMRATRDLLRRRLHIVRKRGQLLAHIQMTSHQYNLPALGKRIAYPSNREGVAEHFEDQVVRKSIAVDLALLERYDALVTDLESYLVRQAKQHDPQAFALLCSIPGVGKVLALTILYEIHDVRRFDRVQEFASYARLVKCAKESAGKKHGTSGAKMGNVHLKWAFSEAAVLFVRHSEQGK

SEQ ID NO: 473493 - protein, 310 aa, unidentified
MESIFVGIDVSKDRLDVAVRPSGEVFFVERNARGLERLVSRLRELSPHIIALEATGGFETVVAAALAGAGLPVVIVNPAQIRAFARAIGRHAKTDPIDADVIAHFAEATKPQVRPLPDEATRVLADLVTRRRQIIEMIGAERQREQRITVLRLKKSIARLLKALEKELASLDADIDDAVRGSPAWREKEDLLASVPGVGPVIARTLIAELPELGQLGRKEIAALAGHAPFTRQSGQWRGKSFIAGGRVAVRSILFMGALVAKKHNPVLKAFFDRLVAAGKPKMVALVAVARKLLTILNAILRDGRPWQTA

SEQ ID NO: 473494 - protein, 344 aa, unidentified
MSGVITVGLDIAKHVFHAHGVDDRGRALFSKRISRGKLLDFFAAQPSCTVALEACGGAHHWARQLTQLGHEVRLIPPASVKPFVKRQKNDAIDAEAICEAAQRPNMRFVAMKSEQQQAAGLVFRTRDLLVRQRTQLINAVRGHLTEYGWIAPKGPSHVAELAHLIEEKRMAGSLPEAARAMFRLMLDQLASLNGRIAVLDKEIARRAREDEVSRRLMTIPGIGPISATAIAALAPPVETFAKGRDFAAWLGLTPVQRSTGGKQKLGATSKMGERTLRRLLIIGSSAVVQQASKRGAAKGSWLEQMLARKPRMLVTVALANKMARIVWALLVKREVYRAPVAANA

SEQ ID NO: 473495 - protein, 414 aa, unidentified
MGLKIVYPICCGIDVHKTFVVACIASTDEGVTTYKRHRFSTYTKGLKELSQWLCEHNCKDVCMESTGKYWIPVFNVLEHSCNITLAHPKYVKAIRGKKTDKKDAKWIADLFKHDLVAGSFMPPLAIRQLRDLMRYRFKLTNFTSSEKNRVQNSLTVSNIQLGNVVSDTFGKSSMNIIGKLLEDPTDTTFDIEPLIHGSMDHKIPELKLAVEGFITPEQSGKLAVIKKHYDNLNARKSDLEELILSLAEPYTEEINLILTVPSFKNIFSAIAVVSEIGVDMDVFPTAKHLCSWAGLTPTNNESAGKKKSVRVSRAGVYIKPLLVHCATAVVKSDKHPEIRNRYLRIKKRRGHKRAIIAIARMLLTAIYHILKKKEPYNPDLYQKADVLPVSREITVEQALSLAKSQGFRIKETVT

SEQ ID NO: 473496 - protein, 362 aa, unidentified
MPKSTTIIAFDQHAATTVAAVLLPGQRTPALHALTSDSPTILRFVERLRRQGPLRCCYEAGPCGFELQRAFTSHGLPCDVIAPALIPRRPGDRVKTDRRDASQLAILYRADALTAIHIPTEQEEAARDLLRCREDIRADLLRARHRLSKFLLRHGRRFTATKKAWTKRHAAWLQAQRWPLAALEQTHRAYVRAVDEAVGRLQAVDTELRDLLTIEPLRARVERLRCFRGIDDLTALTIAAELGDARRFPSASRVMAFTGLVPSESSSGATRARGRITKTGNAHLRRVLVESAWHYRHHPFLGRALRVRQQGAPPAIIDRAWHAQHRLHRRYRRLAARGKPKQHIVTAIARELSGFLWAALTQ

SEQ ID NO: 473497 - protein, 350 aa, unidentified
MIVNHYIGFDVHKKSISYCVKTADGRITEEGKLRATHPALREWAERRKEPWRGAMEATLFSGWIYDALKPHAAELQIGHPAMMKAIGASKKKNDKLDARKIADLLRCDLLPACYVAPPEVRELRGMLRYRNLVVGQATRMKNKMSGLLMEAGAEYNKQRLHGKKYFTELLDSVEEVPESVKDMLRLSRGALEMFETTQQQLLARLRKEPLLVKRVALLTGIRGVGEVTALTWSLEVGDPRRFTSIDRAVSYCGLTSALVSSAGKDQRAPISKQRNAHLQTVLIEAAKLAPRWNPQLAAVHARELERGNRNRATLAVARKLVAYLLAVDKSGQAFQVRDQPAAAMAEGKVA

SEQ ID NO: 473498 - protein, 351 aa, unidentified
MPCKTAVSVVRTIGIDTGKNTLHMIGLDEKGAIVLREKVSRDRIAARLVNIPPCLIGIEAGMATHYMSRDLLALGHEVKQVPPAYAKPFRQGHKNDFRDAHAVAEAVQRPSTRCVPIKTDDQLDLQALHRVRSRLIGDRTAVINQVRGFLLEHGIAVRQGPRSLRQQLPQILATRTDVLSPRMLRIIEDIVDDWRYLDDRIERVTDEIEGLARTDVNCGQLISVPGIGPIIASATVAAVGNGTAFAKGRDFAAWLGLVPKQMSTGDRTILGRITKRGNRYLRMLFVQGARAILLRPKSWAKYSFGPWLMAAARRLHRNILTIALANKLARIALTVLVQGRSYESRIVPAAA

SEQ ID NO: 473499 - protein, 387 aa, unidentified
MPQPNDLSRSLVALDQNSTIIAVIEMSQSSWLVAGMLPGIERQPRKKLEPSPERLVAVLHAWRDEAVRAGRTITRIALAFEAGRDGFWLARWLEARGVEAHVIHASSLAVSREHRRAKTDRLDTELLKRGFLGWLRGERGHCTMARVPTIAEEDAKRPNRERECLVGERTRIVNRIKSTLARLGIRNFKPTLRKASERLATVHTPEGMPLPPNTLAELQRDMARLGFVMSQIREIEVARQKRLEQQPETGPHAMVRLLARIVGVGVETADMLVHEVLSRPMRDRRAVARYAGLTGSPDESGAQRREQGLARAGNARVRRGMIQLAWRFLRFQKESALARWYQARTADSRIGTRKTMIVALARKLVIALWRFVTAGETLEGVILRPAG

SEQ ID NO: 473500 - protein, 430 aa, unidentified
MPELIPLVALLGIDWADQSHELSLQPVAPPGGDARVERHQLPHTPEAIGAWMSELRARFPAGAVGVAIESSRGPLIHALLDYDWVVLYPVNPRSLARFRETFTPSGAKDDAPDADLLRELLAKHRDRLRPWMPDTEATRGLRRLVESRRHAVDLRTTFTQQLTAALKEYFPQALEWAGADLGSEMACDFLLAWPTLEAVQRVRPQRLRSFYTRHHCRRPDRIEARLAAIREATPLTVDRAVIESGTLVVQMLARQLETLGASIRRFDTEIAARFAAHEDAALFSVLPGAGAALGPRLLAAFGSDRTRFPQASDLQAFSAIAPVRERSGKSWVIHWRWSGPTFVRQTFHEFAQQSIRYSGWARGYYALQRSRGKDHHAAVRALAFKWIRVIWRCWQDRTPYDEARYLRALADRGSPLASQLPSPSDEPLAA

SEQ ID NO: 473501 - protein, 369 aa, unidentified
MKKHKHYVGLDVHKDTIVVAIAEAGRDGEVRSYGTMPNTLHSFDRLIAKIGAESVELHVACEAGPTGFVLYRWMSKRGIDCIVVAPSRIPQGAGPRQKTDRRDAVQLARLHRAGELAAIHVPDEADEAIRDLTRARLDAVADRTRARNRLKGFLLRHGHRYAGSANWGEAHMRYLRDMELPSPIHKSVLEEYLLTIDQAVERVDRLEALIEVKAPQWRFYPAVQALMCLRGFKLTAATVLVAELGDVKRFAHPRQLMGFLGLVPRENTTGQARRLGSITKTGNVQARWILIEAAHHAFHPPSVSAPLSLRQSGQPEPYKALSWKAQSRLHKRGWHLLKRGLLKQKVVTALARELAGFVWALLCLVPSPA

SEQ ID NO: 473502 - protein, 397 aa, unidentified
MIAVGIDVSKSKSTVAILNGDGSIRAKPFDVHHVADELQALVDYIKRTSEPPTILMEPTSHYHYPLLKAFTEAELPVCLINPYQMKKYGDTELRKAKTDKRDSLRIAQYALEKSYSLIPYTPQDQKYEDLRFLSRQYSQRISTLTVAKVQLLSLLDETMPGITTILPLKSRDPDNCVLLRFIKRFKSFDVIRKMGKTRFLDSYQVLVKKTKDRFAGSKGLAIYELVLSSVTTRGENPLSAMTQDQCVDLVSTSQKAADEINLQMRIIAETMPEYKVLRSMAGVGDRLGPIILGEIGDIRRFHSGKALNAYAGNDAPPYQSGQFESRNRHISKRGNPALRKACFEVMQALKLTKPQDDPVYLFLLKKEQEGKPYNVAKMAAVNKFLRIYYAHAMELYK

SEQ ID NO: 473503 - protein, 407 aa, unidentified
MWFVGWDWANETHDVSVLDEEGTMVERWALRHDEDGIADTLTRLGAYGATADLPVAIETTGGLVVDRLLEAGHPVVPIHPNAFNAARPRWGASRAKSDPGDSFKLADYLRTDGHRLRRLEPLDPATAELQALSRLRSDHVEAKVAATNQLRATLERHWPGAAGIFKRLDSEIALAFLDDYPTPEAAVRLGEGRLAMFCRRHSYSGRRSPAELLERLRSAPAPSSALGPETLTEMVRAQVRLLRTLLTSIADLDRALGAALLEHAKAPLFAPMPRIGEVNLAQVIAEVGPVLARAANVDEACALVGATPVTKDSGKGHAVNFRWAVNAQARQALSIYADNSRHGSPWAARLYADARARGKRHPHAIRILMRAWTRVMWVCWHADTIYDPTIHGAERRHAQQEIQEIAA

SEQ ID NO: 473504 - protein, 493 aa, unidentified
MAVVMIGIDPHKASHTAVAINAAEQSLGQLRVRASAVQAERLLGWAQAWPERAWAVEGAGGIGHLLAQQLLSAGERVLDVPPKLAARVRLLATGDINKNDPNDARSVAVAALRSAGVRQARRDDHAAVLKVWSKRHQDLAQARTQVACRLHQVLCELIPGGVPGEITAGQAGQILAAITPAGAVEAARRELAAELTEDLRGAGTRIRETRKKTAAAVRAAGTSLTGLFGVGPVIAAAVIGDVRHVSRFPNRDHFAAYNGTAPIEVSSGGRKIYRLSRRGNRRLNHAIHMAAVTQIRYRHSPGRAYYDKKLAEGKTGKEALRCLKRQISDAIFACLQADARRAAAAPEKSPGGQPGNHSASRAAGSNPEHRRFGQATPGPATHPTTPTAAFPAPLPTRASGRPLSVSATATEGNTALRFAVRDTGIGIAPEHVGSVFREFTQADSLTARHFGGTGLGLAISRKLARMMGGDVTVTSEPGKGSVFTVRLPAGATH

SEQ ID NO: 473505 - protein, 356 aa, unidentified
MKTTTPVKSYDGEAVYVGLDVHKRTYVVVVRVCKTVVKKWTTVSDPKALANQLLKFFKGGKIYTVYEAGFSGFRLHRELRCAGIDSIVVHPAAVEVAANNRVKTDKRDAAKLAEQLEAGRLKGIRVPSEDQEQARLLSRTREQLVQTRSQVKQQIRAKAHQFGLIAPEDRREMSPRFFQELLECSPSEMFTLAIEALWQIWQSLDQQINHLVVQLKQQAAVDANEATYRSAPGVGPISARVLSNELGDMAQFKNERAVFSYTGLTPSEHSSGDNVRRGHITKQGNRHLRGILLEIAWRAVRKDSALQVFFDRLHPRVGRKKAIIAVARKLIGKIRAAFRKGELYQLDYPTEANATV

SEQ ID NO: 473506 - protein, 421 aa, unidentified
MKRADTRKVRGVRDDTLIVAIDVGMEMNRGYCTTPDGRSTKPFKFDNTREGLDTFWGMIMASKNRFKCNEVIVGYESTGPYGEPMVHYLMKKPVRVVQVNPMHTKRVKEINDNSPLKTDDKDPRVIADIIKLGRALSIVIPEGDAAYLRRLNNARERHVRERTALVNQLQQLVFLLFPEFKKVIKDIKCRTPLYLLKRYPTPEAIRVLDTHVLGEEMRKQSRGKFREYHADMLINLARNTIGIREGVSGLSMDIRHILVQLELVNRLMAEIEDEMEIALGRIPYSSKLLSIKGLGVVSVAGIIGEIGDFKKFGTQPEIMKLAGLDLYEISSGNMKGQRRISKRGRSLLRKILYYAAIQTIRKNGILHDYYTRLTERGMKRMMALVAVSRKLLGIIYAIVRDDSEYSVNFESMKRQVIKKAA

SEQ ID NO: 473507 - protein, 325 aa, unidentified
MTKHITICAGIDTGKRKLDLALDGSKEQLQVDNTPEGHKVLLSWLRQHRVKRVGIEASGGYEQPVVAELRRKRFVVVVFQPAQVRAYAKFHSLRAKNDKIDAALIAACTAAVRKIHATPDPRLLPFAEQLTMIDQLGEDTARLKNRIESCRNARIKELWEEDIVRLEKREKVELKALIASIRKHPDLARRLDLINSIDGIGLPTAVAILVRLPEVGQITREQAVALAGLAPYDDDSGEHIGVRHIEGGRKRLRRALYTASLAASFRWNRQLIDLYQRLTAAGKGHKRALVACARKMLIFANTVVARGTPWGDTRPALKAATTPAS

SEQ ID NO: 473508 - protein, 321 aa, unidentified
MTVSKDRQAPVVGVDVSKDVLDVGVLPGGEEWHSGQSPEAVEATAERIAGLKPALVVLEATGGLEEPLVDALVERGVPVHRCEPRRARYFARSLGLLAKSDRIDKFALARFGATGELKPQRFADASTRRLDALTTRRRQVIEAITAERNRLGATRDPVACASIERHLAFLNGELGEIDAQIRSCATADEEIQAKLERLCSVPGVGRVTATVLLSALPELGRLNRWEIAALSGTAPFNDDSGKHQGQRRTWGGRKEVRCALYMAALVVTRHNPVLHDLYVRLLAQGKKKKVALTACMRKLVVILNAMQRDGTSWRPTAPAAA

SEQ ID NO: 473509 - protein, 467 aa, unidentified
MLSGAMQTLAGRDADMWAEAPDATSQRRVASCPVRERPRISWMRGDAPPRISFGRLRSRALGQAPPHRRREPGMIYAGVDIAKTDHVIGAVDERGAEMCRPMPFKNTEAGLERAVAWLEGLAGSPSDVVVGMEATGHYWMACYSFLVARGYSVAVINPMQVKAVRKLKKLDKVKNDRIDAWLIAETLRIGQYDETRLATDEVASLRSLSRYLQSLRGMAAELKTQCVCLMDAHFPEYAGIFSDMFGAGSRAVLSKSPLPFELARRRADSLARDIAEASRRGGKSAGYAARIKAAARSSIGVRLGQEAASFQVKSLIRQIEFADSECAKVEARVRALLDEVEPLVLTIPGVSYATGAQIVSEIGDVSRFRNASALVSYAGLNSSVSQSGQFDSGGGPITKHGSPYLRRALWLAANRARQYDPGLRAFYDKKRAEGKPHRVAVTAVARKLCHIVFAVMRDQVPYDPGRE

SEQ ID NO: 473510 - protein, 411 aa, unidentified
MHEKQKYFYVGVDLHKQHHVAVIINCWQEKLGEIKFENRPAAFSTFLLNIDKLMEEGLTPVFGLEDVGGYGRSLAQFLTDHGQVVKEVNPALSYAERKSHMTTQKSDSWDAECVARILVNKLDQLPDAKPHDLFWSIQQLVTRRNALVKAQGALKNQLHIQLSHHYPSYKKFFSEVDGKTALAFWERYPSPSCLEGVSVKQLTTFLLEVSNNTCSVKKANEILKLVKEDGNTTKEHQETRNFLVESIVRHILFGKQEIGKVERELKELMSLLDFQLDSMPGIDLVTASALIAEIGDVRRFPDANKLARFAGIAPVYFGSGGKGKEQKSKQGNRALHALFYNLAVQQVQVAKGSKVPRNPVFHAYYQRKLKEGKTKGQALVCIMRRLVNIIFGMMKHKTAYELPKMKEKEVV

SEQ ID NO: 473511 - protein, 413 aa, unidentified
MIEAVLERCAGLDVHQEMVVACILTGALSEAPKKELQSFGTTTKELIELGNWLVSSGCSHVAMESTGVYWKPVWNVLEAFDFEMLLANAHHIKNLPGRKTDMKDAEWIAKLLRSGLIEGSFVPSAEVRDLRDLTRYRKKLVYQATAEKNRIHRILQDANIKLTSFMSDVFGVSGRLLLERLVNGEVITLEFLQQEMKGPLKHKADQLLQSVQGRIRCHHIQMMRYSWEHLLFLEQAIVQVDEQIYERLKDRRETVELLSTIPGINEQSASIIIAEIGTDMAQFRDEHALAAWAGVCPGNFESAGKKKRTRVRSGNSILKAILCECAWAAARTRNTRLSARYWSLVKRMGKKKALVAVAHTILKIVYHVLAKRQSYIELGAEYLEQYRRDKQERLQTKIIRDLEAKGFVITRPA

SEQ ID NO: 473512 - protein, 356 aa, unidentified
MQKQVTKKIDFTGTTLFIGLDVHKKSWSVTIIVDGIEHRTFTQPPDPESLYHYLERMFPGGSYNSAYEAGFCGYGIHRELNSLGIKNIVINAADIPTSQKDKLQKRDPIDSRKIARSLENGSLKGVYILDRDLEELRSLNRTRFYLMRDLRRSKNRIKSFLQYYGESIPAEFDNNQWTLKFVSWLKQVQMKTFSGQDAFSHLIKSYEHHREQLVHLSRNIRIRIREYDNELYSLLKTISGIGPLTSSALITELGDINRFQCIKNLSSYVGLIPRVRESGETVHVGGITFRCNTFLRTLLIEASWQAIRMDPALMQYYQKHVINNKGHKVIIKVARKLLNRISYVMKNRKPYLTGVA

SEQ ID NO: 473513 - protein, 348 aa, unidentified
MSKISQYVGLDVSLKETSICVIDDSGKIVWRGRTDTTPEAIASAVKQHAPHAVRIGLESGQLSTWLFHELKRAGLPVICVDARHAKAALSLKVNKTDANDALGLAQIMRVGWYREVSVKGLDCQAVRTLLVVRAQLVSQITTLKNCVRGVLKTFGLVLPKGLRSQFPGRVRAAIDGHPVLGAIIEPTLRVLEATRAQLIVYDRAIIQRARSDDTARQLMSAPGVGTVVALAYMTGVEDPARFKRSSSVAAYFGMTPRRYQSGEVDRAGHISKCGDGMVRGLLFEAAKVLLSRSARPSALKTWGEALGKRIGPKKATMAVARKLAVILHRMWITGTTFQWNAEAASLAA

SEQ ID NO: 473514 - protein, 346 aa, unidentified
MTEISIIGLDLAKQVFQVHGADEKGRCVLRKQLKRRDVLAFFTGLPRCAVAMEACGTAYYWAREIAKSGHEVRLIPPGYVKPYVKRGKNDAIDAEAICEAASRPTMRFVPVRSLEAQAAAALHRSRDLFIKNRTMLVNALRSHLAEFGFVAAKGIGKLPELIKIVKEAPAEALPDMVRAALSGFLEAIAVLNAELAAIGKQLMAWHRASAKSKRLDTVPGLGLIAATALSCLVPDAGLFKNGRHFAAWVGLVPRQGGTGGKARPGRISKAGNSYLRRLLVLGATSLIRSVQHKATPLALWVQGLLARRPKRAVTVALANKLARIAWAIMAKGEAHKPLALPEGAKA

SEQ ID NO: 473515 - protein, 406 aa, unidentified
MPGQLVAGIDTHKNTHHVAVLDHLGRRTADSQFPATGRGYRQIVDFFHTHGQVDRVGVEGTGSYGAGITRELAAAGFTVVEIIRQNRQARRLRGKSDPIDAHQAALAVLSGADTVPKTADGHVESLRILVTERRSAAKAKTQTMNQIHALLVTAPEAVRDTYRTLGSTKIVKTLARTRPTGSGFDPHLVTRQTLKRLAARYLILQDEIDEIEKQLDPLVRTVNPTLLSLSGVGVVTAAALLVAAGDNPERLATRAMFAALAGVAPQPASSGQRTRHRLSRGGNRQANAALHRIVLLRRRHRQPRTMAYFERRRAEGLTDRDITRCLKRHVANEVYAALLNPATEHPVGRDLRLERRRIGIPISVLAASLNVPYQRLRRLEIGTRADPELEQRATLALAHITARSTA

SEQ ID NO: 473516 - protein, 360 aa, unidentified
MTATMTYVGLDVHARSTQAAAIDVASGELRRARFGGDSAELVAWLDALPQPLRACYEAGPTGFALQRQAAAAGIDLCVVAPSKTPRAAGDRIKTDRKDAELLARLLLAGQLRPIAVPSPSLEAARHLCRAREQLRGDLLRCRHRVSKLLLLHGRVYPGATAWNGLHRKWLSRQRFEEPASELAYLDSLAAVDGLVARRQALDERLSRLALAGEWAPTVARLRCFRGIDTLSALLLGLEIGDFGRFDSPRKLASWLGLVPTLDQSGESRRQGAITKTGSGYARRLLVEAAWHYRREPRIGVSLRNRQQGQPAHVLQIAWRAQDRLYRLQRRLRARGKPANVATVAVARELACFLWAAAVAV

SEQ ID NO: 473517 - protein, 487 aa, unidentified
MRRIGLDLALRAPHRAAIFDDGKAIGRTFAVPRTMDGINELMRRATIGHGEPCEFIMEPTGLAWVPLAAELTRRGHRTYVPKPQKTHALRKFFKEHTKTDGTDAKAAALLRHVDPEGVHELHVPTADELSLQMFVKQRARLVADATKCKQRIHAVLVLAHPLLSEALAESLFTKLGRAVLRKQLDPFRVVERGRSYLRRFWAQYQRGAVDETQFNEVWSACEAARALFEELRREHRLPFDYENVQHIINQELDAIEFVETQIHELERKIQQLYRAVDPEQILLKVPGVGQVIGAALQALIGDVRRFPNVKAFAAYTGLVPRTNLTAGEAKPGQRMTKAGADLIKQYLFLAAERARLDDPELAATYARAVARGKHHYSATVIVAHKLARRIYAVLKHRATQPDQPTAYRLRRPDDAQELTRLQAREYVRSQYPSKAERARREKAAARNIPGTGSPEGATNGSGPTPLAPPLPATTPCANTDEQTVATP

SEQ ID NO: 473518 - protein, 429 aa, unidentified
MNYNTQNAKIASITEKSLIVGIDVGSETHYARAFDWRNYEYSKKPFAFNNDEAGFAAFKAWMEDIAEKHGKEVMIPGMEPTGHYWLNLGAYLQEQGMKPVHVNPHHVKKSKELDDNNPNKNDRKDPKTIAGLVNEGRFSYPYIPTGIYAEIRNLSNLRIQTQEELTRIKNRIARWFSIYFPEIKDVYKNPDAVSGMMVIKKAPLPCDIKELGVDGVNQVWRDAKLKGAGLKRARTLVSAAEHSIGSTEAPESARIEIRNLLNDYEVYKNRMDDLMREIEAKLSEIPYIDKLMEINGIGLKTVSCFIAEVGDIRRFDNPKQLQKLAGYAIVADSSGKHNGESRISHRGRKRLRYALYEAAISVIGKNKEFREIHDYYRTRKQNPLKKMQSVIAIACKLIRIFYTILTKGVDYDGQKMLSDIVRPETVMAA

SEQ ID NO: 473519 - protein, 385 aa, unidentified
MPSPSDAVMGFHRELAVKVAVSHRDGGTRSERVGLKHQRKTAMEWFIGIDVSLEQSSVCVLDAGGKIMREAKIASEPEALVAFCRELELPVTRIGLEAGPLSQWLHAGLTSAGFETVLLETRQVKAALSAMVVKTDREDARGSAHLLRMGWYRPVHCKSVPAQEVRALLAGRKLLLGKLRDVELSMRGLLRGFGLKVGEVSKGRLEARIRELIAGHPMLEQVIQPLLRAREVLNQQYHVLHRAMLNLVRHDAVCRRLMTVPGVGAVVAITFTSAVDDPTRFSRARAVGAHFGLTPKRYQSGETDVVGTISKAGDEAARTALYQAAHTMLTCPGRYSSLKRWGMEVARRRGLKRATVALARKLSVVLLRIWTSESEFRFDRPVAAV

SEQ ID NO: 473520 - protein, 368 aa, unidentified
MKRIAYAGVDYHLNTISVAVMVESENDFLETIHIKNDDKMIRKYLKKVSKEYELRICYEASSSGYVFQRKVTSWGYHCDVIAPSLIPRKPGDRRKNDFRDARNLAQNYRAGMLTIVHPPSTEEESIRAVVRCRFALKEAAKRAKHQINTFILAQGHHWSKSKWGTQHRSWLTKIRGLLDPYLQMVFDEHLGHLNYLESRIERLEQEIEQIAQSDIYAPSIKKLCAFKGIGTLSAMLLISEITDFRRFGSAGALMAFLGLIPSEDGSGDNQRGGPITKAGNPRCRAQIIESVQHYVKRPLIGPKMKQDLAKVDAQSANIAIKCMNRLHKRFWTLTMKGKIRNVAIAAVAREFVGFIWAMMQREPEAVPA

SEQ ID NO: 473521 - protein, 416 aa, unidentified
MNAVGIDVSSRKSTVAVLRPLGEVVCMPIDVTHDIVGLASQAEKLKTIDGETRVVMEHTGRYYEAVAKALHEAGFFVCAVNPLLIKEYGANSLRRVKTDKADAIKIARYALDNWADLRDFTPMDAIRYDLKTLNRQFQLASKQRTASANNLIALLEQSFPGIRKCFDSPVRSDGTQKWVDFAHSFWHVDCVRKQPFAAFCERYRKWCKRHAYLFKLSNAEEVYALAKRAVVLTPKSKVVKVLVQEAANQLISISRSVEVYRAEMDRLAAMLPEYPVVMAMYGVGKSYGPQLMAEIGDVRRFERKQALVAFAGIDPMPNQSGDKNVRSNKSSKRGSPYLRKTLFNVIRTYLQCAPQDEPVFQFLNRKRAEGKPFYVYMLAAANKFLRRYYAKLRDFFASLDTLQPVAPIPTILKATL

SEQ ID NO: 473522 - protein, 343 aa, unidentified
MNMHTLGIDIAKNTYQLHGADTSGKAVMRKRLPRHKLAAVVANLPACTIVMESCGGANYWARVFQRSGHTVKLISPQFVKPFVKTNKNDANDAEAIVEAASRPSMNYVPLKQVEQQDIQSIHRIRTRVVKNRTALINEIRGLCLEYGIVVSPGAARVKSSLCSIIADSTNEFTPSSRESMQDLHEELVEVETRLKKLGTRIRLLCRQNEVCKRILKVPGVGELTATAIVAAVPNPKEFRNGRHMSAWLGLVPKQSSSGDKQTLLGISKRGDRYLRTLLIHGARAVLSHCKDSDNDYGRWVARKKAALSHNKAAVALANKNARIIWSMLNTGEEFSYGVQTVAA

SEQ ID NO: 473523 - protein, 410 aa, unidentified
MVKENFIYVGIDLHKETHTAVMIDCYNQKLGEITFPNRPADFPKLVTKVKKCNIDAKEVVYGLENAYGYGRPLAVWLIDKGYFVKDVNTAISHRQAKHRGAMYRKSDSDDAGAIALATLNMLDKLPDACPNDAYWSLGQLVHRRDNIMKQRTRLVNQLHEQLCIAYPSYKQFFNDISIPTALYFWEHYPSRKYLKGKSVEDLRAELVPVSHNKCSTRTCEKILDAIAGDKVKNNAYQDARDMVTLSIVSDLQHYDKQLAEVDKMLEQMYKMLGCTLTTIPGVNVITAVKILAEIGDIKRFSNANKLAQFAGIAPLHLSSSGKGKDVATKQGNRRLQATIYFLAIQMVQVSSKGTPRNSVVRAYYEKRKAEGKTSQQALICISRRLISIIYGMLKHGTEYRMPVVESAGEK

SEQ ID NO: 473524 - protein, 340 aa, unidentified
MNVTTYGLDIAKRVFQLYWVEHESGEIHNRKLGRQELLEFFARREAGLIALEACGSAHWWRRKLMGFGHEVKLIHAKFVRPFVQGNKTDAADARAIWTAVRQPGMRTVAGKTEEQQTMLGLHRMRLSLIKFRTMQVNQLRGLLYEFGITLRGGRQAGLAEMKQRMAEMEQTVPGMLLEAVQEQLKRLGEIEVDLQNIERRIKDWQKQQDACRKIAEIPGIGMLTATALVATMGEAHSFKSGREFAAFVGLVPRQSGTGGKVRLLGISKRGDTYLRTLLIHGARAVLFKAKDKGAWSEALLQRRPTNVAIVAMANKMARTAWAILAHGREYQKGYVSQVPA

SEQ ID NO: 473525 - protein, 397 aa, unidentified
MYIVGIDIAKRKHEAAVIDGEGTVIIKPFSFTNNCSGYNRLLAMLAKAKLPLDEVSFAMEATGHYWLALFTRLQKEGFRVQVINPVQTNSIRSFYIRQAKTDPRDALLIAEVIRFGHFSESTLHPENIYELRELCRGRHAIVSMQADVKRKVVALLDQVFPEYETAFTNLFGDTSMAILQTCPTPKELSEMPFEELCHLIEVSSRKRFRMAKAQELQALARNSFGFAMAGDVFSTMIRLYAKHLDFLKQQVREMDRKIAEIMDTLDTPITTITGIGPTLGAYILSEIGDISRFSSAAKLAAYAGIDPTMRQSGEYNGVRNRMSKRGSPYLRHAIWLAASSAVLHDPALKLYFQKKRDEGKPYMASVGHACRKMVSIIYAVMRDNKAYTPCIPNEISA

SEQ ID NO: 473526 - protein, 358 aa, unidentified
MAQHVGVQVLAFVGNPNSYLNSFRMLQGRDMTNADVRELTSLAFVGVDMAKESFDWAVHGEASRHTLPNDDKGFEGLLVALKAYRVGLVVLEATGGWEKRLARFLLGYGLPVAVVNPRAAREFARSMGHLAKTDAIDAMALAHLAQTLAAKADQAGVAFAPPLAEVEQLQLLVTRRAQLIDMRTAETNRLSGAGRALQRSITAVVKTLDKEIARIEGDIDAHLKSHFEEQARRFDAIKGIGPITCAVMLAFMPELGRVSNARAAKLAGLAPLNRDSGKERGQRHIFGGRSIVRSTLYMAMCSAVRFNPVMKIFHDRLIAAGKPKKVVLTACAHKMLRILNAMARKGQPWNEDLHPVAS

SEQ ID NO: 473527 - protein, 446 aa, unidentified
MTDLKEHAKSFAAYIGLDWADKKHNWTMQTADGKRSRGELIHTPEAIDAWAAELAQRFGGRPVAITLEQARGALIATLSKYGHLHLFIVDPSRLNYYRKSVSPSGAKSDLVDGDLILDFQLKHPELVRYLAPDTVETRSLQFLTEQRRAVVNQHTRQVQILTHWLKQVFPQILAWFDDVSTPLVGDLLKRWPDLVKLKKARPETLLQFLHDHNCRSAERNQQRLNELRTAVAATHDSALWKTANLMIATTIEMLATLRTSIEQFNDQIQEVYEIHPDRFLMESLPGAGKALEPRLIAAMGTDRDRFRSAGDMACCFGIAPVTESSGNSRWVHWRWQCSKFIRQTFHEWGACTVRKEGRARDHYERQRAKGKSHHAAVRSVAFKWIRILYRCWRDRVPYSEQRYLEALARAAGKGKPAVNPAESSVSLPAVQWKTCGGFSKPTKLSS

SEQ ID NO: 473528 - protein, 521 aa, unidentified
MKAIGKHSSNSYDLLEYLGWWGVATRLLSPRAPLVMGQVMSLLDRWRGGADRGLTIVEVPPHQPVEDWLIKSVPPRDRYREATKHRGSRLPVGVAYTVLPSSKKFFVGGFPMQKVKPIGTAKVYTIGVDVGRRFHLAVVLDERGEEVGSFRVVNRLKEIAEFGEEVMRKFAGRRRFCIEMVDGHAAPLVRELTARGEEVWLCHPYGVKRLRESLQGENKSDRIDARAIAEYALARGEGGRRLRHRDGYVRALRGYSRHLRRLREELVRVGQKIQAAVVGYCPDLLTSGSFPKPDSDTFGAILEHCLPLSKLKGKGLGRKLERWSRGRYGEEAACALLRAVQYLRIEPEEEAAVCLELKHLLARRRQLLKEIAEVEGKIEEMVAGSEAAQALCREMAGIGPLTAAFLMGEVGDITAFARESSFAHFCGVTPKVTQSGSRRQTALCQQSQKRIAGRLYITNLSAIRSEGADRVYFEKKRKETHAKKALIALGRHRVRKIYRILQEHSWRPVAPAPPCYAGRVA

SEQ ID NO: 473529 - protein, 311 aa, unidentified
MNNTIGIDISKDTLDAHRLADGQHKQFLNGKTGHAQLVKWIGKQSDPLIIFEATGACHRQLERVLGTHIIPFVKVNPKQARRFAQACGKLAKTDRVDCEMLAKMGAALQLVPKPFTTENLYDLKELLSARRALIKDRTAAKARKATVINALIKQQLEKRLRQIKNDIAKIDALMLDVAREDQYMSERLDILFSIPGIGVITALMILVDMPEIGALNNKQVASLAGLAPISQSSGKWMGKARIQGGRPNLRNAIFMPALVAIRHNADLKTKYDQLVTAGKEKKVAITAVMRKLLVLANALLRDNRKWAEKAA

SEQ ID NO: 473530 - protein, 352 aa, unidentified
MSKKVTTSSPKLFIGIDIHKKSWKVHFCTDISEGSTSTFAPTASKLRKYVSKYYSKHEVTVAYEAGCCGFEHARQFIGFSWTTLVVNAADIPRPAKQSIVKTDKIDAKNIAKQLRAGLLKSITIPDTERECLRSLTRQRTCLLKDLKRTKTRIKSLLLYYNVHVPEEFDNASWTHAFKQWLKDLQWNYVNIDSTLKSLLKQLDFLDEMVRDTANQMRAYCKKYLKHDYLLLRSVPGIAGLTASYILAEVGDLRRFHSFKKFAGYIGILPGIYSSGENESVRGVTPRANYVVRSLIVEASWVAIRKDPVMQEYYRKHAGKNSKAAIFKVSRKLLSRVHAVIKTDTPYQLGLVS

SEQ ID NO: 473531 - protein, 413 aa, unidentified
MTEENFAWFAGIDWGSERHQACLVDAQGRIVGEREFPHGGKGLADLCDWLLSMCGAAETVAVGIEVPHGPVVDTLIDRGFVVHAINPKQLDRLRDRHSVAGAKDDRRDAYVVGDGVRTDRRLFRRVHVTDPRLVELRAWSRLAEELTEERVRLSNRVHHELWRYYPQMLKIADGDVAATWVLDLWDLAPTPARAHRLRAAPVEKLLKHHHIRRIDADAVLRNLQEPAIKVGKGVAEAASVHLRSLFTRLRVVNRELRQADAKLDALCAAIGETDADSGEGLQRQDVMILRSMPGIGRINLATLLCEGSGPLSRRDYPALRTLCGAAPVTKRSGKSHIVIMRYASHVRLRNVVYHWARVATQHDPKSRERYAALRRRGKSHGRALRGVADRLLGLACVLLQRQTPFDPNFAQAK

SEQ ID NO: 473532 - protein, 316 aa, unidentified
MNTQDHNEINIGIDTSQSMLDIHVRPQGDFQSFENNPEGIRSAIRFIKPFKPTRVLIEATGRLEVAFFCAAHKAGLPVCVCNPIQVRNFAKSTGRLAKTDKLDAQDIAYFGEAIKPALTDLKPAKLRLLSDLLTVRSQCLDMSTMQKNRLQRMPKTVHQPIRNILKKIIQEITSIDQQLDKLIAEIPQWQDKVNQLTSAKCVGKVLAYTLLSELPELGHLNRKQIAALVGIAPMNRDSGRHKGKRYIRGGRHKVRSVLFVTMMSAIQCHPKLKPMYERLVGAGKPKKVAIVACMRKQLTILNTMVKNGTYWDENMI

SEQ ID NO: 473533 - protein, 325 aa, unidentified
MLHLGLDLSRKRLDVCVLDESGGTLAVTQAPPDLDGLRHLAREIAPLGGPVHAAIESMNGARFVHDSLELLGWEVEIADAQKVKGLAPLACKTDKIDAWVLAELSRRDLVPAIWLPDPSVRAERERARFRLHLVRHRVMLKNRIHASLLAFGKPCPVSDLFGTSGRELLARLGLPDPWTRNIATALQTIDDLDAEIDLCERELRALGADHPYVSLLQSAPGIGWVLGFTIASEIGDISRFTSAKKLVGYTGLCPRVYQSGGKDLRGPLAKNGPKYLRWALIEAATHASRHAVYKDHYDKTRARLGRQRGAKVSRVEVARKLAEAI

SEQ ID NO: 473534 - protein, 391 aa, unidentified
MICVGIDVAKDKHDCFILSSEGEVLADVFTIPNNAEGFGILLQTIRRCTRPADKIKVGLEATGHYSYNILGFLLDCGLPTFVINPLHTNLYRKSLSLRKTKTDRIDARTIATMLMSDVNLKSYTDTSYHNEELKSLTRYRFDKVRERAKLKCSVARLVCILFPELEKLVPTIHMASVYALLSEFPGAHQISEAHLTHLKSVLSDASKGRYGREKAVEIRDAARNSIGSRMHAKSLELKHTIRLIRELDAEIEEIESEINSIMGEIQSPITTIPGISTRMGAMILAEVGDFSNFDSADKILAYAGMSPSTYQSGQLTSSHSHMEKRGSRYLRYAIFNATRFVCNWDPAFAAYLAKKRAEGKHYNVAISHAAKKLVRLIYAMEKSQQPYRQAA

SEQ ID NO: 473535 - protein, 417 aa, unidentified
MEAAMEATAVPCRVLAGIDVHKKMLAVVVRRDQNGETSYQKRAFGTTRSEIEHLTAWLQHNFVTEVVMESTAQYWRPVWYGMEAHFTLHLSHPLQTRAPRGRKRDFRDAQRLADRLSAGDLEESFIPGAEQRAWRWLARTRVDLQRKITRVRNQVEGVLEEGGIKLAAVVTDLFGISGWCMLERMAAGETDTEALVELAQGKLLKKKAQLREALKGSLPSHCRLLLRQHMEQVTLLRRQVVELTAELGRALKQHAGIVERLCKLPGVDHCAAQALLAEIGPRAAAFATPEQFASWIGVCPGSQESAGVSYSTRSAKGNRHLRRVLCQIAWAAVHSKGTFFKQLFNRLKPKIEAKGAVWAVAHRIAKVIWLMLAHEVDYIEKGPAPPNQRTLMRKLRRLARDFALLGIDINKAALASV

SEQ ID NO: 473536 - protein, 374 aa, unidentified
MGWSGRAPARQQAKLEGGTEDEEHAMSPKLNAAIAVIGIDIGKNSFHVVGLDRRGAIVLHQKWSRGQLATRLGNLPPCLIGMEACVGAHHLSRKLTSLGHDARLMPAKYVRPYSRGQKNDFRDAEAIAEAVQRPTMKFVATKSAEQLDLQALHRVRERLVSQRTGIINQIRAFLLERGVAVRQGLRFLRAELPRILATPCDGLSPRMVRVLEDLACDWRRLDERIEGLSSEIEVLARRDAGCERLMSVPGIGPIISSAMVAAIGTGDAFTKGRDFAAWLGLVPKQISTGDRTILGKISKRGNRYLRALFVQAAWVVLIKPKSWDRHGLKPWLEAAKKRLHHNVLAIALANKLARIAWSVLAHGRAFEASKIQIA

SEQ ID NO: 473537 - protein, 324 aa, unidentified
MSEAAAAITVGIDVGKTELVLAVVPSGETWTTTTDARALRALARTLAARAPRLIVLEATGGYEVPVLGALAERELPVSLVAPGRVRAFAQATGQLAKTDRLDAHLLARYGAQLRPAPTPLPDAVQRALMLLVARRRQIDDMLVAERQRLDQQSFFPDSPVRASIEATIRFLEQGRAALDRELHAHLAAHPRFAEPLALLQSVPGVGPVTAATLLAFLPELGTLSRQQVAALVGVAPMAAESGRWRGQRRIRGGRAVVRHVLYMAAVTATRWHPVLGPYYHALRARGKPAKVALVACMRRLLVLLNSLLKSRTPWRAPQPQAATA

SEQ ID NO: 473538 - protein, 392 aa, unidentified
MVVSVGIDVSKDKHDCFILNSEGEILSDVFTIPNSLDGFTILLQRIRDCSSSQDNIKVGLEATGHYSYNILGFLLDNGLPTYVLNPLRTNLYRKSLSLRKTKTDRVDARTIAAMLLSDAGLKPYTDTVYHNEELKSLTRYRFDKVKERAKLKSSVSRLVCILFPELEKLTPTLHMPSVYALLDEFPGAKQIAETNLTHLKAILHNASKGRYNRDKAIDIRESARASIGAVMPAKSLELRHTIRLIRELDAEIEDIEAAIQSIMNEMHSPITTIPGIGTRMGAMILAEVGDFSRFDSPDKLLAYAGMSPSTYQSGQLKNCYPHMEKRGSRYLRYALYNATKYVCLWAPTFAAYLAKKRAEGKHYNIALSHAAKKLVRLIFAMEKSRQPYCSAT

SEQ ID NO: 473539 - protein, 392 aa, unidentified
MVCVGIDVAKDKHDCFILSSEGKVLADVFTIANNREGFETLLQRIRSCACPTDNIKVGLEATGHYSYNILGFLLEKGLATFLINPLHTNLYRKSLSLRQTKTDRIDARTIASILMSDVDLKSYTDTAYHNEELKSLTRYRFDKVKERAQLKQSISRLVNILFPELETLVPTLHMASVYAMLSEFPGAKQVASAHLTHFKAILLDASKGRYDRDKAVELREAARHSIGSAMPAKSLELQHTIRLICELDKEIDEIETAIKAIIDEMAPPILTIPGISYRMGAMILAEIGDFSRFDSPDKLLAYAGLSPSTYESGKLKATGAYAHMEKRGSRYLRYALFNAAKYVCHWEPSFAAYLAKKRAEGKHYNVAISHAAKKLVRLIFALQTSGKAFQPA

SEQ ID NO: 473540 - protein, 408 aa, unidentified
MNPLYVGIDVSSKSNVIYLMLPDGAKHSCFSVANSQDGSSQMVKWILSTVTSRSLDTVVIGLEATSVYGDNLVYFLREDASLAPFNRKIHVLNPKQVKNFKEAYNDLPKNDYVDSFVIADCLRFGRINKEVYLGDYRYKALQNLTRARFFAVQNLVKEKQRFINVLFKKYSTMTQEKVFSDTFSTTALAVYEEFESAEALAAMDLQELTDFIMEKGKNRFPNPDAVAKAILKAARSSYRLPKTVNDSINQVLSISITSIKALDAQIKEFNKAIEAQMELLPNVLISIPGIGPVISAGIMAEIGDINRFPGQAQLGKYAGLAWTQNQSGDFEAENTKLIRSGNRFLKYYLCEGALSLVRCDTEYSNFYHSKYKEVNRYQHKRALALTARKFVRLVFALLKDNRLYRSAE

SEQ ID NO: 473541 - protein, 334 aa, unidentified
MEQCTTIGIDLAKSVFQVHGVGRDGTILVRRQVRRGQMLAFFSGLDPCVIGMEACSGAHHWARELSALGHEVRLMPAAYVKPYVKRGKTDRADAEAICEAVTRPSMRFVPVKSAEAQAALLDHKARDFLIRQQTQTVNAIRAHLAEFGIVVPKGIHNVDRLLEAVGRAPEAAGPALDLLADQIHDLRARIETVTRRIKAAQQANPLARRLATIPGLGPIASSAFAVTTPDVAVFRSARDYSAWLGLTPKPHSSGGKERLGRISKAGNRYLRRLLYLGAMAQIAARRRGRPGTDWLWRMLERKPVKVVAVALANRMARIIWALIGTGETYRTAAA

SEQ ID NO: 473542 - protein, 459 aa, unidentified
MTRDNRQGNGLPAQLAAVNLHAAGIDIGAQAHWVAVPPDSDAQPVRGFGACTADLEAMAKWLQQCGVTTVAMESTGVYWIPLFELLEARGFAVVLADAREVQRAPGRPKTDVRDCQWLQRLHTYGLLAAAFRPPEQIWVLRSYLRQRAMLVTYAGQHIQHMQKAFTEMNLKLQHVVSDVTSVTGLAILQAILSGERNPQKLAQLRDRHCQHSEAEIARALQGNWRAEHLFALQQAVELDEFYHRQIALCDRQIETHLQTLPDQSGGKPLAAVPHRAKRRRNEHHFAARLPLFRATGVDLTAIEGINEHTALVLLSEIGTDMSRWPTEKHFAAWLGLCPLHKISGGKVLARKVRPSANRAAAALRLAASCLHHSQSALGAFFRRLKARLGTPKAVVATAHKLARLVYRLLKHGEAYVTHGMAAYEQTYRERVVQSLARKAKALGYKLLPTTDDALQASSA

SEQ ID NO: 473543 - protein, 359 aa, unidentified
MTIVAHAHPFVIGVDTHARTHTLAVLAATGEQIACEQFATHAQGLARAVAWAARRTGGDLGALWVVEGAASYGAGLVRQVTGAGYQVVEAAHMPARAPGAAKSDPADAVRIAAAVLPLPVTAVRRPRAETGTRAAVQVLLTARDHMTTERTATLNALTALVRTHDLGIDARKPLTGTQVAQIGGWSTCDLTTHVQDLAAAAARNEAVRLARRVGDLDTTIKTNTATMDTLVRTSAAAPLLGKTGIGPVTAAIFLTAWSHPGRVRDEAAFAALAGANPIPASSGNTVRHRLNRGGDRQLNRALHMAVLTRMTHDPETRAYVQRRTTQGRTRREIRRCLKRYLARQVYRTLNATASPPRPA

SEQ ID NO: 473544 - protein, 407 aa, unidentified
MTENVRYIGLDVHADSIVIAVADGNRDAAEVLKSIPHDLPRLLVELQRLGRTSSLKVCYEAGPTGFGLQRFLKEKGVECIVVAPGLVPIQQGSRVKTDRRDARKLAHFLRSGDLTPIWVPDEHTEALRDLERARDDARLAERRARQQLLKFLLRHGRRFTEGKHHWTQMHWRWVLQQRFSHEALNRVLEDYIQTVRQATERMQRLTQDIAELVNGWALAPLVRNLQAFHGVQLVTAVGVTAEIANFERFNHAPQFMAFVGLVPSEHSSGGSRKQGGITKTGNRHVRRLLVEAAWHYYTAPAGVSAALQKRREGVPAEVVAIAEKARLRLRRKAHRMKSAGKSPNKVATALARELAGFLWAAARVTTCPATTAKETTRAPTPPDRGRGGRCLRDGLRVSPASATPAAR

SEQ ID NO: 473545 - protein, 421 aa, unidentified
MVAIPPDREGVTVRGFGTYTPDLAALADWLSEAGVTHVAMESTGVYWIPIFELLEERGFEVIVVNARHIKHPPGRKSDVMDCQWIQQLHAHGMLRGSFRPEAEMCILRAYLRHRDNLLEDRAKHIQYMEKALLQMNLQLGQVLSDLTGETGLAILHAIVKGEHNPLILARMRHGNCKHSPEDLIKALTGHYRKEHLFVLKQALEMFESFSQRLRECDQEIERLLEEMKPELPDDFPPLPPDPKPNSHSKNAPSYDARALLYPLVGVDLMAIPGMNEILLQKILSEVGLDMSRFPTDKHFCSWLGLAPHNAISGGRILYSHTLKNHNRAGQCFRLAARAVSRGNTVYSEFYRHIRARSGAKEANVATAHKIARTFYFMLKRGQPFLAPDLQTYLQVQREKDIRRLQARAIKFGFRLQPAEVS

SEQ ID NO: 473546 - protein, 410 aa, unidentified
MELLHGQCCGLDVHKETVVACLRLVSDGKVTTEVRTFQTTTADLLHLSEWLAANGCTHVAMEATGVYWKPVWHILDDGEFELVLANAAHVKNVPGRKTDVNDAMWLAELLAHGLIRASFVPDTQTQEMRNLLRTRKQLVREQSSHVLRVQKTLEDANIKLDSVLTDLMGKSGRAMIEALIAGETNPVKLAALADRRAKASHEEFREALRGRVTKHHRFLLRLHLNQIDALDAAMATLDAQVEANLGPFRTAVELIMSTPGIKNLGAQVIVSEIGIDMSRFPSHAHLISWAGICPRNDESAGKRRSNRLRKDAPWLKTTLVQCAWAAVKKKDSYLQAQFYRIKARRGPKKAIMAVAASILTAIYHMLKDGTMYKDLGRDHFDRRSTDKQKQRLVKRLAELGYVVEIKSLAA

SEQ ID NO: 473547 - protein, 362 aa, unidentified
MKKNSTRTKRSRSDRNPSVQTIGLDLGDRNSRFCRLSADGQVLEESGVATTSTAIRKMFGPMGRCRVALEVGTHSPWVSRLLAELGHEVIVANPRRVQLISASSRKNDRVDAHTLARLARVDPQLLCPIRHRSRQAQEHLMVIRVRATLVEARTGLVNAARGLTKALGERLPKCDAEQMSMAKATSLPVALQESLRPLLEEVASLTERIDALEAQIEQIARDEYPETALLKQVFGVGTLIALTFVLTIEDKQRFAKSRDVGCYVGLRPKQGASGESDPQLRISKEGDVYLRKLLVQGAQCILSRRGPDTDLKRWGLQLCARGGKNAKKRAVVAVARKLAILLHRLWVTGEVYEPLRQQAVAA

SEQ ID NO: 473548 - protein, 332 aa, unidentified
MQYVGIDLHKRDAVIAVEDERGPVGRARRFPCRDEAAIVAHLWTLRPFRAVIESSASYRWLYDRLTPLGEVVLAHPLRLRASIARPAKTDKLDAALLAQLLRIGQIPEAYAPPAAYQELRELTRARARLSRSATEAKNRLHGLLAARNIHAPYRRPFGVRGRRWMRSLDLGVVGNLEREELIGRLEHYDQEQARLDRFIEARANDFPQIAALRDIRGIGTYTALLVVAEIGEPERFSEPGQVSSYAGLAARVYQSGAHDYHGHITRQGSPWLRWALVQAAMKAIGRDRKLANFYERVRKRSSRPIARVAVARKLAEICWIRLRRWHRERAAA

SEQ ID NO: 473549 - protein, 434 aa, unidentified
MSRVIVGVDPHKKSVTIEAVDEDGRVLATGRFGTETRGHQAMVRYVRGQWPHHRWAVEGANGVGRPLAQRLLAEGESVLDVSAKLAARVRVFDTGNARKTDATDAHAVALVALRTPRLPVLGYDEELIALRLLTDRRDELAHRRVQTVNRLHRLLTELIPGGAKRDLSALQAKRLLATAKPRTLVGKTTRRMAAEELADLVAVDAKLKAIKKELKTAVTQRGSHLMDLFGVGAAGAARILCDVADVARFPDRNHFASWTGTAPLDASSGEQIRHRLSRAGNRRMNHVLHIAAIVQIRHDTEGRAYYRRKLAAGKTPMEALRCLKRSISDAVYRQLLADAENGTGASPGGHSGASSQSSAADLSTPVIGSSDQPLPGPAATTLPPRRGPAKTSAASANQPPRRRAGAVKVERPTGRTTLTATSAGAPSQRPKQRP

SEQ ID NO: 473550 - protein, 340 aa, unidentified
MKSTKHSAITPDLFLGIDVGKTELFCHIITGHDASSSRFNNSEKGIASLLTWLQKFATPSVISACLEQTGHYGIDIAKALHKLRIHSLFLVNPRQIKAFGQQKLRRNKSDTADAKLIARFLQSEHSELRPWQPKPIENERITELSRYSESIVQEVAKLKTKCEAAREPAVLRSLKRRIKVGEKEIADLRKLITKIIDSKTALQIDHALLGSIPGLGEISCQIMLAELPDIGHFKSARELAAWAGVTPCHYASGTSGRSTTPITKVGSVNLRRALFMPAMNARVFNPLLKTFGDRLKENGKKPKQIIVAIMRKLLHQIYGILKSREPYNPEKRGFQNPAKA

SEQ ID NO: 473551 - protein, 350 aa, unidentified
MQYIALDAHKRYSFASVESADGSKRSEARVEHEPGSIHRFLERLERGSPVAVETVGNWYWIIGEIEEAGMIPKLVHARHAKMMLASVNKTDRLDARGMNRLQRSGTLPTVWIPSAELRDQRELFRTRMVFTQQRTRLKNRIHATLAKYALRIEESSDAFNKKGREELTLCLAKLPLHTRYATERLLEQLDSVTVQIAALEARMREVFAPNSEINFLMSLPGVGFILAVVIFSEVGDVGRFASASHFASYSGTVPRVHASGGKVRLGQLRSDVNRYLKWTFMEAANVIALNHRRWPGRHVTRLYERVRSRRGHQTAIGAVARHLAESTYWMLKRGEEYREPKRGAISSTRG

SEQ ID NO: 473552 - protein, 409 aa, unidentified
MKQNHAPGRTILAEGRVVVGIDIGKRKQAATAVSPQGEVLARLASFPNTREGIDLLEREVLQKVGGPRKILIAMEATGHYWMCLYHELVRRGYQGVVLNPVQTNARLGARIRKTSTDPIDSLGIARFILTGDAKATRVPDEKTAELRLLVRHRRRLIQARTDMERYAHTLIDRVFPEYAEIFSSPFLSSTRAMVREFGIAPENIASHHDEVRDTLRRTSRQRIAQEKVDLLLEKAQASIGSRQAESLAGEQLRDLFDYTETIERQVAQIEEKLERRMDERDSPLLSLGIGPALAATIHAESDPIHDFHDPDQYVAYAGLDPSVRESGDSIRRRSKISERGSPTLRSALYLAAFSVYRKHDCFHRCYQKHRRKGHGHTDALVVVAHHLARVVWRLLTDNRKFTKRPPKRR

SEQ ID NO: 473553 - protein, 332 aa, unidentified
MEHCAIDLGGRKSQICIRSGDGQILFEGKYDTVALPDFLQQLPLSRVILETAAEAFRIADAAKQAGHQVRVVPATLVRKLGVGARKTKTDRRDARALSEVSCQIDLPSVHIPSTRSREWKTICGMHDTLVGSRTKLINNLRGWMRGQGLRLRRGNAETFAERMSEIESLPSYVGWQVQALAELNERVRVTEKRIESLAAEDELCQRLMTVPGVGPSTAVRFVAAIDDITRFESAHKVEAYLGLAPGESSSSERQQRLSITKAGPSTVRWVLGQAAWAVQIRCRSAAARPLQAWAAAIGVRRGRRVATIALARKLAGILYALWRDSTTYQPRP

SEQ ID NO: 473554 - protein, 361 aa, unidentified
MSESMALVGLDVHQAQTVAAVLDPSTGELRVNRLRGGPASVVPVFLEELDRPVAAVYEAGPTGFALARVAEERGLDIRVVAPGSIPRAPGDRVKTDRRDAKRLVRLFAAGELSFAFVPSEADERFRDLVRCLEDARKDLMRSRHRLSKFLLRRGERFPCKAWTQPHEQWLCKLRFEDAPSQATFVDYLCAVQALVARRRALIGVLEQAVPESSHAQTVARLRCFRGIDTLTAAGLCAEVGDFHRFSKPALLSGFLGVVPSEYSSDEKRTQGQITKAGPPHARRLLVEAAHHYRHRPAVGLHLRARQAEQDPRVVQIAWRCQRRLHERWTHLHSRRGKRTGTVAIACARELAAFCWEAATLD

SEQ ID NO: 473555 - protein, 344 aa, unidentified
MKQYVGLDVSQKSTNVCIVDEEGRRLWTGKCLSTPEAIAIVIRERAPLAERVGLETGPLCVWHYHGLKALGIPVFCIDARHAKAALAMQLNKTDENDAAGLAQIMRTGWFREVHVKSFNAQLQRSMLQSRLQLVNMRRDASNQVRGALKVFGIVLPPGRLSTFDRLAREHLGGREDLSVFIEPLLAAWRALGEQVTLLDKRLRKAAKEHVVVKNLMTAPGVGPLIGMAYVATIDDPKRFAKSRNVGAHLGLAPRRFQSGEMDCQGSISKCGDGLLRHYLYEAAGVLLTRSRRSNSLKVWGMQLAKRIGKSKARVAVARKLAIILHCMWRTGEAFRWGPSTEVTT

SEQ ID NO: 473556 - protein, 321 aa, unidentified
MHSYQLGIDVAKAKLDCALRLPDGKQRNKVVNNNASGFKTLLEWLQKHGGSTAHVCMEATGVYWEEVAAYLAQRGLPVSVVNPAQIKAFGASHLVRTKTDRVDAQLIAIFCFERSPALWQAPSASEQALRAMVLRLDALQNMRTQESNRLDVAREAVKAGIASHIAWLDKEIDKLARQIRQHMDNDPDLKGKQELLDSIPGLGERTIASLLAFYGNLQRFDNARQAVAFAGLDPRQHESGSSVRGKPRLSKVGHSFLRKALYMPAMVALHKTAWGAVFRQRLATAGKPPMLIIGAMMRKLIHVAFGVLKSRQAFDPTLHGA

SEQ ID NO: 473557 - protein, 391 aa, unidentified
MTNVGIDVAKEVHWVCAVDTQGVLLLNHKLLNTPADLQALVDELRRLPAPVRVGIDILGGIASLIQAVILEAGFELLHIPGVAVNRAREGTAGGEAKSDPRDARVIADLIRTRRDLRKVTADSEIDIELRLLVSRRRDLTEEQTRRLARMHDLLASIFPELEHCLDLRRKTDLSLLRCWVTPEEFRAVSNDQIFAELKAGKVQAFARKLMTQVRACAGKQTIALPGERLTASLIRELADEALRNRQREAELDRDIEARLTTHPDAALIRSLPGMGALLTAEFIAVAGPTVRFRSPDALASAAGLAPVLKQSGKSSWLKRPQKGDKRLKRIFYQSAFASMRCPESAAFYARKRKEGKRHHQIIIALARRRVNVLWAILHNRTPYAPKPLPVA

SEQ ID NO: 473558 - protein, 450 aa, unidentified
MSKPKPQVIEDEEHQRVFERVAAIDVAKASGMVCVRLPGRDGRPRASKVWEVPAVTSAVTELGRRLLSDRVQMVTLEATSDYWRIFYYLLEALGLAVQLVSPAQARQLKGRPKTDKHDAMWLARLTEWGMLRPCFVPPAPIRALRDYTRARTDYVRERTRCYQRLEKLLEGALIKLSSVASKLTTESAKDMVRALIAGERDPHVLAGLARTRMKAKHDALVEALTGMFDAHHGELAQLELDQVKFLDQNITQLEARIRDTLAAIPEAQGVDADGTTGPAAGTGPDAPVLPAAARLAEIPGISPDLAATIIAETGLDMTRFPTAAHLVSWAGLCPAANQSGPRVRAGKKKHGNAYLRGALGQAALGAARTGTFLGERYRRVARRRGKAKAQVAVARSILTIIWHLLADPAARYTDLGPDYVASRTDRDKKIRNHVRQLQALGLQVTLTLAA

SEQ ID NO: 473559 - protein, 384 aa, unidentified
MNKHSMIFIGLDTHKEFHEVAYCEEQRGATPVHYGRIPSSKVSVKKLLRQFESKYPGATLHVVYEAGPCGYWIYRLVTSLGHCCYVVAPSLIPKKPGERIKTDRRDALKLVRSLKSEDLTPIYVPEPEDEAVRDLSRAREAAMKDLKEAKYQLKALLLRNNIRYEGTANWSKKHLRWLTELILPHPAQQIVLQEQLQTIEERIRRLERLDNELTHHVHQWRYYPVVKAVQAMRGVRLLVAVGVVAELGDLHRFDHPRKLMAYLGLVPSEQSSGGKRHLGAITKAGNGRARRLLIEGAHSYRYPANVSTELQLRQEGLSKDIVDIAWKAQLRLCKRYQRMSKKGKHYNLIITAIAREMAAYIWAIAKEVVLTPVNPKLRLSRVPA

SEQ ID NO: 473560 - protein, 337 aa, unidentified
MNQITTIGLDLAKNVFHVVGCDTHGKQVVKKMLRRSQLLAYVANLPPCIIGMEACSGAHYWARQFDALGHHSKLIPAQYVKAFLRGNKNDYNDALAITEAVRQPQMRFVQVKSVEQQDIQALHRLRAQRIKERTALGNQLRGLLAENGVVVRQGINILRQKLPELMEAENGLSGLFRQLLDQGYQQLQQLDQHIEEYTQLLMVISKENEAFQRLQTVPGFGPINTSAFISLIGDGSAYRRGRDVSACLGVVPRQHSTGGKTTLLGISKQGDAYVRSLLIHGARAAVIQAAKKNDALSQWINRIRAERGYNKATVAYANKMIRIGWAILRHNTTFQVA

SEQ ID NO: 473561 - protein, 350 aa, unidentified
MTVIKQVIGVDIAKDTFEVRFGSITDHQEERFLGSATFPNENRGFRKLLEWVKNQLVSQDAPVWFVMEATGAYYEHLAYFLTGYHKQVVVLLPNKMKHFAGTLDAKSKTDRLDARSICQFGLERPLSPWQPPSPQMKLLKELTREYNTIQEMATQVKNQLHAKDHSYHPSVETTKRLRVQLRLFQKQLKSIEQQLRSVVNDDDNLRTRIANITSAKGIGFMTVVTAVAETNGFALITSEKQITSYAGLDIVVRESGKRQGKPALSKKGNKHLRRAVFMPALAACRFNPLLKAFYLRLVRTKANKKVALLAVARKILCLIYTLWKKNVPYDPNYRHSNIRPLSNNSILQTT

SEQ ID NO: 473562 - protein, 427 aa, unidentified
MKELTKVCGIDVHKMFLQVCILSRSGEYSQHRFHNTPHGILALKDLVLAEGCEVVAMESTGIYWYRLFLELESDIRTIVANARQIKSIPGRKTDMNDARWIAELALHGLIRPSRIFPRQDREFRDLTRNRETLVRTRTTIKNRIHKILDSAGIRLNVALKDIFGKSGRHLLAGIAEQKDLEATLATIPSPLILRRADQLREILQDSPLSPTQLHLLTTQLHLLEAIEEKIAQLDALILASLEDSQMEALPICTSVPGISITAATTLLAELGDVRDFSSADRLVSWAGLAPSVYQSADTLVCGKITKQGSKSLRWILVQVAQAASRTTDTVFSRFFRRIAFRRGRNKAIVALARKILTILWHLLVNRELYVEPGVQRVRKLPARATLSKISIDDATEILLNAGYRIYSPESQKSAGKGVGAKRATHPL

SEQ ID NO: 473563 - protein, 408 aa, unidentified
MKRYYIGVDWGDRLHQVYVGDDEGKKVREMKVPETVEGLAEIGRWLNEKRAEGLELWAAIEKPAGCIVDFLLDHGVEVYPVNPKAVDRVRDRYRMSGSKSDAFDAYVLAEFLRTDQAHLKALRPSSEKAQELKILSRDQHRVVRHKTRLLNQLTTTLKEYYARPLEVFEDIETEIALDFLTHYPTPAHLGALKRKEFNRFATKQHHLSKPRCEELWEKLSQPQLAVPEHVVRAKAQLVEVLIDQLRASIKAVKTYNHRVESFFASSPAAAVAKTLPGGKSGTLVAAIWAELGDAQGRWQSSGHLQAEAGAVPVTKASGKSHVVHFRFACNKHLRYTMYWFSFVSLNNSEWAKLYYRGQRDKGHSHPQALRALGAKWLKIIFVMWRDHKPYDENYHLANIALQKMRQAA

SEQ ID NO: 473564 - protein, 341 aa, unidentified
MKNLFIGVDFSKEKVDVAIIFADGLTETAARVFNEFKTTVSGYKQLVKWVEQNSYGIDSSLWLFCGENTGDYSKGLCNFLYGKGYDMWLENAKSIKDASGLRRLKSDRADASMIAEYAMRNYDKAVMYEPLSESLAQLRELFLYRQMVVRYRCSFQVRRGEKRLTMEKSPIKTMISQSGRHIVSELNKEVEKIDKRIAELIKSDEELTEVFTIVTSVPGIGTQNAVCLMVYTDNFRRFNYDSRKIACYYGIAPFGKDSGTSVHSDPHVHYMANRQIKAMLTQAALAAVKFNPVMARYYMRLVERGKKKPVALNNVKNKLVHLVTAMVRNRQTFTPEYKISA

SEQ ID NO: 473565 - protein, 415 aa, unidentified
MEVVHDRCAGLDISKRDAKVCIRVAGKGGRGAQQTVTTWGSMTNQVLALREHLIAERVTLAVMEATSDYWKQFYYLLEDAGFELMLVNARHVKNLPGRKTDVSDAAWLAQLGAHGLVRGSFVPPEPIRQLRDLTRTRTAITRERGREIQRLEKLLEDAGIKLSSVASDITGVSGRAMLEALIDGQRDPAVLADLAKRRLRAKIPALTEALTGLFSDHHGFLARVHLDLIDGHTQAIGEVTDRIEEVIGPFRAFRELIVTIPGISSGAADVICAETGADMSRFPTAGHLASWAGTCPGSNESAGRIKSTKTRPGNPYLKGALGVAAMSAAQSKGTYLGVKYRRIAARRGPMKALVAVEHAMLVAIWNMAHTGALYDDPGPDFYTRLHPDRAKHRALDQLRTMGYNVTLSPLEAAAG

SEQ ID NO: 473566 - protein, 477 aa, unidentified
MSTFERLQSGKMNRKERKDLSRRIMAEDATLQVVHPNAAGIDIGNESHFVAIPPDRDANPVREFGSWTTDLQNMARWLIEHNIQTVAMQSTGVYWIAVQEVLEQYGLEVYLVNARGTKNLPGRKSDVQECEWLRKLHAYGLLRNSFRPPEQIRAIQTIWRQRDRWVKDCGRAIQQMQKALTKMNIQLANTISDISGVSGQAILRAIVAGTRDPRDLAKLRDRRIAASEEEIVQSLQGNWKEDILFELRQVLEAYDFYQNQIAACDRELAKYIADVPSREISEKQNIPEGACPLVSGKPSRRSKPQKKNSIGFDLASELERTMGVDLTRIDGINATIAQVIFSEIGSDFSPFPTENHFASWLTLAPQRDISGGKVIRHIPAAGRNRVANALRMAAQSLYHSDSYLGARYRRLRARLEGKKAVKAMARYLACLVYRMVTKGQAYVDRGATYYENKRHEKERDSILRKAAILGLKLVPSE

SEQ ID NO: 473567 - protein, 316 aa, unidentified
MQTPELFIGIDISKTRLDGAVRPTGLTFQHPNDAQGSAAVVALLQSLQPTRIVLEATGGFEAPLAAALASAKLPVAVVNPRQVRDFARATGQLAKNDTIDAAVLAHFAQAIQPQARPLPDAEVRALQALVTRRRQLLEMLGMEQNRLGSCADDAVRADLQAHIAWLSARLEQANTELQQAIERSPAWLAKEDLLRSIKGLGPVSSRTLLAALPELGTLSNREAAALAGLAPFADDSGRRRGPRHIQGGRSAVRSVLYMAALSASRYNPALRAFKERLVRAGKKAKVILTAVARKLVVLANAVLRTGRRWDPAFATT

SEQ ID NO: 473568 - protein, 369 aa, unidentified
MQPITFVGLDVHKATIAVSVAEGGRDGEVRHLGRVENRPEVVRRLVERLRRGGQELRVCYEAGPCGYGLHRQLTDLRCPCVVVAPALIPRRPGDRVKTDRRDATALATLHRAGELTPVWVPDATHEAMRDLVRARAAAARALTKTRQQLQAFLLRHQRVHGGRAWTRAHRRWLADLRFDHPAQQIVLQDYISAVEDAAARVARLMRQIEELVPTWSMAAVVDALQAMRGVSLLAAVTLVAEVGDFTRFATPRQLMAYVGLVPSESSSGGRTRRGGITKAGNHHVRRVLIEGAWTYRFAARLSRGLHARNVEQPKEVRAIAWKAQLRLCGRYRRLAAGGKPKVVVTTAIAREMVGFIWAIAARVQPQPAA

SEQ ID NO: 473569 - protein, 509 aa, unidentified
MESKKYRRCCGIDVHKKNVTVCILPPAGKPEVEVRKRTFRTFTRDLKQLRTWLKNCKVTEIAMESTGQYWRAIWNILEDHFERLILVNPQHIKGLAGHKTDPKDAEWIASLLDTGKLKGSFVPPREIRELRDLTRQRVNVLEDLNRAKNRIEQLCQAGNIKISSVASDLFGLSGRTMLKALVEGRRDPGWMADYARGALRGKRRELELALEGSFTENQRWLLNRELLQVEWLEIQVQVLEQEIIRRVARFEEPMRRVMTIPGIDRKTAWTIVAEIGVDMRVFEDAKHLASWTGLCPGNRESGGKRMSGRTRKANRYVRRALCQAAWAASHTRTTYLSAFYRRMQVRKGPQKAVVALAHHMILIVYNILKRGEEYVEVGGDYYDRQNKAKTVSRMVSRLAKLGFQVTLTPTEPEEPVSAEPSTEPLEQVGSDCEFISDLAPADDIPAQPQTLVSDSEFKPDLSPVEKMPVQRRKRGRPCKCAERGIICKHRVGVQLNSLQTQELERAEFS

SEQ ID NO: 473570 - protein, 345 aa, unidentified
MKLYGGIDLHSNNCVIAIVNGNGEKLLTKRLDNDLTVIQSFLKPYKNDLTGLVVESTFNWYWLVDALMEDGFQMHLANPSAIQQYSGLKHADDKTDARWLAEMLRLDVLPEGYIYPKEMRSVRDLMRKRMDIVQQSTKNLLSIQSCYMRHLGYKPSSNKIKQMAQCFEETNIDDINQTFSSAHTSTAVYSNLALLRCAQQQIKHIESQVLKQVSLSPEFRLLTSIDGIGKVLALTIMLETGTIERFASAGNFASYCRCVNGSRTSNGKKKGSTNIKNGNRYLAWAFIEAANFAMRYNPAIKKYYQRKLARTNRNIALKTVAHKLARACYHVLKSNVAFEDNKAFS

SEQ ID NO: 473571 - protein, 330 aa, unidentified
MKLNHVGIDVSAKTFTTIIDHEEERTEAFDLPNDPKGFKKLIRMITKKGFTAQVVLEATGNYSLDLALALHRAKRIEVMVANPRAVALFAGAYLRRSKTDALDANVIVEFSIRMPFEAWKPPEAHCFNLRAISRRIEALTKSATQEKNRLHAAMTFDEMSEIVRNDIEVNIRHLERRIERLRDQARELIREYPDLERAFLHLTSVKGIAQAAGIQLLAELSILPSDMDVRQWVAHAGIDPMQFQSGTSIDKPSRISRRGNVHLRRALFLPALVAAQHEPHVTAFYQKLLRRGKTKMQANVAVMRKLLHAIYGMLKHDRDFDGEKFYVLGA

SEQ ID NO: 473572 - protein, 371 aa, unidentified
MDPITGARIARVGVDLAKQVIQVHAVDASGRRLVARALKRDQFFAWCTQLPAGCVVAMEACSSAHHWARKLRAHGLDPRLIAAHFVTPYRMEGKGGKNDATDASAICEAASRPSMRFVPVKTCEQQGVMSLHRVREGLKEERTACINQIRGVLTEFGLVFGKSPKVLRAVLADIIEDASNELSTTARLVVQRAFEHWRELDEHLRWCDRQIGQHVRASPAAKRAAKVIGIGELGASALTAGVGDFSQFKSGHQFGAWLGVVPRQASSGGTIRLGRITKRGDDYLRTLLIQGAKAAVMSADKRDDPISRWLVQLTARVGWQKACVAMANKNARILWAVMTREDGFDSKHVSAKPPPRQPVVDPPSIPAACAA

SEQ ID NO: 473573 - protein, 403 aa, unidentified
MTDQDGTVTGGVDTHKETHVAAVVDAIGRILATKAFPATAAGYRQLLGWMRSFGALSRVGVEGTGSYGAGLARYLDDQAVAVIEVNRPNRQMRRRRGKNDTVDAEAAARAALNGEAAATPKAGDGIVESIRALRVTFCSLRATRTRVSNQIRDLIVTAPDQLRTTLEPLNAQQRAERCARFRPGHVADPTEATKAALRTLARRYEALTADLDALRGELDTLTTTANPALCAAKGVGPDVASILLIVAGDNPGRLNSDAALAALCGASPVEASSGRTVRHRLNQGGNRQGNHALWRIAMVRRTCDPATKTYFARRRAEGKTDREIMRCLKRFIAREIYQLLTNPPAVPTIDDLRPRRTAAGITLTHAADQLDIWPTRLSRLERGHTRDDELADRYRRWLTQNAA

SEQ ID NO: 473574 - protein, 344 aa, unidentified
MEITTVGIDLAKNAFQVHAIGEAGEVLARRALRRAQVVPFFRKLAPCLIGMEACGTSHHWARELAALGHTVRLMPPAYVKPYVKRGKTDAADAEAICEAVTRPTMRFVPVKSVEQQAALALHRARDLLVRQRTQLTNMIRGLLAEFGIDIPKGLTHALAFVRRAAAGDVHEVPELAGKTISDLAEQAIEAQTRIRQLERELLAWYRSNDLARRIATVPGVGVLGASALAATVTDPSQFRSGRQFAAWLGLTPLNNSSGGKERVGRISKMGDQYLRRLLVTGMTSLVRRNKHHPDAADPRVNTLLARKPPRLVTVALANRAARAIWAIMVRGEIYRMPGLGSAAT

SEQ ID NO: 473575 - protein, 411 aa, unidentified
MQNRQNYLYVGVDLHKEHHTAVIINCWQEKLGEIQFKNKPSAFSKFLLEVETYVCDGITVVFGLEDVGGYGRALAKYLVDHEQVVKEVNPALSFLERKSEVMIKKNDSWDAECVARILVNKFNQLPDAKPNDLFWSIQQLVSRRNALVKAQSALKNQLHIQLNHHYPSYKKFFSELDGKTALAFWQQYPSPSCLEGANIKQLTAFLLDVSNNTCSVKKASDILNLVKEDGHTMKEYQETRDFLVRSIVRDIEFKKTEMKYIERELKQLVKLLDYQLDTMPGIELVTASALIAEIGDVRRFLNANKLARFAGIAPVYFGSGGKGKVHKSKQGNRALHALFYNLAVQQVQVAKGSKTPRNPVFHAYYQKKLKEGKTKGQALVCIMRRLVNIVYGMMKYKTAYELPVVEEKEVV

SEQ ID NO: 473576 - protein, 352 aa, unidentified
MTEDSQLIVGGVDTHKDEHVAVALDAAGRRVGVATFPATTDGYVALRTWLVAFGGVLAVGVEGCGSYGLGLCRELTAAGIAVQEVCRPNRQLRRRRGKSDAVDAEAAARTVLAGHDVITPKSADGPVETMRALRLARRSAIKARDTATNQLHALIVTAPSELRERLNGLPIAHVVQRLVDDTLHVDDADDGYGLAMLSLARRWRQLDAEADDLRAALQRVVADAAPDGLLEQQGVGPDVAAALMIAAGDNPDRVRSEASFAALCGVSPLDASSGKQQRHRLNRGGNRDANMALWRIVLVRLRWDPVTRAYLDRRVSEGKTRREAMRCLKRYIARDVYRILTISSPPPSQFAA

SEQ ID NO: 473577 - protein, 447 aa, unidentified
MATRTVGIDLAIRGSHVATILDDHGQILGAPIRLCESDLSRLIARIRKDIDPADRVVAVMEPTGMAWFPVAHWLQRAGCDVIRVKGQRVKALRRYLSEHAKTDALDAQLLCALPGFGGKGLTSLFLPRAQQHALTRLTKQRARYREDISSILHRLKDLIRWASPGLEAALPPFNTGVSLAVLERFFDPRTMRRLGHRRLTAFLDKHVGGKHPAHGIFTQQLAERLQDAARETIRLYPAREVDFALLQLEVRQEVERLRFFRKQIERLDEEIERLYTALHPQDHLRTIPGLGKVLGPSLLAVIHTWSRFGQQRRLRGYTGLFPRRSESGGQDSPSQRITKGGSNRLKRDRLLAADVARKFDPGLASVYYSMMVGKGKHHKQALCAVAMRLANRVYAVLKEGRPYVLRDPEGQEVTLAEARAIIEARYKVPAATRYVRRKGSRSGELVA

SEQ ID NO: 473578 - protein, 315 aa, unidentified
MDEQRTVFVGIDVSKDRLDVHLRPSGKAFCVPREGKGMDDLVIRLQGLPVALVVLEATGGFEATVAAALAGVGLPLCVVNPRQIRDFARAMGRLAKTDTLDAEVIALFAERVRPQARPLREPERVHLAELVGRRRQIIEMIGMETNRGRQAIDKPLARRLARHVSYLQKELDAIDHDIGDAIKHSPAWREAEALLKSVPCIGDVTARTLLAELPELGTVSRHQVAALVGVAPINRDSGLMRGRRAIAGGRTSVRAVLYMAALTAIRRRSPFRGFYDQLTAHGRPKKVALVAMMRKLLTILNAILRDHTPWRPLNA

SEQ ID NO: 473579 - protein, 363 aa, unidentified
MNEITTVGVDLAKEVIAVCAADGSGKTVFTRVFHRDAFAAWAVQLPPCGFGMEACGAAHHWARWLTSHGHTPRLMAAEFVKPFRKSRAAKNDRNDAEAVLTAVRQPNMRFVAVKSVEQQACLSWHRMRQGFSEERTALINRLRGLLGEFGVWRGRSAEVFTRALPLLEHDEALPLMVRRLLTDTGPHLARLNEAIAACEMEIKSHLKTNVAAQRITAISGVGVLTAAAVIATVTDARDFKNGRQFAAWQGLVPRQDSSGGKARLGHITKRGDTYLRGLLTQGARSALQAALTKEPLRRTRLQSWMVQLHARVGYHKTLVAIANKHARMIWAILAKGEAYDPDAWRRWTRAAPATPPAVCSMAA

SEQ ID NO: 473580 - protein, 346 aa, unidentified
MRYSTTVGVDLAKNVIQISVVNGRGKELSNRSLSRKKFAEFLGKQKPSLVAFESCATAHYWARAAQRHGHEARIIPAKAVAPFRQGHKTDSNDALAVAEAARRPNIKEAPLKTIEQQGLQAIHRSRELLIQECTALSNHLRGILLEFGIAIPQGFASLLRTLSEVLEDGDNELPDLYRPTLHRMYTRLLELREDIEAMTGEVARLVKAHPVCNKLTALEGIGPIGALLLYATMGSGTAFSGSREFAAYLGLAPRQYSSGGKTNIVGLSKKVGNSRLRSVLILGARAYTYRMKEPKSSKDKWLKAITERNGVSRAAIALANKNVRTAWAMVTQGTEYQRREQLEMAA

SEQ ID NO: 473581 - protein, 446 aa, unidentified
MSDRSGLSRGDRNRNARLARLRKLLPFDHAILGIDLADDKQAAVVTDHDSRVLARRRVNARAWELGELLDWALARARTAGFVSVTVVCEPTGHRWRVLDQLAAERGLALVCVQPLLVYRARESEDLTFDKSDPKDAVIIARLAAGLHCYEPERADAVWARLRHLGARRSQLTTDATAQVNQVRDLLECAWPAVLTASASPFRSASWRASAAVVLGRCAGDLARVRRLGPARFEAAVRRELPRWGATRPCLRIVRGVFAALADPAGVTAHRPGALERADLAMGDWHDTRKRLADTEQRMVTVLAELGLTELVATIDGLTPVGAAAILAETGDPARFASPRSLVKHAGLCPRDNASGGFQGKTSISGRGRPALRVAAWRAVWAAMPNNDVMAARFTLLTTREDNRLARQQARTACAAALLRWIHVVVTRRVAWDPAIAAGKTPLPHAA

SEQ ID NO: 473582 - protein, 338 aa, unidentified
MEQVITIGLDLAKNVFQVHGIDAAGKVLVRRQLRRGDVLRFFGGLPRCLVGMEACATAHYWARELTKLGHTVRLMPPAYVKPYVKRGKTDVADAEAIAEAVTRPTMRFVAVKTADQQAALMLHKVRDLLVRQRTMLINALRGHLAEFGIVAARGPGGVTAAIISLHEAQDSLPELARVALHGLIDQLRIVRGEIARVEKRIVAWHRASNASRRLATIPGIGPITASAIAAAVPDATLFQSGRQFAAWLGLTPRAHSSGGKERRVGISKQGDGYIRRLLVTAATAVIRLARQGNASKTWAAKLLERKSARLVSVALANKTARIAWAVLARNQSYVAPAM

SEQ ID NO: 473583 - protein, 352 aa, unidentified
MDKGSKLDFRGQHIYVGMDVHKKSWSVSIQTEQFEHKTFTQPPEVEKLTNYLQRTFPGATYHTVYEAGFSGFWLHDQLREKGIDCMVVNPADVPTKNKERAGKTDRVDCRKLARGLRNGEIKGIYVPSRVKVEDRSLVRTRQSMVRKQTRCKNQIKSILFFYGITIPEESHWSRQFINWIESIRMERASGDFALKAHLEELKHLRQIIANLNRAILSLSRTEEYRVDVLLLKSVPGISTLTAMIFLTELADISRFSSLDKLASYAGLVPDIKSSGETEYSTGITFRRNAAMRGLLIESSWVAVRKDPALIMAFNKLSMRMKKTQAIVHIARKLLNRIRFVLKNRQKYVPAVV

SEQ ID NO: 473584 - protein, 388 aa, unidentified
MFCERTSVGLDVHARSVVAAAIDGRSGEVFRARLTPSHAEVIEWVGKLPGPCAVVYEAGPTGFGLARALSAAGLRCQVAASSKLLRPAGDRVKTDARDALNLARLLRLDEVVPVRIPSAAEEAARDLVRTRDAARADLMRARHRLSKLLLRHGIVYYDGKAWTERHDRWLHHQRFDAAPTQSAFEDAYEAVVLATARRARLDEKITALAADSEFSPLTRRLACLRGISTLTGFALAVEIGDWDRFTGASIGAYLGLVPSEYSSGTSRAQGAITKTGNTHVRRLLVEAAWHHRSTYRPGAVLRHRLGSGPGRGPCPRPCRQPALACPLGRIKPAQEGSGDRQRRCRPRTCRLVLVAGGAARLENPGPEPTVEGSNHPGQQREEQRAPRL

SEQ ID NO: 473585 - protein, 312 aa, unidentified
MAKPVSQITLGIDVAKDELVIADWDTGEITTLINNPSEIQAWLGSLHGLVRMALEPTSFYHLALADEAQARGHQVYLVNPRQLAYYREAVGQRHKSDPQDALLLARYLAHEAARLRLYEPQSAAARELWTLLTRRATAVESCKRVRQSFKGTGISIKALTSEYRRVLKRIERRMAALIAVLGWQESYQHCLSIPGIGPSNATALVTAFHRGAFSSQDAFIAYLGMDVRIRESGTFRGKRKLSKKGPSELRRLLYCAAVAGRRHEPFARYHQRQIEKGLPKIAANCILARKLARVAFTLMSRQENYKMEASAY

SEQ ID NO: 473586 - protein, 396 aa, unidentified
MVTVGIDIGGRSHVVARCREGNDRADRDALRVSQSRAGFAVLDAWLERQAEPVTLVTMESSGHYWMPLASHLRRRDVPVAVVNPLAAKSFAKSRLARTKSDPADARNLAEMAMREPLDARDPLTGAELRQAARFAMTLVAGQAKVCQRLLRLVDLGFPELGELFDDPTCRTARGVLRIAPTARAATRRRTSTLANANAGPGRRRLGQTKAERLQAAAADSIAVPELDAEVAFEIGLLLDQYDLLEGQIEAADRRVASLLDGETARRLLTIPGVGPSTAATLMAEVGDITRFADVDQLLAYAGVHPAERSSGRKGSSPETAWRRSKAGNSHLRVAAYRMAVVGVQHNPIIAAHYARKRAAGKSKMNALGHCMRKALSIVWGVWRNGHDFDPAWGTKA

SEQ ID NO: 473587 - protein, 341 aa, unidentified
MPIVTIGIDLAKNVFAVHGVDETGKAILIKPRVPRDQLATLIAQLPACLIGMEACSGAHHWARMFQGHGHTVKLMAPSLVAPYRMSGKRGKNDAADAAAICEAVTRPNMRFVPLKDEHQQATLCLHRTRQGFVEERTATYNRLRGLLSEFGVVLPQSPEKLRRYITEHLDTLPGWAKRSISDLLEHAGHIEDRLLEYDRAIAEIARADARSKRLMQLLGIGPTTASALLASIGAGHDFKNGRQVAAWIGLTPGQYSSGGKARLGSITKAGDTYLRGLLVNGARAVIASLGEKQDRFSRWVRTLVERRGYWRAAIAIAAKNARLAWASLKYGEDFKLEPVAD

SEQ ID NO: 473588 - protein, 349 aa, unidentified
MSAVREKYTNIVGVDTHARTNTYAILVAATGGLVDTATFPTSPPGLKRAIAWIDRRSQPGRTLVSIEGANSYGSGLTRALRTTKMDLCEVRPPRRTSRTGRGKSDDIDALAAARTVLGEQVEALLDPRAEGNREALRILLNARTVMERQGTADRLMLTSMLRTMDLGVDARHALTDGQVLTVSRWRACRDDDLSTRIARAEAKRLATAILQFHAELEANHQQLQEVVGLMAAGLLDLFGVGPVSAAQVLVSYSHHGRVRSEAAFAALAGVNPIPASSGNKTRHRLNRYGDRQLNKAIHTIARSRMTYDPATIAYVERRTAEGKTLRDIRRCIKRFIARQLFRKLPALLT

SEQ ID NO: 473589 - protein, 343 aa, unidentified
MEEAGDEPLFCERAAGIDIGKQMVMVTIRVPSDTRRGGRQQETREFGTTRRQLLELADWLRCWGVERAGMESTSDYWKPAYFLLEREGLELLLYQASQVKALPGRPKTDKLDSVWLARITGQGSLAGSFVPPEEIRRLRTHTRYRRRLTQARTAEKERCEKLLEDAHLKLSSVISDIHGVSGRDMLRAVIAGERNPRVLAEMARGTMRRKISRLEEALDCSFFTPEHAFILPMMLDNIDHLTAQIAVLDKRIAVLCEPYERQVAQLDAIPGFGVTTAQDLIAEIGVDMSAFPTAGHLCSWARVAPRAQQSGGKRKGKSATGRGNPYLGGALGEAAASVGRTQT

SEQ ID NO: 473590 - protein, 411 aa, unidentified
MDLVYPRCAGIDVHKRTAVATIGWVDEQGKRQRKTRTFGTMTAEIEQLAAWLVEHGVTHVAMESTGVYWRPVFNLLEPHVEVVLANAAHVKAVPGRKTDVRDSEWLLDLMQHGLIRGGFIPEAPIRALRELTRYRTSVIEERTRALNRIQKVLEDTNIKLASVVSDILGVSGRAMLEALIGGETDPEVLAGLARGTLRKKHDALVQALRGRIEDHHRFLLRMLLAHVDQLTESITQLNAEIAQRLEPYATAFDLLCTIPGIKRRVAEVVLAELGPDMGRFADARHLCSWAAICPGNHESAGKRRSGRMRHGNRWLRGILVQAAWAAIKVRGSSFGARFRRIAKRRGDKRAAIAVAHSLLTVVYHVLTRAEPYRELGGEYFDRRKPEHQAHYYTRRLTELGYEVTLDPITAA

SEQ ID NO: 473591 - protein, 375 aa, unidentified
MTMMQHRQIRYIGLDVHKATISVAIAEGAGTPTSYGRVPNDPAAIRTLMTRLGDPQAALHVAYEAGPTGYALHRQLAKLGIECMVVAPSLIPKRPGDKVKTDRRDALKLARLLRSGDLTPVWVPDEAHEALRSLVRARADAKADQLRAKHRLSKLLLRQGCWPPIGVRNWSQRYFTWLRQLTFKHLPDQVVFADYLTEVTAAGERIKRLETALQQCAQSSSQVALIRGLQAFRGIGFLGAVTLVAEAGDLRRFRTAPQFMAYVGVVPTESSSGGKQQRGSITKTGNRLLRHVLGEAAHHARHAPRVSSALKRRQADQPRELVELAWRAQVRLHTRYRHLSTRIGALKALTAIARELAGFIWAAGDVLQEEVLTTA

SEQ ID NO: 473592 - protein, 351 aa, unidentified
MIIIGCDFHTRYQQIAMAEETTGELLLERRLDHQSGEAHAFYRSLQGPVRVGIEATGPIHWFERLLAELGHQLWIGDSAKIRASEVRKQKTDERDARLILDLLLAKRFPKIWVPTPAERDLRQLLWHRHKLVGLRTMLGNQLHALALSQGLCRKKKLFSKKGRMELGNLMLGPWAGRRRAKLLELLDQVDPPIAELDRAVLEEAQRREDAVLLMTHPGIGPVTALAFVLAIGPVTRFPRSKKVASYLGLNPSEESSGGRRRLGAISKQGNTMVRWLLIETVHHAVRQDPELRQDYQRLKFRRGHAVAKVAIARKLAVRMYWMLRSGADYAQLVRRQGSPGGTLMNASSSLA

SEQ ID NO: 473593 - protein, 309 aa, unidentified
MKQEVVYCGIDVAKEQLDVALGPKRWQVPNTKQGVGQLVKQLKAERSKVHAICEASGGYEKAIVIALQKSALAVSLVQANRVRQFARAAGVLAKTDQIDAAVLVHFGRAMHPPPSAAQSEQIARLRELDAQRRHLGRLLSAEQNRLAQLSCAELRSLSRSLLSKVKKQIATIDARIAILIAQDQNLCVKAQKLTSIAGVGPRTAALLLAQMPELGSLNRAQAAALAGLAPFNRDSGSMRGKRTIFGGRRTVRTGLYMAAVTAARCNHILAPFYQRLCAAGKPPKVALTAVMRKLLLALNSALAPKLNPA

SEQ ID NO: 473594 - protein, 343 aa, unidentified
MQTIATIGLDIAKSVFQVHGVDAAGQVVVRRQLKRRQVLVFFAKLPPCLIGIEACASSHYWARELQALGHTVRLIPPAYVKPYVKRQKNDAADAEAICEAVTRPNMRFVPIKTIEQQGCLVLHRTRHLLIRQQTATINSIRAYLAEFGIVAPVGRRGVEQLLEVIADSNDARLPEVARVCVAALGVQLRQLKAQILELDRRITAWHRSSEASRRLNEIPGVGPLLATALVASITDPKVFRSARDFSAWIGLVPKQNSSGGKDKLGNISKRGDRYLRSLFTAGALAVIRYAKIHGTKHRPWLVALLARRPTKVAAIALANKLARIAWALMTKGSSYRQPAALRV

SEQ ID NO: 473595 - protein, 433 aa, unidentified
MKVLYERVAGIDVHKDMVKVAIRSPGEKPWTRKTEIFEFRTFYGVLQEMARELRRRGVTHAVMEASGVCTEPVYYALCEQDFTEVAVINPAHAKALKGHKTDARDCARLAELFECGLLRGSYIPPAELKEVRDLTRYRMKTVQARTSEIQRLGKALESAGIKLGSVASDITGKASTAMIEALIDGERRGAVLADLAIGRMRTAGKLADLSMALAGRFTDHHALLCRLHQDRIAVFDDAVDDLDQRITAKAARWQRETDLLKTLPGFGDVVAQAWLGEIGPAPHLHFATCEKLASWVTLCPGNNISARKRKHGRTGDAGTYIKPMLIQAAWAAIRVRGRLQARYNRLVRRFGGDKNPAAKKKAITAIAHTLLKIAYQVLKTGTPYQEPGADFYTRRESPEQKHAWLERQMQKLHPGCAITITITPPEAALPPGG

SEQ ID NO: 473596 - protein, 339 aa, unidentified
MDKLYGGIDLHANNSVVVVLNDQDQVMFQKRIPNELVTLLAHLGPFQSQLQGIVVESTYNWYWLVDGLQEAGYRVHLANPAAMKQYDGLKHTNDHSDARWLAHVLRLGLLPTGYIYPKEERAVRDLLRKRSQLVRQKTANLLSIQNLLTRNTGQGMRGNQIKQLTPARISELVTLPEHALALQVTVAVMQHLAEQITQVERAVHARVKLRPTFQSLLTVPGIGQTLALTIMLETGEIGRFPTVGQFASYCRCVGSTKLSNGKRKGQGNTKNGNKYLAWAFVEAAHFAIRYESQINQFYQRKRAKTKVVIALKAVAHKLARACYYIMRDTVPFEVRRAFA

SEQ ID NO: 473597 - protein, 311 aa, unidentified
MTCWVGIDVAKDSLAVWLRPQGKSFSVSNDEQGHQQLLALFAEEKPERIVLEATGGYECGVMFSLSRAGHRVSRLNPTRVRAFATAMGKLAKTDPIDAAVLAHLAQTLEEAPSTVPSPERERLRELVQRREQLVSQRDDERRRLHQARDSFVRQCLEGAIKALKETIRGYDKEIAKAMNVVDAEQAQQLCQVKGVGPVTAAGLLAYLPELGQLNRRQIAALVGLAPYNSDSGQKSGQRRIRGGRGMIRRILYMTTLSIIRYQEDFARRYQGLRENGRCAKVALVACMRVLIVRLNAMVRDGTCWRTGTVQQ

SEQ ID NO: 473598 - protein, 350 aa, unidentified
MIIIGADYHPGFQQIAFVDTETGELQERRLQHREEAEKFYRDLAGQGMRVRVGMEASGHARWFERMLAERNFELWIGDAAEISTKRVRKQKTDRQDAQLILKLMLEDRFPQIWVPSWENRDLRQLLWHRHRLVQARTRIMNQLQSVALNEGLRCKKRLWREAGREQLEAFRLAPWSSQRRGDLLELLDRLDPTITKLTRSIEQEVEKCPAARRLQTHPGVGPLTALAFVLIIGKAERFQCGKQIASYLGLVPLEDSSGSRRRLGHITKQGNTLLRFLLVEAAQVTVRSLPAWRSKYFHLAMRRGRKIAKVAMARKLAVQMYWMMRKDWNYEQLKKFGSHAGQPETGDGVK

SEQ ID NO: 473599 - protein, 340 aa, unidentified
MRMFAGLDVGFKRTAVCVVDEAGRIVWRGVVDTHPEALCGALQRWGGKLAKIGLESGSMTPWLARELAKAGFPVVCMDARAAADAVRSRRVKSDKADAYALAEMLRTGWYRAVYVKSEDSHRLKAMLGARDQLVRAKRALSNQVRGVLRPFGIRLPSRQGTKKFAEAAHQAVRRDNMLHASVTALLETLAAIEGQIARLDEQLKELARRSPVCWRLMSVPGVGPIVALAFMAAIEDINRFRRMRSVGAYLGLTTRRYQSGETDVVLGISRQGDAMARHYLYEAANVLLTTVRRPSALKSWGLKLMKRRGPKRARVAVARRLAILLGRIWKDKTHFDAVPA

SEQ ID NO: 473600 - protein, 340 aa, unidentified
MNATTYGLDIAKRVFQMYWVDAQTGEIANRKFGRDDLIVFLAQRPAGRVALEACGSAHWWARKIRALGHEVVLLHAQFIRPFVQTNKTDAADARAIWTAVQQPGMRTVAAKTEDQQVMLSLHRMRSLLVKFRTMQINQLRGLLYEFGVTFRAGRVAGLDEIRNRMAELEDTLPRSILLNLLEQLRRINLFEEDIDQLEKRIGVWQKHEAACRAISEVPGIGRLTATALVATIGDAKTFRSGREFAAFLGLVPRQNGTGGKIRLGSISRRGDPYLRTLLIHGARSVLCHTKVPTAWQKAIQVRRPANVVTVALANKMARIAWAILAHGTSYEAHHVSNRPA

SEQ ID NO: 473601 - protein, 421 aa, unidentified
MAPLLNQQFKAFVGLDWADTKHDVCLQPAGEDKREFDCIPHQVARIDEWATALHKRFGGPIAIALELSRGPIVSALQKHAFLTLFPINPSMLAKYREALKPSRAKDDPTDAELALDLLLRHPERFSALRPQSAGMRSLLSLIEQRRDLVGDKTRFANRLINALKQYYPQALEWFEDIDTVLFCDFLTRWPTLPAVKRARRKTLEDFFHAHNCRRAQLIEGRLESIRCAVSLTDDPGIVAPHRLLALMLVAQLRTVLAAIDVFDKEIAAVARTLPDFDLFDSLPGAGPHLTPRLLAAFGEQRDRFKGADELQKYSGIAPVTERSGKKCWVHWRWQCPTFLRQTFVEWAAQTINKSFWAGAYYRQQRAKGSSYQAAVRALAFKWIRILYRCWQTGTRYDESIYLNALRKRGSPLLTNLSQVPG

SEQ ID NO: 473602 - protein, 326 aa, unidentified
MEHELHYIGIDTAKEKLDVDVLRPDGRHRTKKFANTTKGHDELVSWLKGHKIDPAHICIEATGTYMEPVAECLYDAGYIVSVINPALGKAFAQSEGLRNKTDTVDARMLAEFCRQKRPAAWEAPHPLERALRALVVRHQALTDMHTQELNRTETAREVQRPSIDAHLLWLEAELKRLEKQIKDLTDDDPDMKHRRKLLESIPGIGEKTSAVLLAYIGLKDRFAHARQFAAFAGLTPRRYESGSSVRGASRMSKAGHVSLRRALYMPAMVATSKTEWGRAFRDRLAANGKKGKVILGAMMRKLAQVAYGVLKSGVPFDASRHNPVAA

SEQ ID NO: 473603 - protein, 426 aa, unidentified
MKYTQNERIMQITEKTLIVGIDVGSETHHARAFNFRGVEYGKLLIFHNDAKGFAMLEDWARKLAEHNGFKDIALGMEPTGHYWFNLGEHIKKKGMRIVLVNPHHVKKSKELDDNNPSKTDRKDPKTIAMLVKDGRYMEPYLPEGVYKELRTAMESRWRIMKELSVIKNRISRWLSMHYPEFIKVFGDWEGKAAMLILKECPTPAKIIEKGIDGIIAIWKRHKIRAVGRKRAVMLLETAGSSVGTKEGIISAENEVQMLLEDYENKMRQYDKTMALIGSLAKEIPGFEKMLEIKGIGLVTAAGFIAEIGDVSRFRHPKQIQKLAGLSLKENSSGKHKGETTICKRGRKRLRYYLTFGMMPLLSKNEEFKALHEYYTSRKENPLKKMQSLVALSNKLIRIFYTILTKNVTYDPQKMMSDIKRPEVKAA

SEQ ID NO: 473604 - protein, 335 aa, unidentified
METLYMLGVDISKKTFQGALTIDGVNFFEQEVENKTKTIEVYLQGLKKKFGFSFSQLTVCLEHTGIYSYPLLDFLIKHEIKVCVEPAVQIKQSQGMTRGKTDQIDARRIARYAFKNQKELILWKPQRTVVQRLKALLTLRDRLVKTRTQIEVPINEASEFIEESNQKMMLKNCQNTLKALEKDILKVEGEIDKLLTEDAQMREQVQLATSVPGIGKLTALNVIIASGEFERISDVKKFACYAGVAPFEHSSGSSVRGKTRVSKMANVTLKKLLHLAALSAIQYCEELKAFYLRKVAEGKNKMNVINAVRNKLISRIFACIKNKRLYKKDYQYALA

SEQ ID NO: 473605 - protein, 397 aa, unidentified
MIAVGIDVSKSKSTVAILNGDGSIRAKPFDVHHVVDELQALVDYIKRTSEPPTILMEPTSHYHYPLLKAFTEAELPVCLINPYQMKKYGDTDLRKAKTDKRDSLRIAQYALEKSYSLIPYTPQDQKYEDLRFLSRQYSQRISTLTVAKVQLLSLLDETMPGITTILPLKSRDPDNCVLLRFIKRFKSFDVIRKMGKTRFLDSYQVLVKKTKDRFAGSKGLAIYELVLNSVTTRGENPLSAMTQDQCVDLVSTSQKAADEINLQMRIIAETMPEYKVLRSMAGVGDRLGPIILGEIGDIRRFHSGKALNAYAGNDAPPYQSGQFESRNRHISKRGNPALRKACFEVMQALKLTKPQDDPVYLFLLKKEQEGKPYNVAKMAAVNKFLRIYYARAMELYK

SEQ ID NO: 473606 - protein, 338 aa, unidentified
MSVKVIGLDIAKHVFQVHGADASGKAVLNKRLRREQLTDFFGSVARCVVAMEATRGAHYWARVIGTFGHEVRLIAPQFVKPYVRGQKNDMQDAAAICEAASRPEMRFVPQKSISQQDMQMLHRIRSRLIGNRTQLGNQIRGLLAEYGIIVPLHLHQLRRKLIELTSEPHPQLTPFAQELFASLYAELCSIDERITAIERRVQQAFQREEACQKIADVEGVGPVIATAIVAAIADGKAFRNGRQLAAWLGLVPRQHSSGDKQRLLGISKRGDPYLRMLLIHGARSVVYRCVTKTDSRSRWIADKQRRLGTTKACVAVANKNARIIWALLAKGESYRRAA

SEQ ID NO: 473607 - protein, 430 aa, unidentified
MKKEKVLASIGLDCHRNFSTACGCDATMNVIWRRRLSHSNREALRKELGSWPRGTPVILEGTFGWGWMSDELRLAGLDPHLSSGRKVAGWRKARGMAKTNKRDATLLAELWGQSPRWWEVWCAPPEVRDLRELLRVRMSLVQIQTRLKNQIHATLHRHGLWHDLSDLFGRQGRRWLSAVVDGEDFPLREAARQTLANHLGLLDEVRRRIAVLTRQFRSTVRQDPTARRLTTLPGVSTILGYTILAEVGTIERFPSGRELSSYSLLAPICNDSGDEQEGDPVGRYVGKVGRRTLKWAWIQAAHSAIRKSPRMKDVFERYTGGGKHDRNRGFIAVGHQLCLIGYVLWKKQINYQETPPPRPGSERRRQKEAEALKKKRIPRPMRTMNIQQEKPGEDPDKNHQVDGLLSFGNGPAPNRYGRECLAKEIRQTNV

SEQ ID NO: 473608 - protein, 343 aa, unidentified
MVYIGMDVSSKDFVVHAIDQRQQKVFEGRIAPSRAGLRKLIKELGRGPKLFVFEAGNQMKWIALMLMKEEGVRVHVVHPNEIKWIGQSNGKTDKIDAKKMAQLARANLLPKPVHIVEGKTRELREFVSARGQLQAKRVALINTVRGYMRQEGVLLPEKFFQRSDWKNSLENHSMGETQKLIVKSFMDGIDALEHSEEEITKKMVEIQDNRCELLETIPAIGKIASRVLVGALDDAGRFDNKRCVANYGGLAPTIYQSGDTTNLGRINRDGRHEVRKVLLQCAHTIQRMTSYDAAPIREFFERLEKRRGKKRAVVATARKLLTIAYGVLKSKTPYDPMKLRAFA

SEQ ID NO: 473609 - protein, 349 aa, unidentified
MGQVSTIGVDIAKSVFQIHGVDADGTVVIRRRVGRARVLEFFADLPPCRVGMEACATAHQWARELEKLGHDTRLMPPTYVKAYVKRGKNDAADAAAICEAVTRPSMRFVPIKNVEQQSVLMLHRTRDLLIRQRTQLINALRAHLAELGLVAAKGREGLHQLVTVVTECGDERLLSNARFACQAIVTQLHAVQIEISGLDKRITQIHRTNADSKRLDTISGFGVILSTAVVATMTDPKVFRTGRDFAAWIGLVPRQNSTGGKERLGSISKQGDRYLRRLLVVGATSVINCARARPYKYPWVIELLGRRPTKVVAVALANKMARIAWAVLAKGEPYRAPTRSSNAVVPAAA

SEQ ID NO: 473610 - protein, 314 aa, unidentified
MSISTQHYVGIDVSKDQLDVFSLFDNTESQYANTETGITALVNQVKTIPHGVVIVEATGGPEMLLVQSLATRGIVVIVVNPRQVRDFAKATVRLAKTDKLDAHIIACFGAAVQPEPRALKDNQTLELSALIRRRQQLMEMLIAEQNRLRTAAIPVQAQLNVHIDWLKKSIKDIDRNRDQFIKDSPLWRAKADLLRSAPGIGPVASASLMADLPELGQLNRREIAALAGVAPFNRDSGTQRGRRCIWGGRAQLRSTLYMATLTATRCNPIIKPFYQKLIQVGKPHKVAITACMRKLLVILNTMMKNQTPWEYSTP

SEQ ID NO: 473611 - protein, 295 aa, unidentified
MAFHGSTEYFRLANSPEGIADLIARLSPLKPELIVLEATGKLEKAVLEALCKAGLPGVALNPRWVRDFARSTGHLAKTDRIDARVIAHYGAAVKPELRALNDAQSQQLQALILRRSQLMEMLTAEQNRRRRAHKATHASIDELIAFLKKRIKDADDDIDSFLRSNELWRKTEALLRSTPGIGRGTAATLIAFLPELGKLSGKEIASLVGLAPFNVDSGKQQGQRHIKGGRHMVRRALYMACVAAQKANPDIKAFCDRLRDKGKKTKVAFVAGMRKLLIRLNAMMRDATPWSPPKS

SEQ ID NO: 473612 - protein, 363 aa, unidentified
MEGEKRRFAGIDLGKREYTMAIIGKTGNMSIHQGKTSLQGRHALYKKLEKEDKVALEAGNLAFIIAREIQEQVGSEVRVLNSAKLPFIWDAPTKTDKEDAMKLAHLIEERRDEKLPIVPLPSEKEIQRRKLIANYSREMKGRIRLINLLHALFVHQGHTTVVKKSLMTVEKRLIAVERLRGQEREEAGWLLKHLELYEQRIKELKEKIRAEAKSDEDMKRLQSIAGVGPVVAYAYIAHIGDGNRFTSGAQVGNYLGFVPRLDYSGTIQRQGHITKRGNGYLRGLLVQSAWVMVRSRYGGSLRDRFTYLTVFQGKSKKKTIVSIGRRMAELMYSVLRNKTTYEVRPWKGPSNDPGGMAGQAMSA

SEQ ID NO: 473613 - protein, 369 aa, unidentified
MSEDRTLTYVGMDVHQDTIAVAVLRPDGRIDEDTLPATPLAVRRFFSRFPERASLRTCYEAGPTGYELQRQLSELSVECVVIAPALTPRRAGRRVKTDRRDARSLAGLHRAGQLTAVRVPGPEQEAVRDLVRTREDLTEDILRARHRLSKFLLRHGRVYREGKKKWTARHDAWVRRQRFEIARLEGLVGHHLAAIEARLRQRELIDAEIELVAQSESYAPLVHRLCCLRGIKTLAALTLLVEVGDFRRFRSAAAFMAFTGLVPSEDSSGERRSQGAITKTGNAHLRRILVEAAFAYRSRPATGNLWRKRVAGAPPELVAYAHAAQQRLHAKYWRLVRREKRGSVASVAVARELAGFVWGVMTERWADPR

SEQ ID NO: 473614 - protein, 350 aa, unidentified
MMIIGVDFHPEFQEIASVDTDTGEYQEKRLTHPGEAEQFYRSLACLGQPVRVGMEASGHGRWFEGLLEGLRIELWRGDATVIRAKRGRKQKTDREDARHILKLLTKDDFPRIWVPSWENRDLRQLLWHRHRMVQARTRVMNQLQAVAINEGLRCKKRLWREGGRQKLESFQLGPWASRRRRELLELLDRLTPTIEELSQAVEQEAEKCPEAKRLMTHPGVGALTALAFVLIIGNTERFRCGKQVASYLGLVPLEESSGNRRRLGHITKQGSSSVRFLLVEASQVTVRKLPEWRSKYVHLMMRRGRKTAKVAMARKLAVHLYWMWRKGWDYEPWKKFVSHVGQPGHRDGVR

SEQ ID NO: 473615 - protein, 401 aa, unidentified
MHGNEQIADSRSLWEHDSRILGLQPTCTFVFVENTKLQVVLIKEMTTEEKRQTMFVGVDVHKDTHTAVGVSPFGEKLFEITVGNYKKDFEVLTSKVREISSSLSPYYGLEDCHGYGERLSAYLYENGHQILAVPSVLVDRARQKATHPEKSDSLDALGVAKVMMQNIDSLPAYTISEESKKAKQIKELSIDREYLVEERTRLKNHLHNLLHRIWNTEYQGKFKDPFSLKALTYWKKSKPSCDPFLLRSMKRKARRLIDIHYEILDLEKEMKTLLDENYTIQTASGCGTVIAGMIVGEIGDVNRFHSPGALAKYAGCSPRECSSGKKHRHMKTRSGNRRLNCAFHRMALSQISRSGNELAKTYFKRKVSEGKSKSQALVCLRRQMVNIIWCMMKHGTVYKFV

SEQ ID NO: 473616 - protein, 462 aa, unidentified
MNKNNVKCGSVKSRDKMRVSSKMTKINPDVAGMDLGSAEHWVCVPSDRAQENVRRFGVYTEDFRKLSDFLRASRISSVAMESTGVYWIPLYEFLDKAGFEVVLVNARHLKSVAGRPKTDIYDCQWIQRLHSYGLLQGSFRPSDEICELRGLTRHRAELVAEAGTKIRHMQKALQQMNIRLDKAVSDITGKTGTMIIERIIAGDRNHVELARLRDSRVHASEKEIAEALDGNYRSEHLFALKQSFESMLFIQKQMNECDGEIKRVLDGLDRKLDSNMIPPLQPRKGSMRSNKNQPQFELRPALYEIYGVDLTKVDGFQTSTVLNILAELGPDLRKFRSDKYFTSFLGLCVNKEISGGRVLKNRTKKVQSRAAMAFRMAAQSLKNSSCYLGKFYRRIKAKAGAPKAITATARKLAVIFYNMVTRQEEYKPLDPLSFEKKHHDRALKSLIRRAQTMGFDLVPAKV

SEQ ID NO: 473617 - protein, 386 aa, unidentified
MELKVTNKAFAIDISQNKLTAAKGELVIEQEKSAVYVKEVKEFNYDNEGIEELIKFLGEYKEGIIEATGIYYFYLHEKLTEKGYKVTVINPLHLTEILGKKTDKLDAQRLLVAHMTGVIKGSYIPTGEIMELRELTRYRESLVEKTTQVKNEIRKILEFAGYKIQPFDKKGRKLLEKLVKGEGLSKEEKEELKEKLGRNLNDAEKLALKQLVELLKNLEKMIKEVEDMIISKIPKPVIELSKIPGIGLISAATIYAEFGDVSRFSSSKAARAYAGFAPKTKQSGDSESHSGMIRGNKYLRRALYLVAKVARGLEPFKGYYERLIARGKSVTQATCALAGKLASICYHVIKDGVYKGVVKKSFRIPRGKEVNVKDFDVGDALDSLSP

SEQ ID NO: 473618 - protein, 361 aa, unidentified
MQIIGCDLHTRQQTLAMLDTTTGEVVEKVLVHEASNVRNFYSTLSGPVRVGIEATGSMQWFLNLMEELGIECQVGHPAKIRAAEPRKQKHDRRDADLILKLLVENRFPSIWLPAKELRDLRALLRHRHQWVRMRTRVQNALQAMALANGLRRGPSLWSQAGQHTMASLPLAPHTAHRRSELQALYAKFEAEIEKLNQRVEEQACERPGALLLMTHPGVGPVTALATDVFLGDPARFADGKALASYVGMIPSEYSSGRRQRLGGLSKQGNPLLRFLWCEAAMHAARREPELQRFYRRKLIQKGLGKARVAVARKLGIRLWIMLRDQIDYNEFCRRGPMRQKNGGACAGMPKTGYGAKPSPTE

SEQ ID NO: 473619 - protein, 338 aa, unidentified
MFTIGIDPHKGTHTAAVLDGTEIVIDELRLVADRYQRDRLLAFATRFEPRTWAIEGAGGLGALLAQQLVAAGETVLDVPPTLSARVRLLDSTRTDKTDSHDARAAAIVAMRHGRLRRVAPVDHSAVLRLLADRHHDLTGLRTQAICRLHALLCQLTPGGASGRLSAQRAGQILRGIGPLGPVATERKRIALDLLGDVRRFDSQLVTLNERIAKAVPASGTTLTDVHGVGALGAAIILGHTADITRFPDAGHFARYNATAPIAASSALKDRHRLNPRGNRQLNRAIHVAAVTQIAHDTDGRIYYRRKLTEGKTRKEALRALKRQISNAVYRQLTADTRH

SEQ ID NO: 473620 - protein, 342 aa, unidentified
MKYIGMDVHAVSTTFCIFDPDAPPRRQYQTLTRPTERAALEAVLEPYAGACAVVYEVGPQAQWLAAIIRPLAKTMVVANPSRMPWLFRDGRKNDQIDARKLVTLLYLQQVPTVHLPSAEVSAWRALINNRRTIVRRRTMVKNQLRGVLRAYALRCPEKSCWTHRGRRWLETLDIDPARNFLMRQLLDEVDYHDTQLKRIEQELARIAAQQPAVALLQSIPGVGPRTAEAIVAFADDVRRFGNRKQFASYFGMVPKLDASGGRERLGHITKRGPSVVRWLLGESAHIVIRRNPQLRAYFEQVRRGDKQRTRKAIIATARKLLSIAFAMMRAGRPYDPARVRAA

SEQ ID NO: 473621 - protein, 421 aa, unidentified
MHKVEEHAYAAFVGIDWADKKHDVCLQVAGSAKRERLVLEHRPGVIQAWAEQLRERFGGAPVAVSVELSRGPVVSALLEHDFFRLFPVQPTTVADYRKAFAPSGAKDDPTDAEVILELLVRHRDKLKPLQPESADMRALRRLVEWRRDLVQDRTRLTNRITDALKAYFPQVLEWFADKEAAIFADFLERWPTLQHAQRARRETLEAFFRAGNVRSASSIEKRIKAIGKERPLHTDEAVMGPARLLVEALLPQLRVVSKGISRFEAEIAEVAPRQPDYQFFDDLPGAGPTFAPRLLVAFGENRDRFPTASSLQKSAGIAPVMERSGNKAWVHWRYGCSKFVRQTFVEWAAQTIPRSFWAKAYYESHRARGARHQAALRALAFKWIRILHRCWLDRVPYDESRYLMALQKRGAPLLKHAAQRS

SEQ ID NO: 473622 - protein, 341 aa, unidentified
MAKKLSVLGIDIAKQVFHLVGMDAHGTIQLRKRLARAQVMPFIAQLPPMLIGMEACSGAHYWARRVREHGHEVKLMAPQFVTPYRKAHNNDMRDAEAIAEAVTRPTMRFVPVKAVDQQDLQALHRVRERLMKARTALINETRGLLHEYGIIVPQGAATFRTHVQEKLATEETKLTAHSRALFQQLLEELAALDARIATYDAQLAQVAQAHPVCQRLMTIPGLGELTATALVAAVSDATQFKNGRQFAAWLGLVPRQHSTGGKPRLLGISKHGDRYLRKLLVHGARSCLRWVGRKCDRRSHWVRSLMERRGWNRAAVALANKNARVAWVLLSTEQVYRTAAA

SEQ ID NO: 473623 - protein, 479 aa, unidentified
MADHTTTGSGKTQRLTRQQRKELGRRIWSEHPGLEVVHREAAGIDIGSREHYVAVGPDRDAEPVRVFGCFTADLHRLARWLRECGIQTVVMQSTGVYWIPVYDVLEQAGLDVWLVNARETRNLPGRKSDVQESQWLLKLHTYGLLRKSFRPTAEIRALRTCWRERAEYVQQAGRSIQRMQKALTEMNVQLSTVLSDLSGVTGMRILRSIVAGERDGTRLAEFRDPNVKASPETIVQSLEGTWLPEQLAIWKRQLGDWDHLQQQIVACDVDLQAMLKQLPDAESEPEPPSALPTGRLQRKKNRRWSKNEPSFDLSAELKRVAGVDLTRIDGIKVLTVQTILTEAGLDMSKWATENHFVSWIGFSPRNDVSGGKVLKKKTRKVVSRLATALRIAATTLRQSDSYLGAQFRRLRTRLGAPKAITAMGAKLARLVYRMLKYGQEYVDKGTAQFEAKYREQQIQLLRKKAAQHGFKLVSVPNPA

SEQ ID NO: 473624 - protein, 367 aa, unidentified
MGWMAPLRHLGAKVLVGQRPPANREPSMGEITTIGFDLAKNVFQIHGIDAEGSTVLRKQLRRAQVLAFFSKLPRCVVGMEACATAHYWARELRELGHEVRLMPAQYVKAYVKRNKNDAADAEAICEAVMRPTMRFVPVKTADQQAAVLLHRGRERLVRQRTMLANALRAHLAEFGVIAPQGLRNISKLIAIIRDENDARLPDLARQVLQVLATQMEQLEGAIAALEQQLMAWHKSNPVSQRLATIPGIGPIIATAIAAAVAEPSGFRSGREFAAWLGLVPRQNSTGGKTRLGRISKRGNQYLRRLLINGASANLLRSKATNADPWVIGLRRRRPSLVVAVALANKTARIAWAVMHRQKDYQRMAAAA

SEQ ID NO: 473625 - protein, 458 aa, unidentified
MAKKAKKIKTAKGLKLDVVNPNAAGIDVSSTEMQVCVPDDRDGDNNRRFGTFTCDLHEISAWLKACKIDTIAMESTGVYWIPLYMRLVADGFDVLLGNAKAIKNIAEKKTDEVDAEWIMLLHSYGLLKASFQPCNDAREIRDPVRHRDSQLRASSKEALHMQKYMVLMNIKLASVISDIPGKSGQDIIAAIIKGERDPKKLALLADPRCKASTEEIEKSLEANWNEHPVFLLKQSWELYCYIQKQMVETEKQAEVLINRYKASLPQESIPQTECKRSKKPESAKNKISVDIEQYAYELWGVNLMLIPGINKGSLYKLSGELGHDFIEKFASYKEFCNWANLAPNNKISGGKILSSKVPRRKNPVGQILRVAANSLNNDKSSLGIYFRKIKSRKGNQAACIAAANKMGRIIYTMIKTKKEYDASLGQEKQAEILKMKIKRAQKELSKLQKQISDCEIAA

SEQ ID NO: 473626 - protein, 386 aa, unidentified
MQTVAALIPAAMDYERTLVLAIEVSNKSWVLAAQVPGLPHTKAKRTINPDAESLMTAIAGYRARAAATGHSVERVITVYEAGWSGFWLARWIMRQGMEAYVIQPSSVPVDRRMRRAKSDGIDAELLLRTLLAWLRGEPRVCSMVPIPDEADEDARRCVRERTELISERVGLTNRIGAVLATLGVSDYNPLLRNRHRRLTELRTGLGEPLPRNAQAKIERLLARLELVLAQIAELERERDAVVEAEASDKASKMIQQLTNLRGIGVQRATVLVREAFVRRFANGKTLGSYAGLASSPYSSGGIDREQGIGKAGNRRVRTVMVELAWLWTRYQPGAAQVRWFCERVGSTGRRARKIMVVALARKLLIALWRFVIDGVMPEGAILKPAA

SEQ ID NO: 473627 - protein, 490 aa, unidentified
MPERRLVGIDLGITSEHTVCVLRADGSQVCRRRCRPTPDSMAELERAALTGAPDGTRLEVVIEPTGPAWRPVAVYFVRRGHLVHRVSSAKAADLRRFLSRHAKSNSIDAMTLAKLAYLDPAGLIPLDLGNREQAALDRRVRACHRLTRLAGEHKTRLRDLVRQLLPDTPLEGALGQADLAILERTGADPHRLARLGKARLARLIAGASHGQLGELRALRWLDAAHSALELFADHPALAFDDLAEEIKTEVRLLRATEAELSTHASARDLAYAQVDPEGLARSLPGLGEVGAPSLVAALGRPARFPSGRHARSFSGLTPRSSETGETDRKGQPISKAGPSRLRTTLVLAADHARRQDPQLARVYYLQMTERGGCHAKAICVVAAKLAERARAVLVRRLPYELRDTDGRPVSAEQAKAIIAEQWTVPEEVRRRRRSRKTRGKAPQQVGTRHVNASARGAATRRPSPPPILAPELVQIKEVLSTIAQRTIVRP

SEQ ID NO: 473628 - protein, 350 aa, unidentified
MTTIAEPRPLVTGGVDTHLDMHVAAVLSAVGGVLGTAEFPTTAVGYRRLLAWMRSFGDVDRVGVEGTGTYGVSLARHLREKKVTVIEVMRPNRQVRRRYGKTDVVDAIAAARAVLSGEATATPKTHDGAVEALRALKVLQRSATKARTQAINQLRSLLVTASDELRAPLRDLPQRDLLATCAGFRVAADDDSLPAITRLALRELAQRALFLQEQLSQVRLRLARITEHTAPDLVALKGVGPDVASALLLAVGDNPQRLSSERSFASLCGTSPVQASSGKTKRHRLNRGGDRQANAALWRITMVRLASDQRSKDYLAKRLAGGKSKTEAIRCLKRYIAREVYAALPKTAPV

SEQ ID NO: 473629 - protein, 323 aa, unidentified
MHPHPTLGIDMAKRTFAVALWFGPERFHQAQFENHPGGFRRLRTWLKTHGSGGLRVAVESTSTYAEALVAWLHAQGHAVFLLNPERTAHYARACGQRNKTDPADAVTLAAFIAHHAATPWQPPPLEQQQLRSLTRTRAQLVACAQALQRQVQTAAAPGRAHLENALAAIDRELAMTEAAIKQHVRDHANLQASVRRLRTLKGVGLVTAAIVMAELPPITPQTDPRAIAAWAGLTPRRRQSGPREWATHLSRKGNAYLRQALYMPALVARRYNPLLRAFAQRLTAKGKTNPAVLGALSHKMLRILVGLLRSNTDFDPLWSPKKT

SEQ ID NO: 473630 - protein, 441 aa, unidentified
MAAKIRASLSFILYLYSKGGEITMNYDVLSTLFVGIDVSSLTNTVCAIDFQNNKLLDFETKNNRIGAEYIAEAIANCLVSNNLDYVVIALEATSFYSTHIANFLSTNKKLLPFKPLVYQLNPKTTANYKKTFVDIDKTDHLDAYVIADFARCGKISSSPWRGSQFLALQRLTRHRFHLVQTLVSEKNWMLSNIYLKFSELAVNNRDKPFSDIYGATSCAALTEFYSLDEIVYKPIDDLTQFVMKKSKNRFKDPVKVATLLKQAAKNSYRLDKMAYEPLNIAISSSFNVIKALENEIKTVDKAIEKTVKGLNPIEYQSLISVKGIGPVISSGIISEIGTIASFQSHDSLAKFAGLTWRKRQSGNYSSDETEMTKTGNPYLRYYFIEAASSVKNYTPEFEKYYRKKYYEVTTHQHKRALALTARKLVRMIFALLSKNRIYSNY

SEQ ID NO: 473631 - protein, 370 aa, unidentified
MKEPTTSYIGLDIHKESIAMAIADADRAAPRFIGTINPVPAELCKAMRRVCTKESTLVVYEAGPCGYGWVRYLRKQGWACAVIAPSRITRKPSEKRIKTDRRDALLLARESRSGNLTSIVVPDERDEAIRDLTRAREDAVAARLRVRLQMQAMMLRHGRHYEGKKSWTQAHDRHLSTIRFEHPAQEITFNEYRQASKEACERVERITQELRVQCEDWRMNPVVKALMCLRGLDFVGAITFVAEMGDLTRFAHPRALMAYLGVVPSEFSSGKSRRLGEITKSGNKHARRILVEAAWNNRHKAQVSRCLEVRQEGQPKIVRDISWKAQLRLSKRWRSLSMGRKLAPNKICVAIARELSGFIWDVARHVKVSP

SEQ ID NO: 473632 - protein, 425 aa, unidentified
MMYLGFDIGKRWHDAALLDEQGDVVRQLRFATTRAGLAQLATWLGDVDPATVQIGLEATGISWLTLHAWLRAWGAPAAAIRVLNPLQTRAFRNANLRGVKSDRVDAVAIARLLRWEGTRLATHTVPDERQAAAREIGRLRTEMIELRARQLTKLGTLLEPLFPEFAAAFSDLGSPSALAVLARWPSPAALAAARPSEVTRALHTASRGHLGATKAGELRQRAAQSVGIADPFGATTIAVQTMVAHLEHLRAQIATLGERLDALQAEDAPARTLLASIPGFGRETVRTWVAELPPMTAYAAQARAQARLTKKPKHGADKLVAAVGLDAQVKQSGRWQGQVRMSKRGSRYVRRAIMLAAQTASRTDPQCRAIYEAQRAKGKHHTVAVSHVAHQLLHIAYSVLLHNKPYALPARFTAPPPAAFAETGA

SEQ ID NO: 473633 - protein, 394 aa, unidentified
MIYAGVDIAKTDHVIGAVDERGAEMCRPMPFKNTEAGLERAVAWLEGLAGSPSDVVVGMEATGHYWMACYSFLVARGYSVAVINPMQVKAVRKLKGLDKVKNDRIDAWLIAETLRIGQYDETRLATDEVASLRSLSRYLQSLRGMAAELKTQCVCLMDAHFPEYAGIFSDMFGAGSRAVLSKSPLPFELARRRADSLARDIAEASRRGGKSAGYAARIKAAARSSIGVRLGQEAASFQVKSLIRQIEFADSECAKVEARVRALLDEVEPLVLTIPGVSYATGAQIVSEIGDVSRFRNASALVSYAGLNSSVSQSGQFDSGGGPITKHGSPYLRRALWLAANRARQYDPGLRAFYDKKRAEGKPHRVAVTAVARKLCHIVFAVMRDQVPYDPGRE

SEQ ID NO: 473634 - protein, 400 aa, unidentified
MLSIGIDVSKGKSTVCGMKPGGEIVYAPFEVQHTREGMSELVSLLRSSGEEVRAVLESTGSYHCPVVAALLENGIFVSVVNSLRMKRFCSQSIRKVKTDRIDAMQIALYGLAYWQELQPARLPEDTYRELQLLARQYYQMTSMLIKAKVDFNALCDQVLPGMQELMSDHAGRHKLSDFVLRYHHTTHILEMGETRFRKDYCKWAEKKGYRNCERMAALIFATAQNGIPVLPNAPSTQIVITEAIRVLHTVEASRDAILTQMQALAKTLPEYSLVREMPCIGDTLAPRLIAEIGDVRRFHSKRALIAYAGIDAPPYQSGKFCANNRHISKRGNRYLRKTGYEVMQSYVMHKPANDPIFTFIEKKRSEGKCGKLAMVAGLNKFLRVYYGKVTELYRSLPAIE

SEQ ID NO: 473635 - protein, 349 aa, unidentified
MHAAKVDAATIDSASGELRFARLSGQTSEVAAFCAGLPGPTRVAYEAGPTGFGLARELAAMGVGCVVAAPGKIPRAPQDRVKTDRRDAERLARLLMAGGLHPVRVPATDEEALRDLVRAREDLRGDLMRMRHRVGKLLLRHDVRYAGNNWTQAHRQWLAAVALPEPVAQIVLEDSLGAIDALLVRRDSLERQMTALIPGSPWAEEVARLRCLRGIDTLSALGLCAEIGDFDRFRRPAQLMGYLGMVPSEHSTGDKRRLGSITKSGSQHARRLLVEAAWHYRKAPRVGRELGRRQDGQPQQVTAISWQAQRRLHRTWQRLDGQRGKRRTIVAVAVGRELAGFCWAVTTAD

SEQ ID NO: 473636 - protein, 379 aa, unidentified
MTCKGRGRVAKLTRAMEYLSNIELSSPEGTRSEFNPGKRVIKLGIDVHQEFYVVAMQEGGGNPKPAQRFKKAAFLCWASKLKHSGGAQIHAVYEACGFGFDLQRSLTSLGIECHVVCPQKLDEGNKRVKTDGLDAKALCLRLDRFVEGNREALAVIHVPTEAEEQLRAIHRQREQLVKARKQLEAQGRSLMVNHGIEPVKSWWKRRSFAALCVPEWMKELLANSQPILLALEEKIRTLTVQLQAAAAPGQPRGLGAMTSVIIDREVGNWSRFRNRRQVGSYTGLCPGEYSSGKTRLQSCVTKHGNPRLRAALVELAWRLVRFQPNYQPVVKWRKILCTGALATGAARKKAIVAVARQLAVDLWRVRTGRLSAEALGLII

SEQ ID NO: 473637 - protein, 438 aa, unidentified
MATDMEDIDADGDEEMVERVAAIDVAKASGKVCVRLPGKQRRVTRVFDVGATTNAIMALADELTELGIERVVVESTSDYWRPFFYLLEARGILVWLVNARDVKQVPGRPKTDKLDAVWLAKLNERGMLRPSFVPPREIRELRDYTRLRAELIEERSRHKQRIEKLLEDALIKLSTVATDLFGKSGRAMLEALIAGEHDPELLADLALGKMRPKRAALREALTGRFDAHHAELARMLLDEIDALGQKIETLTDRVDQLVGQLHGAAAPGAGGGAVGGLSVLERLDEIPGVGPRAAQIIVAEIGLDMTQFPTAAHLVSWAKLSPRTIQSGPRTRSGRAGRGNPYLKGALGEVAAAAARTDTFLGNRYRRLVRRKGHQRALVAVARSTLVIVWHLLADPNARFVDLGPDFYEHRINKDRRTQDLIRQLQALGHQVTLSSAA

SEQ ID NO: 473638 - protein, 384 aa, unidentified
MIHVDDLSRSMAEFDHDSTLVVVVEMSESSWLVAGMIPGVDRQPVKKLAPDPDALQRLLERWRAEATKTGRKIQRITLGYEAGRDGFWLARWLPTRGIEVHVFHSTSVTVSREHRRAKTDRLDAAMLMRVFLGWLRGERGHCSMVAIPTLEQEDAKRPSRERENLVGEQTRIVNRMKAALVRLGIRGFKPELRKAPQRLTTLRTPEGTTIPPNMLDEIRRDMTRLAVVREQIDRIEQTRLERLKKAPAEGSNAMVSLLARVIGVGIETADLLVQEVLSRNLRDRRAIARYAGLTGSPDESGSKRREKGLAKSGNARLRRSLIQLAWRFLRFQKDSALAQWYRARTEIARKTTMIVALARKLLIALWRMVTTGEIPTGIILREAA

SEQ ID NO: 473639 - protein, 357 aa, unidentified
MRTNLRDGTLGVEYHPSEQYSALADTETAECGERRLNHSAGEAEKFYRNLQQRAASVRVGMEATGCSRWFERLLAELGSELWIGDAAEIKTKRVRKQKTDPNHARLLLQLLLEDNFPRIWVPSPENRDLRQLLWHRHRMLQMRTRIRNPLQALAMNQGQRRKKKLWNEPGRAPLEKLPLAVWASRRSTDLLELLDRMNPPIEGLSAAIEREARKWPEVLRLMTHPSVGPLTALAFVLIIGTVERFKCGKQIGSYVGLIPCEDSSAGHQRLGHITKQGSSLLRFLLGEAAQAAARCDADWRRRYLHLALRRQRNIAKVAMARRLGVRLYWMWRKGWEYSEWVKFGSHAGQLGTGDGVQ

SEQ ID NO: 473640 - protein, 421 aa, unidentified
MRGLRAKRVRAVKEGTLIATVDIGATSNTGYCTAIDGRDIKVFKFGNTREGFDKFWNLVVASKNRFHCDEVVVGYESTGPYAEPLVHYLMDKPVRIVQVNPMHTKRLKEVNDNSPGKTDDKDPRVIADIIKLGRALSIVVPEGDAAYLRRLNNARERHIGERTALLNQMQQLVFLLFPEFKTVIKQMKGKTVRFILNKYTTPDKIGALGKEVLGEEMRRRSRGRFGIKDAELLIGLAQGTVGIKEGVAGIVLDIKHIIAQIGVVDGFIAEIEAEMAVTLERIPSSPRLLSIKGLGIVSVAGLIGEVGDFSKFRTQSEIMKLAGLDLYEISSGKRKGQRRISKRGRSLIRKILYYAAIQMVRKNGIMYDYYERLTGRGMLPMRALVAVSRKLLCIIHAIMRDNRDYVGKYGPPKRKVIKKAA

SEQ ID NO: 473641 - protein, 456 aa, unidentified
MQMWCGIDWAENHHDVSVVDEEGRQRVRLRIGDTAGGFSELMSMLAEQQLLCEQPISVAIETSKGLLPAALRSAGVALVAINPLAVSRYRDRLSPSRSKSDAGDAFVLANILRTDPHNHRPLPVDSELAQVIHVLARAHQDAVWDRMQIANKLRSTLREYYPTFLTAFEDLASKEARATLHLAPTPLEGQRVRRASLTAALRRAGRSRGIPAVVEAIHLALHRDQLRQSVQVEAAMGQHATAQLHALDTAVVNVTRLEQQLQTAFEQHPDAEIITSFPGLSTVLGARILAEMGDDRTRFANARGLKAFAGTAPVTRASGMKTVVTRRVVRNKRLGQATYLWALPMLAHSPGAHAHFTARRERGDSYSAAARNLTNRGIGMLHHCLQTGQPYDEAKAFPNITTDHPVTSSRPPASKAFQETEAPVKHRRSSNHAKRSATSISPPADQACRKTEARTA

SEQ ID NO: 473642 - protein, 344 aa, unidentified
MQISILGIDIGKNSCSVVGADNHGAVVVRRTMRRQTLIEFVEKLPTCVIAMEACCGAHHLGRLFTSKGHEVRLMSPEYVRPYVKAQKNDDRDAEGIAEAASRPTMRFVELKSQEQLDIQTLHRVRSRLVAERTTLINQLRAVLLERGLIFAAGRTKFESALDNLLAEADEILSPRIRNLVIELRDEWRMLDEKVEALNAEFVSLARHNSAMRRLTSIPGIGVLNATALVAAIGDAGSFKHARDLGAWLGLVPRQFTTGGKARLLGITKRGNTYLRTLLVHGARAAMHTLSQSDTPIGQWLQTMLSRGIQRNVVIVALANKLARIAWAVLRKGQPYERAYGVAVI

SEQ ID NO: 473643 - protein, 406 aa, unidentified
MDIIYERCCGLDVHKKSVTACIITPEGKELKTFGTMTDDLVALVQWIKEKGCTHVAMESTGVYWKPIYNLLEMEEITTLVVNAQHFKAVAGRKTDLKDAEWLADLLRHGLLQGSYIPDREQRELRELVRYRKSLINERAREVNRLQKVLEGANIKLSSVASDVLGASGRSMIEAIIHGIDDPAFLAGLARGRMKSKKEQLEKALSGLIGPHQRMLLAVILEHIDFLDRQIARLDQEIEERMRPFEEALALLDTIPGVGRRAAEQILAEIGTNMERFPTAAHLASWAGMCPGNNESAGKRKSGRTRKGNNSLRNILVEVARAAGRTKNTYLSSKYHRIAARRGANRAAVAVGHTILVIVYHVLKRRTPYIELGADYFDRLKKDAIVYRAVKKLESLGYKVSLERDVA

SEQ ID NO: 473644 - protein, 346 aa, unidentified
MTQYVGLDVSLKEVSICVVDGDGNVLNRASVPTEPDTIAEYLAQKAPHVERVVHESGILATWLTRELERRGIPITCLDARMAHKALSARLNKSDKADAEGLAQLARTGWFTKVHIRSETSDKVRALTAARERLIRMRKDLEAHVRGVLKTFGIRMGPVLKAQHRQGFRDQLAEAGSTDPMLDLVAQTMIPIHKKLCASAEALGDELMHVAKQSTLARRLMSVPGVGPLVALNFIATIDDASRFRRSTDVGAFLGLTPRRYQSGEIDRSGRISKCGDAEMRRLLVSAATSLMTQVRRFSPLKSWAIRLSARKGFKKAAVATARKIAVILHAIWRDGTEFTWTKEPVI

SEQ ID NO: 473645 - protein, 497 aa, unidentified
MVKSKRKTYKKRQHIQKVKGRRFTDEIRNLDLQKVLVVPIDGGKNSHKALAANYFGDILQDPFEFTNSLSGVKMFDSILKRITSSIAAQKVIVGLESTGHYYENLYRHLIDLGYDVAMINPVSVYAQRSGQLNWCKTDEIDLCAIGQVLIDNQATETRLPETLYYNLKQLARLRRDEVRKRARLKMQIRVLCDHIFPGLQNAEIFSDFWSKSSILLLENYPTPGSLIRLGVKRLARFFKKHNTKLGTSTAERLINLAKNTLTRKVADLEAHLLNLKFKISDLKRANEKIRKLNIELTRYLVQTPGILLLSIKEVNVPSAAEYLGEVGPLEQAGSAKKIIARAGLNPSRFQTSEYEREDHPITKRGSNPLRNICLLISQNLMAVNSHSHAAHNPYFRKFFDRLVEEGKDERLAKVAGANKFVRVSRAMMRERKLFSPPTWKNNTVSDDPLVKLKGFLCRSKAKELFEELAQIAKEQLPSKVSAQHEKAESISQYDYDL

SEQ ID NO: 473646 - protein, 350 aa, unidentified
MVVVGADVHKRTHTFVAVDEVGRKLGEKVVKATTAGHAEAVMWARERFGTDVVWAIEDCRHLSARLERDLLTAGQQVVRVPPKLMAQTRASARTRGKSDPIDALAVARGFLREPDLPVASHDEVSRELKLLVDRREVLVAQRTATINRLLWRVHELDPEHAPKARSLDLPKHRRILGDWLASVPGLVAELARDELADITRLTETINALAKRIGERVRAVAPALLSLPGCGELTAAKLVGEAAGVTRFKSEAAFARHAGVAPVPVWSGNTAGRVRMTRSGNRQLNAALHRIAVTQIRLPGVGQAYYRHRIAAGDSKTEALRCLKRRLARVVFGHLNTDHQNRTQPCQPAAA

SEQ ID NO: 473647 - protein, 325 aa, unidentified
MIIGIDVSKAKLDCLWLKDSARNKVKTRVLPNTPEGVAACLTWAMKQTPEPIEALHFIMEATGVYHEALAYALHEAGARVSVVNPARIHNYGKSLGVHTKTDKKDSYVIARYGASQHPALWQPEPDAIRQLKALIGRLNAIEKDVQRERNRLEKAGISQSSAEVITSIKTVLAQLETEQKRLVRLIDDHIDRHPDLKQDRVLLESIPGVGPVISRMMVALLRSRPFDSAPQSAAYLGLVPAHHESGSSVRGRARLTKAGDATIRAKLYMAAVVSIRHNPDIKQQYERLLGNGKAKMSAICAAMRKLVHICFGVLKHQQPYQPQCL

SEQ ID NO: 473648 - protein, 346 aa, unidentified
MMIIGCDFHPSWQQIAWLDSETGESGEQKLEHAEGEARKFYGQLREPVLVGMEATGNSQWFVELMEDLGHEIWMGDAAQIRASYVRKQKTDKRDAAHILKLMVEGRFPRLWAPDGEQRDLRQLVLHRHKLVMIRSRVKNELQHLSLNKGMQKKRTLWSQAGMQMLRELPLRPWASCRREDLLGLLAMLDQQVGKLDTAVKEAAKANAQAKLLMTQPGVGPNTALAFVLTIGDVSRFQRGKQVASYLGLIPREETSGGRQKLGAISKQGSRLLRSLLVEAAQSTVRLDPQFRKEYLHRCHQKPKAVAKVAAARKLAVRLYWMLRTQTGYPEIVRIESSSRVALVSAS

SEQ ID NO: 473649 - protein, 426 aa, unidentified
MKSTTQNAKIAAITEKTLIIGIDVGSETHFARAFSWRGYEFSRKPLEFSNTEEGFETFRTWIEELKTKHGMDKVIPGMEPTGHYWFNLGKFLQDNGMTPVHVNPHHVKKSKELDDNNPSKNDRKDPKVIAGLVKDGRYFRPYIPDGIYAEIRVLSGLQVLAQSEITRLKNRIARWFSIYFPNYKDVYGNVGAVSGLMVLKVAPLPEDIVKLGVNGVNRIWRDAKLRGVGLKRAKTLVTAAEHSIGSREAQEAARVELKILLSDYEMQTAREAELMALIEEKIMEVPYVDKLLEIRGVGLKTVIGFVAEVGDITRFDDPKQLQKLAGYAIVKNESGKHKGESHISYRGRKRLRYVLYEAAVSVVSHSPEFRSIHQYYTTREKNPLKKMQSMIAVACKLIRVFYLILQTGTTYDAAKLMSDIRRPVAA

SEQ ID NO: 473650 - protein, 339 aa, unidentified
MLYVGIDVAKNKHDVTALNVPGKTVLKPLTFSNNKAGFELLDLSLRQLNQDCLIALEDTGHYAFNLLNFLHEQGYKVYTYTPLLIKEFAKSLSLRKTKTDKKDAHGIALKLLSDPNREQFQHDNRQVELKILARHIHRLKRKQSDWKVQYTRCLDIIFPELDKIVGKHAECTYQLLTRYPNPQKRLEAGFDKLIEIKRLTASKIQDILSVAPRSIGTTSPAREFEIIKHYKRLIDKAETCVNDLMAEFNSVITTVTGIGNRLEAVILAEIRNIHAFDNPAQLQAFAGLDSSIYQSGQIDLAGRMIKRGSPHLRWALIQAAKACPRFSPAFKAYLKTKLE

SEQ ID NO: 473651 - protein, 322 aa, unidentified
MRYIGIDVSKATFVVAYSSDKGGEIRTFNNTTTGIKQFIGALPKDSSIHCVMEATGNYSAMLLYLLNVAGIAVSMENPLKIKNFARAMLSTVKTDKIDARLIALYGEKMNPQPFKIQGEAILRLRQKRTVIRQLTKQITAMSNLRGSLACLPVPDKGATHTVDETIEFLEKRRDRLQSELTDLVEVEFSRQLALLTTIKGIGITLATALIITTGGFTYFQNAKQVSRYLGICPTYEQSGTSVNIRGHINRNGDAYTRGFLYVAAWTASRFNTKCGETYTRLRQNGKPGKLAMIAVANKLVRQAFAVVTHDKEYVDGFVSNRP

SEQ ID NO: 473652 - protein, 339 aa, unidentified
MWYVGLDLHLRHTTICALDDQGCIVKQLKVRGAWRDVVAVLESWNEPLAVCFEASCGYGHLYDVLMRFAHRVVVAHPGQLRLIFRSKRKNDRIDAEKLAKLMFLDEVPAVHVPSEEVRTWRELIEHRKRLMMKRTRTKNSLRSLLRACGIATPRTWRLWTNEGVEWLKAVELPSQTHHSRRLMLLEELALFAQQVQIVNQALDRLATGNKQVQLLQTIPGIGPRTSEAVLAYVDRADRFADTKSIGSYFGLVPSQDQSGSTNRLGHITRQGPATVRHLLVEAVWQGIQRSPTIRAHFDRIYQGQEIRKKIALVATAHYVLRVMLAILKSGQPWREAPAA

SEQ ID NO: 473653 - protein, 337 aa, unidentified
MQKEDCDCVGVDVSKRTLDVALYRGEVDWKNGHIKVENNKTGYKDLKRWFRSNGIKKQKLRICMEYTGLYAHDFRIWLESEGLVYYMVDPNRMHYFEPPLNIKGIRQTKTDKADAFRIAIYCSLFYKSMSPSHLPSSTYFILKRLLAERLLYVKQAAKYKQQRRDVSLYDTVDSRIRKEEELKKLNSYIWRTEKDIRSVIQSDSLIKRNYDLLTSIVGIGMVIAVTTIVLTENFTAFTDPRKYASYIAIAPFPHESGTSVKGAVRVSKQGFKQAKADLSISVLPAISLDPGIRSYWLRKKAEGKHSGIIMNAIKFKLVLRMFAVVKRGKPYVIIDKF

SEQ ID NO: 473654 - protein, 362 aa, unidentified
MSNSTTWVGMDVHKENIVTVSISGDSGTVMTRWETPNTAKGKERLAARIAGLGKARCVYEAGPCGYDLRRFLDGKGIPCDVIAPSLIPTRPGDRIKTDRRDAEKLARMHRMGELTAICVPSPAQEALRDMVRAREDANEDLVRCRHRLQKFLLRQGRRFEGKSWTREHWRWIRALTFDDANTGTVLAEYVLAVDQQLERVARLDARIEEEAQNPGIAPAVARLKTLRGVRTLTAMTIHSELIDLARFASPRDLMSFIGLVPSEYSSGGKQRRGSLTRAGNAHLRRVLVEAAWHYRHPPHRTGETIRKRREGQPPDVIETARKAEVRLYRKFTRMVMRGKRTTVAAVAVARELAGFVWAIGRI

SEQ ID NO: 473655 - protein, 342 aa, unidentified
MQITTIGLDIAKNVFQVHGIDAREKVVVRKQLRRSQVIAFFKALPPCLIGMEACATAHYWARELRKLGHEVRLMPAKDVKAYVKRNKNDAADAEAICEAVRRPTMRFVRIKSAEQQGQLMQHRTRDVLIRQRTQIINALRAHLAELGIVAAQGDAGVTELRAIVADDRDERLPIDARASVIVLAAQLEALQTLIGSIEKRIKMQHRSNETSQRVETIPGIGVLGATAIVATAADPTVFRSGRDFAAWIGLVPRQDSTGGKQKLGPISKQGDRYLRRILVVGAIAVLRRAQENPGKYPWLTQLLARRPFKVVAVALANKMARTAWALMVHGGTYRAPELAEAA

SEQ ID NO: 473656 - protein, 383 aa, unidentified
MKKNTIANLQGSKSQIRRKAAIKGLTIGLDLGDRWSCYCVLDAVGEKASEGKLPTTKGGLDSVFGKMGPCRIALEVGTHSPWVSRHLAEMGYEVIVANARKVKLITQSLKKNDRIDAEHLARLARVDPKLLSPIRHRGKEAQADLAVLRARAGLVDVRTELVNTARGLTKPMGERMKKCDPDYVKEALADELSETTQNAIRPLLKSVEAINEQIEVYDRKIQEMEKRYPEVELLKQVYGVGSLIAVAFILVIEDKERFAQSRDVGPYLGLTPKQRDSGESSPELRISKAGDPLLRRLLVQGAHCMLRKGAPDSDLKAWGMTKLEGSKKGGKKRKKKAVVAVARKLAVLLLRLWATGEVYDPLYNRKAAAAAKAKAKAKAKVAA

SEQ ID NO: 473657 - protein, 443 aa, unidentified
MKELPVLDSRAAFCDVGSEHMHVSIAGGLPKVFGTFTSQLHELRDWLLGEGVHSIAMEATGVYWLSLYGVLESAGLEVVMVNGRQTRNLPGRKTDMKDCQWGATLHAHGLLKAGFVPPSHIRKLQDYQRLRTDHIASAASHVQHMQKALERMNIKLHNVISSLMGVSGLAIVHAILDGERDPAKLLELCYSTIRHKKAKDVIEALRGTWEPEHLFALRQALQSWEHYHRQIAECDQQIQLLLQEITFNDTQGGGIGEKPKATAGKHPSANAPQISGLHRMLIDLCQGKDLSILPAHTDYSILQIISEVGTDLSKWPTEKHFTAWLGLAPGTSQSGKRKSNVKHSRSRVGRYFCIMARSLARSKDMALGGFYRRLAARRGGLIANIALARKLAALFWRVMVKGTEFVEEGLAAYEAKFLEGKKRSLRRLARELGQAVSPIPVTV

SEQ ID NO: 473658 - protein, 318 aa, unidentified
MSQGYDDFVGIDVCKDNFDVCSAGSGPKGRFENTADGVSRLLPLLPPAGACLIVIEATGGYERQLVADLKTANHEVSVVNPRQVRDFARAFNILAKTDRIDAAVLARFAEKVRPIPREKAGRIDELRELVARRRQLIDHRTAEKNRVRQGASPLVRKSLLRLIEVINKDIKAIDKAMLSLVQSDDDWRNKFDKIKEVTGIGPQTATTLVAEMPELGQVNRQEAAALVGVAPFNRDSGQFKGRRMVWGGRRSVRNALYMAALSAKKHNPVIREFAARLYAKGKPPKVVITACIRKLVVILNAMLKANQSWQPRLANAAT

SEQ ID NO: 473659 - protein, 344 aa, unidentified
MDYFAGLDVSVKDTSVCIVDDTGKIVREVKVASEPEALLAVLENPAYHFKRIGLEAGPLSQWLFSALVEAGLPVICVETRHMRAVLKAQINKTDRNDARGMAQMMRVGLYRPVHVKTLRSQKLRMLLTHRKLLQSKAIAIDNDLRGTLRNFGLKVGMAGKARFEARIRELVESLPDLAALVEPLLIVRRTLREQFCILHRRLLAIVRDDEVCQRLMTTPGVGPVVSLTYRATVDVPARFRKSKSVGAVFGLTCAKYQSGEVDWDGRISRCGDEMMRTMLYEAAQAMMRSKKWSWLKAWAMQIARRRGMKKAIVALARRLAVIMHRIWVDGTEFRWTRGLAAAAV

SEQ ID NO: 473660 - protein, 363 aa, unidentified
MRFYGEQRRFYCGIDLHASKMYVCIVDDQGKIVLHRNLRTEPEALKRALAPYRESVVVGAECMFSWYWVADWCREEGVEFVLGHALYMKAIHGGKAKNDRIDSEKIARLLRGGTFPLAHVYPKEMRGTRDLLRRRNLFVRRRAELLAHVQNTFTQYNVPTASGKGRDRLREGDVGSSFEDTSVQVMLDADIEVVGQLDETIAVLETHVLKHAKIHDPIRLHLLQTIPGVGKVLSLVMLYEIQDVDRFENIGQFASYARLVACAKESAGKKQGSSGRKIGNAHLKWAFSEAAALMIRSMPEAKAFMEKMTRQRGKARAVALVAAKIGRVVYWMMKRKQPFDARQFWRSSLPKGTPLMEEAAMTG

SEQ ID NO: 473661 - protein, 343 aa, unidentified
MQAITTIGLDIAKSVFQVHGVDAAGQVVVRRQLKRRYVLAFFEKLSPCLVGIEACASSHHWSRELQALGHTVRLMPPAYVKPYVKRQKNDMADAEAICEAVTRANMRFVPTKTPEQQSGLMLHRARHLFIRQQTAVINAIRAHLGEFGIVAPVGRNGVEELLEVVADPSDKRVPEIVRACLAALGAQLRRLKEQILEFDRMIRAWHRSSEMSLRLDDCPGIGPVLATALAATVADPKAFRSGRNFSAWIEIVPKQHSSGGKNRLGGISKQGDRYLRGLFVAGALAVIRYAKIHGTKHRPWLRALLARRPTKVAAIALANKIARMAWAMMAKGERYKEPVALAA

SEQ ID NO: 473662 - protein, 434 aa, unidentified
MLWGGGEEIASIVADVNRWSPSMQRPNDLSQSRVVLKQDSTLIAVIEMSLSSWLVAGIVPGVERQPLKKLAIDESALLKLLHRWREEAEKAGRKIESIAVAFEAGRDGFWLARWLRARGIEAHVIHASSVAISREHRRAKTDRLDTELLKRAFLGWLRGERDHCKMVAIPTMEDEDAKRPNRERESLVGEQTRIVNRMKAALSRLGIRGFNPKLKKAAGRLEYLRTPEDEPIPPNTLAELRRDMERRRLVSEQIRQIENARLERIEHAPSHGPHAMVRLLARVIGVGIETADMLVQEVLSRNMRDRRAVARYAGLTGSPDESGTRRREKGLARSGNARVRRGMIQLAWRFLMFQKDSALAQWFRARTENALGTRKTMIVALALSASFVPCKKAYRRLEFQPALRPPSPNTFLVSAYPFSSRVFIASGEKSLSSN

SEQ ID NO: 473663 - protein, 379 aa, unidentified
MEIITRNEKILYVGIDVHKDTYSLCCFDFFRNELSDEMTIKATTKAVIKYLEAIKKKHKEEILFACGYEAGPTGYGLCRGLQKAGYGCVVMAPTTMSNPDGKKRVKTDRIDARAIARILAYKSYSQVHLPSEEMEALKEYTRARDAKKRMFKKAKQELLSFLLRNGKSYPESGNYWTEKFFKWIKTVQFSEKWMQEALNEYLSEVYSLKAKIELMDARIREIAELEIVKDKVDKLICFSGIDVITAVETVVEINDFSRFATAAQFVSYLGLCPGEDSSGKTKNMLPLTKAGNKRVRALFCESAKAIKRTNPYGQKSKRILERQKNASPEIVAYADKATKRIRTKMKHLEERGKNYNVSSAAGARELACFVWGMMNGKIA

SEQ ID NO: 473664 - protein, 440 aa, unidentified
MKQIRNHAAGIDIGAKNIFTAIEGKEVRSFETFTESFQQATSYLLENRIETVAMEATGVYWIILYEMLESAGLDVWLVDGRQTRQVPGRKTDVKDCQWIQQLHSYGLLNRCFVADEQVKAIRSYHRLREDHIRSTTMHVNHMQKALTEMNIRLKEVLSQLHGASGLAVIQAILNGERDAHKLLSLCHHSVIRKKADQILKALEGHYTESGLFALNQAYKGYIFYKEQIRACDHALQKSMEQINNYLDDQDSKKQIDSVKGRKPIRHNKPEVEHLGGHLMKIFTGKDATVLPGITDYTWMQLYAETGNDLSRWKSEKHYTAWLGLASGQHNSGKQKKTRNRKYRPKAGQIFRQIAQSLIESKKIGLGAFGRRLKGKRGPGIAVKATARKLAVLYWRLMVKGLEYTENGIKFYEEKMKLQKERWLQKTVRELGYELVLLSDG

SEQ ID NO: 473665 - protein, 424 aa, unidentified
MKVTYQTCCGVDVHKSFLVATIVKTTGGIEPYYQKKRFSTFNNSILEFKQWLLDNDCHDVCMESTGKYWVPVFNLLEDEINVVIANPRWVKAVKGNKDDTKDSKWIGDLFRLGLVKGSYIPCKIVRILREYTRYRYKLVSCRSSEKNRYQNALTVCNVALDSVVSDIFGKSSMSIIDYLLEQSGTSINHEEIASKLLRSLKSKEDAVIESVEGYQMTDAQKYRMRLVRAHMDYITAEINDVDKMIENMISSNPDFENAVQFLCTIPGVKRDSAITIISEIGTDMSQFSSSKRLCCWAGLTPGSNESAGKKKSVRITRAGVYLKPALVQCAHAAVKSDKSPYYKKKYESLVKRRGKKRAIIAIARMILTAIYQMLSTGEQWNPSDLYKIDMPVALVEKQKAKAIKQAKKLLQREGLLPPDESLAS

SEQ ID NO: 473666 - protein, 325 aa, unidentified
MQIYAIDVSKDYLDIFSKSDDGNSFQKRIKNSFNSICKFLEQMKSEDLICAEYTGVYTNLILHLTYLYKIKIALASGFDIKHSLGNRKGKSDQLDAERIWEYAFRFQDKLIFNLPDDEVMTEIKNLFNLRNQLAKALKTFSTSGTMLKQNPYHSIAEHEMREETLKYFQNQIKNTENQIFQIIEQSNEIIENFNLITSITGIGKVTALELIISTGNFKKIDSARKAAAYAGVCPYPNQSGNIAKKARIHFRANKKLKSLLHICAKTICVYNKEFRLYRERKMMEGKHFYLVMNNVANKLLRMVYAVINSKKAFDGALITKDPRLT

SEQ ID NO: 473667 - protein, 319 aa, unidentified
MTDTSDTHSIVVGIDISKENLDIAIDDEAKPQRVEYTSEGLNGLVERLRAIQPALIVIESTGGLEVRLMAELGAVGLPVARVNPGRVREYAKATGLLAKTDQLDARLLVRFGKAVRPTATPLPSEQEQELSALLSRRRQLIDIRVMEQNRLHTATRSMRSRIRKHLDWLDAEIAAIEQEISDFIQKTPLWAEKDALLQSAPGIGKVSSRTLLADVPELGTLNRKKIAALVGVAPFNHDSGHLRGKRHIQGGRPAVRSVLYMATLAAIRSNPVIKAFYDRLLTAGKEKKVAIVACMRKLLTILNAMLRHRQAWNPACIPG

SEQ ID NO: 473668 - protein, 345 aa, unidentified
MPIVGGLDIHRKQITFDYLDTATGEVRRGQITPADRAHLRAWLARFAGRDDVAFALEGCTGWRYVAEELAAAGVTAHVAEPADTAFARGRKRHAKTDKTDSRHLRVLLEQGRLPECWIPPAQILECRALLEAYHDLRREHTAWIERIHAVFFCQGAPRLGEGALRTEHGLAALREAAAVHLSPAGQLQVATALDMLAAVEARMDTLRQQLLHAARHLAGARALQARLYGVGPLGGLAMTCWLGGAGRFSSARKAVRFAGLDVTVYSSDGKRSPGHLSRQGPEILRWVAYEAGKTHARAPAPGHDYYAQVKDRQDGKIAALAQARKLIRQACHILAELGDDALTAA

SEQ ID NO: 473669 - protein, 316 aa, unidentified
MVGIDVASAHVDVAAIGAALPAALSHVGNDADGHSALADGLARLKPELVLMEATGGYEAALACALQAAGLRVAVVNPRMARDFARAMQRLAKTDRIDAATLAEFAGVLARRPDCERFIRPLREPEQQDLAALVTRRRQLVSMQLSERQRLRLARPVARPSIEALLEAIARQLDDVEAEMARHVEQHYAQMTKLLQSVAGIGRVAAATLIAELPELGRLNRRQICALVGVAPYAKDSGASRGRRRIGGGRFEVRRALYMATLAATRYNAPIRAFYQRLVAAGKLKKVALIACMRKLITHLNAITRDHLNAQTRSPIA

SEQ ID NO: 473670 - protein, 309 aa, unidentified
MKQSVVYIGIDVAKAHLDVAWAQTVRRLPNQRSGHAALIRWIKQSTTPVQLICEASGGYEQALLESLEKGAVKVTLVQAVRVRQYARASGILAKTDKIDAKVLAAFGSAIKPQPMSPRSVEQKRLRQYEAQRRHLSRILVAEENRLAQLSCAQLRTLSRSLMSKIKNQIETLDRRIGELIAQDQTLWEKAQKLTAISGVGARTAALLLAQMPELGQLNRRQAAALAGLAPFNHDSGSIRGKRAIFGGRRALRSGLYMAALSAARFNPILSRFYQRLRAKGKPHKLALTAVMRKLLLALNHSLKPEPILA

SEQ ID NO: 473671 - protein, 409 aa, unidentified
MSKTMAGIDVHKRMLMVVVMGAEETEARPQRRFGTTTPELLHLQTWLQQHNVGDVVMESTAQYWKPVWLTLEEHFRLYLAQAWSNRAPRGKKTDFKDAERLVRRHMAGELTLSFIPDAEQRQWRSLTRRRTQLTRDRTRIQNQVESLLEETRIKLAGVVTDLFGASGLRILTALASGETHAHQLAALADARLHCSPEELTAALTGFVSPVQRQLLQQHLEHLRLVESQIEGVSQMTAEVFQKHGDTIARLAEIPGVRVLAAQQIIAEASANAAAFPSAAQFSSWIGVCPGRYESAEKNHSSRCAKGNPYLRRVLCQVALAASRTHNSFFQQKLRRLLPKHGFQKSIWAIARHLSVVIWKILHDGVRYIEYGGRPSALAAKRRLQRLKKELRALGYSDELIPTRSTCLPA

SEQ ID NO: 473672 - protein, 345 aa, unidentified
MKLYGGIDLHSNNSVIAIINEHGETLTAKRLNNDISVILSFLSPYKDKLTGLVVESTFNWYWLVDALMDEGFKLHLANPAAIQQYSGLKHADDHSDARWLAEMLRLNILPEGYIYPRELRAVRDLMRKRMDIVQQSTKNLLSVQSCYMRHLGYKLSSNKIKQMAAIRKGVNVEQVHTYFSSTNTALSVISYLTLIRCAQQQINAIESAILQQTSLSPEFINLTSIDGIGNTLALTIMLETGTIKRFDSPGNFSSYCRCVKGVRYSNGKNKGATNQKNGNRYLAWAFTEAANFAILYNPTIKKYYQRKLAKTNQVIAIKTVAHKLARACYHVLKDNVPFDEHKAFS

SEQ ID NO: 473673 - protein, 346 aa, unidentified
MLYAGLDLSRKRLDFHLLDAEGATVDVGASPPDADGLQHLSERVALHGEPVRAAIESMNGARFVHDRLELQGWQVEIADAQKVKGLAPLACKTDRIDAWVLAELARRDLVPAIWLPDPRVRAERERARWRLHLVRHRSSLKQRVHAVLLTHGKPCPVSDLFGVRGRQLLAQLGLPEPWQGTIDASLRLIDELEREITDCERELRRLGADHRYVPLLCTVPGISWVLAYTIAAEIGDIGRFPSPRKLAGYSGLCPRVYQSGERDLRGPLSKQGPRYLRWALVEAATHACTAPVYRDRYQQTKARIGKQRGAKVAQIDLARRLSQAIWHMLSRGEPFAPKGATDPLAA

SEQ ID NO: 473674 - protein, 421 aa, unidentified
MKNSAAKKVRQVPAGYLVVGVDPHKKRHAAVAITQDFAVHGKFKFDNSREGLEYLLQRVKAEMVKTDCRGIMFAIETGGHYWRNLAYFLDEVGIPFRFINQFTLKRRREGKDLNRRKNDYRDSEVAAQLLCTGEFTETRLQQGVYAELRAAYNAYRRLVKESTRIKNLIKGLLDGLFPEFTQVFKDPCGLTALSVLSTCPIPGVIAGMTEEQFASTIKASHQGRLMRKKLCALRYAAKTSIGVKAGAQPVSTELSFLVEKLQLIKRHIRSIDGTLVRLVDRTEEGKYLLSIIGVNYISVAGLLAELGSFRSYRSAKQLIKMAGSNPTESESGGKRGSHTPMSRQGRPALRYCAWTAVIPMLRFNPDFRAWAKELRERPVHKNPLAKREVVGAALNRLLRLAFTLVKKQTFYQTPHPVQVTS

SEQ ID NO: 473675 - protein, 405 aa, unidentified
MSDTEDVGVFVGLDVGKSAHHGHGLTPAGKKVFDKPLPNSEPKLRAVFDKLAAKFGTVLVIVDQPASIGALPLTVARDAGCKVAYLPGLAMRRIADLYPGEAKTDAKDAAVIADAARTMPHTLRSLELTDEITAELTVLVGFDQDLAAEATRTSNRIRGLLTQFHPSLERVLGPRLDHQAVTWLLERYGSPSALRKAGRRRLVELIRPKAPRMAQRLIDDVFDALDEQTVVVPGTGTLDIVIPSLAASLAAVHTQRRAMEAQINTLLEAHPLSLVLTSMPGVGVRTAAVLLVTVGDGASFPTAAHLASYAGLAPTTKSSGTSIHGEHAPRGGNRQLKRAMFLSAFACMNADPASRAYYDRQRARGKTHTQALLRLARQRISVLFAMLRDGTFYESRTPRDVELAA

SEQ ID NO: 473676 - protein, 223 aa, unidentified
MNYNTVYVGMDVHKETFSLCCYTNEKEQAEYSQKVDAHYSKVLNYLEAMRFRYGDDVMFICGYEAGCLGFALYHQLTSHNVKCIILAPTTMSKPTGRKKVKTDKRDAALIARCLAHHDYSPVHIPTEQDEQLTDKLERLDQRIEELASKEDYQENVNYLSCFLGVKTQTALSTLVEVGDFKRFASAQQFASYLGLTPGEDSSGEDLNRLGITKAGNSHIRNFC

SEQ ID NO: 473677 - protein, 352 aa, unidentified
MNKDKKVYISIDLHSNKSMIGYMNTEGQYLAQQQFRTTAMNLINQVAAIPAESKHLTIEQGNMSFWAAELLSDHVDELIVCDPRHNRLITQSANKNDRLDTHRLCKLFRLDELKEVWRPKQMGRRRVFYGQIKQYQRLTRTLTAYKNQLQAGLRHWGLNSKLTPSDYRDPGKILQKVSRPLLRQELKARFGFIRQLQTRKDHQFKRITETGRQFWEIAQFQKMPGVGPVCAHTFSGYIQTPHRFRRRGQLIRFCQLGIRKRSSDGRSLRAERLDKAGHGALKNVSHIAWKSAQKTDNEVRRFYQASLAKTGNPVNARLNTQRKILITLWSIWKHNQTYRPEKFFSGDGDSAR

SEQ ID NO: 473678 - protein, 330 aa, unidentified
MTTNPPQIVFNHILAFEVSKEQLLVHTLPADEQCAIANKPQAVRRLIKAEIKRNRNKQLGQMLVVCEATGGYERHVLDAAVEMGLCVHRAHGTRVRHFGGYCGLLAKTDPIDARLLAQYGLKTENIRLYSPPPPETAALRALHARRTEIQQMLIAETGRLDHAQHKSVLKSLKDHIASLKAALAAIEADIAQLVEECEVLRKKVALMQTVIGIGPISAMVVLAYLPDIGRLTRGQAARLAGLAPINNDSGKKRGARHVEAGRTAIRRALYMAAGVAMRANPIVKAFADRLRGKGYPFKYVVTAVMRKLVVILNAVLRDGQSWRGAQVASV

SEQ ID NO: 473679 - protein, 392 aa, unidentified
MYIVGIDIGKNHHEASIVSPEGKQIGRSLRFATTHKGADSLMSFIFNNIGNSSCIFGMEATGHYWYPIYSFLKARGYTIYVINPIQSDSLRKMYIRQTKNDSIDSFLIAEVIRFGQFTTTSMADENILAMRQLCRYRDSVISSRTEIKLRISTIMEQIFPEYEKQFSSLWLSTSMGILEKYLTPENIENAPIDELFEIIKDKSHNKLTMKKAISIREAAADTFGIKIAQDAFSFQLKQLIDRMNFLDKQIEALDCQILEYYEKFDCYLHIIPGIGMIAAATILAEIGDINRFKSSSALVAFAGIDPTVRQSGEFSSTHNHMSKRGSPYLRHAIFLAATTCSFHNSPLNAYYKKKREQGKHHLTATGAVARKLTTVIYAVLRDGKPYEPKSFC

SEQ ID NO: 473680 - protein, 354 aa, unidentified
MIIIGADYHPAFQQIAFVDTETGELQERRLDHPEAAEKFYRELAAEGKKVRVGMEASGHARWFERLLAELNVELWIGDAAEIHRKRERKQKTDRQDAQHILRLLLKDDFPRIWVPSWENRDLRQLLWHRHRMVQARTRMMNQLQAVALNEGLRCKKKLWREAGRKQLEAFRLAPWASRRRQDLLELLDRLNPTIAELTQAIEREVEKCPEAQRLMTHPGVGPLTALAFVLIIGGADRFQCGKQIASYLGLVPLEDSSGNRRRLGHITKQGNSLLRFLLVEAAQVTVRSLPEWRSKYVHLTMRRGRKIAKVAMARKLAVRLYWMMRKGRDYEQFRKFGSHAGQPGHRHGVKSNIE

SEQ ID NO: 473681 - protein, 338 aa, unidentified
MYYTGIDLHKYTSYLTTVDSSGAIVKQENIKNVTHNFVQYFSSIPGEHQTTVESTMTWYWLNDLLSSINIPMVLAHAKYVKAIAYAKVKTDKVDSHTLAQLLRMDYIPVAHKISNDNRTLRDALRARIKIVQRHTSVTNSMHLLLAKYNYDSPTQLTGIPEFQYQQLSEVEALLNEQMLDLEKQLYPFLIPNDDIQRLLWIPGIGKMNAFTILLEIDDINRFPDVKNFFSYCRLVPSARNSGGKSKQRSSKDGNKYLKVAFSDAAIHAVHYYPVIRKYHSSLLRKKNKQIAKTIIAKEIAEIVYHVLKNKSNFNNTFRGQELQHKKSLQWPRVVNPYA

SEQ ID NO: 473682 - protein, 357 aa, unidentified
MYIVGIDIAKRKHEAAVIDGEGAVIIKPFSFTNNCSGYNRLLAMLTKAKLPLDEVSFAMEATGHYWLALFTRLQKEGFRVQVINPVQTNSIRSFYIRQAKTDPRDALLIAEVIRFGHFSESTLHPENIYELRELCRGRHAIVSMQADVKRKVVALLDQVFPEYETAFTNMFSDTSMAILQTCPTPKELSEIPLEELCHLIEVSSHKRFRMAKARELQELARNSFGFAMAGDVFSTMIRLYAKHLDFLKQQVMEMDRKIAEIMDTLDTPITTITGIGPTLGAYILSEIGDISRFSSAAKLAAYAGIDPTMRQSGEYNGVRNRMSKRGSPYLRHAIWLAASSAVLHDPALKLYFQKKTG

SEQ ID NO: 473683 - protein, 341 aa, unidentified
MTSKLSVVGIDLAKSIFHLVGLDERGKIIIRKRLARGEVMPFMAQLPRVLVGMEACGGAHYWARQLRAQGHEVKLMAPQYVKPYVKTNKNDLRDAEAIAEAVTRPNMRFVSIKNVAQQDLQALHRVRERLMRARTALVNEIRGLLAEYGIVLPTGINAFRNALAAKLEAAQGKLTPLSQELFGKLCAEFKQVEAEVAYYDEKLQTLATTHPESQRLLTIPGIGPITATALIAAVGDVGGFTNGRQFAAWLGLVPKQHSTGGQTRLLGISKRGDSYLRKLLIHGARATLRWARTKTDSRSQWIRGLLERRGWNRTAVAVANKNARIVWAVLSRGGVYGESTN

SEQ ID NO: 473684 - protein, 355 aa, unidentified
MEDHSTIIGLDLGDRYSNYCVLNGDGEIVEEVRIRTTAQGISKAFSRYQCARIAMEVGTHSPWVSRLVSGMGHEVLVANARKVRLICQSDKKNDSLDAQTLARLARVDWRLLAPIEHRGEQAQLDLAVIRVRDAVVASRTKLINHVRGMVKSFGGRISKCSAEAFCSRALEEMPGELRETLWPVVKTIGDLSRQIRGYDRQIEAMAEQRYPEARVLTQISGVGLLTALAYMLVLEDPHRFKKSRSVGAYLGLRPRMNQSGQSDRQLRITKAGDELLRRFLVGSSQYILGPFGPDCDLRRWGLALAARGGNNTKKRAVVAVARKLSVLLHRLWVTGEVYEFFRAAHHEVLMGNLNG

SEQ ID NO: 473685 - protein, 358 aa, unidentified
MVVTGSTRRIVGGVDTHKDLHVAAVVDEQDRVIGTRSFATTRQGYRQMLAWMRFFGELQRIGIESSGSYGAGLLRFMQQAKVAVLEVTTPDKQDRRRRGKNDDLDAQNAAHAAFAGQRTVTPRSRDGMIESLRILMACRKTAVSARRVALQMIHNTIVCAPDGLRDQLRSLTRMQLVRTLASWRPDLTAYRDLDSAYRIGLKSLARRYLELHDEIADLDVMVAAIVDELAANLVARNSIGHIGAAQLLLTAGDNPERLRSEASFASLCGVSPVLASSGKTVRHRLNRGGDRAANSALHIIAIGRLRTDQRTKDYVARRIAEGHSKLDAIRALKRYLAREVFTLITQRRKEINATRIAA

SEQ ID NO: 473686 - protein, 353 aa, unidentified
MSDCSKSHRRLTIGVDLGDRYSVTCVLDPDGEVLSVDRLRTAKPAFRDYFGELPRSLVVIEAGSQSGWVSREIERLGHEVIVANPRKLRLIYENDNKSDKVDAEYLARIGRLDPKLLHPVKHRGEAAQIDLATIRARAAVVRQRSALINFTRSQVKVFGERLPTCDAHYFHRKVADRIPPQLEEALRPTLTLIASFTAAIAEYDRQIDELSKTNYPETERLRQVPGVGPLVALAFILTLEDNRRFARSRSVGAFLGLAPRKSDSGSQEPQLPISKAGDPYLRQLLVSAAHCVLRSNVRASDLKAHGEAIARRGGKNAKKRAVVAVARKLAVLLHRLWVTGKDYEPFRKCSPAA

SEQ ID NO: 473687 - protein, 429 aa, unidentified
MTYRIAAIDVHKKMLAVVVADVAGEGEYQFERRKFGATPDQLHLLAQWLCQQEVEEVVMESTAQYWKPVWGALEQYWQPARQKREGARKMSGKLHLCQAKSNRGRRGRKNDFADGERLIKRLVAQELVLSFVPDAEQRLWRTVTRRKYQLTRDKVRFQNQLESLLEQAHIKLSSLVSDLLGVSARRMLKAIAEGETDPAALAALADYRLRATPEQLRDALGACGQLHGVYRRLLKMALEELKLMVMEEQIEQLEQEASELLQQHQNAVQRVAAVPGFGVDSAIQAIAEVGPEAAAFETYKNLSSWVGACPGEEESAGESKSTHSPKGNRTMRRLLNQAAHAAIKVKGSIFEMTFRRLLPRLKYQQAIWAIAHRLCRLLWKILHEGVRYEERGPAVSAKSKRTRTARMIKELKALGYRVEGGPLPAGTPA

SEQ ID NO: 473688 - protein, 343 aa, unidentified
MQTVSTIGLDIAKSVFQVHGVDADGLVVIRRQLKRRYVLAFFEKLPPCLVGIEACASSHYWSRELQALGHTVRLMPPAYVKPYVKRQKNDMADAEAICEAVTRANMRFVPTKSPEQQSGLMLHRTRHLFIRQQTSVINAIRSHLAEFGVTAPVGRKGMEELLRVIADPSDKRVPDVVRACLAGLGSQLLSLKKRILDFDRMIMAWHRSNQTSRRLNCIPGVGPLLATALVANVADPKAFRSGRNFSAWIGLVPKQHSSGGRDRLGSISKQGDRYLRSLFVAGALAVIRYAKIHGTKHRPWLTALLARRPTKVAAIALANKLARMAWAMMATGARYNYPPALKV

SEQ ID NO: 473689 - protein, 353 aa, unidentified
MNQFIGCDAHKKFSLFIAMNEEGGYGQAIRVGHDRERMRAFLEDLPAGSEIALETSGSYYWLVDEMERAGHQPQLAHAMTAKRRMEGRHKTDERDARGLAMLLRNGTLPRVWIPPAQLRDEREMLRWRMSLVETRSQVKNRIHAVLLRYNLGLKVTDIYGTAGRQELQNRLAELPEWTRQSVKEQLETVDHLNQQIEDCEQKLETLLECNAERDLLKTLPGVGKILSAVIALEIGEIGRFASPQKLVSYAGLVPAARESAGKKRPGKCPADCNTYLKWAFIEAGNVVSVHRGKWADRHVAQLYERVKHNTKMHGKATVAVGRHLAEASYWMLTKQEIYREPNANRQALSSTHG

SEQ ID NO: 473690 - protein, 315 aa, unidentified
MTRMRHMENTPNLICVDVAKSELVLFDGKKTWAIPNEKEAINSVLKEFPKHRIVCEPTSIYHLELATLAFKNRNEVSLVNPKEIKNYRDCRAFRAKTDRIDACAIYEFSIRHYEALRLWKPPAKQLEKLYKLISQRSCVVRNRVTLRQVFGQDQAIKPVISETTTLVEVLESQISEIAKSYEDYLRFSPMPGVGPLVCATLVYLFNRYEFADDDAAVAFVGIDLRVSDSGKYKGSRRLSKRGDPLIRNILIQGGFGLMISKAASQAKSKFDAAGRHRTEQGVIAARKILRTAYVLHNTKTDFDLSKWHWMVDNET

SEQ ID NO: 473691 - protein, 361 aa, unidentified
MLYLGIDQHRKQLTVCVRNEGGDVILRRQVSTEWDRVRAFGAEIRKLAGPAGFVVIIEVCGFNDWLLKLLAEYDRHETFVVQPEKQSKKKTDRRDANALCEILWLNRQRLLDGKPVQGVRVVHLPSVQDAADRQLTELRKRVGQLRTRTVNKVKHLLRKHNLEQECPTKGLETVKGKKWLATLALETMDRLEMNLALTQWKQWDDQIETLDAAIRKCQAENALAALLATIPGCGAYSSLALAARIGDIERFPRPASLANYWGLTPGCRNSGEATDRLGSITKQGSVTARFILGQLVLHVLRRDAAMRSWYGRIKKRRGSKIARVAVMRRLATIIWHMVKHQQPYVVGGPPRQRLRAPAGAR

SEQ ID NO: 473692 - protein, 339 aa, unidentified
MRLYAGIDLHSNNHYLGIVNEENQVLFKQKLVNNLKETLTVLEAFRKEIEGVAVESTFNWYWLVDGLMENGYRVHLANPAAIQQYKGLKRVDDQRSALWLANLLRLKILPEGYIYPKEERPVRDLLRKRLQLVRHRTAHILSIQNILSRSLGVKMRSNEVKQLDEERVKDLLKEEHLILAVNASVGVMRYLGGKIKQIEGVVKSRVKLRKEFEGVLSLPGVGDILGLTIMLEVGDIGRFPEVGNYASYCRCVKSTRISNDKSKGQGNRKNGNKYLSWAYVEAAHFAIRSYPVVQRYYQRKTAKTNGIVAIKAISHKLARASYYIMRDQVLYDPQKLFQE

SEQ ID NO: 473693 - protein, 421 aa, unidentified
MATVTFDGRIVIVMDENTGFDIWCGLDVGKQSHHACALDTAGRRVLDKPLPQDQTKLEELFTRLEGHGRVLVIVDQPNTIGALPIAVAGSMGIQVAYLPGLAMRRAADLYPGSAKTDARDAFIIADTARTIPHTLRRIDADEETLAELKVLVGFDEDLAAEATRLSNRIRGLLTQIHPALERVVGPRLTTKQGLAVIEQLGGPQGMAAASKSRLLKVITKAYPHRAQDFADAITAALAEQTVTVAGTAAAEQVLPQLAASLRQTLDQRHALAAQIEQVVDAHPLAEVLTSMPGVGVRTAARILLDVGDASQFPTAGHLAAYAGLAPVTRRSGTSIRGEFPARSGNKHLKRALFLSAFAALRADPTSKAYYDRKRAQGKKHNAALICLSRRRCDVLFAMLHNREPYRTPAPNPEPSPTPLAA

SEQ ID NO: 473694 - protein, 364 aa, unidentified
MTNSITWVGMDDAANKINVAVFFGQASNPHEEFVVVNDATGHGRLVKKLKSLPGEVRCVYEAGVNGYHLQRVLSRNKLSCDVAAPSLTPRRAGNRVKTDPRDAKDLAKLYRSGELTSIVIPGVKQESLRDLVRAREDAMEDQQRARHRLNRFLLRRGMKYRTGKAWTGGHLKWIKAIRFDDPETQTVLDEYRLALDEETERMKRFDELVEETAKAPEYQKLVSYLMAFRGIKVLTAMTIIAEAIDLKRFDDARGLMAAIGLVPWEDSSGIQVRRGGITKTGNAHFRRVAIESSWHYRHAPVAGKALKKRRAGLPPEVLEIVRKADKRLNKRYWHLVNRGKNTRTAVVAVARELLGFIWAMGQVA

SEQ ID NO: 473695 - protein, 400 aa, unidentified
MPTLWAGIDAGKRTHHCVVIDSDGAVLLSTKVSNDETELLDLIATVIALDSDGEVCWATDLTDGGAALLIALLAAHGQRLLYIPGRIVHHASATYRGDGKTDAKDARIIADQARMRTDLQPVRIATDVALGLRLLTSHRLDVIHDRVRAINRLRATMLEYFPALERAFDYSKNKAALVLLCHYATPESLRRIGVARLAAWLKARGCRNSSGVAKTAVDAAHEQTTALPALSIGSALVTKLAAAIIAIDEDLAGIDAEITERLAQHQSAANLLSMPGFGPVLAATFLAQIGGTLDAFENVDRLACVAGLAPVPRDSGRISGNLHRPRRFNRRLLRTCYLAALSSLKNSPASRAFYDRKRAEGKSHKQALIALARRRMNVIWAMLRDNTHYVEPTVNVPITT

SEQ ID NO: 473696 - protein, 428 aa, unidentified
MSYRIAGIDVHKKMLAVVVSNVEVESEFQFERRMFGGNPEQLRLLAAWLLEQEAEEVVMESTAQYWKPVWGALERYWKPIREKREGAKRRSGTLHLAQAQSNRGQRGRKKDFVDAERLVKRLVARELKLSFVPDVEQHLWRAVTRKKYQLRRDLVRLNNQLESLLEETHIKLSSLVSDLLGVSARRMLNALADGETNPAALAVLAHQRLRATPEQLCDALGACTELKPVYRRLLKMTLEHLQILEQQIGQLDQELATLLHPHQDAVQRLAEVPGFGVDSAQQIIAEVGPAAATFPSAKCLSSWVGACPGDEESAGVSYSHRSPKGNRHMRRLLNQAANAAVKVKGSIFEIIYRRCVPRLGHNQAIGVIAHRQCRLIWLILHQATPYEERGPAVTQQSKYKRTWRMIRQLRQLGYRIELPNPQPSQAQA

SEQ ID NO: 473697 - protein, 402 aa, unidentified
MIFIGIDWSTQHDDICIIDNQGQVIKEFRIPVSATGFSKLLQVLKETEPNPEEICFGIETDKNILADFLLAAGYQVYSLNPLSVNRFKERYTTSGKKDDKFDAFNIASILVSDKDHFKPVCLSSDECRELQIHCQSVDNFIRQRSRLINQLNAEIVRYFPAFSSFFSDLSSNVALNVLQKIARPSDIASMSEADFEERVNDVKYFYKKRKADLFNHLKNEVIIFDNPLEDAYALRVTLLAGQLLSLNETIVCLEKIIKEKFEKHPDAKIFKSIPGAGPRMAPALLVCFGDERSRFESYQQVQCYAGTAPVTEKSGKSFHQIKIRRMCNKSFRYVFYTLSFTSIKQSPWAKEHYHKQKQSGKRHSGALRSVANKWAKIIYSMWLNQTEYSENIFINKRSQNAA

SEQ ID NO: 473698 - protein, 339 aa, unidentified
MKLYSGIDLHSTNSFLAIIDGKGKRIFSEKLPNDISVITQRLELFSGTLQGVVVESTYNWYWLVDGLMAEGFALHLANPSAIQKYSGMKHVDDKHDAFWLAEMLRLGILPEGYIYPKDERPIRDLLRKRRHLVALRSSMLISLQNIITRNCGITIKTNDIKRLREDRVHPFLADNEDLALAGRVSKDSIDFLTHQIRAIETFLERKLELKDAYKDLVTIPGVGKILGLTIMLETGPIERFEKVGNYASYSRLVSSRWTSNDKTKGKGNKKNGNKYLNWAFSEAAEFARRYDDKARAFYNRKLRKSNFMVAHTALAHKLARAAYHIMRDHVPFMPDKMFT

SEQ ID NO: 473699 - protein, 354 aa, unidentified
MNSVRYIGLDVHLSTISVAVLDEQGKLVMESVLATHSAAILEFIHGLRGTLYVTFEEGTQSAWLYDLLVRQVHQVVVCNPRKNALLKAGNKSDAVDARKLAGLLRAGLLSPVYHGETSTATVKQLGRSYEALTQDSTRVMSRLKALYRGQAIPSVGKKPYGERREQWLGKLGGAGLQSRAQRLYQQLDVLLALRREARQELIQECRKHAAARLLRSVPFLGPIRAGLLIGRVQTPHRFRTKRQFWAYCGLALETRSSADYRFVNGQLERTRKPVWIRGLNLNHNHDLKNLFKSAATTASARPGPFGDFYQHLLAKGMLPPMARLTLARKMAAITLSVWKKGERFDAQKLKPQAA

SEQ ID NO: 473700 - protein, 435 aa, unidentified
MSQSNMPSSPVDASSFRYVVGVHIGSQTCSMCALTPDKRQVLKPSEFANATAGFALLCGKLEQLGVPAAQILIGMEATSRYGENLSHFLASRGYQLCLLHPRQTHQFAQQRGLRAKTDQLDATTIARVLRSFEARRGYVPTELIATSREFVRLHTQLSEEAARYKNEIQTVLTVLFPEFTQVFADPCRATALALLKLYPSAQALAAAGVEAVTVKLHELAPRTYGRRTAEHLVQLASHSVSNGLAVAARATSLRILCDQLEHTQANLKQLENEIDKLLQTDAGAKGLQSVPDFGRKTVAVLRAELGDVTRFQRTDQVVAYAGLDIEVKESGKWKGQAKLSKRGSGRLRRILYLAAVRCTRRADSAFGAYYHRLLARGMKARDALMAVMRKMLIVAYRLLKTEELYDATKVAAVVLTRESEPPQPPSSPELGAIGA

SEQ ID NO: 473701 - protein, 318 aa, unidentified
MNIIGLDISKDTIDATLHKTNGSIHYIKFKNNDDGLKQFRLWIKGNRIRKAYIGMEATGIYYEKAADMLSSYYTVYVINPLKIKDYGKSRFNRTKTDKADSNLIADYIKRHQDTLIPYQIPKNKALQKLINLKNQLHQHQKQIKNRLHSTEEDFIRNIHQDLIDTIQDKMEQVKIAISEQIKKQTDNNHYRNLQTIPSIGKDTASVLYAQLTEKHFKTANQFVSYAGLSPAIIQSGTSVRGRGRLSRYGNRRLKSTLYMPALCAYRFNAFPKLINNLKKAGKPKMVIIVAIMRKLAKLAYYIVKTGQPYDAERHRLNQ

SEQ ID NO: 473702 - protein, 379 aa, unidentified
MTCKGRGRVAKLTRAMQYLSNIELSSSEGTRSEFNPSKRVIKLGIDVHQEFYVVVMQEGGGNPKPAQRFKKEAFLCWASKLKHSRGAQIHAVYEACGFGFGLHRALTSLGIECHVVCPQKLDEGNKRVKTDGLDAKALCLRLDRFVEGNREALAVIHVPMEAEEQLRAIHRQREQLVKARKQLEAQGRSLMVNHGIEPVQRWWKPRTFAMLPVPDWMKELLANSQPILLALEEKIRALTVQLQAAASPGQPRGLGMMTSVVIDREVGSWSRFRNRRQVGSYTGLCPGEYSSGKTRLQRCVTKHGNPRLRAALVELAWRLVRFQPNYKPVVKWRQTLCKGALATGAARKKAIVAVARQLAVDLWRIRTGRLSAETLGLMN

SEQ ID NO: 473703 - protein, 443 aa, unidentified
MPRFIGLDIHKTVVAGCVVDPHGTVCTRLRFPLTRTTLAAWARQLTAEDAVAVEATTNTWAVIALLQETPARLVVSNPLRTRAIATAKIKTDRVDAEVLAQLLRCDYLPPVWIPDAATLAARRLTTRRSRLVAERTRLKNRLHSVLHQLLLPCPVADLFSRAGLAWLTTVELPAAERAAVDADGRLLAAVEQELTALEQSQVVDAAADPRGRLLLTLPGIDVAVATALLAAIGEVSRFPTAARLAAYLGLVPSVHQSAQRCYTGHITKQGASHVRWLLVQAAQHLDRHPGPLGAFVRKLQRRKNRNIAIVAAARKLVTLAWHVLRSGEPYRYAVPRATQEKLARLRRRATGQRRQSGPPPGTPRAAAYGTGQRTRGIPALATVYQQEGLPAPGPMPSAESRVLATDPAVHQFVTSLQVSHHRPRARQPALHTAKTDTHGAQPG

SEQ ID NO: 473704 - protein, 483 aa, unidentified
MVLRVPIGSWMPYKRINIPKANRHGAIFQTLKFKIMSKSKTKKEKVKRISQLTVINPTAAGIDVSDTEMMVAYPISPEQLEIRVFGCFTRDLHSIANCLKENGTTTIAMESTGVYWIPLFLLLQEYGFEVYLVNAKHVKNVTGRKDDESDAEWIQKLHSCGLLSASFQPDNMVRTLRSMVRHRKNLVRTSSTYLNRMQKAMELMNIKLHTIISDIDGKTGLLILEAILAGERDPEVLADLRDKRIKASREDIIKSLEGHWTTEHLFELGQCYQLYCTHRQMIDECDKEIEKQLVIQIASKNEGVIPDIPKVKRKASGKHKVQFNLTADLKEILKVDVTEVFGINELSALTILSEVGSDMTKWKTEHHFTSWLGLAPNTKISGGKVISSKIMKKKHHAGQAFRMAANGLYNSKSPLGDYFRRLRAKAGAPKAVVATARKLAIIYYKMVANKEAFNPKALDDYRKKYNEKKINQLKRKIAQLEAA

SEQ ID NO: 473705 - protein, 326 aa, unidentified
MQGKVSSNDSAVKQVYVGIDVCKKWLDIAIHPVGHVERFENAAKGHRQLIRHLLKHSVALVVLEATGKLHRDAHRALHEAGLAVAVVNPRRSRLFAASTGVLAKTDTIDARLLAVMAEALRPSRVAPLSDEMASLQELMRIRETTIAERTAIVNQIGAGAGAFVRRELQRRERALTTSISRIEKEIKRLIDADPRLSARYEIVQSIPGVGPVAAAALVIGLAELGTCTAKQAAMLAGLAPVACDSGDQKGARHIQGGRGDVRRALYMAAVSAARCNPQLKTFYDRLIAAGKRPKVAITAVMRKLVALANALLTANRPWLQEAPKTP

SEQ ID NO: 473706 - protein, 341 aa, unidentified
MSNVAIAAIDLGKHSFHLHAQDDRGRELYHKKFNREALGKHLASLAPCTIAMEACGGAHFMAREVQKWGHTPKLIAPQHVRPYVKSNKNDFADAEAICEAATRSAMRFVAPKTEAQQALAMLNSVRDSFIKDRTATANRIHAALLEVGISLPKGFKSLKDLATLIDEEPFPSIIKQLLTKLHDHFDYLDGQVKTLDKEVECRAAEDDLASRLMTIPCVGPITSSALAAELGDGKQFKCGRDYSASIGLVPKQHSTGGKTVLLGISKRGDRNQRRLLVQCARVYLITLERQKGALADWVRQLNSCHHSNHVVCAIANKLARIAWAIAAHHSEFDAGPSAMNA

SEQ ID NO: 473707 - protein, 349 aa, unidentified
MYYVGVDYHKRYSVATVLDEAGTMKARKRLDNRLDDFRDFLRPYDKAEVEAVVEATRSWGIPVDILEQLADRVILANPGEVKLIAKARIKTDKVDSLTLARLLRMDWVPEAYLRPKDNRDHQLILRIRCFLVQLRTRVKNRIHDLIDRQDESVREMATGFSDLFGKKGLTWLASLELGYPSGTLLCRLLAVYNALDKEVRQSDRLVAELFAADEDCKLLVKTPGIGVFFAVLIKTEVGNIERFANSPRFCSYAGVVPSTESSGGKIWHGRIIKQSNCWLRWALVEAVIPATVADAGLRAHYEYYRRTKGSKVAKVITARRLGCIVYRVLKERKPYFERPVQSRGYRQAG

SEQ ID NO: 473708 - protein, 381 aa, unidentified
MKKNTIAKLQGSKSQIRRKAAKKGLTIGLDLGDRSSCYCVLDAVGEKASEGKLPTTKAGLDSVFGKMGPCRIALEVGTHSPWVSRHLAEMGYEVIVANARKVKLITQSLKKNDRIDAEHLARLARVDPKLLSPIRHRGKEAQADLAVLRARAGLVDVRTELVNTARGLTKPMGERMKKCDPDYVKEVLADELSETTQNAIRPLLKSVEAINEQIEVYDRKIQEMEKRYPEVELLKQVYGVGSLIAVAFILVIEDKERFAQSRDVGPYLGLTPKQRDSGESSPELRISKAGDPLLRRLLVQGAHCMLRKGAPDSDLKAWGMTKLEGSKKGGKKRKKKAVVAVARKWAVLLLRLWATGEVYDPLYNRKAAAAAKAKAKAKVAA

SEQ ID NO: 473709 - protein, 347 aa, unidentified
MTVYCGVDFHARVQTVSWLDTQDGEIHRKDLNHRADDVRGFYQQFAGEVIVGIEASGYSSWFEDMLDGIGHQVWIGDASEIRRLARRRQKNDKRDADHILDLMVKGEFPRVHRQCRESREILGQLRYRHRLVKMRTMAANCLKAIAIGAGLSEKTRLVTSKGRSKLDALGLSAVLNEQSKRWLELIDDLTTKIETVERWLEEQAEADQRVERLRTHPGKGLLTGLALVHTLEPVERFASTRKVAAYVGLDPMEDSSAERKRYGSVSKAGSTLVRFLLVEAGQTAAKRDPQLRSFYQRLRDKRKTAKAKVAVARKLAVRGFIMLRDQIDYSEFLRRGVEARSSRTGSR

SEQ ID NO: 473710 - protein, 314 aa, unidentified
MNHTSIYTGIDVSQNHLDVHILPEDTGKRFANSEEGIAQLLQWLTPLQPSLVVLEPTGGLERLVVAHLSAAKLPVSLPNPRKIRAYATVLGKAKTDAIDAAVLASFGEKLTPTVSVVLDEETQQLADLVTRRRQLVEMQVAETNRLTRAPASAQSNIKQHLAQLKAHLKQLNEQIETLLKSDYWKAKRAILISTPGIGPVTSAVCLSELPELGRLSEKEIARLVGVAPINRDSGKHKGKRKIEGGRAHVRSALYMATLVATRHNPVIRAFYQRLLKRGKPKKVALTACMHKLLTILNAMMRDNRPWQSPPVKVV

SEQ ID NO: 473711 - protein, 339 aa, unidentified
MQLYAGLDLHSRNTYIGIMDQEFKHVFGKRVPNKLPLILKTLNPFQDQLKGIVVESTFNWYWLIDGLMDAGYQCVHLANPSAIQQYEGIKHTDDQHDAFFLAQMLILGILPQGYIYPKEDRPVRDLARKRLFLVRNRTDHILSLQSLIMRCSAQRFSANEIKKFTVDDLQHLLQQEYIVLSAQANLDTIGFLSQQILRLEKAIKKKVKLKKAFQQLLTVPGIGLILAMTIMLEVGDIGRFPQVGNFASYTRSVSSNRLSNEKSKGHGNRKNGNRYLSWAFTEAAHLSRRYNEHFRSYYNRKVAEANTSLATKALSNKLARICYYIMPDQVPFRKELQSH

SEQ ID NO: 473712 - protein, 304 aa, unidentified
MYQKHIWMYLYFQKENTCNLAMAGIQKLLAKVKLFPNTLIVLESTGGYEVSVSNALSKVNLNVCVINPRQIRDFAKASGRLAKTDKVDAEIIALFASKMEPEPNVIYNEKQQAMAANNARRRQLIDMIIAEKNRLDKATSEQAESIQRIVEVLEKELERIEAIQKQFVCHDETLKEKKKILTSIKGIGEVTAMAMLCELPELGALNTKQVASLAELAPFNRDSGTLKGKRTIWGGRASVRIALYMPTLVAIKHNPQLRAFYQRLCEAGKAKMAALIACMRKLLIIMNAMIKKKQCWTFEPIQPS

SEQ ID NO: 473713 - protein, 291 aa, unidentified
MVYGAIDLHMRSSQIRIIDDAGVVVRDQRVPTTRERLTQVFAAHGPLRILLETGTESEWVAQALEAAGHEVIVADPNYAPMYGELKRRIKTDRRDVAALAEANRRGWYRRAHRSSPAQRETQQMLRSRRFLVQARSGAVSLLRSLLRQSGARLGTGSCETVPARVARVSMPPTLAETLAPLCRQIAALTTEIHAIDRRLHTRTASDAIVARLRRVPGVGLIVATTFRTFVDRCERFGHAGQVSAAIGLVPREDSSADRRHRGHITKAGPRELRSLLIQAAWVWWRHGGSGT

SEQ ID NO: 473714 - protein, 359 aa, unidentified
MQTQSNKLDFKGQNIYSGFDAHLKSWKVTVMTEKLTHKTFSQLPEPKALYAYLVKNFPGATYYSAYEAGFCGYWIHNELLSLGINSIVVNPGDIPTTNKEKVQKEDKRDSVKIARSLRGGELKAIFVPCEKTLEDRSLLRTRHTLTRDIVRYKNRIKSFLYFHGIQFPEIFNNPQSHWSKRFMSWLISIEMKQESGKLSLAALIRESENLRQNLLLVTRQVRALSETESYKENVKFLRSIPGIGLLTAMLVLTELETFDRFGNNDHLCGLVGLIPSTDSSGDKDKVGDITPRGHHILRSAIIESAWVAVRIDPALSKCFHDYCKRMEPNQAIVRIARKLLARVRFVLKNRKPYELSVVH

SEQ ID NO: 473715 - protein, 444 aa, unidentified
MAMRKRDDEVFPNAAGIDIGASSHWVAVPRHLAEQAGCEPVREVGAMTDDLNALADWLLACGVDTVALESTGVYWIPVYEVLEQRGLKVWLVDARQMKYVPGRKSDVQDCQWLQKLMSLGLLRAAWRPDGEVCVVRAVARQREVLITDQATWVQRMQKALVQMNIQLTEVLGDVMGATGQAIIRAIVAGERDPKVLARHRNSRVKASAEEVTKALTGNWRDEHLFVLGQALAMYDDIARRLNECDVKLQMLLGERSRSRVDLGRAPKAGSKSRVEFDVRQSLANWAGVDLTRINGLGVTVVMKLLTEIGPDVSRFATVKHFCSWLGLCPGTKISGGKVLSSGTKRSANRARQALKMAAMSLSRSDSALGAFYRRLSGRMDKPRANTATAHKLARMVYFMLTRGEQFVDQGQQRYEDQQRQRSIAALKRRAAALGFQLNPTTVAA

SEQ ID NO: 473716 - protein, 384 aa, unidentified
MQKPNDLNQSRIVLRQDSTLIAVIEMSLSSWLVAGIVPSVERQPLKKLAVDESALLKLLNRWREEAEKAGRRIERITVAFEAGRDGFWLARWLRARGIEAHVIHASSVAVSREHRRAKTDRLDTELLKRAFLGWLRGERDHCKMVAIPTTKDEDAKRPNRERQSLVGEQTRIVNRMKAALIRLGIRGFNPKLKKAAGRLEDLRTPEGEPIPPNTLAELHRDMERRRLVSDQIRQIEKARLERMEQAPGDGPHAMVRLIARVIGVGIETADMLVHEVLSRKLRDRRAVARYAGLTGAPDESGSKRREKGLAKAGNARVRGGMIQLAWRFLLFQKDSALAQWYRTRTEGGRNRKTIIVALARKLLIALWRLVTTGEVPAGVVLRAA

SEQ ID NO: 473717 - protein, 460 aa, unidentified
MKNSQQRKQMKKRRINKHLEQVSLFAAGIDIGSQSHFVAVPEELDSEPVREFSSFTVDLNRMADWLVEIGIQTVAMESTGIYWIPAYEILEERGLVVLLVNARHIKNVPGRKTDVVDCQWIQQLHTYGLLKGAFRPPEEIIALRTYMRQRETLTQQASDQIRRMQKALRQMNLLLDNVVSDIDGVTGMKIIRAIVEGERDPIVLAKFRDGRCKKSEEVIASSLEGHYREAHLFSLKQTVELYDIYQEKITTCDAAIQAQLDSMESKEDKKDLPPPKKPKTKSSPKFDVRGELYQLTGVDLTRIDGLNENSVLKVLSETGCDVSAWPTEKHFSSWLGLSPGNKITGGKILSGKTKSSANRAAAAFRMAAFGLLNSNSALGAYCRRQRARLGAPKAITATAHKLARTFYSMLKNGSEYVDKGQDYYEKQYHDRIVKGLKKRAAELGFDLITRELLIDEKSIA

SEQ ID NO: 473718 - protein, 339 aa, unidentified
MRYVGLDSHWRQSTICVLDHRGRKLLNRTIKGPWSKVLEEVGKIRKPFAVCFEASTGYGHLFESLQTVARRVVVAHPGQLRLIFRSKRKNDRVDAQKLAKLLFLDEVPPVYVPSSEVRSWRGFIGHRNKLVRERTRTKNSIRALLRGQGIQAPRGLWYGPGMKWLRSVSFANELDTVQRDLLYERLCFLTKMLERVETTLNRTASRNPGVQLLRTIPGVGPRTAEAVMAWVDNPARFQRIKGAGRYFGLVPCQDASARTNRLGHITREGPSIVRWLLTEAAWQGVRRSPLIRTFYERVRRGDPERRKIALVATAHYLLRAMMAMLRTGEVWRSSEEAAA

SEQ ID NO: 473719 - protein, 376 aa, unidentified
MKEHTRKMKRQNSNANTTAASKAASEKEEFAFYIGIDLGDKNCEVCVFNPAGEHKESFRLAMKSADLQGYFATIGRSRVAIEAGGQSRWVAEVIEQCGHQVYVSNTRKVAYIHASDDKDDPGDAYKLAELVHFKPRLLHPIQHRSREAQADLSWIRAREVLVESRTQLVNAVRGISKAFGERLAKCSTEGFTAKLATQVPEAIRGAVAPLLETIDHLNDQIRYYDQMEEHIARERHKKYWLLQQVNGVGVHTALSFMLTIGDAERFEKSRLVGAFLGMRPRKKDSGESKPQLGITKAGDEYLRKTLVNCAHYILGPHGADSDLRRYGQRICERGGKNAKKRAVIAVARKLAVLLHRLWVTGEVYEPLRNSKKPVAA

SEQ ID NO: 473720 - protein, 405 aa, unidentified
MPYILALDVSMGHSYSVLYKDDTCLFEDEIEHTQRGFHALLEEIQHLPERPLIVFEATGIYSRPVEKFFQDHHFSYCLLNPLEAKKQMEESTLRSWKTDKSDAHRLAQTHLKNQRQPKEVQSNFYLEMRDLARFYQEIEKKITRLRMDLHNCLQLTFPELEQFFSNRLTPYALTLIRLFPHPDFVLASTRTKIKNKLINETRKKISANRAEQKADQIIHYAQCAYPAVEKDSIHCQKTIYYGELLQDLLEQKKALATQMIKKAEGSPCFLLYQTFPGIGALTAALLLGELGDITRFKTHKQLNAFVGIDIRRYHSGKYTGQDRINKRGNPKARKIIFFTIRNMIRQQRAAPNHIVDYYYKLKKQPIPKKDKVATVACMNKLLKCMHAMVRAHTEYDYAYAVSVDH

SEQ ID NO: 473721 - protein, 520 aa, unidentified
MSSARTRKRPSRPRPSPSLGKPRGVLHPRVQQVGPEHFGIVCFDCHKDSSKFLLADFYGAVLIPPTVVAHNRPDLDAALAQVRAAFATHNLRDGLVAIERTGRYHRLVQRTFAAAGFETRILHPFATKQYRQPVDPGNKTDDADLAAIHRATVTGCALLEATRDEAWTTLQLVIRHRRDLVRKGAALNCQIRDHLEAALPGFAACFVKLWDSALPWHLLRHFPTATHLRAAGMTALCHSLRQAGIRFQQRTVAKALAWAERAAPGDVAADQHVRFALALYDDRQHKTQEILTLERESAQRLALTPYVLLLSFPGVNVVSAADFAGEMGPIEHYANCKSITGRAGLRPARYQSNQVDKGDGPLVRNCNRALRAAILGIADNLIVCNHHFGALAAAWATQGKDPRDSHIKVALRFCRIAFQMVAGRQVFRHPCIPGRHYLLDKLTAFHRAHGTPMAEVLRDLQAAIGQVPLREHAAEAKPLHEELKKIQQGHRRGPQPLGAILPLVLARLGVGAVQSEGSGE

SEQ ID NO: 473722 - protein, 410 aa, unidentified
MDTLIERCAGLDVHKDTVVACVRVPARGGGREQSIQTFGTTTAQLLALRDWLVAHGVTRVGMESTGVYWKPVYYVLEDALECWLLNARHLRNVPGRKTDVADAAWICQLVEHGLVRPSFVPPKPIRELRNLTRYRKAQIEERTREAQRLDKVLQDAGIKLSSVASDVLGVSGRAMLRALIAGTRDPETLAELARGTLRRKIPALRQALHGRFGPHHALLVGTILAKLEFLDEALGHLSAEIEQVIAPFAAEAALLRTIPGVDRRTAEAVVAEIGVDMSRFRAAGRLASWAGWCPGNNESAGRHGSGKTRKGSKWLHTYLTEAAKAAARTKGTYLGAQYARLRGRRGSARATVAVGHSILVAAYHILDRHEPYRELGPDYFRRRHSREHQTRRLVRQIEALGYHIRLEEVA

SEQ ID NO: 473723 - protein, 369 aa, unidentified
MAKNGTLAKSHELQPSFRTTTEQITIGIDLGDRFSHCCVLGPDGKILTEGRLKSTPETMARHFKDLPPSRIAIEVGTHSRWVSQLLGQWGHEVVVANPRNLRMIADSIRKSDRVDAHMLARLARVDPKLLSPIVHRKQESYPDLIQLKARDLLVKNRTRLMNAVRGVLKSAGLRVPASGTSCFPSKAAMCIPEELKVSLTPLLETISHLNKQIYLLDKAIESTAQNRYPETCRLRQISGVGSITALQYVLTIGDPGRFAHSRDVPAYLGLTPRRHQSGSIEQQLRISKAGNKQLRSLLVQCAQYLLGRFGPDSDLKRWGTRMFERGGKNSKKRAIVAVARKLAVLLHRLWVTGDTYHPLYSAGISSVAS

SEQ ID NO: 473724 - protein, 353 aa, unidentified
MDSKKYIGMDVHKESISIAVRNDVGKIMMECVIETKANIILDFIHGLRGELHVTFEEGTWAAWLYDLLKPHVTKLVVCDPRKNSRQGNKNDQIDARELADRLYMNKLSSVYHGEAGVRTLKELARSYLTISKDLARVMTRVKAIYRSWGIPCAGKQVYAPRHRVEWLGKISEAGVRRRAEFYYQQLDALRSLRHQVRRELLAESKEHKASKLLCQIPSIGPIRAALLIALIQTPHRFRTKRPLWKYSGFAIETHSSADYRKVQGQLERTKKQVSVRGLNRDCNHDLKNLFKSAATIASVKPGPFQEFYAALVAKGMRPEMARLTLARKIATIVLIVWKKGVSFDAQYLKPQTA

SEQ ID NO: 473725 - protein, 359 aa, unidentified
MQRNKISFKGQKIYIGIDVHAKTWEVCVLTESGYKERHPQQASAKTLFDFLKKHFPDGEYHAVYESGFSGFSTYYALKEYGIDCVVTHAADVPTTQYEEVMKTDKVDAAKLARSLRAGDICPIYIREKENIDDRSVIRIRKTIQKQLSGYKARVKHLLHCNGVEIPDRFVRPGTHWSRAFIKWLKEDVVLLSSSRLSLDLLVKQVETIRQTLLDATKSIRRLAQTDRYRNNYELLMSIPGIGVSVAMCILTEIYDVKRFRNENQFASYLGLIPTCHSSGENTASGEKTFRGNKHLGPMIIEAAWIAIYRDYGLGMAYARYKQSMKPQEAIVKIARKMSNIIFSVLKNSRKYEPYRWDKE

SEQ ID NO: 473726 - protein, 419 aa, unidentified
MSFKVFRFNCCGLDVHKTWIYACIGITDSIGRTEYKQTRFSSFSKGLQELSDWLAKYHCSDVCMESTGKYWIPVFNILEKNNFFVTLSHPKYTKPRKGNKTDRKDAKWICDLYMCDMVRPSFIPPADIRHLRDLVRYRFKLTCMIVGEKNRAQNCLTVSNLKLDDVFSDVFGKSARSITEFMLTHPGELFDVTPFVDSRCKTPVEEIQAAVDGAISPEQAVKLRQCLSHIDELENHLKEIEREILRLSDKYQDALNLIRTVPGFDKNPMTAIQVLSEIGGDMSVFPTAKHLVSWAGCCPRNDQSNNKIKSTRISRAGTYFKPILVQVANALLRSRKHPEITDRYKRIKARRGHKKAIIAICRMLLTAIWHILSDLKPYTPEGFLESRPVNGSKVLTTSQALNLLKQRGYTIKDDVIPAS

SEQ ID NO: 473727 - protein, 318 aa, unidentified
MIEIITRTAGIDTGKDRLDVAIHDGGDPFTVENTPAGWQRLAAWLGDADVQRVGIEASGSYERGVARHLQGAGFAVVVLQPLQVRAFARLHLRRAKSDRIDALLIAACTHVLDPQATKVADPRLDALSDQLTFIEQVEADIARLKTRLEHIRDPRLRDIVTADIEHLRARRADELRRLIAALRSHADLALRFALVLSVPGIGERTALALVLRMPELGAVSREQAAALAGLAPFVQQSGRWEGERHIAGGRSRLRRSLYAAALPAAFRWNTALKALYQRLVDRGKPHQVALVACARKLLVFANTVVARGTPWSEKPIAA

SEQ ID NO: 473728 - protein, 484 aa, unidentified
MVWGFLKKTKNCMNNFRPGASLEPVGEVQNQQAANGRRSIKAMELHSGFVIERRRKAPTWSARLRMPDCHVCACPRTVCQTTKKKGIIMNSNQTSPAASQGRVVGLDLHPGVFSAAALAGRDAATACVEQSWDRRPIAELETWARTLEPGDLVVIEASGNTFSGVERLRAAGIKAVVLESQRAGQIRKSYCANDRTDAVKLARIYLSGLAHLVWEPDARTRERREVLHGHRKAVATTTRTRNRLKSFLSDHHVRLKKGVRLTQTSAAETVRASARWTALQTLLLDEMLTELQTAEARRRRLVAAMAQEVAADPALLRLMRLLGVRHIIAFAIAAVVGDITRFANPKKLVAYLGLAPNVGISGESIRARGELISFGRGDLRALLIQSAQNALQQKKSPWHAWGWKLCVRKSSKNVAVAAVARKFAVSIWYLLRGLFAPLTEIDATLQEKLSKLATAIGLKAIRRLGFESKAAFIEEKIGWLLKPT

SEQ ID NO: 473729 - protein, 413 aa, unidentified
METLVERCAGLDVHKDSVTACVRVPDSHAGRHAETRRFTTTTAGLGLLAEWLASFGVTRVGMESTGCYWKPVWQLLEGQVECWLLNAAHLHNVPGRKTDVADAAWIAQLVEHGLVRPSFVPPRPIRELRELTRYRKTQIQERSREVQRLDKVLQDAGIKLSSVATDVLGVSGRAMLEALVAGTHDPQVLAALAKGRLRSKLPALREALAGRFRTDHHGLLVAQILAHIDDLDEAIATLSARIQQVIAPFVEQVALLDTIPGIDQRAAEVILAEIGPDMGQFPTAAHLASWAGVCPGNNESAGKHRSGRTRKGSKWLGGCLSEVAKAASRTKGTYLNAQYHRLRGRRGPGKATMAVAHSILVIADHVLDQGVAYQELGDDYFQQRHSVEHHQRQLVRQLERLGHKVTLEPIEAA

SEQ ID NO: 473730 - protein, 322 aa, unidentified
MTQPIFFVGIDVAKAKFDVALLISEGKYRSKAFSNDPVGHQRFVDWLDQHRVLEAHICMEATGAYGRNLARFLAQQQILVSVVNPAQIHAFGKTELTRAKTDKADARLIARYCRMHRPTAWVPPSDEIVALQALVRRLEDLRALQNMESNRLESAEGPARTSVESVLEFITQQIQIVRLQIEIHIDNHPDLKKQQELLSSIPGIGDNTATTLLAFLSPLERFHSVKQVVAYAGLNPSIRQSGQWVGKTPIAKAGNALLRKALYLPAVVAKQHNPVLSAFCDRLLLNGKRPMQVVVAAMRKLLHLAFGVLKYGKPFDPKFGVA

SEQ ID NO: 473731 - protein, 316 aa, unidentified
MEHAAKEASFVGIDVSKDRLDIHVRPSGRAFAVARDGTGLDQLVDDLRHLAPALIVPEATGGFELTVAAALAGAALPLAVVNPRQIRDFARATGRLAKTDALDAQVIALFAERIRPEPRPIASADRQVLAELIARRRQVVEMIGMETNRLHQARNPRVQRMLRATLKTLKAQLAELDRDIDDTIKRSPVWQAADDLLTSVPGVGDVTSHTLIADLPELGQLDRRRIAALVGVAPINRDSGQMRGRRTIAGGRIDVRNVLFMATLTAIRWNPVISRHYQALVDRGRPKKVALVACMRRLLGILNAMIRSSTPWQCAA

SEQ ID NO: 473732 - protein, 385 aa, unidentified
MACSHPDTPAAEREPSTIVVAFELSRAKWLIGVCLPGSDKLSRYTIDAGDLGALTAVLAEARRKVAARCPGAVVAIASCYEAGYDGFWLHRWLREQGVHNEVVDPASIQVNRRARRAKTDRLDLEQLMRVLLAYRRGEPRVCSMVHVPSPEQEDAKRPVRERERLITERGAHTNRIKALLYGQGIGEVFPRRADFVDRLVGMRTADGRPLPPKLVTEIRREHERVCLLDRQVAALEADCAADEENALGAQEARIAQLEQLVGIGAISARLLVREVFYRTFDNRRQVGSYFGLTGTPYDSGQSRREQGIGKSGNARARTLAIELAWLWVRHQPQSALARWFVERVGTLKGRIRRISIVAVARKLMVALWRYLESGLVPQGARLRAA

SEQ ID NO: 473733 - protein, 344 aa, unidentified
MGEVITIGLDIAKSVFQVHGVDGLGAVVIRKRVSRARMLEFFAGLPRCLIGIEACPAAHHWARELQAIGHTVRLMPPSYVKAYLKRSKNDANDAAAICEAVTRPSMRFVAVKTKEQQAALMLHRARQLLVRQRTMLSNAIRGHLSELGIVSAKGRNGTGELLEIITDDAGRRIPLLARGILKVLAAQYSAIGAEIASISKSILVWHRSCEPSRRLEEIPGIGPIVATALVAEISDWKAFSSGRGLAAWIGLVPKQHTTGGKDKLGSITKQGNRYLRWLLVNGAMAVIRYAQKHGTKKHPWLGRLMARRPTKVAAVALANKIARMAWAIMTRGERYREPVLLLAA

SEQ ID NO: 473734 - protein, 362 aa, unidentified
MKIIGCDFHPSFQQIAMVDTETGEVTERRLSHADGEATRFYESLTGAVLVGVESSGNMRWFQRLLSRLGHELRIGDATAIRASNPRKQKTDKRDAQHILQLLLEKRFPAIWVPSMEELDLRQLLKHRHTLVQMRTRVKNQLQHIAMNEGFQKKRKLWTKEGMEFLQNLDLDVWTKRRRDDLLKILEELQGHIQQLSQAAEEEAEQRPLAKLLMTHPGVGPILGLATVLTLGNSQRFERGKNVASYVGLIPSEDSSGTRRRLGGISKQGNSFMRFLLVQAGMAAARKDPELGRFYQRLAHKKHHGVAKVAVARKLLVRLYWMLRTNTPYPEVVVRMRGSSSHSVAAAKAEPLSGHPASRTKKK

SEQ ID NO: 473735 - protein, 358 aa, unidentified
MKYIGCDFHPSFQQIAMLDKETGELVERRLLHTEEARGFYEELKGPVVVGVEASGNMNWFESLLAGCQHELWIGDAGAIARQEGRKQKHDRRAAALILKLMVENRFPKIWVPTVEERDLRQLLIHRQHLVRMRTRIKNQLQHIALNQGWQKKRKLWSKAGLELLRSLKLEPWTEQRRNTLLEMLEELEEKIKPLDQAVAQEAEQSEAARRLATHPGVGPVISLATVLTMGDVKRFSNSRSWVSYLGLNPSEQSSGQRRRLGSISKQGNPFLRYLLVEGAVSATRRDKSLARMYARLKAKKHHGVAKVAVARKLAVRLYWMARTEKSYPEVVRTQGSQSHPVAEVKAVRLSRPPASHQM

SEQ ID NO: 473736 - protein, 410 aa, unidentified
MDVVYPHCCGLDVHQREVVACVVIPGTDGPVQKTLRRFSTMTEGLEALAAWLREAGCVQVAMESTGVYGQPVWNVREEVGGVELLLVNARHARNVPGRKTDINDAEWLADLLRHGLVRGSYVPHREQRELRERTRYRTELIEERTAHVNRLQKTRETANIKLAAVATDILGKSGREILTHLVAGSTDASALAELARGKLRSKLPDLQRALTGRLRPHHRCLLAELLAMIDLLDERIDAVSAEITERERPFADDLARLDTIPGIGQRVAEIIVAERGPDLAKCRTPAQVASWAGLCPGHHESGGKRRKGKTRSGNAAIRRALVEAARAAARTRTSLRAQSYRLKQRRGSQRAAVAVARSIIRSIFVVLTRKSTYLDLGPDFFERRHAADTEQQLVRKLERLGYNVTLEKVA

SEQ ID NO: 473737 - protein, 340 aa, unidentified
MDITTLGIDIAKSVFQLHGIDADGAVVVQKKLRRGAVLNFLGNVGPCLIGMEACATSHYWAREIAALGHEVRLIPPVYVKPYVKRQKNDAADAEAICEAVTRPNMRFVPIKTEEQQSVLVLHRARDLLMRQRTMILNAIRGHLAEFGIIAAQGPRQVMGMIARLRDDGDASLPEIARSALLALGAHLEALAGEIRALERQLMVWHRADPTSQRLETIPGVGLITATALAASVSDPSVFKSGREFAAFLGLVPRQNSSGGKDRLGRISKMGDRYLRKLLVVGATSVIRRAGSNPTKTGAWVRSLMERKPARVVTVAMANKTARIAWAVMTRGEAYRASPIA

SEQ ID NO: 473738 - protein, 427 aa, unidentified
MEVIHPRCAGIDVSKKDAKVCVRIQGRGRKATSSTVTTWTSMTGSILALREHLLAERVTCVVIESTAAYWKPFYFLLDEALNVMLVNARHARNVPGRKTDVSDAAWLAELGAHGLVRASFVPPEPIRVLRDLSRARTTIAQARTKEIARLETLLEDAGIKLSSVACEITGVSGRAMLEALIEGQHDPGELADLAKRQLRKKIPALTEALQGRFTAHHGFMVRLYLDRIDAHEADIARLDARIEEAIGPFRAARELLVSIPGWSQVVADVFIAETGADMSVYPTAEHLASWVGVTPRANESAGRIKSAKTMPGNRHLKAALGVAALSASRSTNTYFGARFRRIAGRRPVRPGTKKSRRQSAAGQTAIVALEHKMLTCAWHMLVNGTFYQDPGPDYYTRHHPAQTKAKAIKQLQALGYDVTLQPHTDAA

SEQ ID NO: 473739 - protein, 321 aa, unidentified
MNSIIVGIDVSKETFDAAVLINNKVQTRKFNNNSEGFNKLVTWLKSRGTGHVCMEATGIYWKNLAKYLYDYGYKVSVVNPARIKGFAMSKLSRTKTDKADSVLIADFCKAMKPEAWYPQPLYIQELQQLVNRLNVLIKHKLFILAFHTFSYPKAIANNIQMHIEFLETQIKEIEQLINDHIKNNKDLHNKAMLLESIPGIGAKTQAVVLAFLADIEKFSSAKQVVAFVGLNPKHLQSGSSVRGASRISRTGNSDLRKSFYMPAMSALRHNCIIKQFSQRLSDTGKPKMLILIAAMRKLLHIIYGVLKHNSPFNPNVLINQK

SEQ ID NO: 473740 - protein, 418 aa, unidentified
MKMIKTKKVTAVNPQTLIVTIDIGKEINTGYCRYPDRSEIKPFEFRNNLAGFEKLWKTVVAAKLAKNLDETVIGFESTGAFGEPLQHFLKDKPVRLVQVNPLHTKKLKELQGNSPAKTDYKDPKVIADIIELGHGLTVIIPEGAAAELRRLTQARERAMKRRTALLNQIQDLVFISFPEFLQVMKGVKTKSSQYLLRHFTTAQDIVEHGLEALATTLKRISKGQLGRAKAQALYEGAMHSVGIREGCMAVILEIQEMLSSVEECNRLVALLEQEMSQRLSEIPYSHLILSMKGIGKVTAAGLIGEVGDFTKFDRSKELLKHAGLDLFEISSGKHKGNKRISKRGRPQLRKLLYFAALGTVRKGGVMHEHYQRHLQKGMKRMKALIAIARKLLCVIFALVRDRCEYLENYHPHQLQRAA

SEQ ID NO: 473741 - protein, 342 aa, unidentified
MTFVGCDLHTRMQQVAVLDTGTGAVSERRLDHDGMAVEEFYAALPRPVTVGIESTGYAVWFHALMQRLGHTLLVGDAAKMRAMVVRKTKTDRRDARHSLDLLRHDRFPTIWVPDPATRDLRALLTHRMRLVRIRTMVKNGLQAIALNSRLAWGSKLLRQAGLVQLQALALPPHTARRRDQSLELLAGLNTQIRELDDAITTAALAHPDAPRLITHPGVGALTALTTIVVLGPVTRFHDSKQVVSYVGLAPALNASADKYHLGHITKQGSPLLRFALGQAAAHAARMDPDLKRTYGALVHRRGRPKAKVAVTRKLLVRLFIMLRDQIDYDEFCRRGRSAPASA

SEQ ID NO: 473742 - protein, 400 aa, unidentified
MAVMIGVDPHKRSHTAVAIDRDDVQLAAIEVRASVRQVDELLGWAAGFADRTWAVEGAGGVGYLLAQQLVAAGERVLDVPATLAARVRVLGSGRSNKNDANDGYSIAVAASHAPRLEVVAPADHAAVLRLLAKRNRELGSSRTRTACRLHALLVELVPGGISKQITVNRAARVLAGVSPTDPVAATRHALALEHLEDLRHIEEQMRASKRRIADAVNASRTSTTDIFGIGPVGAAIAIGQTRAVSRFADRDHFAAYNGTAPIEVGSGGHSVHRLSRRGNRQLNHAIHMAAITQIRHAHSPGRGYYDRKLAEGKTKKEAIRALKRRISDALYQRLVADAATKTGPGGQTGTTRQASVTGLTPQQPALRNSHSRTRTERRTRPTATTTERTPRSRETSRTRT

SEQ ID NO: 473743 - protein, 397 aa, unidentified
MVNVGVDLHKTQFTVCVRKNGGLEYGKYPTTEDGYRAFLEEAAGWQQSGEEVRAGVESTGNTRYFKGRMEAAGIGVTVINTLKFKVVNESVNKTDKHDASTIAEFLEKDILPTSQLCSRESEQLRRLLKVRSTLVRAQVVIKNQIHALLTAEGIEDVKSAELQSKRGRKRVLDALQQWENGLVAQPLLETIDRLAENVKGIEEQLRALAGGDRMVELLMSIPGCGEISAWTIRAYTDDIRRFASAKKYAAYAGLVPWVQNSNETVRHGKITKRGPRELRTALVQVVMGLRRLKGKTLQWRLMQRYEAMKKSKIPGKVIIATARKIATVIWHMLTEDAEFDLGKMVDRKLAKKAEAMSESARQPKEAPTEKQVKLAAVQIGTKGVKKPGVVRKKIKVG

SEQ ID NO: 473744 - protein, 343 aa, unidentified
MPFYGAIDLHSNNNYRVVSDEKDQGVLRRRGPNLLESVLRDLEPFRSGLVGVAVESTYNWYWLVDGLMEAGYRVHLVNTAAVRPYEGIKHTNDWSDALWLAHLLRMGLLPEGYIYPAAQRPVRDLLRKRSQLVRQRTAQRLSLGNIVTRNTGVRVSRSQLQELTLAEVGKVLPQPQVALSADCSLQVARTLDQQIERIEQEVGKQLKLNAASHQTLKLLETVWGVGPVLGRTILLESGPVGRFAQVGDCSSYCRAVSSQAWSNGRQKGEHNAKCGNRYLAWAFVEAANYAARYYGPARAFVARKTAQTNRALAFKALANKLCRASYWVMKQQVGFEPTRLFGS

SEQ ID NO: 473745 - protein, 330 aa, unidentified
MKFKNIIGIDTGKSSIDFSFLENGEKKKIGIVENSVKKLELFFNDLKIDVKETLFCMEHTGIYNFHLLSVLQNHRANIWLENPIQIKRSMGMTRGKNDKIDAFRISKYAYLHQERAKLWQPTRLVIQNLKLLMSQRSRLNKAKKLIEIPVVESKEFIAKDQYKLLKQNCKSTLTGIKKDLALVTAQIKKIIESDDTLKELFKYVASVPNVGLITATAIIVSTNEFQKIDTARKFACHAGVAPFEYTSGSSVRGKTRISHLADKELKTVLHLATLSAISRPGELRDYFVRKVKEGKNKMLVINAIRNKLIHRVFACVRDQRKYFKKDLTFA

SEQ ID NO: 473746 - protein, 310 aa, unidentified
MANQYVGIDVAKATLDVAIGSDGELVQVENSEAGIARLLERLGEVAPELVVLEATGGYESVVAGAIVGRGIAVAVVNPRQVRDFAKATGVLAKTDRIDARVLARFAEAVRPEPRPLPTAEAKELEEYLSRRRQLVDMLTMEKNRQSIAATERMKKSLKKHVEWLEEALRRANDDIDKAIRNSPAWREQEDLLRSMPGIGPVSARTMLAELPELGRLNRKKIAALVGVAPLNRDSGTLQGSRTCWGGRASVRQVLYMAAVTAVRCNPVIRRTYAALRARGKKHKVALVACMRKLLTILTAMVRDQRRWSPS

SEQ ID NO: 473747 - protein, 345 aa, unidentified
MTIIGCDLHSRYQVVAWVNQETGEILTRRLEHEDGEAKRFYSGLPRGARVGIEATFPALWFERLLQECGHELWVGDAAKIRASETRKQKYDGRDAEHILDLLVASRFPRIWTPSPAERDLRQLLVHRMKLVRARTAVKNQLHALAMSQAVCRKHKLWTAKGRAELEGLTLLPWASQRRKALLGMLDQLDAAIQPLDQAVEKEAQSWEDAVRLMTHPGVGPVVSLAFVLTLGPVGRFPNSRKVVSYLGLNPRENSSGGRQRLGAISKQGSSMMRWLLVEGAHRAVVYDPELRRAYQRLKFRRASGVAKVAMARRLAVRLYWMLRARVDYAQLVRMSGSPSSAVVPK

SEQ ID NO: 473748 - protein, 397 aa, unidentified
MFYLGIDIAKHKHYASIIDSTGKPITKPFPFHNHKEGGQALLTWLYRYISSPTKLSIGMEATGHYWIAVYSFLLDHGFSVIVLNPLQTNAWRKGTEIRKRKTDAIDATMIADVIRFGRFLETPLVDEKMFALKQLSRFRNSLVRNISDLKRKALVVLDQTFPEYQSIFSNVFGKTSSQLLIEYTSPSDYERLSIDDLTLIIEQASRCRLGKKTANQLMELASNSFGVTFCKDAFSFQLKMLMEQIRFIETQLRECENQMSQLLSDLDTPITTIPGIGPILGATILSEIGDIGRFDKPSKLVAYAGIDATISQSGQYESTGMSMSKRGSSHLRRALFQAAITAYKHDPVLKAFYEKKRNQGKHYYVCIGAVARKLCYIVYAILKSNKPYKIPPFPCQR

SEQ ID NO: 473749 - protein, 338 aa, unidentified
MQISTVGVDLAKSVFQVHGVGAGGEVLVVKTLRRGQLLTFFSRLAPCLVGLEACGSSHHWARQIAALGHEVRLIPPAYVKAYVRRNKTDAADAAAICEAVGRPSMRFVTVKTPERQAVMSMHKARALLVTQRLRLSNAIRAHLAEYGVVAPVGRAGFQSLLVGLERGELEIPEALIIALRAMAEPLAGLTAAIAAVERQIRAWHFADRQSRNLQSAPGFGPLVASAVAASLTDPKAFRSARAFAASLGLTPRIDGTGGKVRLGHVSKRGDRYLRRLLVNGAQALLNSKNAKTDPWLARLLAEKSRKLAAIAVANKLARIAFAMISSGQPYRSPQPHTA

SEQ ID NO: 473750 - protein, 358 aa, unidentified
MNKSNNLDFSGTTIFCGLDVHLKSWRVNIRDQDMELRDFSQNPDPVALHHFLTKNYPNATYKVGYEAGFCGFGIQRELAALQIDCVVLNAADIPKSDKDKRQKNDKRDARAISEEIKNKKKAGIHVPAAAMEYARSLVRQRQRLVLDSTRQKCRIWHCLHFHGLELPQKADVGQYWSSQFIKKLENNPCNGDTWLKMNLQLMIKDHQQKRALILETTRGIRSLCRQEVFKDQIKLITGIPGIGEVNAAIILFEIEDINRFKSPDHLYSYAGLVPDTDDSGETKKSKGITHRQNCRLRNAIIESSWVIIRQDPAMLMLYKNYCKSMHKNKAIIRIGKHLLSRIRYVLKQQKPYVQAVLK

SEQ ID NO: 473751 - protein, 473 aa, unidentified
MARAARRPGARQYPKRRSSRGRSAPFEQMHLNAAGIDVGATEHWVAVPEDRDEEPVRRFGASTAALYVLAEWLRQCQIETVVMESTGVYWITLFEVLEERGFDVKLVDAHDARQVPGRKTDVKDCQWLQELHTYGLLRGAFRPEDQICVLRSYLRQRSMLVAMASRAVQHMQKALEQMNLKLTEVVSDINGKTGMEIIHAILAGERDPQRLASHRDRRCKHDQATIAKALEGHWRAEHLFALQQALEQYEFLQQQLQACEQQIEACLQTFVTHVEVEPPQPTPACKRRARQRQAPSFDVHQYLDAMTGVDLTQIDGIDALTALKVISEIGLDMTRWPTGKHFASWLGLCPGNKLSGGKRYRMRSKPTANRAASALRLAAQGLVNSHSALGAYYRRMRARLGAPKAITATAHKLARLVYSLLRYGTAYVDAGQQAYEQKYRDRVLTNLQRKARVLGYQLVHVEDTGRVQAAATL

SEQ ID NO: 473752 - protein, 353 aa, unidentified
MPSIYYIGLDVHKKTIAYCVKRQDGKVVKEGSVAATRPALREWSEGLGRPWVGAMEATIFTGWIYDFLSPWAEELKVAHPKMLKAIASAKKKNDRVDAAMIADLLRCDLLPECQMATREIRELKRVLRFRNLLVRQAVRMHNKTAGMLMEVGAEYDKKRLKGRRYFETFLGQVEDVPASVVEMLRMSRAAYELFQDGQRRLVRALKTHPELKERVELLTTIPGVGEITALTWALEIGDPALFRSHARVVSYCGLTSAERSSAGKERRGPLSKDRNKHLQTVLIEAAKLAPRWNAELAAVYEKEVARGNRNQATIAVARRLAAYLLAVDRRRTPFEAKTEGETEAKAKAARCAA

SEQ ID NO: 473753 - protein, 395 aa, unidentified
MQTAHAFDSTPAGDLLTVSLELAKRNWKLALQCDKQPRPAVHCAREESPAAQIEATVSLIEAKKRKWQLAEPVRVVVLYEAGQDGFWIYRALEQRGYEVVVADPASIPVERQARRAKTDRLDALRLLSCLRGWLRGERDRLRAIRVPTPEAEALRHMARERGQLQKEIGQHRDRISKELCTVGRSDIEVDASFAQRLEQGQIKCHDGAPLPEPLLERMRRECERLALARAQFRQLETILSKQLPEPVAQGVAALQRLRGIGPVSAQRLMLELFWRNFNNRREVGSCVGLVPQPYDSGQSRVDQGISKQGNRRVRALLIEMAWLWLKHQPHSKLAHWYYDRIGTNVQPDRGKRLRRIAVVAVARRLVIALWRYLKDGVVPEGATLGIERGARSRAA

SEQ ID NO: 473754 - protein, 313 aa, unidentified
MNNQEINVGIDTGKHQLDIYIRPLGEYFTVTNDAKGVKEAIKRIAPHHPTRIIIEATGRLETAFVCAAAKANLPVVIANTYHVHNFAVSTGKRAKTDKLDAKMIAHYGEALKPRLSDIKPDNIQQISDLLVRRAQLIDMRTMEKNRLSILPKALHRSIKKIINTLQKEVENIEGILDELMQETAQWQELKNILLSVKGVGKVLAYTLMSDLPELGQLNRKEIAALVGVAPMNRESGAYKGKRKIKGGRHRIRTVLFMSMLSAIQSNAKFKGIYTGMVAAGKPKKVAIVACMRRLITILNTMVKNNRQWDEKLV

SEQ ID NO: 473755 - protein, 377 aa, unidentified
MSNVRFIGLDVHAETIAVAVAEPKGEVRSLGIIPNRSDSIRKLVKKLGAPEQLRACYEAGPTGYVVYWELTSLGVCCEVIAPTLVPVKPGDRVKTDRRDAVKLARSYRAGDLTPVWVPDAAHEALRDLVRAREAAKKDQLRARPRLGKFLLRHGRRPPTTVKAWTQSYLAWAKSAVHFEHHAQEATLLDYLHEVEHAADRIVRLERAIDEAVRTAPARQRAVIDALQALRGIALISAVTIVAEVGALSRFVKPRQLMGYSGTVASEDSSGKRIRRGGITKTGNAHLRRIVGEAAWAYRHRPAVGPALRKRHALVDDAVKAIAWKAQHRLHSRYRMLTARGKTPQHAATAVGRELLGFIWAIGVHVEAREGHRKPVAA

SEQ ID NO: 473756 - protein, 346 aa, unidentified
MEQFIRCGIDIAKLVFQIHGVNAKSGETSMVKKLARNEVLRFYANKPPMLIGIEACGGAHYWARELTKLGHEVKLMTPQYVAPYRRGGKNDANDAEAICEALARPNMRFVAVKSESQQAVLVMHRMRDQWVRERTSLMNQIRSYLHEFGIVINQGRAALAKTLPMVAEEGSLPLLFRQSIADLANKLTDLETQITALNKRIEAWSKQDNTAKALLELCGVGSVTASAAVATAGDVSVFKNGRQFAAWLSLVPKQNSSGGKTVLGAITKRGDRYLRTLLVQGARTVMLAASRAKKSTQTTPMFDWIYKLQERRPNNVVAVAIAAKQARMLWAIMAKQQRQAQTGLAT

SEQ ID NO: 473757 - protein, 342 aa, unidentified
MKRELYIGVDVSKNWLDLAYYDGITVDWKQGHIRVDNKQTGFNQISKWLKKLGTDKDCVLFCMEYTGLYSQDFRVWLEKEGFLYGMVQPRKMHRFEPDLGEDERALDRIKTDEMDSFRIAMYCEKHSRKIKALPSKLPGEVYFKLKRLLAERKQYTKQSVLYKQQLNDISTYDTEESRKRKQIGLDLLSNQIRQTDEEIKKLLDNDPSMGKNYNLLCSIKGIGLVVALETIILTENFLAITNPRKYACYIGIAPAKKESGVSVRGGEHVSRKGFTQAKADLSIVCLSAIRWDPNIKSYWERKKADGKHTGIVMNAIKFKLVLRMFAVVKRQLPYVIIDNFKK

SEQ ID NO: 473758 - protein, 302 aa, unidentified
MAARPGGERMTLTNDRAGIKRLVGRLGELKPRLVVVEASGGLQRQVVAALWTAGIAVAAVNPSWVRNFAKGRGLRAKTDRKDAELLALYAERERPQVRPPADAETQALQELVMRREQLVEMLVAEEHRLTHALGPVRKELRHHISYLEGRLKQIAEDIDKTVRRSAGWRRKSEIVRSVPGFGKVFCSMVLAKVPELGALNRKQIGALVGVAPVPDDSGTRHGRRAIAGGRFEVRNKLYMCALVASRANPVLKEFYQRLVARGKPKKLALVAVMRKLIVTLNAMLKTNSMWRPPCLAVSVREN

SEQ ID NO: 473759 - protein, 364 aa, unidentified
MHYVNNTELSSHEETHRQFNGGRCAIKLGIDVHQDFYVVVEQVGGSNPKPPQRFQKEAFLHWAARLKQKSGAQVHGVYEACGFGFSLQRKLSALSINCYVVCPQKLDEQNKRVKTDGLDAKALCLKLDRFVQGNRDALAIVRVPSEEEEQARAIHRQREQLVKARKQLEAQGRSLMVNHGLEPVQNWWKPRTFAALQVSDWMKELLQNSQSILLGLQEKIAALTVQLQSAAAPNQPRGLGKMTSVIIDREIGDWNRFSNRRQIASYTGLCPGEYSSGNTRLQSCVTKHGNPRLRAALVELAWRLIRFQPNYHPVHKWRQILAKGALTTGAARKKAIVAVARQLAVDLWRIKTGRLKAEQLGLTI

SEQ ID NO: 473760 - protein, 347 aa, unidentified
MRVYIGVDFHARKQTISYLTTEDGEIQQLELDHEKEDVRAFYAQFRGQAVVVGFESSGYAAWFEELLEELGYETWIGHAGAIRQYARRRQKNDRRDADLILELMVAGDFPRLHRYSRESREVLQQLRYRQRLVKMRTMVINSLRYMVASRGVSLRGTLQSQRGQARLLQLALPETLAQQRDELCRLLVELQQKIVTVEEWLQQKAELDPQVQRLRTHPGIGLLTGLGLVATLELIERFANPRKVTAYVGFDPVEDSSGERRRMGSISKQGSRLLRLLLVEAGQVAARYDRELGCIYRRVAMRRGHATAKVAVGRRLLVRAFIMLRDEIDYAEFQRRGVAARSSRGSA

SEQ ID NO: 473761 - protein, 423 aa, unidentified
MGSDSQQAFTAFVGIDWADAKHDICVQVAASSRREFTCIAHEPAQVEAWACSLRERFGAPVAVAVELTKGPIVYALQKHDFIVLFPINPSTLARYRQAFRPSGAKDDPSDAELALDLLVCHPDKFAPLEPQSVPMRTLIHLVEQRRQLVNDKLRFTNRIGNALKQYYPQALAWFEQRDTTLFCDFIDRWPTLAQVKRAHRAGLERFFQNHNVRFANVIEERLRAIKAATALTAAEAVIGAYRLQVEILIEQLRTTLRAIERFDRQIAKLAPTLPDYALFSALPGAGPHLAPRLLAAFGEQRERFRSADELQRYSGVAPVTERSGKKNWVHWRWQCPTFLRQTFVEWSAQTINKSFWAGAFYRQHREQGSTHQAAVRALAYKWIRILYRCWQNHSAYDEVAYLKALQRRGSPLFKHIAAAAQTG

SEQ ID NO: 473762 - protein, 390 aa, unidentified
MVYVGIDVASQKHDFFIMNDLGEAYTTHSITIPNSNEGYKKLHNSIQEFCGATNDFKVRIGLESTGFYHKNIVSYLLSLDYEIMVINPILTNMYKKSKKVHIQKNDNIDSIYICMYLGDTRTVFKPYTIVSYHSDALKALSRERFSLVEELRLAKIGIYRLLVHVFPEYLKLFSNIYQGSALSILERYNNPDRLSKAHISTISSLIHGRCRVSAIDIINAAKNSIGIKDDCLYFELERAIIRLRYINSQIEEYNKEIKRYIELLNSPILSIPGISYITAGIILGEIGDISNFKNAESLISYSGLDVIIYESGKYKRTNLSISKKGSIYLRYALYQAARVCWISDPMFHNFYLKKQNENKHFYVILGHIEKKLVKVIYSVLKNNKPYSPHL

SEQ ID NO: 473763 - protein, 421 aa, unidentified
MNQLTDAGYTAYVGIDWAAAKHDICVQAAAGGAREFACISSQPEGIEAWAQDLYQRFGGPIAVALELSKGPIVSALQKYDFMVLYPINPSTLAKYRETFTPSGAKDDPTDAELAVDLITRHAERFSPLKPQSVNMRKLIGLVEQRDKFLGDRGRLVNRLGHALKQYYPQVLEWFNEHHTVVFCDFLTRWPTLTQVKRARKASLERFFKSHHVNSAELIEKRITAIKAAMPLTADPAVIEPHRLQVEILIEQLRITIRALQRFDDEIASTANKLPDYDLLFSPLPGAAQVLAPRLLAAFGEDRQRYPQADALQKYSGIAPVTKRSGKTTWVHWRWQCPTFVRQTFVDWAAQTINKSAWAGAYYRQQRAKGCSYQVAVRALAFKWIRILHRCWQDRTPYDESKYLEALRRKGSPLLKYLAEAA

SEQ ID NO: 473764 - protein, 339 aa, unidentified
MQLYAGIDLHASNNFIGVIDEKGTKVFKSKLPNHPEEILLTLGRFQEEMVGVVVESTFNWYWLVDLLNNAGYRVHLANPSAIQKYSGLKHSDDQHDAFWLAEMLRLGILPEGYIYPKEERPIRDLLRKRGHLVKLRTSLILSLQNIVARNRGVRLKVNDVKRLKENVVAPLLEENEDLAMAGMVSKDTIDFLTQKIREIERMVEGKLKLEDSYRYLLTIPGIGRVLSLTIMLETGPISRFPEVGDYVSYCRKVSSKWTSNEKAKGKGNKKNGNKYLAWAFSEAAELARRYDAQCRNWYNRKKQKTNFMVAHQALAHKLARAAYCIMKQEVPFMPEKLFA

SEQ ID NO: 473765 - protein, 340 aa, unidentified
MTIIIGIDPHKATHTAVAIGSDESELATVTIRATRQQTDKLLSWAEPFEERTWAIESAGGLGYLLAQQLVGAGEQVLDVPATLASRVRVLGSGRSNKNDPNDARSVAIAALRSPGLRAVSIADHAEVLRLLAKRNGDIGDHRTQVVCRLHALIAALEAGGIAKELNASDANGLLGSFEPSSPAEHTRHQLALELLADVRHLDGQLAESKQRIKVAVQASGTSLTEVFGIGPVIACALLGYTGDVSRFASRDQFAAYNGTAPIEVSSGGRVAHRLSRRGNRNINHAIHMVAICQIRHTHSEGRAYFDRKVAEGKTKREAIRSLKRQISNTVYRHLVLDAQR

SEQ ID NO: 473766 - protein, 400 aa, unidentified
MLSIGIDVSKGKSTVCGMKPGGEIVYAPFEVQHTREGMSELVSLLRSSGEEVRAVLESTGSYHCPVVAALLENGIFVSVINSLRMKRFCSQSIRKVKTDRIDAMQIALYGLAYWQELQPTRLPEDTYRELQLLARQYYQMTSMLIKAKVDFNAICDQVLPGMQELMSDHAGRHKLSDFVLRYRHTTHILEMGETRFRKDYCKWAEKKGYRNCERMAVLIFATAQNGIPVLPNAPSTQIVITEAIRVLHTVEASRDAILTQMQALAKTLPEYSLVREMPCIGDTLAPRLIAEIGDVRRFHSKRALIAYAGIDAPPYQSGKFCANNRHISKRGNRYLRKTGYEVMQSYVMHKPANDPIFMFIEKKRSEGKCGKLAMVAGLNKFLRVYYGKVTELYRSLPAIE

SEQ ID NO: 473767 - protein, 366 aa, unidentified
MRVGADLAKRVIQVHAVDAAGRRVVSRALKREQFMAWCAQLPAGCLVAMEACSSAHHWARKLRLLGLDARLIAAHFVSPYRMEGKSGKNDMTDAAAICEAASRPSMRFVPVKTCEQQGVMSLHRVREGLKEERTGCINQIRGVLAEFGLVFNKSPKVLRAVLADVIEDASNELSAMARRVLQRAFDHWRELDEHMRWCDRQVGQHVRSSPAARRAAKITGIGELGASACTAGVGDFHQFKGGHQLGAWLGLVPRQNSSGGKTSLGRITKRGDDYLRTLLIQGAKSAVMSAGKRDDPTSRWLVQLTARVGWQKACVAMANKNARILWAVMTRDEGFDARHVSDKPQAKKSAEERFVAPTTTMTLCPA

SEQ ID NO: 473768 - protein, 391 aa, unidentified
MIFVGIDVAKDKHDCFILNSEGTVLADVFTIANNRIGFETLLSRIQSCSQGESKIKVGLEATGHYSYNLLGFLLDSGLATYVINPLHTNLYRKSLSLRRTKTDRIDARTIAMMLMSDVDLKSYSNTAYHNEELKSLTRYRFDKVKERAKLKSSVARLVNILFPELEKLVSSLHIAVVYALLSNYPGASYIANANTEELAETLCTASKGRYTKSKTAEIQVAAGVSIGSKMPAKSMELKHTIALIRELDKEISEVESAIDKITFQMDSPIFTIPGIGRHMGAMILAEVGDFSNFASADKLLAYAGLSPSTYQSGQLQNCYAHMEKRGSRYLRYALFNAAKYVCLWCPTFSAYLEKKRSEGKHYNVAISHAAKKLVRLIFAMQRSGKAFLADY

SEQ ID NO: 473769 - protein, 370 aa, unidentified
MKKRITFVGLDTHKNSIEVALADDRRNSEVRLYGSIGGDLGSLDKMIRKLQTTGVELRFVYEAGPCGYEIYRHLRAKGLQCDVVAPSMVPKRSGDRIKTDRRDACNLARLYRAGELTAIYVPREDDEAMRDLVRGRQDAIHAQRKVRQQLGGFLLRHGFRYPGKCVWTVAHRRWLAGIRMPHPAQQIMLQEYIHSVEECTQRVHRLTEQILQLMHDWRMHPLVGALQALRGVAPVIAATAVAEIGPMDRFASPRQLMAYLGLVPSENSSGGSIRRGAITKTGNGHARRALIEAAQAYSHPARISRVILKRQEAVPEPIRQIAWKAQLRLCARFRKLTARGKSRNRVVTAIARELSGFMWAIAKQVPVPQT

SEQ ID NO: 473770 - protein, 409 aa, unidentified
MVCVGIDWSDTSHSVNILDRLGEKLDVFEIPHSQDGFESLHRHIMRRVSSPQDAPVAIETNNSLIVDFLSELGYTLYFLNPKQTDRFRDRHRMSRSKTDPFDAYVLADALRTDMHLFNSLSPLDEQSLTLRVLTRTREGAVGRKVAIQNELTAYLKRYYPVSLQLFVGIDNREAIGFLLAYPSCEQACRLSQAQIASVLAKEGVSRGIAAKHAAAAHTKLKQAQPRPSPAVGRAYPLAVVSLLRQFQAVLEEIQALEAQIRDVYKDHPNKDLIESLPGVAEVLGAVLAAEIGSDITRFCDIKTLKAFAGTSPVTQQSGQYRGVHFRRACNTHVRRALHLASQSAISQAGWAREVYDRLRAQGKTHGRALRAVANQLVEMLHVVLLRRAPYDESYHLRMRALHGRAIVQI

SEQ ID NO: 473771 - protein, 419 aa, unidentified
MDALLNNEYEVHIGLDWADSHHELCVALKGEKECRRMKLSADAMRMHECLTSLHIESGRGRIAVCFEQTGGSVVNALMMHDFIDLYPVNPIQVKNYRESFSPSGAKDDPADAQIMLELLCRHGDKLKCWKPDNEEARKLRLLCEARRRFVDERADWVNELRATLKLYYPQALTVANDNLCSEMFCAFLMKWPQFESFRDAPNQTVRRFLYGHNIRSKSRVEKIMKEKDESVVLTDDEAVVEPCILRIQALVRGIREHNKTVEAYNRKIRTLEAVMQDASLFQSLPGAGRCLAPRLLAAFGTDRSRFESAEDVNTYMGVAPVVERSGKKCWVHWRWSCPSFLRQTMVEFARTSIGQSRWAYAFYHDARQRKGKDHQAALRALAFKWVRIIYRCWQDRTPYNEEQYIRALKRKQSPLAKAL

SEQ ID NO: 473772 - protein, 338 aa, unidentified
MNVTHIGLDLAKNVFQVHGVDRDERVVAKRKLTRRQVHDYFEKLPSCRIGMEACAGAHYWAREFGRMGHEVKLIAPQFVKPYLKSQKNDANDAEAICEAVGQPNMRFVTAKSVAQQDMLAAHRIRSELVRQRTAKANQIRGLLAEYGVIVPVGINALRRVLPDIQEDAENGLSGLFRRLLEGLRADWVELDRRVDQLDGEIEAAAKEDETARRLQTVPGIGPITAMALAASVGDGRQFRRGRDRAAWLGLTPGQHSSGGKERLLGMSQRGDSYLRTLLIHGARGHPGRGQQGRPAQPLDYRSGGAAAQERGRRGLRGREAYKPPPRGCPPWPGGIALQ

SEQ ID NO: 473773 - protein, 376 aa, unidentified
MSNLRFIGLDVHAETIAVAVAEPGGEVRSLGVIPNRSEAIRKLVKKVGPAAQLRVCYEAGPTGYVVYWQLSELGVKCEVVAPTLVPVKAGDRVKTDRRDALKLARSYRAGDLTAVWVPDAAHEALRDLVRAREAAKKDQLRARHRLGKFLLRQGRRPATKMNAWTQKHLTWVKTVHFEHAAQEATLLDYLNEVEHVADRLERLERAIDDAVKSAPERMRTVIDALQALRGIAQVSAVTIVAEVGELSRFAKPRQLMGYSGAVASEDTSGKRTRRGGITKTGNAHLRRIVIEAAWAYQHRPGIGPALRKRQATVSPEVRQIAWKAQHRLNARYRHLTAKGKCRQEVVTAVGRELLGFIWAIGVKVEAQGRRQQSAAA

SEQ ID NO: 473774 - protein, 370 aa, unidentified
MTQPTPLFVGLDVHKDSIAVAHAQGQSADPPVFVGAIGTRQADLAKLIRRLQAKTSNLVFAYEAGPCGYTLYRDLTGQGFACHVVAPSLIPKKPGDKVKTDRRDAIELARLLRSGDLTRVYVPTVEDEAIRDLCRARDAARLTLKNAKLRLKGFLLRLGLHYVGRADWNAAHRRYLAKVVCPTPAQQIVFQETLGAVDEQVDRLGRLEAELREIGATWRLDPVVQALQALRGVQWLGAITVVAELGDLTRFDSPRQLGAFVGLIPSEYSSGPARRQGGITKAGNGRARRALIEAAWAYRHPAKVSQHIQTRIDTLPKPIQAIGWKAQVRLCKRFRRLTARGKHPNVAVTAIARELIAFMWAIAKEVTVTV

SEQ ID NO: 473775 - protein, 453 aa, unidentified
MAKKPPRDAKAHKAMLPVMRPDAGGIDIGATEIFVAVPVDRAAQNVRSFPTFTQDLYALADWLKECRVTTVAMESTGVYWIPLFQILEERGFEVYLVNARHVKNVPGRRTDVSDCQWLQFLHSVGLLRASYRPAQEVCAVRALLRHRESLVQMAATHVHHMQKALDQMNLQLHHVISDITGQTGLAIVDAILAGKREPGELAKLRNERIKASEEVIAKSLVGDYRPEHLFTLRQSLEAYRSYQKLIDSCDREIRHGLEKFQTPRQPDMPVGERPKKPSQSPSPNSLLGAELKRVFGIDLTKIPGVHVGIAQILFGEIGPDFRKFRSASAFASWMGLCPDNEISGGQVLWVGTRKVNCRAATALRMAAQSLHHSKSALGDFYRRMRAKLGAPKAITAAAHKLARIIFHLITTGQEFDDSRFAADQARHQKRQQAKLRAKAKAMGFELVPIVQPG

SEQ ID NO: 473776 - protein, 380 aa, unidentified
MRRVSGLDVHKDSVFLCLVDDDGVVFQSKYGVLTTELEQMAGVMMEYGVEEAAMESTSIYWMPVWRILEPYVALRLVNPFFIKQLPGKKSDVKDAEWIATCLQKELIKGSYVPDELIQQLRQYDRRIFDLSKDIVYKLTKLDAALQRCNIRISNYVSTTKGKAYQEIVRLISEGKTDSEELVKHIHGRTVNRIGKDVLVSALSGVISAADIDTIRQLREEVELAQRHKDECQAKMDAICEQYFPKQYANLQTIPGVQARSATAIIAEVGANMDAFQTAAHLVSWAGLKPRNEESAGKIKSRRVTHGNKYLRKTLIECSWSASKTHGCYYNRFSYIQCNVRHKNKMKVQVAIARKMLTAVWYILHDNVPYRDCMPDIVPAE

SEQ ID NO: 473777 - protein, 356 aa, unidentified
MVNSNKLDFTGQPIYIGMDVHNKSWSVSIHSAVCEHKTFTQPPDVDVLVNYLKRNFPGASYHSVYEAGYSGFWIHDQLRQKGVACTVVNPADVPTKDKERRTKRDRVDCRKLARSLRAGELEGIYVPCRTKLEDRSLVRTRQSMVRKQTRCKNQIKAILRFYGIDLGEDQTERCWSGKFLRALENIPMERASGGVALQIHLEELRHLRKLITTLGQEIRVLARTDEYAVQVRLLRTIPGISTLTAMILLTELQTILRFPSLDELAAYVGLIPDTQGSGEVEHTGEITKRRHGPLRASLIEASWVAVRKDPALMMAFQKSCQRMRKTRAIVKIARKLLNRVRFVLKNQRPYVVGIVQ

SEQ ID NO: 473778 - protein, 368 aa, unidentified
MDELITGFVGLDAHAESTAIGFAEAGRAPPRFIGTVGAKRSELMKALGRLGEPGSLLVVYEAGPCGYGLARELGALGYRCEVVAPSKIPKKAGERIKTDRRDALKLASLARAGELTSVTIPDERDEAIRDLTRARVDAVRARLKARQQLQALLLRHGRRYTGKTAWTAAHERQLASISFSHAAQSIAFTEYRQAVSECDTRVRRLSEALAHEVESWRMQPVVGAVMTLRGLDLVAATTVVAELGDLKRFARPRELMGYLGLVPSEHTTGAKRRLGAITKTGNGHVRRVLVEAAWNYRFPARVSRALQVRQEHQPKAIREIAWRAQLRLGHRYRRLKARGLPHNKVCVAIARELAGFIWDIGRHVGPNA

SEQ ID NO: 473779 - protein, 342 aa, unidentified
MQQSIYVGLDLGSSRCHQTIINADGSLRMSRSIPTNEQHLRFAFTALGDHVRVHLESGELSTWVSSIIKPMVAEVVVSHSRTLAWIGKDSNKDDSVDARKLAELLRLNRTHPVYYQTDIDRRLFKQLVTHHENLSREQARLKSKIKARLRTLGIIRFDARLFTKSGNTALLAEIKEPAIKLMLAQSFAVLNQLLDTENQAKQAMTAASKQFPEVRLLQTAPGVGIITACRFVAYLQIPHRFSNKRKLWRYCRLGITRRESNGKRLAHPRLDSAGVGSLKDVSRKVFEAARRTKKDNSFKRFFEQSLLNTKNPVHARLSTQRKILSTLRAMWLRMQPYDDTGT

SEQ ID NO: 473780 - protein, 344 aa, unidentified
MTNIQPKETAHEAKPDLFAGIDVGAEELILVIRKNGKPFDPQKFTNTPTDRARLVKKLVKLPGIVVCLEATGIYHFDLSLALHDAGVLLMVVNPKASHNFAKVLMKNSKTDAVDANTLAEYAARMDFVAWTRPSDEQIALRSFARRINALTGQKAAAKNHLHALNATSETPKAVIKDAKLAITQLEKRIDRLTAGALVLIGKHPELERILALLIGIKGIGQTSAIALMGELLLLPPDLSHREWVKFAGLDPRAFDSGKSVHKKTRISKAGNRHIRAALYFPALSAKQHDKHVKAYFQHLLDNGKTPLQGVCAVMRKMLHAIHGMLKHNEPFDNTRFYAIPEFTG

SEQ ID NO: 473781 - protein, 364 aa, unidentified
MNRVFIGMDVHKEKIVVVGLPEEGSHPVVREEFGGGDLPRLKKRIQTLSRSWEVESCYEAGPSGYGLARIFLEARISCRVVAPSLIPRRPGNRVKTDSRDAKELALALRADTLTFVRIPALEEEEAQGLIRCREDVARQVRLFKTTVSHWLLNRGQRVPVGVKRWAPAYWKWVRALPLSPMDRTTLDHYLDVVSLLENRRKQVEEQICALAKEDPYRERVKRLIVLRGFSPLAAMRLIAEVIEFKRFRSASSFMKFTGLTPSEYSSGERTRRGRITKAGNSHLRHVLVEAVQKAHFLPNPGRALLRRWQDVSGPLRQIAVDCMKQMHHKFLGLTQRGVPAGKTRVAMARGAGGVRLGTDDVSGG

SEQ ID NO: 473782 - protein, 331 aa, unidentified
MSVHVGLDVGSRTTVMQWRDQGRAAGSWDIAQTPQGRKAAVKKLKALKPLSVVMEATGIYYLDLALELSAAGLPVSVINPKSSRNFAKLVLQHSKTDTIDAQLLAEYGERMTPRLWTPPSPVQLELRAIGRHINRLICHCTRAKNELHALKATETTSVMMIEDEEEAIAMFGRRIERFRQAGREIIANCPTLQSQFDHMVVAPGMGDVSTFSVLAELTTLPETLKSPQVSRYAGLDVRLTQSGTSIDKPGRLSKGGNAYLRSAMFMPAMSAIRCDPYVKAFYEGLVGRGKRKMQAICAVMRKYLTGLWACMRSGEDFDTAKLFSEKHLLRA

SEQ ID NO: 473783 - protein, 386 aa, unidentified
MQIVADRPEAPTAIRTDLGAIFVSLELSRSTWLVTSLSPGGGEKMSKQVVRGGDVAGLLEHFARLREKALVRTGKVFPFVVIQEAGLDGFWIDRALQNEGIESHVVDPASIATSRRRRRAKTDGIDGEALVRALLAYKRGEPRVCAMVKAPTPEEEDRRRLCRERKVLIVERVQHVNRVKGLLFSQGISGYEPLRRDRRERLDTLQTGDGRRLPDHLKAQVRRELDRLELLLEQIKAVEAERDELLAAQRTAAPAAMLLDIKGIGPEFAAILWSEGLFRHFDNRRQVASYAGLAPTPWQSGSVDREQGVSKAGNRRLRTALIQLAWLWLRHQPQSALALWFEERVRRNGGRLKKTAIVALARKLLVALWKYVTAGVVIEGAVMKRT

SEQ ID NO: 473784 - protein, 347 aa, unidentified
MKEVSTIGIDLAKSVFQVHGADVAGRTVLQRRLRRCDVLTFFTKHPACLVGMEACGTAHHWARQLSALGHRVKLIAPKAVKGYIGRGKSDAIDAEAICEAVTRPRVREIAVKSIEQQSTLMLHRARDLLIRQRTQTINSLRSHMTELGVIAAVGDAGAAALVAIVENEADPRLPPAARVALKSLTATLASLRAQIESLDAAVLAAHTADATSQRLASIPGIGPLTASAIVATVGDARVFKSGRSFAAWLGLTPRISGTGGKTTLGPITKQGDRYLRRLLMQGATSALTRIRRQPARNPWAARLLDRMAFKPAAMALANKAARIVWALMVRGGTYSPGHQPAPFVATA

SEQ ID NO: 473785 - protein, 428 aa, unidentified
MASTTDPISPTTWVAIDVAKGVNVALIEHSDGKQQRLRFAHCREDYDRLVDLLGRLPAPCRVAIEPTADYHRTLAFCLLQNGFGVVFVSSVACARMREAAFNSWDKNDPKDAQVILRLLKLGMTQHYCDPLITQIHDLQELSKTYHHIAVARTRLQHILITHYLTLYFPEFERFWATQRNEWFIRFLIRFPTPASIRAVDFPSFREVVSDLMGRRVHKQAKIAEIYALAEHSIGLPVPEQSAAAATFRMQLERYLELCRARSELEQRAEQLLHDKTDYQQIRSIPGIGALTALVILAEAGDLRRFGHHRQFLKFCGLDLAKCQSGVSRSRERLSKRGNARLRCALWQAAMTAARMRENPFGEKYRRYVASAPNDADLKRKARTAVAAKMARVIHALVKSNCVYQPRFEFGLPSGSTPLNRAVEAFGTS

SEQ ID NO: 473786 - protein, 343 aa, unidentified
MNVFIGLDVSLASTAICVLGPQGKIVEELQAESEPEALVRAIGTLPFSIAAIGLEAGPLSQWLSKGMEEAGFDVVMMETRLVKAALKAMPIKTDRRDAQGIARLLQMGWYRPVHRKSVSSQEIRALLAARKSVQQAIINLELSMRGVLRNFGLKLGHVTRIRYEARVRELVEQNDILSASTEALLRARAQLRVELAELDAKIADLAKQDDVCRLMMTMPGVGRIVALTVKSAIDDPTRFVRSKDVGPWVGLTPRRTQSGEMDIVGQITRAGDRALRTALYQAAMILMHRGSPNWLQAWALRVAHRRGSKRALIALARRIGVVLHRMWRDGTPFRHAQSSPATV

SEQ ID NO: 473787 - protein, 372 aa, unidentified
MTKSNILFIGLDVHKESIEVAIAEDGIGGEVRHYGKIGGTIAAVDKLLRKLVSLGKTLHFCYEAGPTGYELYRHLTQKGHICIIIAPSLIPTKPGDKVKTDKRDAIQLARLFRAGELTPVYIPEREDEAIRDLSRAREDAMLIQKSARQRLKSFLLRHNIRYTGSARWSEKHLRWLADEVRLSNPVQQVVFQEYVNTVTEAALRMERILKEIHHYVKLWRMYPVVKALMAMRGVQMIVAVTMVSELGDITRFESPKQLMSYLGLTPSESSSGERQRRGGITKTGNRHARRILIEAAWAYRYLAKVTPEIQKRQEDVPYVVRTIAWKAQVRLCKRYRIMTKKDKPKNVITVSVARELAGFMWAVAQEIKIPEK

SEQ ID NO: 473788 - protein, 458 aa, unidentified
MARRQHSRQQPVERGQTSREVMHPNAAGIDVGAEFSYVAVPEGRAEQTVRRFACFTADLHALADWLQACGVDTVAMESTGVYWIPLFQVLESRGFEVFLVNARHVKNVPGRKTDVKDCQWLQQLHSFGLLAASFRPEDEICVLRSYWRHRDTLVRYAASHVQHMHKALEQMNVQLHKVISDVTGVTGLRILEAILAGERDPQQLVSLKDRRIRSSADTIAKALEGDWRDEHLFALRQALDGYRFYQQQIEACDQEVEAHLNTLETRAEGPPPWPQDGRPRAPKGNTPSFDLRSHLYRITGADFPQIDGIDVLTAQTIISEVGLDPSRFGTAKRFCSWLGICPDNRVTGGKVKSTHTRPVANRAAKAFRLAARSAGKTQSPIGAFYRRIKARKGAPEAITATAHKIARIFFHLWQHPQQFDLTQLERQQQQYEQRRLNSLRRAAKARGFQLVPLACVAG

SEQ ID NO: 473789 - protein, 339 aa, unidentified
MPGVELWPNAFGRALVAPTPLGGDAMASICETQVTIGVDPHPGSHTATAVSPLGEVLGSVTVSNNEEGRQDLRSWVRQHTSRRWAIEGAGNRYVARFVSELIEEGEQVYSIPPSMTAQYRSRRGRKKDDEVDAENAAKALLANPGISHYLPARYEQRLKELTRSYQRLSHQLKATRMAGKATDDPLLSQVTMKVTKALEEGLVELKREMEKTVRMVAPRLLEIRGVGPVVASVVLAEAGRITRFANRDHFVAFAGCAPIRWESGAHQTVRVNPGGNRRLNWAAHIMVISRLRIDEATKAYRDKKLGEGKTTKEALRALKRRISNAVYRRLVADAQQHSV

SEQ ID NO: 473790 - protein, 334 aa, unidentified
MNNVSLIGIDLGKNSFHVHCQDATGRALNRKKFTRTKLFEFLANSPSTTVVMEACAGAHYMARKISELGHTPKLISPQFVRPFVKSNKNDFVDAEAICEAASRPSMRFVAPRTESQQEILALHRVRESLVRDKVKTTNQMHAFLLEFGISMPKGLAMLRRLSVVLAENNLPPYLEKLLMKLQSHYLYLVEQIHDIEHELELAAKQDDTTQRLMSIPSVGPITASILMANLGNGQQYKRSRDFAAATGLVPKQFSTGGRPTLLGISKRGNKNLRRLLVQCARVFILHLEHQSGYLAEWVKNQLSKKHSCVVACALANKLARIAWAITTKQSTYMA

SEQ ID NO: 473791 - protein, 343 aa, unidentified
MQTITTIGLDLAKSVFQVHCVDANGQVVIRRQLKRRHVLAFFQKLPPCLVGIEACASSHHWSRELQAVGHTVRLMPPAYVKPYVKRQKNDMADAEAICEAVTRANMRFVPTKTPEQQSGLVLHRTRHLLIRQQTSVINAIRAHLAEFGVIAAVGRKGIEELLSVIADPSDKRVPDAVRACLAALGNQLLSLKKQILAFDRMILAWHRSNQTSKRLNCIPGVGPLLATALVANVADPKAFQSGRNFSAWIGLVPKQHSSGGRPRLGSISKQGDRYLRGLFVAGALAVIRYAKLHGTKYRPWVAALLERRPTKVAAIALANKLARMAWAMMAKGERYNYPASLRV

SEQ ID NO: 473792 - protein, 330 aa, unidentified
MSAPIEIPSAPQKTLQMMGVDVAKQKLDVSVDDTTTLTIDNHEESFKNLLKAIPDWGSVCVVMEATGGYERKLVAFLQAREIAVAVVNPKRVRDYAKAMGAYAKNDHIDADMIRHYAQTAYDKNRLQLSETLTEAARRRDSLLRRRNQLVGQRAIEKQHLESAADKDTVRSIKRIIKQLDKEIDKIETLIKADIDADDRLKKSMKQLMQVPGVGDVTVLTLLIQLPELGKLSNKEIAALVGVAPYARDSGKKTGRRAIFGGRMQIRSTLYMATLSATRFNKPIRIFYQRLLAQGKLKKVALVACMRKLLTMLNSMAKTGDEWNPDFAKQA

SEQ ID NO: 473793 - protein, 344 aa, unidentified
MIVLGADTHKSSHTVAGVDSATGQVLGDKTIGVGARGFAALLVWARGLGGERVWALEDCRHVSGALERFLIARGERVVRISTRLMAGTRRSSRERGKSDRIDAIAVARAALAAGIETLPTAALAGAELDLRLLVDHRERLVRTRVALNSTLQWNLHDLWPELTLPGGALFSKKWTIKIARRLARAEQTMRVRIARDELRRLRELTATIKALKAEITELVSAIAPQLVAEPGCGPLTAAKLVGEIAGADRFASDAKLARAAGIAPIPASSGRTDRHRLDRGGNRQINAAIHRIAVTRARCDPHTQDYIGRKKAEGKTNRDAIRCLKRHIARRVWQLLRAPAPSRP

SEQ ID NO: 473794 - protein, 344 aa, unidentified
MKNSNVIGIDLAKNVLQVCKVSKHGELITNKAMSPSKLKELLAASTPSIVAMEGSGSCHYWGRLAKEFGHEVRVINPKKVKAFLQGQKTDANDALAIAMAATQFGVRFSLVKSEEQQMLQTLETSRKFLDRELTALSNHIRAYLYEYGITMSKGRKSLRETVALVLDHLDTRLPLCLKNTLKLLWERYQLTLAQLKEAKAAKAAMVKQIEPCKRLLALESVGEVCAAMLYANIGDGKAFKNGREASACIGVTPKQHSSGGKTNMMGINKKGGNKELRAALYQGALSVISRLPDEPQTVKQAWLIELVKRAGVKRACIALANKTVRTAWALLATGESYQPVLLNK

SEQ ID NO: 473795 - protein, 395 aa, unidentified
MFIVGIDVAKRSHEVCMITSDGRTVQRPFSIRNNCTGYNLMLEKIRKHTNIKSQIVFAMESTAHYWLALFTRLRKDGYHVILLNPIQTSAMRDMFIRKIKTDAKDSFIIAELIRFGRYAESNVAQDRLLALKELCRNRFYLVDMAGDLNRKLIALIDRVFPEYEAQFDTIFCKSSVAVLKKYPTPQKLSNAHLDKLTELLWNSSNGHFGEWKARELKELARNSFGVEDCDGAYSTLILLMLDQIQSLSGKADALEKEISRLFQSFDTTVTTIPGVGPIIGAVILSEVGDISRFSSADKLAAYIGVDPSVNQSGEFQAAHAHMSKRGSPYLRRCIWMASQVAVQRDPMFRAYYEKKAAEGLKYMTIIGHVTRKMTTVIFAILRDHKVYEPVLPTAA

SEQ ID NO: 473796 - protein, 432 aa, unidentified
MEKMHFHAAGIDIGSRKVFVGLEDKPVRWFETFTSDLVALKDYLLENRVSTIAMEATGVYWYVLYDILLTAGLDVWLVDGRQTRQLPGRKTDVKDCQWIQQLHSYGLLNRCYVSEGLVKELRSYQRLREDHLRSAAMHVQHMQKALIEMNIRLPEVLSQVHGVSGMALITAILAGERDVQKLVSRCHASVREKKGEELRKALEGHYTTQGLFALGQALKAYQFYQAQILDCDRQIDSTLQKINKDKTFPPGTSTGKRKAIRHNKPNINGLGDHLLKIFGGRDATKLPGFTDYNWLQLYAEVGSDLSKWPSEKHFTSWLGLSPGQDRSGKKNKSKSKGKPTVGQIFKQMAHGLLNSKYIGWGAFARRLRGRKGPAIAIKATARKLAVQYWRLVVKGAEFVEKGMDAYQNILQEQKKRRLEKLALELNMNLMPA

SEQ ID NO: 473797 - protein, 363 aa, unidentified
MNEITRVGVDLAKQVIQVHAVDAAGNRVSGRALVRDKFTAWCAQLPPGCLVAMEASASAHHWARRLIGMGLDARIIAAHLVEPYRLQGKSGKNDANDAAAICEAASRPHMHFVPAKSVEQQSMLCIHRLREGFKTERTACINRIRGLLAEFGLVFAQKPTVLQQALPDVIEDASNEMATLARLALQRAWVQWQELNAHLAWCDERIGAHLKSNERVREAERLIGVGPVTASAVVATVGDFKQFKNGAQFGAWLGLVPRQHSSGGQSKLGSITKRGETYLRTLLIQGAKSAVMTAHRRDDPISKWACQLREKSGWQKAVVALANKNARILWAVFVRGKAFDAHHVSVKPGAVIKASPVMTATPA

SEQ ID NO: 473798 - protein, 418 aa, unidentified
MELIHPRCAGLDVSKGDAKVCVRIAGKGRGGTKRTVTTWSSMTNQVLALREHLIEARVTLVVMEATSDYWKPFYYLLEDGPFELMLVNARHVKNIPGRKSDVSDATWLAELGAHGLVRGSFVPPPPIRILRDLTRTRTLITRSRSSEVQRLEKLLEDAGIKLSCVATDITGVSSRAMLEAMIGGQHDPAVLADLAKRRMRSKIPALTEALTGRFSEHHGFLARLHLDLIDQHTTAIDELTARIEVVIAPFRHVRDLLITIPGISTGVADVVIAETGADMTRFPTAAHLASWAGTSPGSNESAGRVKSTHTRPGDPYLKGALGIAAMSVVRHPSTSGYLGAKFRRVASRRGPMKAIVAVEHATLIAIWNMITTDTTYHDPGADYFIQRNPAKARQRAIDQLTKMGYSVTLSPMESAVAQ

SEQ ID NO: 473799 - protein, 417 aa, unidentified
MSFPPGGFLIIREKGTSDVRFIGLDVHRSFAQVAVVEDGICRDEGQVGVKPEELREWAATLQPDDEVALEATTNSDAIAVLLHPLVARVVVSNPRKTRAIAEAKVKTDKVDARILAQLLAADFLPSTWVADERTRMLRRLVTRRMHLVRQRTRVKNQIHAILARNLVPTCPHSDLFGGVGRRWLAKQQVPVDEQRSIDALLRQLDFHGEELAEVDRDLAVEAIDDPVVARLMTVPGIDVAVALSIVAAVGDFSRFDDPNKLVSYLGLNPKVRQSGDSPAVHGRITKAGRAQARGMLTEAAFAASRAPGPLRAFYRRIKDRRGFQVATVATARKMTVLCWHLVTKDEDYAFARPGLMARKRRNLELAAGHPPQVAKRGAAYNYNNADFRRREREFVEQQERAYELTVSRWQRTRPGNG

SEQ ID NO: 473800 - protein, 313 aa, unidentified
MPSPMDFGVDVAKDTLQIASAQSPTELSLSNRRSSISAWLAKLPRGSRLAMEATGRHHLLLAELAHAAGMIVYVLNPCDLRHYARAVGLRGKTDRVDARLIARYLLREQAELHPYVPPTPVQREIDQLLRRRATLVNTKTRLQLSLRGMASYAAGLRRVLKRLEALIAKFDQRLRQLATHQADAQRRVESTLGIGPLLGVALTNTFERVPLHNGDAAVAFVGFDPRAKDSGQFKGRRRLSKRGPAELRRLLFNGARSASKTKLWRPLYQRYRNRGLSATEATVILARKLLRIAFSIYRHGTTFDPARLRSCLT

SEQ ID NO: 473801 - protein, 431 aa, unidentified
MWDSTKTNNAKTMKAWNEIKHYAGFDWAKDHHDVVILDGGGKIVAEFRFDHTAGGWEEFSKKLASFPDVAIAVETKHGAVIERLLERGCRVFPVHPRSAKAYRQRKVPSGNKTDRVDAWSLADALRLDGADWKPLSALDPLIKELRLLCRDEVALIRDRTALITQLRQALYDYYPAALEAFDDWTMPAAWSFVVSFPTPEALVKVGKRKWEKFLHAHKLGRPATYQRRLEIFARANKFAGWEATIRAKSQLAVARARQLQLLETQIAEYRREIRRLFAQHPDAKLFGSLPGAGEKIAPRLLAEIGEDRALFPDAQALQCLAGTAPVSYQSGQIHRVYLRRQCNKSLRNAVHLWANLSREFSPWADTYYTALRGKGKSHACALRALGQRWLKIVWKMWQTRASYDADLHARNQLKHGSWVLQLVNQPVVTKT

SEQ ID NO: 473802 - protein, 345 aa, unidentified
MEVTTVGLDLAKRVFQVHAVNAEGVVVLRKALRRGQMLPFFAKLPRCLIGIEACGTSHHWARELNRLGHDVRLMPPAYVKPYVKRGKTDASDAQAICEAVTRPTMRFVAVKSAEQQAALSLHRTRDLLVRQRTQLVNMIRGLLAEFGIVIPDGVERALGLARQIHTNEALPDVPATAQEVLNLLCGQVLDTHARVQAIDRSLLTLHRTNEVARRLASIPGIGPVGATALAASVADPNQFRSGREFAAWLGLTPLQNSSGGKERLGRISKMGDRYLRKLLVVGATALVRHARHKPDKADPRLLALLARKPVRVASVAMANKMARVVWAIMARGGTYQARHVPSLVG

SEQ ID NO: 473803 - protein, 437 aa, unidentified
MNKSNNGGTKMKYTQNEKILQVNEKALVIGADIASEIHYARAFDNRGIELGKLFKFSNDTEGFRTLMTWLVELKQKNQKQKIIVGMEPTGHYWFTLAQYLQEHGIKIVLVNPFHVKRSKEMDDNNPTKNDRKDPKTIAMLVKDGRYMEPYIPTGIYRELRTAMDTRWQIIKQLNTIRNRVKRWISIYFPEFPTVFGDWEGKAALIMLNEFPTPEQILEKGIEGIVARWHRDKIRAVGRKRATKLYEAAKNTVGIKEGLIAAKNDIAVLLEDYEHKMRQYEKTMAIVEGLILQIPGITEILKIKGIGLVMAAGFIAEVGDISRFNHSRQIQKLAGLNLKENSSGKHKGKTTITKRGRRRLRAFLFQGILPLVATNREFRELHHYYTTRAQNPLKKKQSLILLCCKIIRIFYALLTKRVAYDPQKMMNDIQRITLPKAS

SEQ ID NO: 473804 - protein, 358 aa, unidentified
MTMVGIEGMETKVEVILGVDTHLDFHVAVVLDHLGRRLGELSVPTTAKGYEKLLCWVEGFGPVRCAGIEGTSSYGAGVARYLKAQGIEVLEVERPKRRRRSSRRNAEKSDPLDAEGAARAVLAGETSGVPKSGEGRVEMIRALRAARRSAMKARTQAANQLQGLRVTAPEELHHRLRGLSTKELVAVAARFRLGDDPHDVAAATKFALRSVARRYKALSAEIAELDAQLDRMVRQAAPELVSLAGIGTDHAAALLIVAGDNPERLRSEASFASLCGVSPVEASSGKVVRHRLNRGGNRDANRALYMICLARMRRDRRTKEYVTRRSAEGKSKREIIRCLKRYVAREVYRVLVSLPVQC

SEQ ID NO: 473805 - protein, 415 aa, unidentified
MDVVYPRCAGLDVHKKTVVACVITPGGFSGWQRAVRTFGTMTADLLALSDWLSGYGCTHVAMESTGEYWRPVFNILEGNFEVLLVNAQHIKAVPGRKTDVKDAEWIAQLLQHGLLRASFIPPVAQRDLRDLTRERSNFIRERATLVNRVQKVLEGANIKLGSVATNVMGVSGRAMLEALAAGETNPELLANLAQGRLREKREQLSQALAGRVKAHHRFVLSELLCQIDSLDETIARFDMEIEAYCAPFEMAVVLLDTIPGVGRETAEVMVAEMGADMTPFPSADHLASWAGLVPGNHESAGKRLSAKTRKGNRTLCTALVQAAHGAAHTKDTYLAAQYHRLAARRGNKKAIIAVAHSILVIAYHMIQRQEPYRELGADYFDKRRPEATAKRLVKRLERLGFDVQLNRPVSVAATT

SEQ ID NO: 473806 - protein, 320 aa, unidentified
MLSTHPLYRRRAMTAVGIDVGKAGLDVAIDGVSGVARFRNDSTGRRALLRQLLSLDSPLIVVEATGGYEDPLLDACGDAGLRIARINPRQSRDFARATGELAKTDAIDAKLLCLFARLFGDRLRIHQPPPLWQRELRDWLRRRGQVVITLQAQKQQADVAPPSVRKLIARTVAALQRELDAIELAMRALVNANVSSALRSTKGMGPMFQATSLAMLPELGTLTRQQIAKLVGVAPMNRDSGQTLGKRRIRGGRAPVRVALYMATLSAVRWDPVMKAHYRQLRERGKVAKVALVACMRKLLTIANARRRDELRQSAEIAPA

SEQ ID NO: 473807 - protein, 477 aa, unidentified
MQEKRHIGLDLGVKSKSKVYIIDQAGEKVRPEFSIWTNPQGLDYMMEQALKGAFKDILLDLTMEPTNVAWFGAAVYVRKKYPQVSIYRVKSEKAQDLRKFYRKHTKTDSLDAKTLATMPIVDSNSLEELYIRPKNMLALNTRCKQRARLVKEATSKRNSICDQIELGFPHLVDCFSSKFTTPFVRLCERYVNPFKVKRLGKKNLLKVLIKLGFRKDVSSLAENIYQRTEEACILFTDEDNVIDYDDLQDRISSELKIFKALQKEIDKVTKKEQDLYEKCFPNKRLNSIPGIADVLGAVIGSTIGNSDRFSSARSLVGYLGYYPRENSSGLSSKKGLRMTKAGPNIAKGSLYLTANTARLIDPQLGKVYYEQMVVHGNPHTKAVCRVATALIPRILRVMKENRNYVIYDLEGNPISRKEGRKIVKELFFVPEEVRQRLSNRKRMPLNKKGRTKPQYTRGSKAPQIRVDSSRRIVLSLS

SEQ ID NO: 473808 - protein, 338 aa, unidentified
MELYAAIDLHSNNSVLVVTDAEDHVVFAKRLSNDLQLIVAALRACPGDVRAVAVESTYNWYWLVDGLREAGFEVRLVNTAAVKQYDGLKRGDDFSDAKHLAQLLRLGILPQGYICPAELRAVRDLMRKRAQLVRQRSTQILSIHCLLARNLAKSVKGDDIKKLADADIDALGLLEDQKRALRANVAVMRCLEEQVRLLERAILAKGRLRAEFHALKTVSGIGDVLALTIALETGDIRRFASAGKFASYARMVDSRRESNGKIKGVGNRKCGNKHLSWAFIEAAQCAIRYDASVRRFYQRKRAKGLAVIAVKAVAHKLARACYHIMRDGVPYDGTRAFA

SEQ ID NO: 473809 - protein, 346 aa, unidentified
MIIIGCDYHPSWQQVCWLDQESGETAEQKLVHASGDAEKFYKQLPAPALIGMEATGNCQWFVEMVTAAGHQVWIGDAAKIRANDVRQQKHDKRDAALLLKLLREGRFPRIWTPSSEQRDMRQLLIHRYKLVRLRAQAKNELQHLAMNQGVQKKRRLWSKAGQELLRELPLQPWASRRREDLLKVMALLDAQILSLDMAVKQAAETDANARLLMTQPGVGPITSLAFVLTIGDVRRFQRGKQVASYLGLIPREYSSGGHQRLGSISKQGNRFMRMLLVEAAQIAVRCDPRMRAEYLHRCHSKPKGVAKVAAARKLALRLYWMLRTQKRYPEIVAIESSSRVALAGAS

SEQ ID NO: 473810 - protein, 400 aa, unidentified
MAVMIGIDPHKGSHTAVAVGAAEEPLGTLRVRACPDQAGTLVAWARAWPERTWAVEGARGLGGLLAQQLVAAGERVLDVQPKLAARVRLLHTGNTSKNDPNDARSVAVAALRSMARQEVVIADGHARVLKMWANRHRDLSRARNQAVCRLLAVLCDLIPGGVPEEITAGQAARLLGQISPSGPVAQARCELAAELLADIRHLDARRREARTKLAAAVKASGTSLTEVFGVGPVIAATVIGDVVTVARFPTRDHFAACNGTAPAGVSSGERKIYRLSLRGNRRLNHAIHMAAITQIRHKHSDGRAYYERKIAQGKTHKEALRRLKRRISDAIYARLRADARIAGPGGQPGNHSVSRAAGSHPERQLFGQATPGPQTTLRATAAPTPAMPPEPPADNTRQAT

SEQ ID NO: 473811 - protein, 420 aa, unidentified
MPHEQASEWYVGFDWASEKHRVCLLDRAGRVVGERDVAHDGAALTDLCEWLIDKSCAEPARIAIAIEMPHGPIVEMLLERGFAVYAINPKQMDRFRDRFTVAGAKDDSRDSRVLGDSLRTDRRAFRRLCPDEPLVVELREWSRMADDLKQERNRLANRVREQLWRYYPQMLKLADDLAADWFLALWECVPTPAKAAEARGAAIARILKAHRIRRFNAAEVLRILREKPLAVAPGAVEAATAHIGAVAERIELVNRQLNTAQRQLDELCARLEQPSEGEPGQKSEQRDVAILRSFPGIGRINLATLLAEAWQPLQRREYSVLRAMSGTAPVTRRSGKACIVLRRLACNKRLERAVYHWARVAVQHDPRSRAKYAELRRRGHSHGRALRSVGDRLLFLACTLLQRQILFDPDYKRADVAAAA

SEQ ID NO: 473812 - protein, 330 aa, unidentified
MTNANVRESRLPPLEFVGVDMAQQAFEWTLHGVRGTHSARNDDSGFEAVREALKRRNVGLIVVEATGGLERALAGYLLRHGLPVAVVNPRAAREFARSMGHLAKTDAIDAVALAHLAQTLAAKADQAGVRLTPPSAEVELLQAMVARRVQLLGMRTAEKNRLGGAVRVLHKSIEAVIKTLDKEIAKLDRDIDTHLQQHFTEQAQRFDAIKGLGMATCAAVLAFMPELGTISGARAAKLAGLAPLNNDSGKERGKRHIWGGRSIVRSALHMATLSAVRFNPVIKAFYDRLLAAGKPKKVALTACSHKLLRILNAMARTGQPWNEELHVVAP

SEQ ID NO: 473813 - protein, 407 aa, unidentified
MEVIYPRCAGLDVHKQTVVACVRIAGDGPPLQEVRTFATTTSGLLALADWLDSFGVEHVGMEATGVYWKPVWHILEGHFELVLANAAHVKNVPGRKTDVNDAMWLADLLAHGLIRASFVPPTAVQELRTLTRTRKQFVRERSAHVQRIEKVLEDANLKLSVVLSDIMGKSGRAVLQAIIDGHEDPKRLASCVSMRVKASSAEVLEALRGHISAHHRFMLKLHLGHVDALDKAIAEIEKEVGLGLEPFRQAAKLLSTMPGLSDVSAHVIVAEIGIDMSRFPTPGHLLSWACMCPRNDESAGKRRSTRLRRGGKWLKTTLVQAAWSAVKVKGSYLQAQFHRLRARRGAKKAIIGVAASMLTAAWHMLRNGTEWHDLGAAHFDRADAHKTALRLIRRLQQIGYAVQVTPA

SEQ ID NO: 473814 - protein, 370 aa, unidentified
MAKSTPLFVGLDVHKDSIAVAHATGGRSEAPVFVGAIGTRQADLDKLIRRLQGKTSALRFAYEAGPSGYGLYRYLTGKGLACDVVAPSLIPRRPGDKVKTDRRDAVELARLLRSGDLTAVYVPTVDDEAIRDLCRARDAARVTLKDAKLRLKAFLLRLGLHYVGRADWNAAHKRYLAKVVCPTPAQQIVFQEGVRAVDEQVDRLQRIEAELQDLAPRWHRYPVVEALQALRGVQWVVALTVVAELGDLTRFDNPRQLAAFVGLVPSEYSSGSARRQGGITKAGNGRARRVLVEAAWAYRYPAKVSLHIQQRIDRLPKSLQDLGWKAQVRLCKRYRRLVARGKHPNVVVTAIARELIAFMWAIARAMPTRA

SEQ ID NO: 473815 - protein, 421 aa, unidentified
MNKRIYRATHVKQVNWRKAIQNTAGKALVLAIDVAKEEQFAMLMDAESQPQITVKWRHPVETPELLKHLATLASEQLEVAMEPTGIYGDTLRRQLALAGYRTYQVSAKRVSDAKEIYDGVPSLHDVKAAYLIGRLYWSGVGQAWQESSAQQREFKALCNRYELHNEHYGRNRNRVEAMLQRHWPEAPTYLALDSVTLEYLLIRYGCPQALVRDSVAAATLMRKVSCGKLAPEKIHGLLEDSRHSIGIPCVEEEQRYLQQLGEELRRSRLHQKAVRKQLQVLIDADEQLKAMSAVVGPLTTAMLLSNRLDPRHYGNAGAYRKGMGLNLKEKSSGKFKGQLKLTKRGSGQVRKYLFFSCLRLINHDPIVQRWYQAKVQANGNRGKLRYVVALMRKLACALWHVGHGEAFDARKLFTVKPVVSA

SEQ ID NO: 473816 - protein, 416 aa, unidentified
MFAVGVDVANGRSMVAVLDGMRNMVAKPFEVVHTAQGFAALVEKLRQLDGEVRIVMEHTGRYYESFAMTMHRAGFFVSAVNPLLIKNYQGSINVRKVKTDKADAQKIAQFALDKWTILPHYTPMDTIRYNLKTLHRQFQLASKTKTALSNNLIALLEQSYPGANRYFDSPVRTDGRQKWVDFVDTFWHVDCVARSSEHAFVERYRKWCKRHGYVFSEQKAIQLHADARQKIPLVPKSDTCKLLVREAVSQLNAVSRTVETYRAEMDRLASQLPEYETVMGMTGVGKSMGPQLMAEIGDLRCFAHQKSLVGFAGTDPIKEESGDKVSQSAPSSKRGSPYLRKTLFVIMTILLQLQPQEDPVYQFLDKKRSEGKPYYVYMTAGGTKFLRVYYGKVRDCLKAKGLWEVPASASQEVNPG

SEQ ID NO: 473817 - protein, 343 aa, unidentified
MDYYVGLDVSLKQTSICVVNQAGSIVHEGVADSDPEAIASFVRSKAPGTLRIGIETGPTTTWLWTELKRLGLPVICIDARHAKAVLKMQINKSDRNDAAGIARIMQTGWFKEVRVKDLDSHAVKALLASRALLVKIKRDLENQIRGLLKNLGLVIGRAKFNVFAVRAEELIEGRPELIAAIRPLLEARNAVEQQVSELDRKVMKLARHDAQVRRFMTAPGVGPITALAFKATIDDPARFARSRSVGAYVGLTSRRHASGEVDWTGRISKCGDAMLRSYLFEAAGVLLTRVPKWSAVKAWGIRLAKRNGLRKAKVAVARKLAVILHRMWIEGTEFNWSTKEIAA

SEQ ID NO: 473818 - protein, 344 aa, unidentified
MVGVDTHKEIHVAAAVDWQGTLVGEECFPTTRQGYRRFESWAKSLGDVLRVGIECSGSYGSGLARHLAKNGFVVLEVTFPDKTVRRKRGKDDFIDAEMAAEAAFTGARTVTPKSRDGMVEALRMLQKTRSTAVAARRVALQMIRADVISAPEELRDQLRGMTRMQLIRHLVATRPDSTDFRTPTGAAKIALKRLAKRYVDLDDEISELDDMIAAILADAAPLLVQLKCVGAQSAAQLMVTAGDNPERLKSEASFAMLCGVAPVPVSSGMTYRHRLNRGGDRQANSAIHIIAIGRLRTDERTKEYVAKKMAEGHTKMEAIRCLKRYIAREVYYAIKKQRELVNCS

SEQ ID NO: 473819 - protein, 343 aa, unidentified
MPIVGGMDIHRKQITFDYLDVVTGEVQRGQISPADRAHLRAWLKRFAGVPDVAFAFEACTGWRYVAEELAATGVQAHLAEPADTAAARGRKKRAKTDRADAKLMRELLAGGRLPECWIPPSQVLECRALLETYHALRREHTAWVQRAHAVVFHQGAPVFHALGEADGPAQLAALARARLSPAGQQQIGLYLRMLEVTETELDVLRGQLTATARRLAGAKALQDNLYGAGPVTALALTCWLGGKDRFSSARKAVRFTGLDITVYSSDGKRSPGHLSRQGPPVLRWCAYEAGKAHARGSAPDHRYYEQVKDRKDGKRAALSEARKIIRQACHLLAGLGDDAFTTV

SEQ ID NO: 473820 - protein, 342 aa, unidentified
MNQVNQSIGIDVSKDAIMCCIGTLESGQHCFSKSKSFPNTPKGFEALLEWSTPGKTSAVFVMEATGVYYENLAYWLDSQGYQLSVLLPNKMKHYAKSLNVKTKTDAVDAQVLSRVGLERTLHYWHMPSAMMREIKFLSREYRETKAKLVVIKNQLHAKKHSFACPLSVEKRLIGQMALLETQLLEIESELRAAAISDPQFYDRVTRLNTIPGISFITIITILAETNAFALIKNAKQLASYAGLDVEHRQSGAKEGKTKISKKGNRFIRNALYMPALCATKHNPHMKPFYTRLCERKPAKKVAVTAVARKLLVLTFTLWKNNQEFIENYTEESRQALKPAYTG

SEQ ID NO: 473821 - protein, 367 aa, unidentified
MEKSSTAFIGMDVHKESIEIAIADQREARHYGRVSGDAAAVDKAVRRLRSVHKHPVFVYEAGPCGFWIYRRLKAQGLECMVVSPSNTPRNAADRVKTDRRDALKLARLARAGELEPIYVPDAADEAMRDLVRTREDAVSMQRQARQRLQALLLRNEIRYVGRSSWTAAHRRWISGLKLPQPAQQIAFEEYVQAVEEAQRRLERLGEAILAQLAHWRWRPVVRALQALRGVSEIHAVRIVAELGDFQRFDSPRKLMAYLGLIPSEDSSGARRRQGSITKAGNSSARRAMVEAAQAYAHPARVSWVIARRQTGLARSVTDIAWKAQLRLCARFRKLSARRLPRNKVIVAVARELSGFVWAIARQLKPLS

SEQ ID NO: 473822 - protein, 343 aa, unidentified
MTVIIGVDPHKATHTAVAVDQAEQELDRVLVRATRRQLEQLQRWAQPFGDRVWAIESAGGLGYLLAQQLIGAGERVVDVPATLASRVRLLGTGRSDTNDPNDARSVAIAALRAPRLAEVQPADHAAVLRLLAKRNLDLSRERNRTANRLHVVLCELVPGGIAKELTVSRAVSLLETVEPAIAVDQARYEMARELLDDVRRLDAKKKEMNHRIASAVDASGTTVTEVFCAGPVVACLVLGYTGDVTRFRDRHHFAAYNGTAPVEMSSAGRRVHRLSRRGNRVLNYAVHIVAVGQIRQAHSEGRAFYDRKVKEGKTKREALRALKRRISDAIYRQLVIDAARTHS

SEQ ID NO: 473823 - protein, 313 aa, unidentified
MSTHQIFVGIDVSKETLDIAVRPTGEQWQLANAEADFPALVDRLQGLAPTLIVLESTGGWERPVAMALLTAALPTAVVNPRRPRHFAQATGELAKTDELDAHNLAHFAEAIRPEPDTLLDPTATALQATVKRRQQLIKMRTAERNRLSTVPDPDLRASLQRHIAWLSTELEALETRLLEQLAVNPAWQAQVELLSSVPGVGQITAITLIARLPELGQVNRKAIAALVGVAPFNRDSGYRHGTRTTWGGRADVRAALYMATVAGLRWNPKIKAFYERLLQAGKRKKVALVACMRKLLVILNTMMKDGTAWDPAK

SEQ ID NO: 473824 - protein, 350 aa, unidentified
MHATTVAIDLAKDVFELAYADADHRIVARKRLSRRAFARALDNQGPLRLVMEACGSAHYWARRFVSQGHTLRLLPARDVRPYVRRNKTDRTDAAGLLEADRCAQIDAVPIKSPEQQGVQALHRIREQWKAQRTATINLLRGVLREFGIVIPLGAAKVRPAVLAALEDGDNELPMVLRHTLCETLDRLAELTRAMNAIEQQLQAYAHADPVCQRYQQAPGKGVLTATALRASAGPLERFRSGRHLAAWMGLAPREHSSGNQRRLGRISKRGDGYLRMLLIHGARATLRAARVREQHQQSLNRLQIWALTLQQRVGHNKAAVALANKLARRLWAMEHHHVAFDANHISVRPE

SEQ ID NO: 473825 - protein, 328 aa, unidentified
MQAASDVARQFIVGVDVAKAKVDVALVLPQGKWRNKVVANSAAGFEELRAWLAKHGVDHAHVCMEATGVYWERLAEYLGDHGFEVSVVNPAQIKAYGGAMGVRTKTDRVDAKVIAQFCADRSPTVWRLPSKAVRRLRALVARRQALLDLRTEETNRLEVTATEEVRQSIEEVVAHLDKQIKQIEKQIANDVDQDPTLRQQRELLDSIPGLGDKSIAMFLGHYGGELRFGKTRQAVAFAGLDTQKHESGSSVHGKPRISKKGHSSIRRALYMPAVVVMTKTAWGKTFASRLLAAGKPKMLILAALMRKLVTIAYAVLKSGKPFNPALHA

SEQ ID NO: 473826 - protein, 299 aa, unidentified
MIVVGVDVHKQSLTAVAVDELGRTVAARSGPVDAEILEWARTLGADRLWALEDCRHVTRTLERTLLRAGERLVRVPPRLTAPQRRRSRTRGKSDAIDALAIARAALQEPGLEGPREDEEPLHELKLLVDHRDDLVDERRRAQQRLRWHLHELDPALHVPLGALDRTIWLDRLSRKLSRREQTVQLSIARELVGRCRLLTRAILALDRELQQRTQTLAPTLTQLPGCGPVSAAKLLGEIGPIDRFRSDAQLARHAGVAPLDASSGKHQRHRLDRGGNRQLNCALHRIAITQGRIHAPARA

SEQ ID NO: 473827 - protein, 401 aa, unidentified
MIDKEAPILAFDVSKGSSHCQGYCSFGKPSSKPVKAAHSRSGMAAAEEISEALERETGRKPKVVMESTGVYSKPVIRWAESRGMEVYLVSPLESAKVRKSRVRPTKTDALDCGVIAEVAYTRDVRKLAAASSLYSQAYSLSRRRAAVVDRLVASKNQYRKSLDAVWPLLDEACDPFSGYAMWAVRRYRHPERLAKAKEGSIVSGLERAKARTGPISKAAIASKLSAYAKGAMSGCPADGGEVDSLISALDDVIGDMRALDETTSRLLGLAKELPHFALIASIDGIGDALAALICAEIGDPSRFASRNGIVAYAGLDPTILQSGRNDGLHYSITRKGNAFLRKYLYLAVENMIMSKADNAITRFYSKKKSSGLCHKAAATAACRKLLVSIWGMLRSGSLFER

SEQ ID NO: 473828 - protein, 395 aa, unidentified
MQTLFVGIDVSKDSFSVAGLDAQGGTAFSLTAGMSRSGFSELFKAISSHSVALSDVVVAMESSGCYHLNLFSFLSSKGLRTLVINPLVIANFSRLSLRKTKTDRKDAFTIARFILSHRDSVEQFTILQAHQDLKDLAREREFTLKMISSIKNEIKRLLQSTFPELEHLGNVFSDTMLQFLSVFPSARLIRMAEPQAIRHAFEQRDKRKRISVPPETIRRAARDSIAAVSPAKEMILPGKIETLLHLEERLAQLTKMLVKLCETTMQEDLKILTSIHGINNITAAPFLAEMGDWRGFRSYKQLIAFAGIDPSIHQSGTIQGVSRLSKRGNRHLRRLIWLMTFCAIRMEGPFKAYFTRRKTEGLPFRKALFATAHKLVRVIFSMLNNRTCFVAQPTA

SEQ ID NO: 473829 - protein, 322 aa, unidentified
MRYIGIDVSKATFVVAYSSDKGGEIRTFNNTTTGIKQFIGALPKDSSIHCVMEATGNYSAMLLYLLNVAGIAVSMENPLKIKNFARAMLSTVKTDKIDARLIALYGEKMNPQPFKIQGEAILRLRQKRTVIRQLTKQITAMSNLRGSLACLPVPDKGATHTVDETIEFLEKRRDRLQSELTDLVEVEFSRQLALLTTIKGIGITLATALIITTGGFTYFQNAKQVSRYLGICPTYEQSGTSVNIRGHINRTGDAYTRALLYVAAWTASRFNTKCGETYTRLRQNGKPGKLAMIAVANKLVRQAFAVVTHDREYVDGFVSNRP

SEQ ID NO: 473830 - protein, 349 aa, unidentified
MNKILKQVVGIDVAQKELVVYFGQLNAELGVEMKAYKTFANTLNGFGKLVTWAWKLKDPETAVRFVMEATGVYHESLAYFLDTEAQIVSVVLPNKIANYQKTLEIKTVTDKTAAETICRFGLERQLDSWKRPKKIFKMMMQLCRERDQIVVERTVSKNQLHAERSEAEPHQRSIFRAGERITLFDRQEKEVKAEVSDLVKSDETVDKLMTLLYSIPGVGPLTAATVLAETNGFELIKNKRQLTSYAGLDVKEKESGTSVRGVAKISKRGNKYLRKAMHLPALTAIRTDERFKTIYTRLVSRHGIKMKAVVAVQRKLLEMIYTVYSTQKPYDKNYLKNKELLKAENSTKN

SEQ ID NO: 473831 - protein, 346 aa, unidentified
MEYIALDVHKRYTWARVENAHGDRVTEQRVLHQRGAIQVFMQQWTAGSPVAVETVGNWYWVVDEIEAGGGQPQLVNARLAKLMIGSVNKSDKLDAQGLNRLQRTGTLPTVWIPSAAVRDARELPRTRMVFSHQRTQLKNRVLATVAKYGLGIDGVSDAFGKRGRQVLSTLVPQLPPQTQQAVTCLLTQLDQVEATLTLLEDQMRAVFAPCPQTAWLKTLPGVGELLAVVIWTEIGTVARFRRAEALASYSGLVAREHSSGGKFHFGAIRRDVNQYLKWAFVEAANSAVLNRARCGYTHISQLYDRLRGRRGHGKAKVAVARHLAEASFWMLTKGEPYRAPTSSTPR

SEQ ID NO: 473832 - protein, 372 aa, unidentified
MQEQDGQPVPRRLVGIDLGIASRHSVRVLEANGQAVCRASCVPSVASLAGVERAALAGAPEGTRLTVVFEPTGPAWLPIAVFFARRGHAVYRVSSAKAADLRRFVRRHAKSNGIDAETLARMPLADPDGLQPLELPGADAAALDRRVRACERLTQAASEHKVRIKDLVRQLMPMTPLTGDLGKADLAILERYADPRLLLGAGPVEVTRLITSTSNKQQGAERAAQWRAAAAAAVELYGEHPAVPYAELAAEVATEARLLRAIQAELAAHATAREAHYLLADPAQLARTLPGFAEISAPVLIAAMGRPGRFRDGTRFKSSTGLAPRASATGQTDRKGQPMSKAGPSLLRPTFFRAADTARRKTPSSPGSTTCR

SEQ ID NO: 473833 - protein, 404 aa, unidentified
MFYFGIDWSQDYHHLCILNEVGARVSQLQFEHSLAGFAQIEIERRKLDVPAGDCPVGIETTNNLVVDFLLEHDYPIYVVPPQATNGYRNRQRSSGAHDDDSDAALLASIMRTDRESHRRLRPNLALTQQILAQVRLIEILRRSIQRQTNQLRAVLFRTYPQAVGLFSDLTNQIALEFLLAYPTAPDAQTLSREAFEAFLRQHGYTRSDLIPLRYAHLVEPFPTANPAIVQAYQGQVRVLAQVLLPQVRGRTQAIAQLGQLLEQHPDAFIFKSLPGTGLLLAPALLAKFGDDRDRFPTPVDVQALAGTCPVTERSGKRKLVLFRHGCDKEFRRIAQQFARASVPQSGWAAAYWHESRPNCHSDSHAYRILANRWLAIIWKMWQDRKPYDEAYHLQQRALRRKPRA

SEQ ID NO: 473834 - protein, 362 aa, unidentified
MYLIGIDISKFKHDCFIATETGQVVKSSFSFDNNQEGFNQLLTVLLSLDHSQQIRIGLEATGHYGTNLKLFLHEHNFSFMEFNPILSDQFRQVSSLRKTKNDKIDAKLISQMLLSFDYKPNSLLSYHISKLKSLTRFRKKLVKDCTIYKERLINILDLVFPEYSNYFTQVWGKVSLYILKNYPTIQDIANINVESVLPIIKALSRGHYSMPKLIKLIEAAKVSIGCKNDSHTLELKLTINLIEQMNYAIENVENEITIIMNKYNFKTATIPGIGIISAASIVSEFNDFSNFNSSNQLLSFAGLEPSIYESGTQTTYGHLVKRGSSYLRETLMNVAPFVMNYNNVFYQYYLKKEMKANTIEWL

SEQ ID NO: 473835 - protein, 316 aa, unidentified
MTTQECYVGIDVSKKSLDIAVRPGDEHWTVANDEDGIDELATRLKSIGPRLVVLEATGGIELAVTGSLADAGLLVAVVNPRQVRDFAKATGRLAKTDRLDAQVIAHFGQVIQPAPRPLRNAEAQALSALLARRRQMVGMLTQEKNRLHAAQASVQRDIREHIVYMEKRLAKLDDDLGSTLRKSPLWRERDDLLRSVPGVGKVLSITLLADLAELGTLNRKQIAALVGVAPLNRDSGMLRGHRTVWGGRARVRATLYMATLTATRHNPVIRAFYEQLCARGKPKKVALTACMRKMLTILNSMLRHHATWQPDYALNA

SEQ ID NO: 473836 - protein, 316 aa, unidentified
MILGFDVSKDELVAVLIDRRGEVKGNWVIENSKEKINEFLDEIVLTHPGITMGSEATGEYHNILAKECLKRNIVFHLLNPIVTKQFTRATVRKRKTDLIDAHIIAKCILQGEGNVIDRSIFNGNKAILRTATQLTRLAVTLKHIGNRFREHYPEMLDVEEEINKMYVNVKKGIKVLQDKGIREVDKELVKLLSSIPGIGKTLSCVFVSEIGEINRFKNVKALVAYAGLDPRIRQSGYTLKRNTRLTKRGSPYLRRAAYLSASIAQRHDEQLKEYYLKKRGEGKRYKEATIANARHILARIYAVLKRRTPYVAMVDN

SEQ ID NO: 473837 - protein, 409 aa, unidentified
MNSLFIGIDVSSQNNAVYFMKSDGTKHSSFSIQNNLTGGKILSQRIVSAMKENCFDNAVIGLESTSVYGDNLVCFLREDYELSKFNKKIHILNAKQVKKFKDSYADLPKNDYIDSFVIADHLRFGRITKEVYMDDYRYKALQNLTRARFFAVQNLTKEKQRTLNTIYLKFCTLATDKIFSDKFGATSLAVLEDFLTVDEIADMDLIDLVSFLNEKGRSHFADVEATAKALQAAARGSYRLPKTVNDSVNQVLSIQISSIRALETQISVFDKAISEQIKIIPNTLQSIPGIGPVFAAGIIAEIGDINRFDNQASLAKYAGLAWTQYQSGNFEAQNTRLIKSGNRYLRYYLIEATDSMRKRNSEYQDFFNLKLKEVNKYARKRALALTARKFVRLVYALLMTNRLYKQSEN

SEQ ID NO: 473838 - protein, 385 aa, unidentified
MRQLNDLSRSLVTLEQDATLIAVIEMSLSSWLVAGIVPGVERQPLKKLAVDESALLKLLHRWREEAEKAGHIIKRIAVAFEAGRDGFWMARWLAARDIEVHVIHASSVAVSREHRRAKTDRLDTELLKRAFLGWLRGERDHCKMVAIPTINDEDAKRPNRERESLVGEQNRIINRMKATLIRLGIRGFNPKLKKAAERLEGLRTPESEPIPPNTLAELYRDMERRRLLRDQIRQIEDARLARFEQAPNDGPHAMMRLLARVMGIGIETADMLVQEVLSRNLRDRRAVARYAGLTGSPDESGRKRREKGLARSGNPRVRRGMIQLAWRFLMYQKDSALAQWFRTRTENARGTRKTMIVALARKLLIALWRLVREGVVPDGIVLRPA

SEQ ID NO: 473839 - protein, 338 aa, unidentified
MTIKTLGIDLAKNVFELCGLDESGDIQLRRRVRRDTLLLAVAEIPACVIGIEACTGAFYWQRQFEALGHDVRVIAPQHVKPFGRRQKNDRNDAEAIAIAVIQPRMRFVPKKSVAQQDVQTLHRARRRMVNHRTALVSQMRGILLDRGIAFGQSITRARSMIPRIIEDRSNELTDLCRETLSSLLELMSEIDKRVREFDRRIDRVYRESEACRRVGKIRGVGPKTATAVVAAIGDGRDFDNGRHMAAWLGLVPRQHSSGDRTILMGISKRGDQHLRTLLVHGARAVVRTAVGKTDRFSQWVNELRERRGTNRAIVAVANKNARIIWALLAKNEEYRPAI

SEQ ID NO: 473840 - protein, 347 aa, unidentified
MQFFVGIDVSLESASICIVDEAGVIIKEGKCACEPEVIARFVRMPGRRIEHVGLETGSLSQWLHAGLTREGFRVTVMEARHVRASLATMRIKTDRNDARGIAQLVRLGWFKSVHVKTPSAQETRALLGGRQFLVDKVTAVENSMRAALRNFGLRMGPVTRPKWASRARELASGNPALEVVVEALLRVREVLLAELRDLDKKLLGMARADPVVRTLMTAPGVGAIVALTFKSAIDDPGRFQRARDVGPWLGLTPSRYQSGQIDRMGRTSQAGDAGLRTILYEAAATILGRMTHWSALKAWGVRIARRSCAKKARVAVARKLAVLLLSMWKADEPFRWTSRPAEEAAMA

SEQ ID NO: 473841 - protein, 407 aa, unidentified
MISIGIDIAKEKFTVCALEQGSKIIWKPFDIHLKKTKVEEFLKKLDTLNEEVKIVMEATGKYHLPILYELKDKGYFVTVVNPLKMKQFCRVLNFRKAKNDNIDAKQIAEYGLMYWKELEEYKIDEDNYMVLKELNRSYQHYMELRINQINFIDQTIHQTFPGIKKLIPHNSGDFSKDKLLDFLEKWWHKNLVLEKPEEKFIEDFKNWAKEKRYHPNADKAKSIYKLAEESISTQPSSSSYIKMNIQEGIELIKHINQILHTILSQMIEIAEPLEEYQEAKKFSGISDKLAVQITAEFGDLSKFKNKKSLISFVGIDSPPYESGNFKADQRKITKRGNAILRKVGYQAMKCMMSAKDTENDIYLYMVKKEKDGKAKKVCKFAGLNKFLRIYYTKVMASKQEKKLLKVA

SEQ ID NO: 473842 - protein, 410 aa, unidentified
MDLLRREVPATSLVVAVDPGKAFNRVWLTTGERGLIGEPVMLPVLRDGVDELERLVAASGIEGPPVIGLEATGALHRAWASEIERRWPGSLRLFAPSETTAARAQLGSRRFKTDDRDCAALIWLLRQGAGRPAEPEVVAAMLGTVAHRRQLVDARRVLQQRLHDQLNALCPGLSAPAGHGRALKLSSPTGQAVLASAAAFAGRAPSKRSLLARAPGRMTDQTAAFWTGRWKRLLDPPPDAELRAARLGRDLRRWQDLGRDIALADDQLSALLAQTAGQILTTLPGVAAVRAAAFAAYTLPIARWPTAEHLYSATGLAPATYQSSTVTRRGRISRQGLPEHRDALMAIAWGLSQNSSAFAARDAELRARGFRPIQARVALGRNACRLCWRLLHTQQPYDDQRYARARRRGR

SEQ ID NO: 473843 - protein, 411 aa, unidentified
MIKENYIYVGIDLHKETHTAVMIDCYNQKLGEITFPNRPADFPKLVAKVKKCNTDGKTIVFGLENAYGYGRALAVWLIDKGYLVKDVNTAISHRQAKHRGAMYRKSDSDDAKAIALATLNMLDKLPDACPNDAYWSLGQLVHRRDNIMKQRTRLVNQLHEQLCIAYPSYKQFFNDISRPTALYFWEHYPSRKYLKGKSVEDLRAELVPVSHNKCSTKTCEKILDAVASDKVKNNAYQDARDMVTLSIVSDLQHYDKQLAEVDKMLKQMYKMLGCTLTTIPGVNVITAVKILSEIGDIERFANANKLAQFAGIAPLHLSFSGKGKDVATKQGNRRLQATIYFLAIQMVQVSSKGTPRNPVVRAYYEKRKAEGKTSQQALICISRRLISIIYGMLKHGTEYRMPVVENAGEKL

SEQ ID NO: 473844 - protein, 360 aa, unidentified
MEVLFRSCCGLDVHAQTVVACLVKEGHRTTRTFSTMTGQLLVLADWLVSEECQHVAIESTGVYWRPVFNVLEGLMPVMLVNARHVKAVPGRKTDVRDCEWLADLLRHGLLKPSFIPPPEIRELRELTRYRQTLVRDKTSVANRVQRIAESGNIKLSQVASDALGKSARLMLRSLSEGETDSQKLAQLARGRLRNKQAQLEQSLIGRLTAAQRFVLKELLDRYEELEAALLRVTQEIEREIAGCQNPFVVEAVELLQTIPGVGQQVAEVVVSEIGVEMSRFPSDKHLASWAGMCPGSHESAGKQKSGRRRKGNLYLQRMLTQAAWSATRTKGTYLAAQYKRLVRHKGKQRALERVKIEYMV

SEQ ID NO: 473845 - protein, 377 aa, unidentified
MKRLRTELKVDGGFSAKRCHGKVVGVNSIATNQEGLTMKRAIIGLDIAKLVFQAHWIDETTGELHRDKLKRAKVSEYFAQLPRSVVVMEACGSAHHWARKLIAQGHEVKLIAGQFVKPYLKSNKTDLADAEAIHEAAQRPGMRFVAPKSQAQQSVLALHRVRQQLVKFRTMHVNQVRAILYEFGEVISKGRLKAMKELPAAYARLEETLPAFLLDTLRDQIQRLAGLDKEIEAIEMRLAVWKKSDDKTRRVAEIPGVGLLTATALVATMGEASAFKNGREFAAYLGLVPRQTGTGGKVRLQGISKRGDVYLRTLLIHGARAVAFHTKTRPSRLTELLKRRPLNVAIVAWANRTARTAWALIARGTNYQPGHTPDFAV

SEQ ID NO: 473846 - protein, 315 aa, unidentified
MAMSVPNAEAIIGVDVAKSELVIFNEERDQLITIPNTKPEIKKWLKALPARVRIAIEATNIYHVLFADLAYEAGCTVYLVDGYALSHYRKGINVRAKTDAIDARLLARYLRNESEDLHPWTPPPPLYRRLLSLFRRRAGVVQARTALTQSWANEPMLKTAFNNHLASMQRLELLLEKLIKDLLEEAGLMSLVKRCMKIEGIGFLTAARLVTSYQRGEFKNSDAFIAFLGMDLRVAQSGQKKGLSKLTKRGDPEARRLLHNAAMSARRTSAWKAFYEAQRARGFSTIQALVMLARKLARLVFALLKSGSEYQSKAV

SEQ ID NO: 473847 - protein, 400 aa, unidentified
MDETQRFKWFLGIDVSKETFDGCCINMRGERLFTLSTSMNRTGFEELMKQLSGLSVSMESVLVGMESTACYHVNLYSFLISLGYTVIVMNPLLISNFVKLQLRKTKTDKKDAYVIAQFLLLNRDSLSQTILSSDISDLRDLSRQRESLVDQMSSTKSEIKRLLSMTFPELEHISGIFSKSMLRLLCHYPSAASIKQAKRSKIAKILIPGSYGKQTDVSVDRILKAAQVSVGTSSATKEIILRQKASLLIQLEQHLQELTDILIGLCERKIQRDRDILTSMKGIGEKSAVNFLIEIGGDIKQFESHKKVIAMAGLDPAVYQSGKIDRKGKISKRGNRHLRRVIWIMATKVIQFNERFKQYYLKRIEDGLPYKMAVLATAHKLVRVMFAMLKNKTLFDPRMN

SEQ ID NO: 473848 - protein, 348 aa, unidentified
MAHFVGLDVSVKETSVCVVDDAGKVILEQQVPTEPADIIALLTSLGVTYGRIGIEAGPLSQWLVNALTAAELPVICVETRHMKALLTAQQINKTDRNDARGIAQMMRVGLFKPVHVKTLVAQEQRMLLTSRKLLQRKLLDVECELRGTLRNFGLKVGVVSGGRYEARIRELVVGFPRLAAIAEPLLNVRWVMRQQLAVLHKMLLDTVRGDPVCRRLMTAPGVGAVVALTYRATVDQPQRFAHSRAVGAHVGLTPKRYQSGETDYDGGVSKCGDALLRTMLYEAAQVLLTHGSKWSWLKAWGMRVAQRRGIRRAIVAVARRLAVVLHRMWVDGSEFRWSKDSAAAPTVA

SEQ ID NO: 473849 - protein, 370 aa, unidentified
MKMSVGVDLHKTQFTVCILSEDRMVKESGLYPTSEYGYDAFLRKMTGLMDQGYEITAAVESTGNTRYFRNQLLKEGIGVKVVNTMKFKVVTESVKKTDKRDARTLAEFLEKDMLPESVLCSQESEEIRRVIKSRSILVKALVSLKNQVHGLLMGYGIESKRGQLQSKKERQRILCGLEDHRSYGNAAQAVKPLLETIDQIASEIKRLEDVLAKLVAEDKDVELLQTMPGVGLITAATIRAYTDDINRYESSKSYAAHAGLVPWVQNSNETVRHGHITKRGPVELRTAFVQVVMGMLRYQKVTSSYRIMNRYQDMKKHKGTGKSIIATARKVSTITYALLKTRKPFDPTKMELVRKKTNPVTVEIPLALAG

SEQ ID NO: 473850 - protein, 322 aa, unidentified
MAQGEVMVGVDVSMARLDVALWPGGESFSLSNDLAGVEQLLKQMLELRPQAVVIEASGGPEELLVSELCAAGVAVAVVNPRQVREFARSLGQLAKTDRLDALVLAQFGHSAQNHGRLTLTQLPSVAEAELKALVRRRRQLIGMLVAETNRRQRASKVVKRSIVATIRALKRSLAELEQQVRETIKHSPAHQQKIAILQQVPGIGPHLARSLMAEVPELGQVGRRQIAALIGVAPHAHESGKFKGRRMIWGGRAGVRSTLYMAMLSATRCNPLVAPFYRRLLERGKSKKLAYIACARKLLVILNAMFRDRTTWSPDLDFQHSR

SEQ ID NO: 473851 - protein, 351 aa, unidentified
MSQKSSSAIAVIGIDIGKNSFHVVGHDQRGGIVLRQKWSRGQVEARFANMPPCLVGMEACVGAHHLSRRLKALGHDARLMPAKYVPPYSKGQKNDFRDAEAIAEAVQRPTMKFVATKSAEQLDLQSLHRVRERLVSQRTGVINQIRAFLLERGIAVRQGQRFLRTELPQILVTPPEVLSPRMVRMIEELAADWRQLDARIGRVSDEIEELAKQDAACERLMSVPGIGPIISSAMVAAIGTGDGFGNGRDFAAWLGLVPRQISTGDRTILGKISKRGNRYLRVLFVQAAWVVLVKVRPDRWAGHGLRPWIEAAKKRLHHNVLAVALANKLARIAWSVLARGRVFEASKLKAT

SEQ ID NO: 473852 - protein, 323 aa, unidentified
MAQQVWTAGIDVGKQRLDIALWSKTPQALQVDRNADGLARLIDWLRERNVVRVGLEASGGYEREVLDALEDAGFVTVLLNPRQVRQFARAKGRLAKNDRIDARTIAEFVAKMIDEDPARRDRSRDLLIEHLSFRRQIQNWIEGCDNMLEHLRDPALRKAAQVRRTGFERDLARQDAKLAGLIASQPDWAETARRLRTVPGVGPVLAHTLIGLLPELGRLSGKAVAALVGVAPFDDDSGQRSGARTIHGGRKVVRNVLYMAALSGKRCNPVLAAFAGRLKGKRPKVILVGCMRKLIVILNAMLRDGRDWRAPVQAASRSAAECR

SEQ ID NO: 473853 - protein, 444 aa, unidentified
MAKPKNKLSVVNNNTAGIDIGSRKIFIAAADKPVISFGTFTDDFLQAVTYLKENNILSVAMEATGVYWISLYDILDQSGFDVILVKADQTKNIPGRKTDVADCQWIQQLHSYGLLRSSFIPPQHIRILRTFVRQRRTNLFIASDHIRRAHKALELMNIKLQNVITQINGKSGLAVLTAIINGNHNPEQLACLCEESILKKKKDAVIKSLKGNFSDENIFLLKQAVDAYLFYMKQVDDCDKQIEKHLSKLTQHIKAPKKINKPKPIRHHKPNIDDLHLKLMKLTGGKDPSQITGLTDSTMLQIISEVGTDLSRFPTEKHFTSWLGLAPNSHQSGLTNKKKKFKRHTSAGQIFRLAAQAIAQSKHLALTSFYHRIKARKGSLGAIKATARKIAVIFYNVMTKGMEFVEQGIKQYEQHIKERQMKYLQKQAKRFGFTLTPQLQEGVH

SEQ ID NO: 473854 - protein, 347 aa, unidentified
MFAESVDVVIGVDTHRDSHALALLDAGLGALIAEERVDANREGYRRALKLASGCGRRRLWAVEGTGSYGAGLARYLQRQGERVLELERPVRSGSRGRAKSDALDALRAARAALTGEPLAELRSGGKREALRVLLVSREASVAVRRRGLNQLRALVLTAPAELRERLQGQPKRALVKRCVALRPRPGQQPQLRGTLLALRSCGRQVELASREAAVLERELAALVEQLAPQLLSHYGVGPITAAQLLVSWSHPGRLRSEAAFARLAGAAPIPCSSGKTIRHRLDRGGDRQLNRALHTIVLARRRGDQRTIAYIHRRIKEGKTEREAIRSLKRYIARNLYRLLEHTHQTA

SEQ ID NO: 473855 - protein, 390 aa, unidentified
MDSSARRLAKARLPEGVAGMARLHAMIGEQVGEDPDEDVEVLIGIETDRGPWVAALVAAGYTVLAVNPLQAAEFRRRLGVSGAKSDAGDAHVLADMVRTHSHELRPVAGDTSRAEAVKVVARTHKTLIWERTRHTQRLRHALRDYFPAALDAFDDLDAADTLELLAKAPTPAQAARLTLAQISAALKRARRKNVAEKAVAIQAALRAEHLGQPPVVAAAYAASIQALIAVLTVLNTQIKALQGQVEAHFGQHPDAEIILSQPGLGVVCGARVLAEFGDDPHRYATAKARKNYAGTSPITKASGKKKVALARFIHNDRLIDALMTQAFAALKASPGARAYYDRQRARGAGHNAALRQLANRLVGILHGCLKTGTLYDETTAWSHHAENVAA

SEQ ID NO: 473856 - protein, 356 aa, unidentified
MPIPIKRYKGMKKIFIGIDFSKEKFDATVIKAEGVEERAERQHEVFDNKVSGFRRLLRWVKSVVDEQDTGLWLFCGENTGGYSRALCNYLYGSGYDMWLENALSIKRSSALQRTKSDKADAGIIAEYAMRNYDQMRLYKPLEKNLERLREVFLYRHNLVKLRASMMTRKGEKKLTQEKSDISRFMAMSSKHLISEFNKKIAECDMRIKKIICEDKDLHRNFEIITSMPGVGTQNAACLMVYTDNFSRFDYDSRKIACYYGVAPFGRQSGTSVNTPPHVSPFANKLIKALLTQAALASINFCPQMAAYYHRLVKAGKKKPVAVNNVKNKLLHIITAMVRNGDMYNPDHDYYAALNAA

SEQ ID NO: 473857 - protein, 390 aa, unidentified
MRYFIGIDVAKFKHTACVIDMDGIALVEPFDFTNDIIGFQSLLKNIKPFLKKKHLVGMEDTGHYGDNLRNFLLEKQYKVVMLNPIVTSHIRKASNKAKNDRIDCFVIANTMMNPNFYRDQQVQSIDYATIRQLTRMHHTHTEEINRYKCQLQKSIDIVFPEFNSLLNTKYSKTYLEILDTYHGAYTIANTDIRLLRNTLKNVGVGRSVSISAEQLKKAAKESIGQHNLAIEMDIPFLISLIRRLTSILGEIDTKIEEFSHQLNSPILDISGISHFSAMSIISELGDITYFSNEKKLIKFAGVNPCVYESGTYSMTHTRLEKKGSKYLRKTLYQIIDVVIRFNPIFQAFYQKKISQGKSYRCAQGHCIRKLLRVIYKILSTGERFNPEKLK

SEQ ID NO: 473858 - protein, 343 aa, unidentified
MGEVSTIGLDIAKSVFQVHGVDVDGAVVIRKRISRAKLLEFFATLPTCLVGIEACPTAHYWSRRLQGLGHTVRLMPPSYVKAYVKRSKNDANDAAAICEAVTRPSMRFVATKSEEQQSGLMLHRSRQLLVCQRTMLSNAIRGHMAELGIISAKGRNGTAELLKIIADEQDDRIPAAARFSLNILARQYAAIREETVAIERRIHAWHRSSEESRRLEEIPGVGPIVATALMAEVGDWKTFSSGRSLAAWIGLVPTQHSTGGKERLGRISKQGNRHLRWLLVAGAMAVIRYARQHGTKRPWLARLMGRRPTKVAAVALANKMARMAWAIMVRGERFKEPRLLPAA

SEQ ID NO: 473859 - protein, 416 aa, unidentified
MTFKVVRFICGGMDVHKNLIVATIGTTNRQTLITEYIQQSFSTFYSDLIRLKEWFISHDCYDVCMESTGKYWIPIYNVLETELNICLTHPKYVKAIKGKKTDKRDSKWICDLYKCDLVKHSFIPKKEIREMREIARYRCKLVYMRSSERNRYQNCLTVSNISLASAVSDPFGKTATNIMKELMQSEVIEDDKILKLIHKNCKDKDKILDSLQGYHIESDQRFKMDTVMNHIEYLDKQIQACEAELIKRAYPLRDYFQHITHIKGISALSAILIVSEIGTDMNQFESDKQLVNWAGLSPANNESANKKKSVRISKAGQYLKPLLVQCALSSIKDKNSYFGIKYCRIKKRRGHKKAIIAIARMMLVCIYHMILTGEEFNPCDYESLTNPKPKKEPIMTVESALQFLKDSNFDFSSIQL

SEQ ID NO: 473860 - protein, 365 aa, unidentified
MKKSSTAVAQSKRNFNGKLTIGLDLGDRSSWYCVLDEAGEVIHEQKLSTIAKAMKEVFGTIPRSRIALETGTHSPWVSRLLEELGHEVIVAHARNVRLIGESRRKDDRLDARTLARLARIDPQLLAPVKHRSAEAQAHLMVIRARASLVRARTALVNTARGLTKSYGERIRGCNPRNMDMEKAQALSPELQAALGPLLQALESLSERIAEYNQQIEQIAKQSYPQTALLKQVKGVGTLIALTYMLTLEDPHRFRKSRDAGCYAGLQPGRRNSGQSAPQMHISKEGDPYLRTLLVQGAHHILGPFGVDSDLRRWGLKLAERGGKNGKKRAVIATARKLAVLLHRLWVSGEVYDPFHNSRSTMLATA

SEQ ID NO: 473861 - protein, 367 aa, unidentified
MKKSSTATAKQSRNMSQQKLSIGLDLGDRNSWFCVVDEAGQRQLEQRVRTSAKALREVFGAMPRSRVALETGTHSPWVSRLLSELGHEVIVAHARNVRLIGESRRKDDRIDAQTLARLVRIDPQLLCPVKHRSAKAQSDLMMIRARAGLVRARTALVNTARGLAKSYGERLRGCNVRNMNPEKAEELSPELRGALEPLLATIESLSERIEDYNQRIEAVAQQSYPQVALLKQIKGVGTLIALTFLLTLEDPHRFRKSRDVGCYLGLQPGRRDSGQSQPQMHISKEGDPYLRTLLVQGAQHILGPFGVDCDLRRWGLKLAERGGKNGKKRAIIATARKLAVLLHHLWVSGEVYEPLHNSSGMTVAAAA

SEQ ID NO: 473862 - protein, 381 aa, unidentified
MDTKTVQSTLQRPISQQLYLAFELSQKQWKLGFTVGMGQRPRIRTIQARDLQALQWEVQEARHRFRLPDTVTTLSCYEAGREGFWLHRYLHAQGIANLVVDSASIEVSRRSKRAKTDMLDVDKLLEMLIRYHGGERKLWRVVHVPSLEVEDRRHLHRELTTLKAERTRHINRIKGLLVGQGVCMPVIEDLLEKLETVRLWDGTGLPVGIHTRLEREYQRIQLVNQQIQQLEVQREEQLRTSDHPSVVQVRQLLRLKAIGVNSAWLFVMEFFSWRDFHNRREVGALAGLTATPYRSGGASREQGISKAGNRHIRAMIVEIAWIWLRYQPNSQLSRWYQQRFGQGSNRLRRIGIVAMARRLLIDLWRYLETGTVPEGAVLKSS

SEQ ID NO: 473863 - protein, 339 aa, unidentified
MTVKTVGLDLAKDVFQVHGISENGRVIFNKPIKRAKLLAFFQTLPPCTVGMEACGSSHHWGRQLRKLGHDVKLMPAGYVKPYVKRGKSDAVDAEAICEAVRRPTMRFVEIKTEDQQAILSIHRTRDLAVRQRTQLANMIRSLLREFGHILPIGIEAVTAFSNRHLDGDHLDMPEIANGMLGIQCYQFIGLNERISGYSKMIEQHAMRNADARRLVRMPGIGPVTASAIVATIGDAHQFRTGRDLAAWLGLTPLNKSSGGKERLGKITKQGDRYIRKLLVVGMTSRAVMAKRSPEKVDLWTAKIVADKPFRLATVAMANKAARAVWAMLTKKQEYRQPAF

SEQ ID NO: 473864 - protein, 351 aa, unidentified
MEWIAFDSHKKYTLARIESEDGRTHREARIDHAPGVIRRFLTRCSKGSPVAVETIGNWYWIVDEIEEAGMVPQLVHARKAKLMMGHTNKTDRLDAQGLNRLQRTGTLPTVWIPPMELRDLRELLRTRMDLVVQRTQLKNRIHAALARYCLKMEEASDAFSLVGREEMARLFEKLPPQTRFANTLLLEEVDAVQKQIDRLEERMKDVLEDTPAVQLLRSLPGVGRILSAVIALEVGDVKRFPSAGHLASYAGTTPRVSSSGGKTHYGKLRSDANRFLKWAFIEAANVTARFHKQHPEAHLSRIYAKLRKEKGHAKAIGAVARQLAEATYWMLTKNEVYKEPARTGTGSSTEA

SEQ ID NO: 473865 - protein, 356 aa, unidentified
MTTTSVPDVIIGVDTHKDVHAAVAINSLGARLAGATFPANRTGYQALEAWASALGSIRTIGIEGTGSYGAGLSRYLREQGHVVLEVNRPNRQLRRQKGKSDTVDAESAARAVLSDQATSCPKSGTSSVEMIRHLKVARDTAVKGRSQAMQTLKAIIVSAPAALRERFDAIQGKMTLIRRLAALRPAVMTSVTASAKMALRAIARRWLALDAEIREHDAHLEALIAACAPQLVEAHGIATGTAAEMLLLVGDNSERIKSEAAFAKMCGACPIPASSGKTNRYRLNRGGNRQANAALYRVVIVRMRGHQPTVDYVRRRTAEGKSKLEIIRCLKRYVAREIFGYLRNPPKTAATATNTP

SEQ ID NO: 473866 - protein, 559 aa, unidentified
METKVPRRLRVLVADDYPDVAKAVGRLLAVDCEVVGTVADGSALLEAAQRLQPDVVVLDLNLPKVHGLEVCRQITQLHPRMKVIVFTATDDPTVTERSLAFGATAFVSKLAHGDLLSAIRRLCVDESVAPRAGLEPATLVRRFECFTADLHRLADWLQQCGVTTVAMQSTGVYWIPLYEILDARGLEVYLVNARHTKNLPGRKPDVQESQWLLKLHTYGLLRNSFPPSADIRIVRTYWRQRGGHVQAVSTCIQRMQKVLTQMNVQLANVISDLSGWTGQRIVRAILAGERDPQTLAALSHPGIHATRDQIARSLEGTWQSDLLFVLQQEVTMYDAYLQRIAECDQALEHHLKTFADKAIPDAPSDAESSSPVAPRQTRVKHRRKAGSHTPQFNLGHELHRISGVDLTRIDGIDVGVAQTVISEVGVDMTRWKTEAHFASWLGLCPDNRITGGKVIRKGTRHVINRAATALRLAATTLLRSHSYLGAQYRRLRARLGAPKAITAMAHKLARLVYRMLKWGHEYVDKGLQYYEERHRDQQVQLLKKRAAKLGLQIVDPDAA

SEQ ID NO: 473867 - protein, 416 aa, unidentified
MQFGAFIGLDWADEEHALSLCAANDTQIQRTTLKQTPEAIAQWANELRTRFPNQFIAIALEQSRGPLLAALTNFEHIVPYPVNPKSLARFRQALYPSNSKDDITDADLLLEILLKHRDHLRPWQPDTVHTRQLALLTEQRRNLVDTRTALTNQLLAHLKMIFPQALDFVGDLATPLAAAFLKKWPTLQSLQKVTPAALLKFYYGHNSRANGALTRRLELLKTALVLTSDPALLNTHSMAIQALAAQLAALHPFIRKYDQEIAGLFATHPDAALFESLPGAGAALAPRLLVCLGTDRQRFSCAEALSCYTGIAPVTEQSGKSKWVHMRWSCPKLLRQTWHEFANCSIRFCPWALECYQDYRKRNIDHHEAVRKLAFKWQRIVWRMWQERQPYDELRYQAALLRKRTKPTAQPVNNKN

SEQ ID NO: 473868 - protein, 402 aa, unidentified
MTYDYVIGMDVGKYFHHACVLDIDGAQVLSKRINQNEKSLRTLFSTFIANDHKVLVVVDQPNNIGRLTVAVAQDIGIDVRYLPGLAMRQLSRIHAGNAKTDIRDAYIIAHAARNLPESLRSVDRVEEAFLQLKVLNGIDEDLARSYTRLINQIRSALVGCYPQFEQALRGQVIHRKWVLHLLARYGGPTKIKRLGKAKAAAFARRSKARNPEPVIDAIFAAISEQTVAIAGAQYAEMGVAMSAKDALLKLEHRKQIEQEVIELINDIPHTQILLSMPGIGPKTAAQILMTAGDMSDFPTAGHLASYAGLSPRTNQSGTSIMSNSLNRAGNKKLKNALWQSSFASIRFHERSRQFYERKRREGKRHNAAVVALARRRLNVLYAMMSNHEYYRDPDQSQEVEAA

SEQ ID NO: 473869 - protein, 428 aa, unidentified
MKNNSARKLKQVPVGYLIVGVDPHKKMHVAAAMTQDLVVHTRFKFSNSSDGYQNLIRRTQDLISKTHSIGLILSIEAAGHYWRNLGYFLDSQGIQFRLVNPFTLKRIRDGKDLNRRKNDYHDAEMAAELLRNGDFVETRLPKGIHAELRALYSAHRRLVADRARMKNLLKGLLDGIFPEFTQVFKNICGMTALQVLSVCPVPKTITSVKLEDFVDVIRKGFKGRAPKVRKLHDIYSLARTSIGIEAASDSVSLEINFLVKRLQLLSDQINETENVMITVLKSIPDSSYLMSIHGISYMTVAGILAELGPLGAYHHAGQLIKMAGTNPTEWESAGKRGSRTPISKKGRPGLRWCLWTAARSLLRHNADFRQWAKERLERPAHLHPLKPREVFGAIVNRLLRVAYALVKKQAYYQIPAPHEATELELVAV

SEQ ID NO: 473870 - protein, 437 aa, unidentified
MDEVTDEPLYRDRVCGIDIGKAGMVATIRVPSEKNPARRAAETRSFGTTRREVLALADWLRSWQVPAVVMEATGDYWKGPFCRLEAEGFDCVLADARQVRHLPGRPKHDPGDSRWLAACFERGAVTPCFVATPEFRVIRLHTRYRRDLTEERTREKQRAEKLLESAAVKLSSVVTDLHGVTGRDIMDHLIAGERSPKVLAQLARARARRKIAELEAALEGAEFFTDDHAALLAAMLERIDRVNAEIARLTEVTDRLLAPHEEQLQQAESMPGWGRRAAQDALAETGTDMSRFPSGAHLASWAGRTPLDNSSGKRKGKAKSKKGNRYLGGLLGETAVAAGKTQTREGARYRRIARRRGKAKACVAVGNTQLKVYHKLLSTPGTRYTDLGPDYYDAQASTRRQIAHHVGKLGALGFEVTLCRLPEPDPDPRPAASTQAA

SEQ ID NO: 473871 - protein, 349 aa, unidentified
MRFYQQQHRFYCGVDLHARSMYLCILDDQGGVLLHENFPAQGDVFLKAIAPYRDGLVVGCECMFAWYWLADLCLENDVPFVLGHALYLKAIHGGKTKNDRIDSKKLAALLRGGNFPMAYVYPKGLRETRDLLRRRVFLVRQRAHLIAHIQNTNSQYNLPVFGQKLVFAGNRAELNVAERFTDPSVRLSIQTDLAVIDHLEERIHEVELHLERHAKVDDANTLARLRSIPGVGKILALIFLYEIHDIRRFPSVGQFLSYCRLVRCAHESAGKKKGSGNSKIGNAHLRWAFAEAVCLWLRQSERAKKWLRRQEKKRGKAKALAVLGAKLARAMYHMLTKKEVFDEVKALGG

SEQ ID NO: 473872 - protein, 353 aa, unidentified
MEIVVALDVHRRQITYKALDRETGEVRRGRIAPAARAEVRAWLAQFAGCEAEFALEGTTGWRFVVEEIERAGHSAHLADPAETAARRGRKRRAKTDNADCDLQLRLLLAGELPESWIPPAQILELRTRVRMRKTLIDQRTAWQQRLQAQLFHQAIPAGLRLRTEAGRDALAQAELSPAGRELVALGLRMIDALDRELAPLDRELHAFARRQRGCRALIAGLYGVGPVSATAILAELGDARRFASSDDAVRHSGLDVTVYQSDSKRAAGRLSHEGPELLRWALFEAAVSAARAGSPDHAYYLQVAERLDHTRACLSVARKLCRRAYHILRELGDEALAPVEGDPHAEEAIAAAA

SEQ ID NO: 473873 - protein, 325 aa, unidentified
MENIALIGIDLGKNSFHIHCQDRRGKAVYRKKFTRPKLIEFLATCPATTIAMEACGGSHFMARKLEELGHSPKLISPQFVRPFVKSNKNDFVDAEAICEAASRPSMRFVQPRTESQQAMRALHRVRESLVQDKVKTTNQMHAFLLEFGISVPRGAAVISRLSTILEDNSLPLYLSQLLLKLQQHYHYLVEQIKDLEYEVGQRLLSIPCVGTLTASTISTEIGDGKQYASSRDFAAATGLVPRQYSTGGRTTLLGISKRGNKKIRTLLVQCARVFIQKLEHQSGKLADWVRDLLCRKSNFVVTCALANKLARIAWALTARQQTYVA

SEQ ID NO: 473874 - protein, 386 aa, unidentified
MVDSSFEFQGSVAGVDVSDKSSRICVMSEPGEVMLEDTVKNNQDAFRAWFAKFKPLRVVVEAGTHTLWIRDELTALGHDVLIVDPRDPRTQGRKKTDREDARRLAMAGFLPAGYLNTVRFRSRETHRDLMQLRARGALVGTRTTLINCVRGLVKPLGGRIQDCEADNFAQRAAKDLPRELLRIVLPLLRTIRELTRAIAACDRRLSRITAKRYPIAQRFAEEIPGIGPVTSLAFVLTVEDPHRFPKSRTVGAYVGLAPGSGDSGEQRPQLRITKAGDVRLRSLLVQCANSVLHPRSADWDLRSFGLALMEHGGKNARKRAKVAVARRLAVLMHRLWITGEVFDPHHVAKLHQKQAAQMASRPPNRAKTKTAARITAEQSSPSVQSA

SEQ ID NO: 473875 - protein, 476 aa, unidentified
MNAKSSSKKNQVVAANIFEREELVRKAEKIGKDLRAYSWKELETHGKFAKNDKISFISDNMLVVGCDIGSETHYLRAIDTRGRELSTKAFPFSNTAEGFASAKAWLLELAARHGKTQIVVGLEPTGHYWFCLASWLVSNGISVVQVNPYAVKQTKELEDNSQRKDDLKDPKLIANLVKDGNYGMPYLPEGVYGDLRRFTLLRDQLTEDRIRAVNRLHRELTICFPEYKDAFGKVDGAFTMVLLKTVPFPADLKAIGADGIRDIWHAAKLRGRGYSRAEEIIRYAEQSVGLQDGVDGSRTAVIWFAEQIASLDQKLAEIEEVLRAKCHELPCAENLLEIPGVGGTILAGIVAEMGDLSRFDTAKEIQKLSGLGLVACSSGKHKGETKISHRGRKRLRYWLFQAAKSVTAHTAEFKELHAYYTTRENNPLKKMQSLVVIACKLLRIIFAIFKNGTRYDPEKMLREIRRQTDQAIPTAA

SEQ ID NO: 473876 - protein, 355 aa, unidentified
MIGLRYIGLDVHQDTVSAAVLDHQGKLMMQSVIATRAAAILDFLHGIQGTLHVTFEEGIHSAWLYDLLQHRVARVLVCDPRKNKLLKAGNKGDLIDARKLAELLRNDALSPVYHGALSALEVQHRTRSYTMLTEDTTRVMNRLKAVFRSQAIRCHGKKLFRLDLREAHLAQLPTPGLRQRADSLYRELDALHPLRLRAKREMLAECRKHPAMKWLQSVPYLGKVRTAVLIGRVQTPHRFRTKRQFWSYCGLALQTHDSAEYHLVHGQVQRKTRPAQIRGLNWNHNHELKGLFKSAATMAAFRQGILHQYYVGLLAKGMRPEMARLTLARKIAAITLKIWKEGGTFNAEHIKPQAA

SEQ ID NO: 473877 - protein, 355 aa, unidentified
MTSTKYIGMDVHKESVSIAVRNDAGKIVMECVIETKASMILQFFDGLRGDVHVTFEEGTWAAWLYDLLKPHVTKVLVCDPRRNALLQEGNQNDRVDARKLAELLHNNQLRSVYHGDHGLRTLKELVRSYLTITQDLSRVMTRVKAIYRSWAIPCTGKQVYGPNHRAEWLAKINEPGVRRRAEFYYQQLDALRCLRQQVRRDLLAESKKHPTWKQLCGIPSIGPIRAAELLGILQTPHRFRTKRQLWTYGGVGIETSSSADHRVVKGQLERKKKPVEIRGLNSNYNHDLKNIFKGAAIVAATKPGPFAEFYAELLAKGMRPEMARLTLARKIATIVLIVWKRGVSFDARHLKPQTA

SEQ ID NO: 473878 - protein, 347 aa, unidentified
MRFYTKQHKFYCGIDLHTQNMFVCILDAGGNVRVHQNIHTDPEGFLRVIAPFREDIVVAVECMFTWYWIADLCTQENISFVLGHALYMKAIHGGKAKNDKIDSLKIATLLRGGMIPQSYVYPARMRATRDLLRRRNHLMRKRAELFAHIQNTRSQYNLPDPLGCIAKPKNRGGIVQRFHDPSVQKSMAVDLEMIDAYDHILTQLERDIIACAKEHDLRSYALLQTIPGVGRILGLVILYEIESIDRFPQVQDFVSYGRLVKCIKESNGKKYGSSGKKIGNAHLKWAFSEAAVLFLKGNEPAKKYLQRLARKHGKAKALSILAHKLGRAVYFMLKNKEAFNQKKFLGL

SEQ ID NO: 473879 - protein, 320 aa, unidentified
MMSEVILGIDVSKKTLDAALIFENRVFCKQFQNSCDGFKELAAWLTSLQIERLHACLEATGIYGEAVALFLHECGHLVSVVNPLRIKGYAQSNMRRNKTDRLDARLIADFCLTQKPDVWQPPLKEVKHLQSLVRRVEVLEEMLLAEENRLANASAEIKPSIERMRRLLKAEIKELQQQTKRHIDRHPHLKEQSALLQPIPGIGARTAHLLLSEIEFERYSSARSIAAQAGVVPRKRQSGTSLKQTSLSKLGNARIRRALYFPAITAKQHNEVIKEFAKRLKKNGKTPMQIVCAAMRKLLHIAFGVLKHKRAFDASLAFSA

SEQ ID NO: 473880 - protein, 374 aa, unidentified
MNNSITYVAMDTHKKEHKLALHYPDDEEIVQFTVKNTASDIRKMVNKIKNKVPANVEFCYEAGVCGFNLKRRIEALGCRCKVIAPSLTPVKPGDHIKTDRRDAVKLLSMFKADLLTEVYAPDEKQEAAREMTRCRQSAQENLKRIRHQLLKFLTRHGYIYTDGDHWTQKHLRWLGGLEFDQPMLREVFDCYFTEMQHCIQRLSSLDRQVEKLADSEPYCQIVGLLRCFHGIDTLTAITTVTEIFEFGRFSSPGEFMSYLGLTPSEDSSGEKTCKGSITKAGNKRIRKLLIEAGWHYRHPCNVTSKALKQRRKDQPQWVINIADRAGQRLRKRYWYLINRGKSPCVATVAIARELAGFIWSVFKEYEARNGKNVA

SEQ ID NO: 473881 - protein, 385 aa, unidentified
MTSITYVGLDVHTTNYTAACYRFETDNTFAVAELKPKADEIEKYLKRVKKNLGEDCEFLCGYEAGCLGYSLYHELTAKGIKCVIMAPSTIESAPVNKIKTDKRDAKKLARCLATGGYKAVHVPTDEDNAVKEYIRMRDDVNGALKRIKQQITAFCIRNSKIYRGVVGKNYWTHKHLNWLEKLEFNNPFLRETLEEYIAVFYVLREKIDTYDAKIAELSQTPRFEEPVKKACCLLGIATHTAMATISEISDFTRFPSAGSFAAYLGLVPGEHSSSNKRNQLSITKQGNTHVRRLLVEAAQSYTKGQIGKKSAALKKRQAGMDPKIIAYADKCVERLKRKYVRIALHSNRNVAKTAIARELACFIWGLMTNNYGECRGNVENRPILC

SEQ ID NO: 473882 - protein, 341 aa, unidentified
MAVAGGLDLHRGQLTFDYVDTGTGESWRGRISPADRESLRGWLRRFHGVPDVEFAVEGCTGWRYVAEELQRAGITAHLAEPAETAGLRGRKRRAKTDWADARHLRDLLLDGRIPESWIPPGHVLEARALVRLYKDLLEERTSWQQRVHATLFHQGIPVVPKLGTADGQQRLEAAELSAAGRRAVQAGLRQIERLTQEMASLRRELARLSSRQPGCRALRRAHYGIGGLLSVAVWAELGDCRRFSSSDDAVRHTGLDITIYDSDGRRARGHIARQGPPVLRWALYEAALYASRPASPDYAYYCGVRDRIDGQRALLSVARKLARRCYHTLRDLGEDALAPAA

SEQ ID NO: 473883 - protein, 460 aa, unidentified
MGDTEKTGNAEGNALHVVHRHAAGIDIGSTFHMVAVRRDVDPQPVRRFESFTGDLHRMADWLTQAGVTTVAMESTGVYWIPAFEILEARGFEVLLVNARDVKNVPGRKTDVTDAQWIQRLHEHGLLRGSFRPSQQVATLRAFVRHRERLVEAAASTVQHMQKALLQMNVQLHHVVSDMTGVTGMHILRALVAGERDPAVLARLRDVRCQATVETIQAALTGNYRPEHVFALQQSLELYDVYQEKIRGCDAKIEDALRLLDDPRSLRPDRRSDARPARSKRPQKNEPRFDIRSALHTLLGVDLTQIHGIGPYAALKLVSECGTDMRRWPTAKNFTSWLTLAPGNKITGGKVLSSKTRRSSNRAAHLLRLAAVSVGRTRTALGAFYRRLAMRIGKAKAVTATARKLAILFYNTLRHGAAYVDPGATYYEERYRQRTLSNLRRRAHSLGYQLVAATPDGAGVS

SEQ ID NO: 473884 - protein, 354 aa, unidentified
MIYVGIDYHKKYSQVEAMDKEGKTVARAKLANKEDVLRRWFSCLPESCEVVMEACWNWQLMYEILEGIDEVKRIYVANPYKVKAIAEARIKTDTIDASTLAHLLRSNLIPSVYIPSEDTRRRKDLLRQRMFLVRMGTRVKNRLHALIDRYRVAMPSLSDPFGRTGLSFLKNLRLSPPGDLLMRQDIELLEALNLLLREAEREVIHLFSGDERYEVARSLPGLGPILSGVVVAEIDRIDRFPTPGKLLSYAGLIPTTYASGGRVYHGHLIKTSNKWLRWAMVEASWTAQRCSPYCQAYYRRHLHKGHNTAICILARRLLEILWVCLKKRRCYEERVNRFFYSPLPSQKYSHQGCC

SEQ ID NO: 473885 - protein, 400 aa, unidentified
MRAVFGIDVSKASSEVAILVNGEKVHGYTMSNDALGFARLLGDLRTVHKPEIIFEATGVYSRRLQAFLDEHGYAYTRLNPLEAKKQLDSLRVRKTDQIDAEKLAQSQFVLNRKPTYVQEEVYQNLRALSRFYQNLTEDIVRAKNRLHKVLQVTFPELENILSTPSGEQYWNLVTAFPCKDFVLDLSKDELSESIRQSTSKRISDKRVAYLAEKLIALANQSYCAVKKTSPILEEVRYYGKELLRLSEQRQTVLDQMVELAQPLPEYDILLSIPGIAETTATSIIGELGDIRRFQSANQINAFIGIDLRHYESGNFLAKEHITKRGNPYARKILFKCIHNIASASHTNPCHIADFYEKRKRQSQMTSTKSHTIASIHRLIRTMYYLIMHNKLYDYASTQNR

SEQ ID NO: 473886 - protein, 341 aa, unidentified
MEEYIGLDVSMKETAISIRRGGKRVWRGKRASDPKLIADLIRKRAPSAKRVVFETGPLAVWFYHALQGEGIPAICIDARHAKAALDMAPNKTDANDADGLAHLAEVGFFREVRVKGFDSMLTRTLVAARTKLVKITTELSNQIRGLMKTFGLLVPAGKGSTFEKNVRSLLADQDGLASIVLPMLEVWRSVRIRATELGRQLIAGARRSQACRILMSIPGVGTITATSFITAIEDPDNFGKSRSVGAWLGLTTRRYQSGEVDYDGHISRRGDHHLRGLLYEAATVILTRSSADSGLRTWGLKLRERLGFKRAAVALARKLAVTMHAMLKTGELFDRTVGATA

SEQ ID NO: 473887 - protein, 341 aa, unidentified
MGEVTTIGLDLAKHIFQAHGADASGAVVFRKKLRREQVLAFFAGQPRCRVAMEACASAHHWAREIGALGHETRLIAPAYVKPFVKRQKNDAADAEAICEAAQRPTMRFVLPKSAEAQGAAVIFRTRDLLVRQRTQLINALRGHLAEFGHVARKGPGHVAKLVELVRAAESDLPEEARSVLLITVEALEAVHARVRGLDRQIEARAKASPLARRLMTVPGVGPILATAMVALAPPPSTFRRGRDFAAWVGLTPRQHSSGGKERLGRTTKMGERSLRRLLIIGASSVVIAAGRGGARDPWLARLLARKPRMLVMVALANKMARVVWALMARGGSYRAPIAAAA

SEQ ID NO: 473888 - protein, 368 aa, unidentified
MRFYTKTHQHYGGIDLHAKTLYLCILDREGQILLHKNVRSRPDDFLAAVAPFRDDLVVAVECIFTWYWLADLCRNEGIEFVLGHALYMKAIHGGKAKNDKVDALKIATLLRGGTLPQAYVYPPEMRATRDLLRRRLHLVRRRANLLAHIQNTHHQYNLSPPAAKIAYKANREGVAEAFDDLDVRKSLEIDLAMIEHYDVTIRELELHLERRAKQHDPQAYHRLRSVPGIGKILALTILYEIQDIHRFERVQDFLSYSRLVKCEHSSAGKKLGTGGAKIGNAHLKWAFLGSRLALPSEQRRRAEPRSPPGREARQGQGAVDPGGQAGTRRLSDPPQGAGLRDGPVPGRGEVKERRWIIQPSNWSRLHRQ

SEQ ID NO: 473889 - protein, 314 aa, unidentified
MKKKVEIFVGIDISKVWLDVAVHGQEDPLRARNDDTGITSLVKRLKKLRPSLIVLEPTGGFEKLVMAELTDAGLPAVVVNAKRVRDFARATGRLAKTDELDAKVLAHFAATVRPPVRELPSEEEEQLTALLTRRKQVLDMVTMEKNRLVTVRAKMRSEIESHIQWLSKSLKDLDKEIEDFVESTLSWKEKDALLQSVPGVGPVTAATMLGMLPELGQLNRQEIAALVGVAPINKDSGRKQGKRRVYGGRANVRSVLYMAALAATKFNPVIRKFYERLIQHGKEKKVALTACMRKLLVILNAMMHSNQPWRSQAA

SEQ ID NO: 473890 - protein, 334 aa, unidentified
MAFDQHREQIAFDALDTATGEVSRGGIRPADRLGFRRWLGRWDGREIEAALEATTGWRFMVEELEAVGAEVHLAEPAETSALRGPKKRAKTDRQDARHLRELLQAGRVPESWIPPEWILELRSKVRLRHTLIQQRGEWQQRIQAQLYHHGVPRRRGLLVSERRAWLEALELPDAARRQIAVALAMIDAVDGQLRPLDDELRVLARRQPGCRALMRHFGIGETTSVAILAELGDAGRFSSARHAVRYAGLDITVSESDRKRAPGHLSRQGPPTLRWALYEAAQVARWPRSPDRDYYEQAAARLGGNRACLSVARRLLKRAYHTLSELGEEALQPA

SEQ ID NO: 473891 - protein, 459 aa, unidentified
MCPATERLGWTCTSPTRTVKHVPWGVRAKSASTGPMKHHGWPSREGILTESYRFFVGIDWAWERHTICVLGSDGEVIDRRTIEHSGAGLTQLADLLEKLSSGDPFSVAIAIEMPRGAIVESLVERGFAVYSLNPKQMDRFRDRHTVPGAKDDSRDAFVMADALRTDLHLFHRVRLDHPDILRIRELSRSEEDVQQDQVRAENQLRSLLNRYYPQMLQLCPAVDQAWFWDLLEMASLPAQGAKLSKSRIEKLLRSYRIRRLDADEIHQTLSVPALQLAPGAAEAASEHVLLILPVLRLLDRQREEIARRMQLLLEKMSEDEQVVEHRDVKILLSLPGVGRVISATMLAEASQPLAERDYHAIRSYAGAAPITRRSGKRKMVVMRRGCNPRLRNALYHWSRVSSQNDPRSKEHYAALRAKGHSHGRALRGVADRLLAVLIAMLRSGTLYDPNHQTAAMPLK

SEQ ID NO: 473892 - protein, 462 aa, unidentified
MRILGIDLAVTAKHRAILADERGRFIGGILKFNTTQAELERLYATARQGLEADEELAVVLEATDIVWYPVAVFFHRRGATVYLVNPRMAADLARFYKRHAKSDRLSAKVLARLPVVSPDSLYPWVPSGPDYLALQRGCKELERLTEQASATQNRLRSADHLGWPGLHLRVFGDPFSPAARWFREHCYDPHRVVEAGVSGLRRAWQAAELYDGDEDWIEPLLTLAHEVLALYGEQGECLDYQALAAEVQREQRRLAALEDDANFVRLKVTRPRYRQLHPSRNLESLYGVGQDGAAVYVAFIGDPHRFPDNRAFRGWHGLVPRSDQSGEREAKGLHISQAGPDLIKKYGFLGAETARQWDPQIAAIYHDQMVNKGKHHTQAVCACATHLLDRLRVILAEDRPYELRDVDGTPVTPQQARAIIAERYTVPEEVRRRNNHRARRERAEQWAERKEERRSRSREKRG

SEQ ID NO: 473893 - protein, 316 aa, unidentified
MTVTPVFVGIDVSKERLDVARRPSGDGWAVANDDPGIAALVARLRELPPALIVLEATGGLELAVTGALAAADLPVVVVNPRQVRDFAKATGRLAKTDTLDAAVLAQFAEAVRPARRPLRDADTQALGALLARRRQLVEMRTAEQNRLGSAPRRVRVEIQAHITWLNRRLARVDADLDQAIRSSPLWRAKDDLLRSTPGVGPVLATTLLADLPELGTLTRQRIAALVGVAPLNRDSGTLRGRRTVWGGRAHVRAVLYMSTLVAVRYNPVLQSFYLRLREAGKAPKVALTACMRKLLTILNAMVKHRTPWEDRFAHSA

SEQ ID NO: 473894 - protein, 322 aa, unidentified
MSVSVLGIDIAKQKFDVALLVDKKTKHKTCKNSVEGFETLTIWLEKQGIQKVHACLEATGNYGEDLAIYLHEAGQMVSIVNPAKIKGFGQSELIRTKTDKIDAALIARFCLAMKPGPWSPPSPEIRSLRALVRRVDSLIDMRSQEKNRISTAHESVIPLIKEHIGYLDKEIEKIRNQIADLIDQDPNLKNKKDLLVSIPGIGTATIPHILAELDDLKKFNHVRELVAFIGLAPREKLSGSSIKGKPRLCKIGHARLRKALYMPALVSIQCNPVMIAFYNRLKEKGKNGKVIVCAIMRKLVHIIFGILKSGKKYDPNYKPALA

SEQ ID NO: 473895 - protein, 324 aa, unidentified
MNKDIKYFGIVISHLVFDATDSDGNYYQLKNNPSGFKKFVKILGSDSHCVMEATGYYHYQLAYYLLEAGIKVSVENPLAVKRFIQMKLSKIKTDKSDSRLICEYAKQVELKLWQGNSKHQTECLQMTRLLSVYTKQSTMLKNKLHGEAVLDNPSKAVVSSLKRSLKQVQKEMKTLEGKLIILVKEVHQDVLTRLKTIPGIGNKTALMLVVLTDGFERFTSGGELCSYAGLTPVIRKSGSSLNGRSKISKIGNQKLRNLLFMCSFNACKYNKACREIYERLVAKGKSKKLALIAVCNKLLKQAFAIAKSGLVYDQTYRSILATNK

SEQ ID NO: 473896 - protein, 339 aa, unidentified
MKVYAGIDLHSSNNYVGIINDQDQRVYQKRLPNQVDHILEALEPFKESMEGVVVESTYNWYWLVDGLQAHGYKLHLANPSAIKQYEGLKHTDDKWDSFWLAHMLRLNILPEGYIYPKDKRPVRDLLRRRLLFVKHRTAHILSLQSMISRNRGTGMSVRAIKRLDEGDAEIVFTQPHLVLAAKSNIAVIHFLKERIKLIEKAVKTHIKLRDEFKYLLTISGIGDILALTIMLEVGDINRFPKVGDYSSYCRCVKSERLSNGKKKDENNRKNGNRYLSWAYVEAANFAIRFCPYSQAFYQRKMAKTKRIVAIKALSNKLARASYYIIRDQVPYDPEKLFSQ

SEQ ID NO: 473897 - protein, 425 aa, unidentified
MKQRRSVEGEFRIYVGLDWGTEFHRACVLDSSGRILRQCRVDHNGQAITDFLRSLDDLANGQPATIAMAIEVPRGPVVEAFLEGGFAVFSINPKQLDRFRDRYTAAGAKDDSRDAYVAADSLRTDQHCFRRIATDHPDVLRLREISRTEESLGEDLRRTVNQLYQLLLRYYPQLLQLNSTPDEPWIWALLEAAPIPQRGAKLTLARLKSLLAKYRIRRWTAEELQVILRTPPLPLSAGSADAISEHALLLLPQLRLLYSQRNKVRNRIEALLKHMTLLGREHPECREHRDVGLLLSIPGLGNLIAANLFTEGTDALAQRDYDALRAHSGAAPVTRQSGKSRQVIMRRGCSERLRNAVYHLARCSVLHDPHSKRHYAELRGVGHKHGRALRGVADRLLTMLIAMLKTGKPYDANRRSHATTPAEAT

SEQ ID NO: 473898 - protein, 382 aa, unidentified
MKNQNQQPTPTSHKQTEAKVEVIKLGIDIHKRQYVVVQQVDGEAPKSPQKFTPEAFLRQAAKMKARAKRVVSCYEAGCFGYVLHRQLESMGIENQVVRPRNWDEYGSKVKTDGRDAKELCSCLDRWLAGNEHALSIVRVPTEEQERARSLSRQRDTLAKEQKRLQNVGVSNGRYYGFELPMSWWKPCRFRKLEEELPGWFLEIVRPIQEILVVIGSQLKAATAHEECKANRKLPVGLGALTASVLDQEFRDYTRFNNRRQVASFTGLCPSEQSSGGTRRQGSINKHGNPRIRSKLVEFGWRLLQFQKEYEPVKKWQQKLAEKPQGKASKKKMVVAIAREFAVDWWRINTDQIQPEDVGLRVDYPTAYATRALREGRMVRHYN

SEQ ID NO: 473899 - protein, 368 aa, unidentified
MSRNKRLLVNAIDVEQEYKIIGLDLAKDDTSCVCIAESGEIIAIDRLSYADLLEAAEQLSPTIFAMEPCNGMHWLVNQLQDCGHECRVISGSAVQQYVESHFGKQKTDLNDAQAIAYLALDEMLRFIRAKTPSEMSIQALQTIRTQLTKQKVASIVCFKSLCQGYGISIGKNEGSVAKFISLLKETNKIPEEIKEALRMLIANYKVLRTRINKIDKVIDTIVSHNPIGQNLKSIPALGVQCAARLLTIAPNIEDFKGPKDLVAYCGLVPRNLTTGQHQKTAGITKRGDRLMRRNVVLAANCLYRMNKHGNLPNCKLKRWMDKKFLIMPYQKFIIQLAAKLLRIAYAVMKYGTDFDYARAGVARSAIKV

SEQ ID NO: 473900 - protein, 355 aa, unidentified
MSQEKYIGMDVHQATISVAVMDASGKVIMECLLETKAATIVEFIQGLHGTLSLTFEEGTSAAWLHDLLKPHVSRLVVCDPRKAALLKEGNKSDRIDARKLAEMLRTNQLKSVYHGEHGLRTLKELGRSYLTITQDVTRVMNRIKALYRSWGIPCSGSTVYAPRHRAEWLAKIEQPGVRIRAERLYQQLDSLQPLRLQARCELLRESHRHAVVRLLRQIPSIGPIRSALLVALLQTPHRFRTKRQLWAYSGFAVETHDSGEYRSVRGKLQRNRERITVRGLNENHNKDLKNLFKSAAISASTRPGPLQDFYVALVGKGIRPTMARLTLARKIAAITLTMWKKGVSFDPKQLHRQAA

SEQ ID NO: 473901 - protein, 401 aa, unidentified
MDYHSVNPVERRCTVIYLGIDIAKRLHVAAAISSDGEIIIEPFEFSNDHDGFSKLLSSLHNIQKEYLIIGLESTAHYGNNLVVFLFSHGFNITVINPIQTSVMRKNNIRKTKTDKVDALLVAKTLLLNNFRLVTKQDIDLIRLKDLCRFRQKLIKARTSVKIQMTTYIDQVFPELQYFFKSGIHHKACYALLKEASSPEEIASMHMTHLAALLNKASHGHFKKEKAQELRVLAQKSVGTGNKTLSIQIAQSISQVELYDRQLTEVHLEIEKTMKSLNSVIMSIPGIGYLNGAMILGETGNITRFSDPSKLLAFAGLDPSVYQSGNFKAANTRMSKRGSRVLRYALINAAHNVVLNNKTFKEYYDLKISQGRSHYNALGHCAGKLVRIIYKMLTCNLEFNLE

SEQ ID NO: 473902 - protein, 359 aa, unidentified
MLKYSFGMDVSKKDIYACLSVIDAKQQVKVKASSKFPNNKQGFKDMLLWLNRHKKEVKIPLMCVMEATGVYYEECALFLFKAGFEVSVVLPNKAKKYLQAVGLKTKNDKIDAAGLARMGAEQCLELWRPMDEYFYTLRALTRQHQSLQELKTNISNQLHADEHSIYSSKEVMKQLKKLIATIEKQLKDNEHSIHAHLYSDDEVAQRVNHIIDIKGLGYMTVATVLGETNGFALFKSISQLISYSGYDVIEDQSGKHQGKTKISKKGNSHIRRALHMPAFNVIKYDDGNFKTFFERILAKHNQKMKAYVAVQKKLLVMIYTLWRKNEAFKPGEKIKSSGNEETVLSFALTEGQLNEVAPA

SEQ ID NO: 473903 - protein, 348 aa, unidentified
MALTIVETRAVTGGVDTHADVHVAAALDPIGGLLGVGEFPATPAGYAGLLGWLRGFGTVCLAGIEGTGSYGAGLARHMATAGVRVVEAGRSDRQDRRRQGKSDPLDAVSAARAAQSGRARGAPKGRDGQVEAIRALMVAKRTARSERTQTINQARALVLTGPDDLRTRFSRHTPAGLVAQLAALRPRPGDVVGYATRISLREPGRRAQFPGGQLERLDELIVPLVTARAPGLLALHGVGPDTAALLLIAAGDHPGRLRSEAAWAHLCAAAPIPASSGKVTRHRLNPGGDRQANHALWRIVITRMGSHPPTRAYVERRSAEGLSKTEIIRCLKRYAAREVYPHLRPGAG

SEQ ID NO: 473904 - protein, 472 aa, unidentified
MRYIGLDLALTTAHKAVVIDEKGQAITNIMSIKAAATALEELFQRTRAGAPADEPLVVVMEPTGMAWFPVAVFCQRQGVQVHLVNSQQVADLRRYYRKHAKSDRSDARVLARLPLVSPEKLHPLELISAAQLTVQRGCKELDRLIDLMTAIQNRLRSIDRFAWPGLEQVLPANIAPLTRWFREHCYDPRRVITLGAAGLQQAWQKSGLKSTEMPPSAEWATELVQLAQEVLPLYGCAAEFLDYAYLQAEVSREQALLAMLEEALKRLKLKTVRPLYRQLHPSRNLESLHGVGQDGAAVYFSFIGNPARFPNHAAFRGWSGMIPRSSQRGAGEVKGLPISQAGPDLIKKFSFMGAETARQWDPQIAAIYYNQIVRYGKHHTQALCACATHLLDRIWTILKDDRPYELRDVDGTPVTARQARQIIALRYTVPKEVRQRNNQRTRRTRREQLAEKKHLRESRPSEVRGKSQTSSE

SEQ ID NO: 473905 - protein, 359 aa, unidentified
MRYVGIDYHKRYSVLCATDERGQELKQRRISGNSATGFAQFFSELGEESKVVMEACWNWGWLYDLLAKIDGIDEVMLAHPYKTRLIAEAQIKTDRLDAQMLAELLRGDLIAQSHAPSAATRARKHLLRQRLFWVRLRTMLRNRMHAILDRQHGLERPQLKNFFSRRGQTWLEEVQLPCAEDQPLLTQDLEVAELLEEKIKQLDRSIGQSQSEEEKLLESIPGIGPLFSSVIATEIDGVGRFNSATKLAAYAGVVPTTHASGGRVFNGRLLWQCNKWLRWALIEASWSAIQFSGYFGSIYRCARARGKNKNIAITMVAHRMIKIIWLLLAERRPYTETLPDRSEDGMTVVVRRKVLGLAS

SEQ ID NO: 473906 - protein, 346 aa, unidentified
MHKVDQPADAPNVSGIMIARNEMADNVLGIDVSKRKFDVALRGGERTGRSHAFANSEAGFEQLVGWLEKLGVEQVHACLESTGTYGLALAEFLHGRGYVVSVVNPACIKAFAASELKRAKTDRVDAKVIARFCEAMKPTPWVPPAAEVSELQALVRRVESVQQMIQQERNRLAAPGISEPVRASLARTVSLLGQELARLREQVADHIDQHPELKGRRDLLCSIPGIGETTAARLLSEMSGIEFGRAREVAAYAGLVPSPRESGSSVRGRGRLSKRGNVRLRRALYWPAIVAMRHNPTLRAFAGRLREAGKPTMVIIAALMRKLLHIAFGVLKHGRPFDPNYHPCAT

SEQ ID NO: 473907 - protein, 421 aa, unidentified
MLKIHRFNCAGLDVHKNLIVATIGITDKKTRVTEYIQKDFSSLNYDLYNLKNWLIEHKCFDVCMESTGKYWIPVFNVLETEAKMNIVLVHPKYVKAIKGKKTDKKDSKWICDLFKHDLLKSSFIPSKDIRELRDLSRYRFKLICMRTSERNRYQNSMTVSNIALASVVSDPFGKTAKAIMNEVLSTEAIDEAKITKLIHGSCRNKDKIIESLKNSKIEPDQRFKMTEIQSHMNELDKHIEAVEIEIIKRASRYFDDFIHITEIDGIQLMSAILIISEIGVDMTQFETDKQLCCWAGVSPANNESAGKKRSVRISKAGQYLKPVLVQCALAAIRKKNSYFGQKYTRIKKRRGHKKAIIAIARMMLVSIYHMILTGEKFNPSDYESFKDPKPQREKNNYTVETALDFLKSQGFDVSSIQEIPK

SEQ ID NO: 473908 - protein, 344 aa, unidentified
MEHSAGLDVSVKETSVCIVDDTGKIVREVKVASEPAALLAVLKNPAYCFKRIGLEAGPLSQWLFSALAEAGLPVICVETRHMRAVLKAQINKTDRNDARGMAQMMRVGLYRPVHVKTLRSQKLRMLLTHRKLLLSKAIAIENDLRGTLRNFGLKVGMVGKVKFEARVRELVENLPDLAVLVEPMLIVRRVLREQIVILHRRLLAIVRDDEVCRRLMTTPGVGPVVSLTYRATVDIPARFRKSKSVGAVFGLTCAKYQSGEVDWDGRISRCGDEMMRTMLYEAAQAMMRSKKWSWLKAWAMQIARRRGMKKAIVALARRLAVIMHRIWVDGTEFRWTREQPAAAA

SEQ ID NO: 473909 - protein, 341 aa, unidentified
MNQVSTVGLDLAKYIFQLHGADSAGAVVFRQKLRRGQLLAFLATLPPCTVAMEACGSAHYWGREIAKLGHTVKLIAPAYVKPFVKRQKNDMADAEAICEAAQRPTMRFVALKSANQQAAAVVFRTRDLLVRQRTQAINALRGHLTEFGVIAAKGPVHTSKLIAALEDPASDLPQAARAILAVLVEELRSLDERVAVLDREIARHAKENAVARRLMTIPGIGAVTAAALTALAPPADTFRCGRDFAAWLGLTPVQRSSGGKERLGKTSKMGERSLRRLLIIGASAVARWAARKGVPAGSWLGRMLARKPPMLVRVALANKMARIVWALLAKGGVYRAPVAAV

SEQ ID NO: 473910 - protein, 387 aa, unidentified
MPQPNDLSRSLVALDQDSTLIAVIEMGQASWLVAGIVPGVNRHPLKKIATDQEQLLQVLRRWAKEAETTGRMIKRIAVAYEAGRDGFWLARWLRARGVEAYVIHPSSVPVSREHRRAKTDRLDTELLKRAFLGWLRGEPDHCSMAAIPTLTEEDAKRPGRERESLVGERTRIINRIKGALARLGIRNFKPILRNAPKLLETLGTPEGAALPPNTLAELRRDMARLSFVKQQIKEVETGRIERLQRAPGERGNAMVRLLTRVVGVGVETADMLVQEIFSRNLRDRKAVARYAGLTGAPDESGKKRRERGLAKSGNARVRRGMLQLAWGFLVHQPDSVLAKWYRARTADARGVTRKTMIVALARKLLIVLWRLATTGEVPEGLAIRAAA

SEQ ID NO: 473911 - protein, 343 aa, unidentified
MKLSYVGVDLAKNVFQLHGIDQHGQAIWRRRLRRGQWLQVLRETVEPGCIIGMEACASAHHWARQLEAYGYDVRLIAPQFVKPFVKSNKNDRNDAEAICEAMTRPHMRFVPVKTVEQQDLQAIHRVRSTLMSQRNAKANQIRGLVAEYGIVAPQQMLALRRAVPAWLEDAENGLSACFRALLHDMWMDLQHLQDRLTELDRQIEQIAKDNPVTRRLQQLRGVGPLVATALVASVGDGSHFRKGRQMAAAIGLTPRQHSSGDKRRVLGISKRGDVYLRTLLIHGARAVVSQAKRRDDPLSLWVTGIAERSHINVAAAALANKTARIAWAMLRNESDYEPALAVT

SEQ ID NO: 473912 - protein, 414 aa, unidentified
MEVKYQRCCGIDVHKQTVVACVMVSGEQPGEPDKETRTFKTMSDDLGALARWLKAKGVTHVAMESTGVYWKPVYNLLEGQFEILVVNAERIKALRGRKTDAADAEWIADLLRHGLLSGSFIPTAQQRALRDLTRFRSSLVEDRARAVNRLQKVLEDANIKLASVATDVTGVSGRAILEALLAGQTDPQVLAELAQGRLRKKIDLLQKALAGRLKPHHRVMVTELLGQIDHLDETIERLNAEITEQMRPFEAEIERLDSIPGVSRRVAEVLVAEVGVDMQPFERAENLASWAGMCPGNNESAGKRKSGKTRKGSRWLRAALTEAAHGAARSKHTYLKAQYHRIARRRGAKRALVAVGHSILIIAYHLLTRQQTYQDLGENYFDERDHEGVKRRAVRRLEQLGYQVTLAPLMAVAA

SEQ ID NO: 473913 - protein, 311 aa, unidentified
MTILTSQTVVGIDIAKAEVVAFRADQQTTETIKNDRAVLKRWLKALPAHSAIALEATNIYHLDTVELAHEMGHQVYIVDAYRVSHYRRGVGQRAKNDPCDARLLARYLASEQGKLRVWSPPPKAYTLLKSLLHRRATLIQNHTGLMLSWANEPLLKKVLAAQQKAFKQADQAIQKLLRKVSKEAGIEENIDRCKAIEGVGELTATGLATTFMRGDFANGDAFIAYLGMDLTVDDSGKKNGPRHLSKKGDPEVRRLTYNAAMAACRSPKWKPFYDSYLARGFSKTQALVALARKLCRVAFALMKNQSEYLPA

SEQ ID NO: 473914 - protein, 346 aa, unidentified
MRQIVRIGLDIAKRWFQVHAVDEAGKEILNRKLPRDKVLGFLGSLPACEVALEACSSSHHWGREIGQLGHRVRLISPNYVKPFVKRGKSDAHDARAICEAASRPDMRFVRVKTEKQQAALMQHTSRQLLIDQRTAVANSLRGQLAEFGIIEKQGIENLADLVRRLDEEDPDIAHIPETALAVMKILADQLRAVEANLAMIDEQIEAWRQSSASAQALKTIPGVGTLISAALAAYVPDPSAFSSGRDFAAWLGLVPRQNSSGGKDRLGRITKQGNPYLRRLLVLGATASLRWLNKRTDPLAMWTRQLLQRRPARLVTVALANKLARIAWAIMTTGELYRREALSVVA

SEQ ID NO: 473915 - protein, 448 aa, unidentified
MSKLHVGLDVSQKSVAACFVLDDGTEPVKRFSFEHNPAGVDKLVAKINTTAEEIGIDQVMIGMETTGLLWWHLSEALRNSERLEHLQPQVYAINAKLVAHFKKAYVEMDKTDPGDAFVIADRLRFGRLPKLAEPDERYLAIQKLTRHRFHLTHSLAREKNRFLTHLFLKFSGFCQEEPLSDPFGAASSALLTEFFSVDEIAQMPVEDLTDFLVEKGKNRFPDPEAVARATRQAARNSYRLSKCLADPVNIVLAMTLENIRFFEKQIAAVEKPIAKELAAFPGAQVLLSVPGLGPVFVAGIIAEVQDVNRFDTDAQLARFAAIVWKKNQSGAFEADDTPMMHSGNEYLRYYLIEAANSLRMHNEEYAAYYQTKYREATTHQHKRACVLTARKLVRLVHTLLRKGQLYQTPDQRKEAPAVLPAGMTPGELARHVVRRRQAKGRFRVHLDH

SEQ ID NO: 473916 - protein, 412 aa, unidentified
MEGETVIAGVDTHKDVHVLCLLDGLGRKIWSGSFGADPEGYDRLAEAIGDPGSCMVVGVEGTASYGAGLTRRLVELGYNVVEVLRPKRDKARPGEGKSDPLDAERAARKAASGRGCSVPKSQDGWVEAVRQLYVARRLAVATSTSCVACAKSTLTTSPSALRERFRGRERPKDLMPLLARGRKAGDALEESVLASLRSVAAVWKEARSQVESLDERIRALLEANAPALLGIEGCGTTTAAALVVAAGDNPGRLKGEAAFSMLCGVSPIPASSGKTERHRLNRGGNRQANWALYEIAIKRMAYDERTKRYVAKRTSEGKSRREAIRCLKRYIAREVYRVLMDPNPDGAAPEGPELAKMRKAMRVTQKQAAAGLGMSAASLGHLEHGRRRSTKLERRYYELLCELKGALPQTAY

SEQ ID NO: 473917 - protein, 403 aa, unidentified
MNSVGIDISKGRSTIAVMRPFGEVVISPFEVRHTGSELSKLARQLKSLDGETRVVMEATGNYHASVAKLLHDAGLYVSVVNAKLVHDYGNNELRRVKTDRKDAVKLANYGLDRWLTLPRYIPEEDTRLLLRNCYRQYRQYSKVQTVLKNNLISLLDTVFPNANRLFSSPIRGDGSEKWVDFVAEFWHCRCVSEKSERAFTSKYLRWCRKHGYNFSEAKAHTSYAEASGHIGVMPKSETTKLLVEQAVAQLRATSTALAALKLEMQTLASQLPEYPVVMDLFGVGPTLGPQLIAEIGDVRRFYSKKALVAYAGLDAPPNDSGDVTGRHKSMSKIGASSLRRTLFLVMSVYLQNAPLDEPVYQFMDRKRAEGKPYRVYMMASANKFLRIYYATVKAYLESLEHTA

SEQ ID NO: 473918 - protein, 514 aa, unidentified
MSEGTAQPPFSRLCPRLLRKHSAWLIRHIPLTQKFHPQPLAPAKMADWVHAHYARVRSPYAAQDKPFASGFTNPYRNGGDIMLKINYMSTLFVGIDVSSKSNSVYAMDFEENKYLSTSFGNNQPGADELVNRIAACMQKHKNLDTLLIVLESTSVYSVHISNFLASSEVLMPYKPYVFCVNPKATANYRKSYIGMEKTDPTDAYLIADFARVGRTKKLEPWRGGQFIALKRLTRHRMHLSECITREKTYMVSNLYLKFSELQLLEGDDKPFGNLYGATSSAILTEFLSPQEIIDMPEEDLLAFLAQRSRNRICDLSKTSELLRKAARDSYRLDKCMYEPLNISLASSFNCIQAYQKEIRLIEQAIEKCIKGMNPNALIILQSIPGIGPVWASGILSEIGDISAFHSSDALAKYAGLYWPKGDSGDFISEDNQMSKAGNPYLRYYFGEAANSIRKHIPEYADFYARKYAEVSKHQHKRALALTSRKFVRLVFGLLAKKQLYTGEKLDTEHNTESN

SEQ ID NO: 473919 - protein, 337 aa, unidentified
MTIIRIGLDTSKHVFQVHGVDESDQAVLRRQVRRSEMTKFFAKLAPTRIGLEACGASHHWARMLRGLGHAVVLMPPQYIKPYVKRGKNDAIDAAAICEAMSRPGMRFVPIKSAEQQAGLMLLTVRDLLVKQRTMLINAMRGHAAEFGVVAAKGPIKVSELLQRAQAEAAGVPALAREMLSVLSGQLDALEAKLKALEAQLIAMHKADPVSQCLATQPGIGPIGAVSFALKVSDPEAFRSGRHFAASLGLTPKENSTAGRHRPGRISRQGDESLRRLLVLGATAVIRFAKAGQASPWLLNLLARKPKKLAAIALANKMARILWAMMVSGEVYRHPKAA

SEQ ID NO: 473920 - protein, 407 aa, unidentified
MICVGIDVSKRKSTVCFMAPGDKIIRRLFDVKHTKEELQPLVDEIRVQAKYDEIKVVMESTGVYHLSIAYFLQQNGIFVSVVNALKVANFNKAENFRHTKTDSIDSSNIARYGIAYWAKLPQFDLNGDKYFLLKRLCDAYLNFSEERSRILLQLQSQLEQTMPGIFDLFGGFDINSGKDKLLDFLERYCHIKDIIAKSEAEFVASYREWAKEKGYRSNESKAATIYAQAKNGIPSIPNNPIVRETIMWYVGLLRRADEALMASLTRMEDIAKDLPEYELVGEMGGVGRVTRVALIAQIGDVRRFKNKHSLICFAGLTPSIHELGKFRASQNHIVKKGSARLRKVLYQVMMSLVMHKIPKDDAVYRFIKKKEDEGKYKKVAKVAGMAKFLRIYYGRVMHLYRDLGLAA

SEQ ID NO: 473921 - protein, 482 aa, unidentified
MKAKQKEPTEKSTGQSSQLNWRQMNRKQRRDLERKIQSADLTLQLVHPDAAGIDIGNESHYVAVPPDRDSQPVQHFGCTTAELRAMADWLKQCRIRTVAMQSTSVYWIAVYDVLEQAGLEVYLVNARETKNLPGRKSDVQESQWLMKLHTYGLLRNSFRPPREIRMMRTYWRQRNDLVRSAARHIQRIQKTLTQMNMQLANVLSDVSGVTGQAIIKAILAGERDPQKLAAFRDPRVKASEKDIARSLEGNWQEDLLFVLKQEQATFEFCRKQMAECDRQLEQYLQKMEDRSQGATLPEEKRKDRLQKKKGNQPQFDLQQQLFRMTGTDLTQIDGIDVMTATTILSEAGWDMIKWKDEHHFVSWLRLAPDNRISGDRIIGKGRLPTSNRVTVALKLAASNLRTSQSYLGAQFRRLRARLDTPVAIKAMAAKLARLIYRMLRYGTKYVDHGSRHYELQQRTREIRRLKLKAATLGFHLVQSTAA

SEQ ID NO: 473922 - protein, 449 aa, unidentified
MKRKARNKKRIQEHLEQVNLYAAGIDIGSTSHFVAVPPSLDDRPVREYSCFTGDLEHMADWLKDVGITTIAMESTGVYWIPAYELLEERGFEVCLVNPRHLKNVPGRKTDVLDCQWLQQLHSFGLLRGAFRPSGEICAFRAYMRQRSMLVENAATHIQHMQKALRQMNLLLDNVVSDITGKTGMTIIRSILSGQRDSVILARHRNSNCKNSEEVIAKSLKGHYKEEHLFSLRQAVELYDFYQHKIANCDQAIAMALDKIEGPDDLDELPPKKSKARRKNKALPFDVRQNLYNITGVDITKIDGVKETTALKIISEIGTDMSAWPTAKNFASWLGLSPGNKITGGKVISSKTKTCANRAAEAFRIAAYSLTKSKSAFGAHYRRKRSQLGPPKAITATAHKIARLVYFLIKYGAEYVDPGQDYYEEKYRDRIIKNLQKKAKSLGYEMVSQS

SEQ ID NO: 473923 - protein, 331 aa, unidentified
MIHLGIDIAKLKFDVALLAQGKFKTKVFANDSAGISACLKWLGTHADGPVHTCLEATGSYGEALACALHDAGHTVSVINPARTKAYAQSLGLRQKTDAVDAKMLARFVQTQEPAVWTPPPAELRALQALLRRLDALVEMRTQEKNRLGVAEPTVSASIAQHLDYLQAQIDALKAQIENHIDQHPGLKQQQDLLDSIPGIGAATSAWLIGELNLTRFDSARQAAAFVGLTPRKDDSGTSVRGRPRLSKQGNSLLRKLLYFPALTAMTHNPLVRALCLRLKAKGKHNMAIIAAAMRKLIHIAFGVLKSGKPFDPTLPCSLDKRNWRTAPSPGR

SEQ ID NO: 473924 - protein, 325 aa, unidentified
MKKIFIGIDFSKEKFDVVIIMAENLEEKAPRVHEQFANDKAGYRKFLKWVKVNSHGVDMSLWLFCGENTGDYSKGLANFLYGKGCDMWLENAKCIKDSCGIRRLKSDRADAAMIAEYAMRNHDRMTLYEPLSGPLAQLRELFLFRQMNVRKRSGYIVRKGEKGRTLDSSPAKSFMARKCKHMIAELDKTIKECDKMIEALIASDRDLQETYEIVTSVPGIGAQNAVCMMVYTDNFKRFDCNPRKIACYYGIAPFGHDSGTSVHCDPHVHYMANKTIKGILTQAALCAINHCPPVAHYYARLIERGKKTMVALNLSLIHISEPTRP

SEQ ID NO: 473925 - protein, 331 aa, unidentified
MQSKQIFIGVDVSKLTLDVWVNGTRHHLKTENSSEGLKKLIAWLKSLQIALGDCWFVLEYTGGYEYRLVQFLQAKQITFTRVPGLQIKKSLGMQRGKNDKIDSRRIAEYGYEKRMKLKEHKACTTAITRLKQLLTQRSGFVSDKKAHEHRMKELLAMMDFKGGDPIIKHYKQAVDFAVKMIKKTEAEITKIIATDEGMSRNFELITSIPGIGPVNGWMTIAYTENFECFPDGRTYGAYIGVVPYEYSSGTSIKGKSRVSHMANKTLKADLSMAAKASVQHDPEMKTYYERRLGIGKKHMAIMNEVKFKLVLRMFAVVNKGEVYVKNQKIAA

SEQ ID NO: 473926 - protein, 367 aa, unidentified
MRKSSKVFVGMDAHKESIDITLAEVGGEVRRWGQIGGDRAALEKAVRKLESLGHPLHFVYEAGPCGFWIQRTLAARGHDCWVVSPSLIPKKSGERIKTDRRDSEKLARMARAGEVSPIYVPGEIDEALRDLVRARDDAIIAQRKARQQLKALLLRNEIRYVGKSSWTPAHRRWLAELKLPQPVQQIAFEEYVDAVEVASARIERLTRAIEGGIAGWRFEPVVQRLQALRGVQFVHAVTLICELGDLSRFDAPRQLMAYLGLVPSENSSGERRHQGAITKSGNHFARRALIEAAWAYQHPARVSPIIARRQAGLPKSARDIAWKAQLRLCARFRRLCARRLNKNKVVVAIARELSGFVWAIAREVKSA

SEQ ID NO: 473927 - protein, 385 aa, unidentified
MFQCSGSSQAAVDYNSTIIGAIELSEKKWVLAVQLPEVGRHSRHALDACGDGLVSFVERLKAKCASAGRKIARVILTHEAGRDGFWLARFLARRGIEVHVMQPSSLPVDRRARRAKTDMIDVEMLLRTLMAWLRGEPRVCSMVAIPSEADEEARRANREREDLTGERRSIVNKIDGILATLGIKGYKALRRGRREQMNCVRQPDGEPIPSQAKARIERLLDRLELVMKLIEQVESERDAVLKKDAPADEAERMIRSLTALRSIGPDTATLLVREAFVRRFRNRRALGGYVGLGGTPFSSGGSEREQGIGKDGNRRVRAAMVELAWTWLRWQPESALSVWFRARAGAMGGRIRKTMIVALARKLLVALWRYVNDGVVPNGARLKAA

SEQ ID NO: 473928 - protein, 442 aa, unidentified
MYIDSLCKVDYSVKTAKGDLFMKKAGRGKVREIKQDTLIVTIDIGLEMNRGYCTTTDGRDTKPFKFDNTREGLATLWSMIVVNKNRFRCNEVIVGYESTGPYGEPTGNYLVKKPVTVVQVNPMHTKRVKEINDNSPLKTDDKDPRVLADIIRLGHALSVVIPEGDAAYLRRLNNARERHVGERTALLNQLQQLVFLLFPEFRRVIKDMKTKTALYILNKYLIPDIIGGLKKEGFGEEIRKKSRGKFGESHAEMLINLARDTIGIREGAAGLSMDIRHILIQLELVNRLIAEIEHEMEITLNKVPCSSRLLSIKGLGVVTVGGIIGEVGDFKKFRTQSEIMELSGLDLYEISSGTWKGQRKISKRGRSLLRKILYYAAMQTIRKNGIMHEYYTRLTGRGMKSMMALIAVSRKLLRILHAIVRDDSEYIVNYESVKRQVIKEAA

SEQ ID NO: 473929 - protein, 372 aa, unidentified
MEERSKVHVGLDVHKDGITVGAAEAGPARGRVVGKTAHDVNKLLTMLTKLGQPEQLHIVYEAGPTGYGLQRALQARGYVCEVIAPSQMPRRPGDRVKTDGRDGVQLAECSRAGQLRAVWVPDPADEAIGDLARAREDAVNSRTKVRQQLKGFLLRHGLRYGGKTSWTIAFYRWLAMLSFEAGASQTAFTEYWLAVQAADERVKRLTQALEASVTGWRFEPVVAALQALRGIDVVSAIGLVAEIGDLSRFDHPRKLMGYLGLVPSEHSSGDRVSRGSITKTGNAHARRLLTEAAWNYRFKARIGRQALRRQETLSEQVRAMAWKAQLRLTKRFAVLLGRGVQANKVCVAVARELAGFVWAIGMAATHEQSAQH

SEQ ID NO: 473930 - protein, 422 aa, unidentified
MPNFKHPRFFATNTSMLFDQAFHPGTVAPVSGIYRCDACGFEAVSTVDWIRAKAPFGGRVCFWLEDRSKFGRKEPSMMLIGCDYHPSWQQISWLDTATGETGEKKLEHASGEAEKFYRGLPGPALIGMESTGNCQWFVEMATTAGHDVWIGDAAKIRASDVRQQKHDRRDAALILKLLMEGRFPRIWTPSGEQKDLRQLLIHRYKLVRIRAQVKNELQHLAMNQGVTKKRKLWSKAGQKVLRELPLKPWASRRREDLFKVREMLNGQVDLLDQAVVEAAEKNEKARLLMTQPGVGPITSMAFVLTMGDVNRFQRGKQVASYLGLIPREYSSGGHRRYGPISKQGSRFMRMLLVEAAQNAVRYDPGFRNEYLHRCHTKAKGVAKVAAARKLAIRLYWMLRTKTGYPEVVRVESSSRVPLVSAS

SEQ ID NO: 473931 - protein, 352 aa, unidentified
MEIIALDSHKRYSQVCVQNENGQILCERRLEHSRGSISGFLGGYSEGSPVAVETIGNWYWIVDEIERAGMVPKLVHAHKAKLMMGSVNKTDKLDARGLNRLQQAGTLPTVWIAPGEIRDNRELPRTRMVFANERTRLKNRIHSVIDKYGLQDEFSGISDIFGARGRERMREVLKQLPPQTRYTVRTVLGELRDVEGRMAAIEKRMKKIFKQTHEVKQLMSMPGIGFILAVVIANEIGDISRFSRPEQLASYSGMVPRVHSSGGHTRFGKLRSDVNHYLKWAYSEAGNSTAVNYKRLPARHVSQLYARLREKKGHAKAVGAVGRHLAEASYWVLTKDVDYVEPSAKRSSSRAD

SEQ ID NO: 473932 - protein, 334 aa, unidentified
MGSQYVAIDLHKRRSLIVRADENGERLETIRIDNDPVTFAQVIAAAGEDPEVVLEATCGWYWAADVLDELGAHVHLAHPLGLNWNNRRVKNDVRDANDLLDMLRLGCVPEAWIAPPEIREIRELVRYRAKLVMLRSGLKSQLQGVLAKEGIVAHRNQLWGPKGGRLLDEMPLGDTYRKRVESIRSLIASYDREILALGGEINTWLAGDVGYVAIQAIKGVGPILGAVFIAEIGDVTRFDSPDRLCSWAGLTPRHRESDNKVKRGGITKQGSRLVRWAAIEAISRGRDTSVDAHYRRVKERRGTNVARVAAARKLLHLVYYGMRDGEIRCLNKTG

SEQ ID NO: 473933 - protein, 346 aa, unidentified
MFLIGCDFHPSWQQVCWLNRTTGETEENKLVHAPGEVERFYRQFPAPARIGMESTGNCQWFVELVTALGHELWIGDAAKIRAGDSRQQKHDKRDARLLLRLLMEQRFPRIWTPSSQQRDLRQLLVHRYKLVLLRMQAKNGLQHLALNQGLQKKRRLWSRAGQKLLSELPLRPWASRRREDLTSIVKLLDQQIQLLDLAVIEAAQKDANARLLMTQPGVGPITSLAFVLTMGDISRFRRGKQVASYLGLIPREYSSGGHQRLGSISKQGNRFLRMLLVEAAQGAVRCDPQFRSEYLHRCHEKPKGVAKVAAARKLAIRLYWMLRTQKGYPEVVSIESSSRVPLVGAS

SEQ ID NO: 473934 - protein, 355 aa, unidentified
MMEAFAVSLTHFIMKTTKHCVGVDISKDSIVCCLGSRIQEESPVFSRPKTFTNDLKGFGQLLDWCLQQVDNGVSFVLEATGVYYERLAFWLDDRNQQLSVVLPNKIKHYSKSLNIKTKTDNVDAQVLSRFGLERKLDYWKMPTKFMREIKSLTREYQEAKVKLVAAKNQLHAKEHGYDCLVSVSRRLKRQISLLENQLLEIEAELRTTVMSDTLFYDKITKVITIPGVSFITAIIVLAETNGFALVKNAKQLVSYCGLDIQHNQSGGHEGKSKISKKGNSFIRKALYMPALAASRYNKDLKVFYERIIDRKPAKKIGITAVARKLLILIYILWKNDQEYIFEEQINNAVMEVGRY

SEQ ID NO: 473935 - protein, 326 aa, unidentified
MRKPGSHTSRLKTQIALDISSKSLDVHFKSDGNAFSVPNTEEGLNRILKSLTAYDVSLVLMESTGGYEDLAACFFQDHGFDVVVVNARHARNFARAMGKLAKTDRIDAAVLADMAFMIDASHDRDRYIKPLTDEQRKRLSVMTVRRRQVVGLISTEKQRLTRADDWTRASIKKTIKALTTELRHIEQQISAHVKKNFVELSKMLLSIPGIGEQAMTILIGEVPELGKADRRTISALIGVAPFNHDSGNFRGRRRIWGGRQSVRNVLYMGIISATRFNPVIRSFYNRLVSAGKPKKVALIACMRKLLTIINAMMRTGKPFDVALHGG

SEQ ID NO: 473936 - protein, 388 aa, unidentified
MIQVDDLSRSLIAFEQISTLVIVVELSQSSWLAAGVVPGIERRPLKKLDPDPTALLHLVEGWRDRATKAGRAITRTVLAFESGRDGFWLARWLRVRGVETFVMHSTSVAVSREPRRAKTDRLDTEMLIRVFLGWLRGEPRHCKMVAIPTLEEEDARRPSRERESLVGERTRIINRMKAALVRLGIRGFKPGLLTAPQKLDALRTPEETPIPPNMLDEMRRDMARLAWVREQINAIEQARLERLERAPATGRHAMVRMLARVIGVGVETADMLVQEALSRNLRDRRAVARYAGLTGSPDESGSKRREQGLSKAGNARVRRGLIQLAWRFLRFQKDSALAQWYRGRTEDAAGKRKRTMIVALARKLLIALWRLATIGEIPVGVALRPAVA

SEQ ID NO: 473937 - protein, 264 aa, unidentified
MDFIGFDLGKVSSQLCIITADGELLEHRVNTDREHLTKWLGSRPPARILIEAGTESEWVARHLETFGHEVVVADPNFAPMYATRSRRVKTDKRDARTLAEACRLGAYRPAHRTSDAQRHIRAKLAVREAIVRTRSKYISLCRALVRRDGLRVTAGTARSFASRLDGLPMSVELQVEIAPLITLLESVNAQIKRADDELAQLVKDDPVVKRLTTVPGVGPVTAACFVSTLDDVARFPDAKQARAYLGLVPSEYSSGERAASWAHR

SEQ ID NO: 473938 - protein, 354 aa, unidentified
MTSIPPDAERRKVIVGVDTHKHIHVAVAIDQHGAQLGDLTVSADTGGYTQLEQWARALGRIDRFGIEGTGSYGAGLTSFLRRCGHRIVECNRADRRARRQNGKSDTVDAEAAARSVLGGTSAVVPKTGDGQIEMIRQIKIARDTARKGRTSAIITLKTIIVNAPAALRESLAGLPDKTLLDRCAGFRPGVIDDTTGSTKHTLRALAKRWSDLDDEITGHDRLLDTLTARASPTLRDGFGIGPDTAAEMLIVFGDNPQRIKSEAAFAKLCGTCPIPASSGMTNKHRLYRGGHRQANAALYRTAIVRMRFHQPTIDYVARRTAQGLSKKDIIRCLKRFIAREVYQRVMSDHTARTT

SEQ ID NO: 473939 - protein, 348 aa, unidentified
MDIIGLNLHKRESQLSIRAEDGTITERRIVTSRERFTAVLGGRPRARILLEASTESEWVARHLESLGHEVIVADPNYAPMYATRSRRTKTDRRDARTLLDACETNAYRPAHRLSEARRHVRAELAVRDALVRTRTRYIALAKALVRRDGLRVPTSASSWVPTRIAALDLAPALATELTPLFAVYAPLNEQIAAADRRLAAVAAVDPIVARLATAPEIGPVTASAFVATIDDITRFGSAHQLEAYLGVVPSERSSGEKRQLGRITKAGNGRLRWLLVEAAWRVLRSKSPETAALRAWALAIARRRGKRIAAVALARRLAGVLYAMWRDGVPYDAQRIRPLAVTVHERAG

SEQ ID NO: 473940 - protein, 394 aa, unidentified
MKLIGIDIGKNKHFFCIMDQQTGEIISQPISFSNDKEGFDFLVQKIKSYPKDSILIGMEDTGHYHFALLKYLLDLQYTVALINPKTTDFNRKMQGGITKNDKLDTINICDVLDTPERKKQYRITKVNSFDLYEQKQLTRHHHNLKEEENVYKNRLQKCIDIVFPEFNNLFNSKYGTVYMNILKMFGSAENIANTDIRTIRKCFEIEGRGNRISLTPERLKECAGSSIGISSSAEVIQIKHLTAQIELIEEQLTEIDKKIEEFSIQNNSPILSIPGISHFSGTSILAELGDISNYSKPSQIIKFAGVAPLHYESSQFNAQHTSITKKGSKYLRKTLYQIILPVIRHNPVFNKYYQLKISQGKGHRCAQGHCVRKLLRIIYHLLKTNQQFDPQLLR

SEQ ID NO: 473941 - protein, 331 aa, unidentified
MDVCFVGIDVSSKTFNVCIQRDQKLIEWELPNTPKGYTKLLKDLNKYKVAVRIGMEATGVYHLNLAFYLSQAKHTEVMIINPFVMHSFAKSIAPRGKSDRKDACMILKYLERMPFESFIPPEQELLHLRSLTRRIEQITVDVRREENRLHAMQSASIVSPFVLAQCKQSISDLKSSIVELQIEMERLIRASSSSKTASQVEILQSIPGIGLRTAIVLISEIGLLPEGLTVKQWVAHIGVDPCQRQSGTSVHTRSRISKRGNKHIRRALFLSAMSASQFSLPISEFKNELVARGKSKKQALVAVMRKLIHCIFGILKHQTPFDPSLFRGRTS

SEQ ID NO: 473942 - protein, 375 aa, unidentified
MKETLRFLGLDVHAETIAVAIAEPDGELRSLGTIANRAESIRKLVKKLGPAERLKACYEAGPTGYVLYWQLAELGVFCEVIAPTLMPVKPGDRVKTDRRDAERLARSYRSGDLTPVWVPDEGSESLRDLVRAREAAKQDQMRARHRLSKFLLRTGQRPATGVKSWTLAYMTWVKKIHYTQAARESTLLDYLHEVEHMAERVIRLEQAITEAVKQVSPEMQQVVRGLQAMRGIAQISAVTIVAELGQLSRFANARQLMGYSGTVPSENSSGKRTRRGSITKTGNAHLRRIAVEAAWSYRLRPCLGPALRKRQEGVSEEIKEIAWKAQHRLHKRYMRLSAAGKDQRKIVIAVGRELLGFIWAIGVKAETTGRQQIAA

SEQ ID NO: 473943 - protein, 338 aa, unidentified
MDVKIIGVDIAKRYFQVHGINASGMVTMRRKISRDSFLKLLADLPSCLIGLEAGSGAHHWAREIARLGHDVRLMPPQFVRPYVKTNKNDAADAEACCEAVQRPGMRFVPVKSLGQQAAMAVHRVRDHLVRQRTGTINALRGHLAEYGIVAAALRGGLNQLFSIVEAEDDDEYVPGSVKQLLRMLVAEIRAADAHIAELDRKLKDFAGAEEACRRLIEVPGIGPVIATIVVATVPDEQRFSSGRHFSAWLGLTPKQHSTGGKERLLGISKRGDAYMRRQFINGARSLVRIASGRTGGYWDWINALLARRAFNVVTVAVANKLARVAWALQARGTRWRAA

SEQ ID NO: 473944 - protein, 386 aa, unidentified
MQLNNNEQANTPMKKELYLGLDVHKDCIITAVAQEGREGEVRDTGVISNDLHALEKWVGRLRKAHGSDVVLRACYEAGPCGFGIARRLKQLGVECEVVAPSLTPKRAGERVKTDRRDARKLARLLRAGELSPVYIPESTDEAIRDLCRARTDAVDDRCRSRHRLKGFLLRHGYHYQGKSSWSAAHERYLRELVLPHPAMKVILEEYLQGIAAAGERIARCEEAMRSLLEKWHLRPAVEALMAMKGFRTVAAMILVSELGEVHRFSHPRQVMAYLGLVPTENTSSDRRRQGHITKCGNAHARWLLVECAQHYATLPKVSKELSRRQEGQPREVRALSWKAQNRLHGRFARLSARRLQRNKALVAIARELCGFIWELLRMQRCYQTPH

SEQ ID NO: 473945 - protein, 332 aa, unidentified
MYVCVVDRQGKKLLHQNILHNDFAFFLKKIARWKHDLTVVCECLFCWYWLADACLAAGLKFVLAHALYLKAIHGGKNKNDRIDSEKLARLLAANLIPPSYVYPSAKRPVRALLRQRLSYVWRRAELLQRLHNFQLAEGHEPVPRSTRNRDPWEERLIEAYPEPHHRLNLQTDLATVRHYDQMILNLETQLVKTTRRFASRDYALLQTIPGIGQALALTILYEVDTIDRFPTVQDFCSYSRLVQGTVASAGQIKGLRGAKLGNPYLRWAIGEAAVLGRRHSPLLAAYHDRLEAQKGSFKANAIVANQLGRAIYFMLKNGTVFNLEQLLRHAQP

SEQ ID NO: 473946 - protein, 359 aa, unidentified
MVMLAEHYDFVIGGDPDRDTIDLAILETGTGRVRDQTADQTDGPAYSRLLAWARQHAPGRRVWALEGTGSFAAGFVTMLAEAGEDIVEIPGQKRSRRAKNDRIDAVQAARTALAQTEQAAPRERGLREALRQVLVTRQGVLVSRTKAINELKSLIVVAPDHLRAGLRGLALIKQLDRIDHLTSPAGATIEHRVTVSTLRSIAARIRFLIAQTAELDAELQVLVPHHPAGPTLLAEPGVGPVVAAQLLVSWSHRGRVRSEAAFAALAGVAPLEASSGQRTRHRLSRAGDRDLNRALHTVAITRLRCHDESRAYETKRAAQGKTHRDVRRSLKRALARRLYRRIQAATRPAAAFNGLVHAA

SEQ ID NO: 473947 - protein, 312 aa, unidentified
MDAIVVGIDVSKDRLDVAVRPTGETFSVARDAEGLDALLARLTPLGPKAVAVEATGGYEIVVAASLGAGGLAVVVVNPAQVRSFANALGKRAKTDPIDAQVIAHFVEATKPEIRPLLDAETRLLADLIARRRQIVQMIVAERQRQKRLTEKRLQKSIVRLLAALQKELSTLEAEIDTVVRGSPAWREKEDLLASVPGVGKIIARTLLAELPELGSLDRRKGASLVGLAPWTRQSGQWKGKSFIGGGRADVRAALFTGAMVAARHNPDLKAFRDRLVQAGKPKLVAMVATARKLLTILNAIVRDQQPWRQQNA

SEQ ID NO: 473948 - protein, 361 aa, unidentified
MTGTMTWAGLDVHARSTHAAAINVMTGELVRARFGAGLEEPLAWLAGLPGPVKACYEAGLTGYGLYRAAQAAGVEMVVIAPGKTPRGPSDRVKTDMKDAELLARLLLAGSLTAIKVPPPELEGARDLMRAHDACRRDLMDARHRASKLLLRHGRVYPEKSTWTVRHRGWLGRQQFDQLATELAFADALACVDAISARKAALALKLSELALDERWWPTVARLRSFHGVDTLTAFALHLELGGDWRRFQRAPQLASWLGLTPTLSQSGESSRQGHITKTGSTLARRLLVEAAWHYARTPGPGVALAARQAGQPAHVLQISHRARQRLHRTHRKMRSRGKPGNVCVVAAARELSCFLWAAAVAD

SEQ ID NO: 473949 - protein, 355 aa, unidentified
MIIIGVDFHPKFQQIAWVDTDSGELQERPLAHREEAEKFYGALAAAGQQVRVGREASGHARWFERLLGELNFELWIGEAAEIRAKRVRKHKTDRQDAQHILGLLLENRFPRIWVPSGENRDLRQLLWHRHRMVQARTRVMNQLQAIALNEGQRCPKGLWRERGRQQLEAIQLAAWASRRRRDLVELLDRLNPTIAELSQAIEQEVEKCREAQRLMTHPGVGPLTALAFVLIIGKVEGFPSGKQVASYLGLVPVEQSSGDRRRLGHITKQGSSMLRFLLVEAAQVTVRSIPEWRSHYVHLMMRGGRKIAKVAMARRLAIALSWMWRKGWSYEQSKSSVRTRASSEQAMVCSTTPRH

SEQ ID NO: 473950 - protein, 383 aa, unidentified
MQPTQVNDFTPDKEVLAVSLELSSKSWKIALHDGKRDKPAIHTADDAVAAKRLAHAVTVIEEVKRKWGLPGHSQVVVSYEAGQDGFWISRALARVGYAALVVDPASIPVERHARRAKTDRLDAIKLVTCLRAWLRGERDRMRVIRIPAPEAEAQRQLPRDRGELQKETMQHRDRIRKLLRTVGCWDSVEGDFAQRLERGEIQCHDGAALPPELHMRLTRECERLALAQQQLAALEKELVRQLPESVQERIMALMKLKGIGEVGAMRLVLELFWRDFDNRQQVGSCVGLVPQPYDSGCSRVDQGISKQGNRRVRALLIEMAWLWLRYQPESGLSRWFAQRTQGCGQNKRGRRIAIVAVARRLVIALWRYLKDGVIPDGATTKAA

SEQ ID NO: 473951 - protein, 425 aa, unidentified
MNSISNKKINQVTDQTLVVGMDIAKKKHYACFVDERGRVLKKPFPVLQSREGLEWLYQCIVEAMKEFGKTEVIVGIEPTGHYWLNLAYFLDEKGIPLVMTNPMHVKRSKELDDNLPTKHDAKDALVIARLVKDGRFSYPRILKGMEAELRVGATFRSKLVEERGAIRNQMIRWLDRYFPEFSQVFPSFGKMALAVLEYTPFPSDLAGKELEEVLALYRQSEGLQSPQKPKAKKLMELAQHSIGVTEGQQMARIEIATLVRRYRQLEEEIEALTEQLIELVQTSVEYEWLKTVPGLGDATIVELLSEIGSFSHYQDPRQLIKLAGLTLREHSSGQHKGQKRISKRGRRRLRALLFRVMMPMIRHNEAFRQLHDYYTTRPDNPLRKKQSIVVLCGKLLKVLHAVCTKHQAFDAKRMMQDIFGLETAA

SEQ ID NO: 473952 - protein, 353 aa, unidentified
MEQFIGCDAHKRFSLFIAMNEEGEYGRPIRVGHERERMRAFLEALPVGSQIALETSGSYYWLVEEMERAGHRPQLAHALTAKRRMEGRHKTDERDARGLAMLLRNGTLPRVWIPPAALRDQREMLRLRMILVESRSQVKNRIHGVLLRYNVELKGKDIYTQGGREELDGHLTELPEWTRESVHKQLGMVDHLDQQIEACEQSLETMLEPNAERDLLKTLPGVGKILSAVIALEIGDIARFGNAERLVSYAGLVPAARESAGRKRPGQCPSACNTYLKWAFVEAGNVIATHHHKWPERHVAQLYVRVKHNTKMHGKATVAVGRHLAEAAYWILSKQELYREPKSNRQALSSTHG

SEQ ID NO: 473953 - protein, 462 aa, unidentified
MSYKIAGIDVHKRVLMVVVIDASTPEEKPERRRFTTMASDLQRLSCWLREQGVEEAVMESTAQYWRGVWLELEPYLRLQLAQAFSNRAPRGRKHDFKDAERLVRRLIADELILSFVPDGEQRTWRDMTRMKTQLRRDRVRLQSQMECLLEEMRIKLSSVVSDLLGASGLRILRALAQGETDPKKLALLGDDQLKCSEEQLVDALTGRPQPMHREMLGLQLERLQLIDRQIEKLNGLIAQAMKPHQEAVIRLAEVPGLGVDSAQQVISEIGVQASTFPSAAELTSWVGTCPGKDESAEENHSSRSAKGNKYLRRVLNQSAHAAVKKKGSHFQAVFRRLLPRLGYKSAIWAIAHRLCRVIWKILHEGVRYIEQGSDSDPKVRERRAGILARALRKLGYDVAITHKPGYGPEGNANLAGYDFRRSLGSLTNQSLLGGRGGRHCYEIKCIAAGLQKTLYVIYEAEC

SEQ ID NO: 473954 - protein, 418 aa, unidentified
MKKHSKSSQRSEPSLKRTKARGPVQRDAKEVLAEVLEKLTGKLDVPAVSTSAKENRRANTVGPNRDRLTVGVDLGDRWSQYCILGLEGETLAEGQLRTTQDDVREFFQALTAARVVIEVGTHSAWVQDVITEWGHEVLVANPRLMEGSKRRKRKSDRIDANKLARLGRVDPQSLYPIRHRSREVRQDLVVLRARDALVSVRTELINTTRGLVKSMGTRLPGCSSPSFTDKVKDAIPVEVREALLPLVQLVETVNDCIAKYDQKIEELGREKYGHTTLLRQVKGVGPITSLAYVLTLEDPQRFSSSREVGPYLGLVPKQEDSGDSQPQLGISKTGDRMLRRLLVGSSQYMLGAFGPDTDLRRYGLRLCERGGKNAKKRAVVAVARKLAVLLHHLWVTGDVYEPLHHTGAGTRTAQATAA

SEQ ID NO: 473955 - protein, 337 aa, unidentified
MDNYVGIDLHSNNIYTAIIDNDNKKVFKKKTKNDLRLVLHALKPYRDQVKGIVVESTYNWYWLVDGLMDAGFDVRLAHTGAIPQYAGLKHSNDQTDARHLAHLLRLGILPQGHIQPREQRAVRDLLRRRLLLVRQKMLYHLSLQSLIVRHTGERLSANQIKSLDNDAIADKLADPIRLGGQLTHLARCWHERAIAMLEEEVLKHLKPRRDYQLLSSIPGVGKVLASTIVLETGAIERFPDPGHYASYARCVDTERVSNGKLKGRGNKRNGNKYLAWAFMEAAHYAAIWSPEIKRFYQKRQAKRHILVAKKTVANKLAKASYHMLKRQEPFDVNRAFG

SEQ ID NO: 473956 - protein, 340 aa, unidentified
MKVRTLGIDLAKNLFHVHGVDGQGRTVVQRQLRRRQLLPFVAQLQPCLVAMEACGGAHYWAREIAKRGHEVRLMSPRFVRPYVKSNKNDARDAEAICEAVGRPSMRFVAVKSQAQQDMLALHRVRSLLVRERTALMNQMRGLLAEYGIVVVQGAVPLRRALALILEERDNGVSEILRELLVEMSERQRLLEDRLKRYDQRITEFARADERAGRLMAVEGVGPLTATALIAAVGNARQFRSGRELSTWLGLVPRQHSSGGRSVLLGISKRGDRYLRTLLIHGARAALRFAARKRDPRSRWIGAVRERRGANIAAVALANKNARVLWALLARNEDYRLPAAA

SEQ ID NO: 473957 - protein, 428 aa, unidentified
MNDVKDTKREHFCQIIREISGSDEYLVVGIDVAKDKHHAFMGTATGKTLYRRLIFENSRSGFVGLLEQVELIRSQNGLKKVIFAVEPTGNYHKPLSRFLVDSGSHLVLVTGKAVKNNREVLDGRWDKHDTKDAANVADLASRGRCQYYDRPSEKIIELRDLLSLRRRLKKDEHGIRVRIRNTVLAKYFPELDKFFNTGTGESLSIVKWCPNPAKIADMPFDRFFRMVTKRERGIAQKLRLRKIHASAGDSIGCPMGEAAEFEAKLLVDKLNQVRQDIEKVEKRIKEIGEGFAEYRYLLTIPGYGPYVSSVVLSAIADPFRFDNASQVIKLSGYDLCADRSGQSSDKAVPVISKRGSGELRYALYQAARVASVKNRYFKVYFTGLLQGRQRERGIHTKMRVKLAAKMLVIAWVMMKKKEVFDPGRLNIG

SEQ ID NO: 473958 - protein, 453 aa, unidentified
MAQGSGLTRGDRNRNRRIAAVRGVVRRDRAVLAVDLGEDKQAAVLVDHEGRVLARKIVKAKAYQLGGLLEWAAGQAARAGFAGLTVACEPTGHRWKALMGLADAAGHGFVCVQPLAVARAREGDDYTRDKTDHRDAYLIGKLVVRLECYLPERAGEDWARLRHLGARRFALVADVTACMQQAGDLLGCAWPAPLGAAARPLESVTWLAAMAVITDRCNGNPARLRAMGYDRFVAAIRRELPRWGGKLIRHSIARNVWEALADAGGVAAQRRGALERVHLLLGDWRALRARLADTEDRMTAMMGELGLTALVTSIDGMSALSAAVILAETGDPRRFTSGRAVVKHAGLNPSERTSATMTGQTRISRRGRPGLRSAAWRAVWGALRHNRVLSAKYAHLTGRDGNRLADGQARVACAATLLRWLWAVITRRQAWDARIAAGVIPARPATVTIAAAA

SEQ ID NO: 473959 - protein, 343 aa, unidentified
MKHYIGLDVSMKRTFICVINEHGKIVHEGSENTDPHLIANYLSKLSLEEITVGFESGSLTPYLMTGFKERAIDAVCMDARRLSPILALKINKTDKNDARGIAEALRAGMYTRVHCKPEESINRAILLTSRRALVEQQTHLKNTVRGLLKGHGIRLGSISAKKFAGAVMKQLEGCQEIVILSIKCLLDAFDKLVEETAKIDKKMLEVAYHDKEVQLLMTVPGVGPVTALTFKTEIFDANRFKDSRSVGAYLGMTPTQYASGETQKQGKTSKCGSKELRFLLVEAGVVILTRSKKWSKLKAWGLKIMRKKGLKKAAVAVGRKLAVIMHQMMLKEKEFIYGEPKAA

SEQ ID NO: 473960 - protein, 378 aa, unidentified
MQQNLYVGLDLHSTNTYVGVLDGQGKKVWSGRVNNDLQLITNIFEPYREDIVGVVVESTYNWYWLVDGLMDAGFTVHLGNPVAFQQYNGLKHTDDKHDAFFLAEMLRLGILPKGHIYPKEERQVRDLLRKRLLLVQQRSQHILSFKSLVSRNLGFSIDTNQVKRLKSEEINDWFGNDHLRFSARANLDAIDYLHSEIKDLERIIINSSNVTAAYQLLSSVPGIGKALSMTIALETGDISRFRTVSNYSSYCRCVPSSRTSNGKSKGKNNTKNGNKYLGWAYIEAANFMKRYNPRAQVFYRKKVAQSNKILALKALAHKISRACFYILRDNTPFDEVKMFCNPKRCDKGCSSEPERGLRHERIAPIGPSAATNLTVGSV

SEQ ID NO: 473961 - protein, 342 aa, unidentified
MEKIATIGLDIAKSVFQVHGVGADGKVLIRRRLTRARMLPFFAKLPRCLVGIEACNNSHYWARELTALGHDVKLMPAQYVKPYVKRGKNDAADAEAICEAVTRPTMRFVAVKSPEQQSLMMLHRVRLMLNRQRTQISNAIRAHISEFGVVAPVGRLGVDRLLDVVADASDDRVPEDARMCLQMLAAQLEVVKQQILKNDRRVLASARRTELGRRLMDIPGVGPLLASAFVASVADPTMFRTGRDLAAWIGLVPKQNSSGGKDRLGSITRAGNRYLRQMLVVGAMAVIRYAQRHGTKRPWLVQLLARRPTKVAAVALANKNARMVWALMTSGERYREPMRIAA

SEQ ID NO: 473962 - protein, 347 aa, unidentified
MRFYTKQHPFYCGIDLHARSMYVCLVSHDGEIVLHRNMKAAPEPFLKAIAPYRDGLVVAVECIFTWYWLADLCAAEGLAFVLGHALYMKAIHGGKAKNDKIDSHKIAVLLRGGMLPQAYVYPAPMRATRDLLRRRTHLMRKRAELLAHVQNTNSQYNLPEIGKKIAYKANREGVAERFADPAVHKSIEVDLALSTYYDQLLGDVELAIVKAAKHHDANTLYLLQTVPGIGKILSLVLLYEIHDIDRFPTVQDCVSYCRLGKCAKESAGKRLGTSGKKIGNAHLKWAFSEAAALFLRNNSAGQKYLARLEKKHDKGKALTILAHKLARAVYYMLKRQTAFDMDQFLHS

SEQ ID NO: 473963 - protein, 445 aa, unidentified
MDVVFPHCAGLDVHKKRITACRVSPDPTGQDADGVLDVRDFGTLTIELLALSDWLSQVGVTHVAIESTGEYWKPVYNLLEGTFTVFVVNAAHVKNVPGRKTDKADARWLAKLMRYGLLQASFIPPQGQRDLRDLTRYRTKLVQERSREVNRVQGVLERANIKLASVATDIMGVSGRAMLEALIAGRADPATMAELARGRMRTKIPVLAQALTGVVRAHHRRLLAIQLAHVDFLDEQIATLSEEMQHVLSTLCPSAPPGSTTDDAGAPPTVPEASPSAPPMTFLRAITLLDSIPGVNQQGAELLVAEWGIDMERFGTAPRLAAWSGIAPGNNESAGIQRSGKTRKGNRALRTGLVQMAHAAAHTKDTYLSALYHRLAARRGKKRAIVAVAHSIVRSAFHMLSRHEPYHELGGNYFDAHRREHLVDRLTRRIERLGYRVALEPAVTP

SEQ ID NO: 473964 - protein, 359 aa, unidentified
MSRLPMFAGLDYHQNVIQVCVQDHTGQVRLNRSCNSDPAEVTALLRQAGHVSEVSLEACCGSAAFGEALAAMGSWRVNLAHAGYVSRLRSSPDKTDFSDARLLSDLTRVGYLPSVWLAPPEIRDLRQLVRHRQSLVNQRRNLKLQIGAAMREQRVKIGEHGRWSKKWVEAVREHAGLSPAVRWIIQEKLGELAWLSGRIERACDRLREASSPHDLYHRLHELEGVGEVTAWTLLASIGRFDRFKNGKQLARYCGLSPRNASSGDKSADAGLVNACSRELRAVLIQCGHGLLRRPGRWRELADKLKRLGKPTNVVVAAVANRWVRSMHWRLVSAQTKLTEKLTDKKELSAKKLTVKKKGL

SEQ ID NO: 473965 - protein, 350 aa, unidentified
MLIIGCDYHPSFQQIAYVDTDTGELGERRLAHPEEAAQFYGELKQRNVAVRVGMEASGHARWFERLLRQLEFEVWIGDAAEIGTKRVRKQKTDRQDAQLLLRLMMEDRFPRIWVADAENRDLRQLLWHRHRLVQMRTRVMNQLHVVALNEGLQRKKALWRPAGRKQLESLALAPWASRRRQDLLELLDQITPQIQKLTQALEAEVDKRAVTRRLMTHPGVGPLTALAFELVIGTPDRFHCGKQIASYVGLVPEENSSGNRRRLGHISKQGNALLRFLLVEAVQVTIRTQSQWRSKFFHLAMRRGRKIAKVAMARKLAVHLYWMWRQGWDYAEFKKLGPHAGKPGNLYGAQ

SEQ ID NO: 473966 - protein, 410 aa, unidentified
MEAIVERCCGLDVHQATVVACLLVGAPHERPRKVVRSFGTMTGQLRELGQWLASEGCTHVGMESTGVYWMPVYAMLEGQFELVVGNATHIKNVPGRKTDVKDSEWIADLLRHGLIRRSFVPPKPLRELRDLLRYRRKLIESQTAERNRLLKLLETANIKLASVASDVFGVSGRRMLRALLDGQETPAQMAQLARGALRKKTTALAAALEGRVEEHHRFLLGLQLERLEQVEATLVALDERIDDKLSPYRTQHQRLMQIPGIDRVGAAVIIAELGVDMNVFPTPQHAAAWAGVCPGNNESAGKRKAQPGRKGNVHLTTALVQAAKCASRKKGSYLKEKYWRLRARRGPNRAALAVAHKILIAAYHMLRSGLDYKDLGTGFLDRASASATKSSLVKRLQKLGYKVHLEPLAA

SEQ ID NO: 473967 - protein, 342 aa, unidentified
MEQYVALDVSLKDISVCIIDSNGEVVFEGKTAAEPATLVELIRSKAAQVKRVGLETGATSPWLFHALVAAGLPVVCMDARHAHAALSMRPTKSDRSDARGLADMLRMGWYREVHAKSVTSHEHRTILGARHQLVTMRSELDAQIRGILKTFGLILGTGNKDTLIQRAEKLAAGHPVLRGVVAKLAEVRRHVTSQIVAIDRDIRHLVHTEPTLKRLISVPGVGPITALAFLSAVDDPSRFKHARDVGPYLGLTPTRYQSGETDRQGRISKCGDTFTRTCLYEAAHVLLTRVQRFSPLKAWGMRLAKRIGGRKARIAVARKIAVILHCIWTDGTEFWWTREKAA

SEQ ID NO: 473968 - protein, 352 aa, unidentified
MTELSKERVIKFVGIDLAKRSFHLYAVDGEGREVLSRKLTRGRLSAVVAQLPTCTIAMEACGSAHHWARLFRTFGHEVRLIAPQFVKPYVKSNKNDAADAEAICEAAQRPGMRFVAVKTVEQQDIQAIHRMRSLAVERRTAQINQIRGLLLEYGIEVAQGRAAIQRRLPEILEDADNGLSARFRAELCGLAEELRHLNERVAHYDEQLEQIAQGDAQARALMTIPGVGAKGATALLAAVGEDPRLLKNGRGLAAWLGLVPRQHSTGGRERLLGISKRGDVYLRNLLIHGARAVLRCVERKEDRTSRWATALKARRHTNVAVVAMANKIARVAYAVMITGKPYDPARAALAHG

SEQ ID NO: 473969 - protein, 318 aa, unidentified
MNEMIVEKFVGIDVSKSTLDVCIEPAVQTLHVAYDEAGIKQIAVRLKEVNPTLIVMEATGGLEVRIATELASQGLPVAVINPRQARDFAKATGQLAKTDQVDAAMLAAFAQAIRPQVHPLKDADTRALDDMVTRRRQLIDMRVQETLRLGTAASKPLEKSLNKHIVWLDKRIAEIDTDLTNRLRKSDVWRTKDNLLRGIPGVGPVTTLTMLAKCPELGLLNRREIAALTGVAPLANDSGKHRGKRFIWGGRADVRAVLYMAAISAIQHNDAIKAFAERLKKAGKPPKVVIVACMRKLLTIMNSMLKNNTPWNPENACL

SEQ ID NO: 473970 - protein, 402 aa, unidentified
MIFINCLGIDIGKSQSLLAHYKDEVLVKEMVIQNNQNGYRYLKNYIKHLDSLFILFESTGIYSRGMKRFCEIHKIDYLEMNPLEAKFKTSSLRSWKTDKSDAHKLALLAFRMKDSKVQRQSEEIYFELRERARFHLEMEINQNRLKVELVETLHQTFPGLEKLFTNRYSKIALNIAKAFPHPDFVSTLTHDELVEKVLHSTDKGISVNKAHKYVQKLIEIKNNSFPNVDKSSFLLQKVQYLCDKLLIGIEEMKEFDQEMIDLAKNTTEFENIISIPGIGELTAALLIGELGNIREFKTNKQLNAFVGIDIKRYQSGTSKSRDTINKRGNKKARRLLYLIIMNIIRGRNHYQSHIVDYYYKLREQPHGKTHKTAVIASINRLLKTIHYLIVNNKLYDYQKAPH

SEQ ID NO: 473971 - protein, 348 aa, unidentified
MVTIGIDPHKQTHTGVAVNPLGVQVSQKTAPARRDGFGQLLEWGRKLDSERVWVIEDVRHVSGSLERFLLDRGETVIRLPPRLMANARVGVRERGKSDPIDALAIARAALREGIDTLPTAKLAGVELEIRLLGLHRERLVGARTRLINELRWQLHDLWPDWEIPKRVLIQPGWQTKVTRRLQRAEITVQVQIARDMIARVRELTRTITQLYEQLADLVKQAAPQLLAEKGLGVLIATKLIGEVAGIDRFTSDAQLARLSGCAPIPVSSGRTDRYRLDPGGNRQLNHAFHMLAMTKLMNDPQTAAYIARQRTNGKTNKEAIRSLKRHLVRRVYHLLHDPNEVPITVCLT

SEQ ID NO: 473972 - protein, 345 aa, unidentified
MQNMYYIGLDVHKRTISYCVKDGSGTIHAQGTIPATRLDLDRWMKTLPQPWTAAMEATVFTGWIYDHLQPQAAALKVAHPLMLRAIAAAKKKNDRVDASKICDCLRCDFLPECYMASTAIRERRRTLRYRNLLVRQMVQMKNKIGMLLMEAGVSYNKQRLHKASYFRELLTTNPDIDEGLCSLLRLCRETVVRLQKTESALVRSLERDSLLMDRVERLMTIPAVGPITALTWALEVGDVQRFSSIKKAISYCGLCGAEKSSANTVQRTPLSKQRNKHLQTTLIEAAKMAPRNSSELAMLYDKEKQKGHANRATLAVARKLVAYLMAVDRGQRDFQVLEASHCTAA

SEQ ID NO: 473973 - protein, 319 aa, unidentified
MQTILHNCCGLDVHKDSIVACLLKTINTLDTQSKDELVQKEIKEFKTFPNDLKQLKKWIESEDCQYVAMESSGVYWHPVYEELESAFDGNMQLLVVNAYHMRNVPGKKTDIKDAEWIAKLHRAGLLRGSFIPPKSVRELRELTRYRKSIVQDITKQKNRIEKTLQIAGFKLSTFLTDIFGLSGRNLINVLIKKGYLSPSDIDTETKRISEDKKAEIKRVLNSKLSSHQRNVLKMQIKHLDEQLNHVTTIEKSIEKLLDPFEDAINRLDTVPGISTTSATAILAEIGNDMNKFPTSEHICSWVGLSPSNNMSAGKKKVLA

SEQ ID NO: 473974 - protein, 339 aa, unidentified
MELYAAFDLHGNNNFLALIDSNGRRIFGKRLLNDRERILEVLRPYQKDLMGIVVESTYNWYWMVDALKEEGYSVHLANPSAIQQYEGLKHTDDEHDSFWLAELLRLGILPEGYIYPKEERPIRDLLRKRGHLVKLRTSLIISLQNIISRNCGMKLNANEVKGLKEDRVHPLLRDNEDLALAGKVSKEAIDFLTRQIRTIERVVEGRIELKSSYGYLLTLPGVGKILALTIMLETGPVSRFAKAGNYVSYCRKVSSHWTSNEKLKGSGNKKNGNRYLAWAFSEAAELARRYYPEPRAYYQRKMQKTNFMVAHSALAHKLARAAYYVMRDQVPFRPEKLFS

SEQ ID NO: 473975 - protein, 412 aa, unidentified
MFKIFRRNCCGLDVHKTWIYACIGMTDTNGLTEYKQARFSSFSKGLKELADWLAKYSCNEVCMESSGKYWIPVFNILEKTCFVTLVHPKYTKPQRGNKTDRKDAKWICDLFMCDMIKPSFIPSPEIRQLRDLIRYRTKLTNMLTGEKNRAQNCLTVSNLKLDDVFSDVFGKSSRSITNYMLDHPGETFDVAPFVDGRCKTPIAEIQAAVDGAISPEQAVKLRQCLTHIDELGAHRNVIEQTILLIAEPFSAVLDLLYTLPGLDKNPMTAIAILSEIGPDMSVFPSSKNLVSWAGCCPRNDQSAFKVKSTRISRAGYYLKPLLVQVANALIKSKKHPEFKERYHRIKSHRGHKRAIIAVCNMFLTAIWNMLSKLEPYNPDGFLEHRPVNEKKVLTKSQALELFRLRGYTITDD

SEQ ID NO: 473976 - protein, 346 aa, unidentified
MKHSVGLDVSVKETAICIVDEAGKVVRESKVATEPQAVIAFLSSAGVEYARIGLEAGPLSQWLVNGLAKAELPVICVETRHMKAMLKAQQVNKSDRNDARGIAQMMRVGLYKPVHVKTLASQQQRMLLTGRKLLRDKLQDMENELRGTLRNFGLKVGVVSSGQFEARIKELVAGQPPLEMIVVPLLTVRRVVREQLAKLDKMVLDQVRGDKLCRRLMTVPGVGPIVALTFRATVDQAQRFTRSKTVGAHFGLAPRRFQSGERDYDGRVSKCGDAMMRTALYEAAQVLLTRTRTWSWLKAWGMQVARRRGAKKAIVALARRLAVVMHRMWVDGTEFRWRKEADTAAT

SEQ ID NO: 473977 - protein, 353 aa, unidentified
MDRTTYGLDIAKNVMQLHWVDAQTGEIGRRKLARGRLSAYFAQLQPVRIVMEACGSAHHWARVLGALGHEVELLPAAQVRPFVRSNKDDAADARAIWLAAQQGDIRRVPQKSVEQQAMLALHRTRSHWVSVRTATVNSLRGLLYEFGVVVRGGRKAGLKALVEQRALIEAQIPATMRALVDGQLQMLASIGQRIDQLEREIAALQRQLPAARELDRVPGIGVLGSTALAATLGDGKAWRSGREFSACIGLVPAHAGTGGKVRVGHLSKRGDPYLRTLLIHGARAVIEHASDQPQWLGQLLGRRPMNVAVVALANKMARTAWAIVAHGRAYQRDWQGVKPSTRPGSAAAQAAAA

SEQ ID NO: 473978 - protein, 395 aa, unidentified
MPNPTAAANVPAAYDHDSTLAMALELSGKSWELGAVVPGLARRPRRRLDPRDMAGLLDQVQRWKAEAVAAGRTIERVVLTYEAGRDGFWIARHLIARGIEVHIMHPASIPVDRKKRRAKTDRIDLAMLLRSLLAWLRGDPMSCSMVAIPSETEEDQRRPGRERERLVSERIALENRMQNLLCLHGVSGFKPRLKKAAAQLATLCRFDGEPLPTELMAELRRLLARHQLLSEQLKEIEAARETVLTAEMPDLAAQQIQALALLYGLGLGTATDLAREVFCRSFRHRQALASFVGLSGTPFNSGGSEREQGISKSGNPRVRRLLMQLAWRWLRLQPQSELSRWFQERTGGAKGRIRKVMAVALARKLLVALWRYLQTGVLPAGALTTKPSVAAHATT

SEQ ID NO: 473979 - protein, 400 aa, unidentified
MISVGIDVSKGKSTVCILKPYGEIVSKPFNITHTHKDLSELSSMLFRLNDEVKIVMEATGIYHLPVLTYLQEKGFFVSVINPYLMKSYRNESLRKAKTDKIDSRIIANYGIDHWFKMKEFQTSGEIYEELKLLGQQYRHYMKLHLLSLAELTHLLDLTMPGIKNLLASWNETNRKDKRSDFVERFWHYDVITSMSEQEFTEEYILWAKEKKYVPSQEKAKVIYTLAQESIPTLPSETSSVKILVTEAVRVLKEVDATLGLILSRMQEIAKTLPEYSVVREMGGVGNTLTPKLIAEIGDVRRFRNGKALVAFAGIDPPPYESGQFVGCNRKISKRGSASLRKVGYETMRSLKMRSRPEDPVYRYVVKKESKGKSKKSAKIAGLNKFLRIYYARVTELYKNI

SEQ ID NO: 473980 - protein, 410 aa, unidentified
MIEAVIERCAGIDVGKKFVLVCVMTGGAKDEPRTQIKKFGTIVGELDRLAAWLVAEGCTHAVMESTGSYWKPVFNLLEAHVRVILANAADVQNRRGHKTDPNDSRWLAHLLRHGMIRPSFIPPLAIRELRDLTRRRRQLIGENSRERNRVQKVLEDANVKLGDVLSDVFCVSGRLMLQALLDGHLSAEQIAELAKKKARMKIPQIAASIAGHRLTDHQRFLIRHALRHLQFLETEVDALNEEILRRMEDPALAEAFQLLQSIPGIKEESAASILAEIGADMQQFPSAAQLSSWAGLCPANHESAGVKKSVRTNRGNVWLKGMLTQSAWAATNLKGSRLQARYHALRVRCGNKRAIVALGHTLLITVHAVISTRSPYREAPLPEETQRQEESARYHLRCLKKLGYPTLAAE

SEQ ID NO: 473981 - protein, 360 aa, unidentified
MIILAIDLGKFNSMCCFYDTKTQKYRFQTVAMSRMYLTTVFEKHEIDLVVMEACGPSGWISDLCEELGLKTFVCSTNDAAWEWKNVKRKTDKDDALKLARLAMMRQLTRVHMPQHQVREHRSLIKYRKKLVGRITAIKNAIRGLFLCQGVEIAKGLPAWYSGRDLINSYRKPLAECSAEELWRGQLDFELTLLDSLRKQITDVETRLDMLAVNHKGIQRLRTIPGLGPRTAEVIVTALDDVHRFKNGRQVSSYIGLVPRQYQSGETDRNGRITKRGSRILRTILLECAWVSLQYNDWSRATYDRIQGGQKTRKKKAAIALARKIAVVSWAMLKNETDWDPEKAKLNIKPTVEECLAGSTA

SEQ ID NO: 473982 - protein, 333 aa, unidentified
MNKSEPTFLPCGIEISSQVLVIDLSGKAPCEFSNTPAGHESLIRWLQRAGLEIRVCMEATGLYGLDLALALHAAGIAFMIVHPRSARNFARAMMQRSKTDRLDARVLREYAARMPFEPWHPPSPQALHLMAIAHRLQALTRMITAEKNRLHAASLSRALPAVVRQDLGRSIQSLERALKRLTLAALELVLSDPQLARRNELLLSVPGIGVTSALNLLAELLRLGPDCGVRQWVAFAGLDPRHYTSGTSVAKKTIISKSGNAHLRRALYMPALVTVQHEPHFRGFYQRLVARGKTKLQAIVAVMRKLLHAIYGMFKHNQPFDGSKVYALETSCA

SEQ ID NO: 473983 - protein, 355 aa, unidentified
MSQEKYIGMDVHQATISVAVMDAGGKLIMECLLETKTSTIVEFIRGLQGTLSLTFEEGTSAAWLHDLLKPHVSRLVVCDPRKNALLKDGNKSDRIDARKLAELLRGNQLHPVYHGEHGVRTLKELGRSYLTITQDVTRVMNRIKALYRSWAIPCAGTTVYSARHRAEWLAKIAEPGVRVRAERLYQQMDLLQAVRLEARRQLLAESHKHSAVKLLRQIPSIGPIRSALLVALLQTPHRFRTKRQLWAYSGFAVETHDSGEYRSVRGKLQRNRERMTVRGLNDNHNRDLKNLFKSAAVSASTHPGPLRDFYVARVEKGMRPTMARLTLARKMAAISLTIWKKGVEFDAQQLQRQAA

SEQ ID NO: 473984 - protein, 322 aa, unidentified
MQQGEVMVGVDVSMLQLDVALWPSGESFSARNDTQGVGQVVARMVQLRPQAVVIEASGGPEDLLVSELCAAQVAVAVVNPRQVREFARSLGQLAKTDRLDALVIAKYGHSAHSSGRLNLTQLPAAAEAELKALVRRRRQLIEMLVAETNRRQRASKIVKRSIVASIRGLKRALAELEQQLRDTVKNSPAQKAKAAILQQVPGVGPRLAHSLIAEVPELGQLGRRQIASLIGVAPHAHESGKFKGRRMIWGGRAPVRSTLYMAMLSASRHNPLLAPFYRRLLERGKSKKLAYIACARKLLVILNAMFRDHTTWSPNLDFQHSR

SEQ ID NO: 473985 - protein, 390 aa, unidentified
MIYVGIDVAKDKHDCCILGSDGEILFSPFTFQNSLQGFDALYEKILSLTSDLSEIKVGLEATGHYHLNLLRSLLDNGLASFVINPLHTNLYRKGQSLRKTKTDKVDAASIAMMLLTGRSLKPYSDTSYHNEELKSLTRYRFDKVQERARLKISVSRLVSILFPELEKLVPTLHMASVYALLSEFPGASFIAAAHLTRLKHLLYDASKGHYGRDMALTVRDAATSSIGSVIPAKSLELKHTIHLIQVLSAEIDEIEDAINAIMDTLDSPITTIPGIKNRMGSMILAEIGDVSRFDNPDQILAYAGLSPSTYQSGQLTSSYAHMEKRGSRYLRYALFNAAIYVCHWDPTFKAYLTKKRTEGKHYYVAVSHACKKLVRVIYRMQLTGEPYRVA

SEQ ID NO: 473986 - protein, 385 aa, unidentified
MTNQIQAPRFIPRDYDVFGGLDVDKKSMSVVFTDHAGSQRALRMAHQVTPLVNYVRKHFAGQRVAFAYEAGPTGFGLHDELVRRAYTCVVVAPSKVPRAPGERVKTNRLDSRKLAESLRGGQLHSIHVPSAVYRNLRHLVQMRDTHVRQLTSSKLRIKSLLLYEGIAFPEEHEKWTARAMRELQTLPCSDPVRFKLDDLLDTLHFHFQAAARATKQIRQHCLQEPELQQSIEVLLSLPGIGWIVASHLVARLGNPREIKNGRQIAGFLGIVSSEHSTGDKENRGEITRSGDSRLRNKLIQSAWIAIGKDPELRAFYRRIYQRHPKKVAARKAIVAVARKLTNRIYVVLKEQRPYVIRPDSSIAPLTAEETVGPRERLDSAQNDQS

SEQ ID NO: 473987 - protein, 399 aa, unidentified
MTNQDHRVGGIDSHKDTIHVAVITAIGQPVTDREFPTTVAGYRRAVAWLIEHGPLSAVGVEGTSSYGIGITTELLAAGIRVVEVNRTRAAEKRKQGKTDPLDAYRAARSVLSGEASTEPKNPSIEPLRALTIARRSAVKSQQAAWRQIGSLLVTTRPALRDRFRDLPETKLIATLRDCRPDQIHDVDDADTLYALRTLARRYLALQDEITALEERMLRRATRANPALMAIKGVGPAVGAQLLITAGDNPDRLRTSASFAALCGTAPIPLSSGRTDKHRLSRGGDRQANAALHHIVKVRMSYDQRTRAYRDTRLANGWTTKEVFRALKRAVAREIFHALAGHTLAPDYSDLRPARHAKNLTLTAAAQHLGVWPARIGELELGRRPNDELATRYRAWLAAA

SEQ ID NO: 473988 - protein, 377 aa, unidentified
MNEHDPIAVVGGVDAHADTHHAAALDQRGALLATKSFPTTTPGYAALLDWLYSFGELAAVAIESTGSYASGLVRYLREHDVQVVEVNQPHEHTRRRRGKSDSIDAELAARLLLAGKATAIPKQSDGIVESIRLLRDARESAVKSRTAATLQLGGLIITAPQELRDELKRRKTLRGKAALCRRFRPALNELATPTQAAKFALRSIARRLGALDGEIADLDRQLETLVRAAAPRTTRLLGISTGHAGRLLVTAGQNIDRVHSEAAFAALCGASPVPASSGKTTRHRLNYGGDRQANRTLHLIAVCRLRYCQRTRAYAQRRTAEGKTKREILRCLKRYIAREVYNTLQADLADLHPRPRPARTTTIICGAGPIGITRHRT

SEQ ID NO: 473989 - protein, 409 aa, unidentified
MERQIERGCGLDVHRDTVAACVRVPGAQGAREQHVRTFGTTAAELLLLRDWLGAHGVTHVAMESTGVYWKPVFYVLEDACTCLLVNAAHIKQVPGRKTDVLDCIWIAQLLEHGLLRGSFVPPVEIRELRDLTRHRKVLIQERQRAANRLHKLLQDAGIKLASVATDILGVSGRAMLEALVQGTTDPDVLADLARGKLRKKLAALRQALTGRFRPHHAFLVGQLLAHVDYLDEAITTVSGEVEAHLAPFARHLTQLDTVPGIARRTAEVILAEIGVDMTHFPSDRHLASWAGLCPGNHESAGKHKTGKTRKGNPWLRMALIEAALAAIRTKDSALAARYRRVMRHRGHKKAVVAVAHAILRAIYHILTDLTPYRELGPNYYDRRHAHRITRRAVELLERQGYRVVLEPAA

SEQ ID NO: 473990 - protein, 347 aa, unidentified
MSNHIENGQVRVLGIDLGKSVFQLHGVDARGKSVLKQRLKRDKLLEFMAQLPPCLVGMEASSGAHHWARKFQGYGHEVRLMAPQYVKPYVKRHKNDSVDAEAICEAVQRPNMRFVGIKSVAQQEILALHRVRSLAVKNRTALVNQIRGLLAEYGIVFPKSIKQARRAIVLILSDESSEMSANFRVILEDERDELAHLDERIGKYEREIEALAKAEPQCRLLMTIPGVGPITATALLASVGDVRAFKNGRELSAWIGLVPNQHSTGGKAWLTGISKRGNGYLRTLLIHGARAALRVCENKPDRRSQWVVSVSERRGANKAVVALANRMARSAWAMLVKQEAYGASAAV

SEQ ID NO: 473991 - protein, 343 aa, unidentified
MYYIGLDVHKKTISYCVKDAVGQIHQEGKIGSTRRELDAWIKTLPQPRMMAMEATIFTGWIYDHLLPHAEKVKVAHPLMLRAIAAAKRKNDKIDAGKIADCLRCDFLPECHMASTEIRDRRRILRYRNLVLRQAVQMKNRISGLLMETGVSYNKLRLHRMGYFADLMSTNEEVSQSIRPLLRLCREQIDRSIRLDTTLLRSLERDPLLSDRLRRLRTIPGVGPITALTWALEVGDTSRFRSIKQAISYCGLCSAEKSSADKMMRTPISKQRNKHIQQVLVEAARLAPRYSEELALLYEKERQRGNGNRATLAVARKMVALMLAVERRNTDFVPVGEFRRTAAA

SEQ ID NO: 473992 - protein, 341 aa, unidentified
MNGSKNVVGIDIAKRVFQLHSIDMETGEIVSLQLKREKFLEHFANRQSCLIGMEACGGAQHWARKLTAMGHQVKLLPGKAVKGFVTGNKNDRHDARAIWTAVQQPHVKAVAIKTEEQQAILALHRMRSQLVKFRTAQINGLRGLLTEYGEVMPQGKAGARKGIAEALARLADRLPAMVIDTLRDQWARIGKMDEEIATIEQRIKLWLKNDDACRRIAEIPGVGPLTATAAVAIMGDAKTFKSGREFAAFAGLVPRQTGTGGRIKLLGISKRGDTYLRTLLIHGARSVLTHAKEPGPWVTELRQRRPLNVAIVALANKMARTIWAMLAHERTYQKEFVSQPA

SEQ ID NO: 473993 - protein, 322 aa, unidentified
MEEAVYVGIDVSKQWLDVHVLPSSQRWRTERDEASLETLSRRLREAAPALIVLEATGGLQTRVAAALTAAGLPVAVVNPRQVRDFARATGLLAKTDRLDAAIIARFAAMLRPEPRALPDEALRALADLVARRRDLVGMRAAEKTRLTSATNVVVRRSIERNIAALTSEIDALDEQIGQSIKASPVWRAQQNLLLSVPGAGPQLARTLITDLPELGRLTRRQIAALAGLAPFADDSGTHRGRRHVRGGRASVRVALYMATVSARRFNPVIRAVFDRLTAAGKPFKLAMTACMRKLLVILNAMARDNKPWTTADDLLNAKPALS

SEQ ID NO: 473994 - protein, 284 aa, unidentified
MKRKLYVGMDVHKETIQIAYLTSNSKEILKEQQIKHNEVQIKKFIKKLKTEWNEIHCCYEAGVTGYPLYRYLKSLGVNCILVAPGKIPRQSTDKIKTDKRDAIKLARLMRSGELESIHVPSEEDEAVRDYLRSRDSLRLDLGRNRQRLMKFLLRKDIKYSTTKYWTVSHYKWLNNLHFNNEILQETFNDYYSRVRVQEENLKSMDKKIQEVAESEPYREKVGILRCFRGVDYLTAMFLLCEVNDFKRFKTAGSFMSFLGLVPGEYSSGFQKKTNRDNKNWKSET

SEQ ID NO: 473995 - protein, 339 aa, unidentified
MKYTQVGVDIAKHLIQVHFINEHTGEVVDKQLRSKDFLTFFSNREPCLIGMEACGGSQHWARELEKLGHKVRLMQGRFVKALVMGNKNDVMDARAIWMAVQQPGKTIAVKTEEQQSVLVLHRSRRQLVKFRTAQINALHGTLLEFGETIHKGRAAMDRELPAALERLKTKLPPYLITVLEDQYHRLNELDTLIEGLEKQLNSVARQNETCKRLIEIPGVGPLIATAAVATMGEASAFKSGREFAAYVGLVPKQTGSGGKVRLLGISKRGDTYLRTLFIHGARAAALLTKEPGPWITELKKRRPTSVAIVAMANKLARTVWAIAAHDRKYDKNHVSIRPY

SEQ ID NO: 473996 - protein, 348 aa, unidentified
MTLVGCDLHSRKQQVAVLDTTTGEVAEQELAHDGDAVERFYRALTPPVTIGIETTGYTQWFHALMHRLGHTVLVGEAAKIRAMVVRKTKTDRRDARHLLDLLKHDRFPTVWIPDPGTRDLRALVAHRVRLVRMRTMVKNGLQAIALNQRLALRSKLWSQRGLAQLRALPLPPHTTRRRDDSLELLAWITSRVHQLDARIVAAAENDSHARLLLTHPGVGPLTALTTVLVLGPVKRFPDGQHVVSYVGLAPAINASAGKQRLGRITKQGNALLRWVLGQAAPLAARADDDLRRRYFSILHRRGRPKAKVALARKLLVRLYIMLRDQIDYEEFRRRGCATRHHQPMASIM

SEQ ID NO: 473997 - protein, 341 aa, unidentified
MNHYAGIDVSLECSSVCVVDASGKIVREGKVASEPEALIAWFGSLGLGLTRIGLEAGPLSQWLFAAMRDASLPVELLETRHVRDAFKAMPVKTDRKDARGIAQLMRLGWFRPVHCKSIEAQETRAILTARKLVQSKLHDVEMNLRGTLRGFGLKVGRTTSNRFAARIRELVEGHPSLQLIATSLLAVHAVLLREFKGFEKRVRIMARGDERARLLMSTPGVGAIVALTYASAIDDPGRFKSSKQAGAHFGMTPKKYQSGETDITGRISKIGDKGVRTALYEAAHIILTKPVKGSGLKSWAARLAKRVGMNKAKVALARKLAVIMHRMLVDRTPFNPAAAAA

SEQ ID NO: 473998 - protein, 323 aa, unidentified
METSEVSFKQVVSRGCGLDVHKKVVVATIDGEGIKKQTREFDTITSSLKELRDWLLEKGITHVVMESTGVFWKPVYNVLEPGGMTVWIVNAAHVKNVPGHKTDKKDSAWLCKLLLAGLLKPSYIPAKEQRELRDLTRYRTRLIQSNASNKNRIVRVLEDANIKLSSVLSSTSGAVGTKLIDKICKGKEITMQDIDEVYHKKLGASKEEIFEACQGFVTGHHVYMLQIIRQEIDDTVRTIESLGQRIKEVLSPYENALELLKKVPGISSKSVEDLVAEIGLDMNVFPSEKHLASWAGMAPGNNESAGKKKADGQPRGTNRLKLC

SEQ ID NO: 473999 - protein, 267 aa, unidentified
MTYYAGIDVSLEYSSVCVVDGAGKIIREQRIASEPEALIAWFRGLGFGLERIGLEAGPMSQWLYAAMRAAGLAVELLETRHVRDAFKAMPVKSDRNDARGIAQLMRLGWFRPVHCKSMAAQEVRALLTARKLVQSKLLDVQMSLRGLLRGFGLKVGATTPSRFAGRIRDLVEGNATLEVIAAALLVVHETLRRELAGLEKRVRSIARSDGRVRLLMSTPGVGAIVALTYVAAIDDPARFKSSKGVGAHFGLTPKKYQSGETDITVVP

SEQ ID NO: 474000 - protein, 339 aa, unidentified
MDHVGIDIGGRESQVCVRNSAGEIVEEVRCKTGSLAAVLAGRARSRVIVETCTEAFRIADTAIARGHEVRVVPATLVRSLGVGQRGLKNDERDARLLSEASCRIDLPSVHIPSTTSREWKALSTSREALVKARTQLISTIRSYVRSRRSSVLRATPESLPPKVRAALLETEAGLPEHIERILVVIEALNGQIAVAAKELADLAEKNELTHRLMSVPGVGPVTAVRFVAAIDKVERFPNGSYVASYLGLTPGENTTGFKTKRTRLTKAGAPEVRWALGQAAWSVFLQRKDNPIARWAKQVAARRGRQVAITALARKLSQVLYALWRDGTSYSPGPARSAA

SEQ ID NO: 474001 - protein, 336 aa, unidentified
MQPILKSCCGIDVHKSMIKASIAKGPLDKPPKLTTRTFSTMTSDLIKLKDWLRENEVEAVAMESTGVYWKPIFNILEDEFPVVLANPQYLKKVPGNKSDVKDSKWIAGMLRCGLIPASFIPPKAIRELRELNRTRRKLMGMMASEKNRIQKVLEDANIKLASVVSKIDGVSSMIPFREENTLVQTIPGISKTTASAIIAEIGVNMSQFPSDAHLASWAGICPGNNESAGKKESGKIRKGNSYLKATLTEVAWAASRTKGSAYSAIYHSLAKRRGKKKALIALGHQILRDIHRVLKTGMPYVDEGAEAVYLRNSKARQQSAIRFLERSGYTVITASA

SEQ ID NO: 474002 - protein, 341 aa, unidentified
MEKFIRTAIDLGKNYFQVHGLESEGGRSISRKVKRSRMHEVYSQIEPCRVGMEACGSAHYWARQLTAMGHEVVLIPPAYIKPYVKRGKNDAVDAAAICEAMSRPDMRFVPIKSADQQAVLMLHKTRELLVKQRTMAVNALRGHLAEFGIVAARGIGRVDELLALAEADAALPHIARASVACMARHLEGLDQSIETMEEEIAKAHRQNPTSRLLDEIPGIGTLIASVTAASVPDPGVFKSGRDFAAWLGLTPRQNSSGGKEKLGAITKQGNRYIRKMLVTGATSVLRVAGKRKGALANWINALRARKPERLVAVALANKLARICWAIMTTGEGFRTEMYAKA

SEQ ID NO: 474003 - protein, 410 aa, unidentified
MKEQNGADVTILPQLDKACGLDMHKDKIVGFISCKDGSGQELKEFGTSTCELKDVKAWLQGHHVEHCLMESTGIYWMSLYAILTEAGIHVTVANPTHIKQVPKRKTDRKDAKWLCTLLLNGLVRPSFMPTAEQRILRDHCRSRLFYMRQQNKTQNRLLKILESNNIKLRSFISSIKTKSAMSMIRLLAAGVTDKEQLLACALGRVKLKKEGLSKALDGTLAPHHLVQLQMLLQDLDHVAKQLETLETIIVEITQAHYSVAYECLDSITGIAGRSAQIILSEAGSDMSRFNTADHLTAWCGLAPGNHESAGKRRETSVKKGNPYLKTAIITAAWAAVRVKDSYWRALFERLRKRMRVQKVIVAVARRMLKVVYKTLDTLTHYQEKGIAHFMDLQAKAALYNRMKQQWPSAE

SEQ ID NO: 474004 - protein, 413 aa, unidentified
MEVFCGIDWAEDHHDIALAGRDGQLLARRRISDDAAGLALLVDLLAAHGDTATDPVPVAIETPRGLLTACLRATGRQVYPINPMAVARYRDRHSAAGRKSDHGDAVVLANILRTDLASHRPLPADTELAQAIAVLARAQQDAVWARTQAHNKLRSHLREYYPAFLTAFADARGGIMRPEARILLAAAPTPAAAAKLTPSQLRALLRKAGRSRGIDTQASRLRDAFRAPQMRQLPLVEQAMGRQALALLRQGDAACAAASDLEQAVIQPFNQHPDAGIITSFPGLGPLTGARVLAETGDDRSRFAGAKGLKAYAGAAPVTRASGKSIAILHRRVKNQRLAAAGYVWAFAALTASPGARAHYDRRRQAGDRHTAAQRNLFGRLLGCLHHCLATGQLYDENTAFPATTHQPDIAAA

SEQ ID NO: 474005 - protein, 344 aa, unidentified
MANHNQFCNFTKLIGIDLAKSVFQIYSCDTQTGEITNVQIKRDKVLESLANCGKCLIGMEACGSSPYWARKLQALGHTVRLMDPKLVKPFVRHNKSDKADAEGVYHALVSGVRAVAVKTETERDIQTLLTMRALLVKQRTARINHVRGLLAEYGHVMQKSVDQFDKKVDECINSLEGDAVQLVIDTLRDTVKSIRDDQDRIKTLQREISRLANQTRNAKHFLTVPGIGETIMAYMCVLLADPTQFSSGRQFAAYLGLVPMHTGSGGKTVTTKIPGRCDKALRALLVQGAHAVARSKYRTDWVKNILAKKPKKVAMVAIANRMARQCWAVASKGQDWRRMPVTAA

SEQ ID NO: 474006 - protein, 420 aa, unidentified
MQNPVPFAALVGIDWADKKHDVCLCAAGSTKRERSVVPHTPTALRDWANKLRTRFAGAPIAICIELSQGPVVSALLEHDFFVLFPVQPKTLARYRAAFTTSGAKDDPTDAEFALELLLRHPDKLTRLEPESVPMRSLRRLVEARRTLVQDRVRITNRITAALKAYFPQVLDWFRDKEAAIFADFVERWPTLELVQRARTETLTAFFRAHNVRYQTAIDRRIAAVRHELPLTNDAAAIEPNRLLVEVLLPQLRAAGAAIDRLDDEIAKLAPELPDYALFRALPGAGAALAPRLLVAFGERRERFPDAASVQQYAGVAPITKRSGNKSSVHWRYQCPTFLRQTFIEWVGQTIPRSFWANAFYASCKARGMQHQAALRALAFKWIRILYRCWVDRVPYDESRYLLALQKRHAPLLKVAASIET

SEQ ID NO: 474007 - protein, 405 aa, unidentified
MVDIMVSDFRKGRYNLMKIYVGIDIAKLNHFAAAISSDGEIILEPFKFTNDADGFQLLVSKLESFDKNSIIIGLESTAHYGDNLVRYLVAEFYQVCVLNPIKTCQMRKNNIRKTKTDKVDTYMIAKTLMMQDDIRFVSFYDLDMMDFKALGRFRQKTIKQRTRLKIQLTTYVDQVFPEIQYFFKSGLHQNAVYALLKEAPSPKEIASMHMTHLANLLKVNSHGHFTKEQAKELRVLAQKSVGANDSAISIQITQTIQQIELLDSQLEKIEAEMTDIMKFNDSVIMTIPGIGYINGGMILGEIGDIHRFSNPNKLLAFAGLDPSVYQSGNFQAKTTRMSKRGSRVLRYALVNAAWNVVRNNATFKAYYDAKRAEGRSHYNALGHCAGKLVRVIWKMLTDKVEFNLE

SEQ ID NO: 474008 - protein, 339 aa, unidentified
MQVSTMGIDLAKNLFVLHGVDHNGKTVLRKKLSRSQFVPFIIQLPACLIGMEACSSSHHFARLFSNAGHRVKLIPPQYVKPYVKTNKTDAVDAEAICEAVTRPNMRFVQIKTAEQQGVLALHTERSFLVRERNGCANSLRAMLAEFGCVMATGFSALYKAVPEILEDEENELPHFVRVSVQRQLEHLKALETRIRQTEHELSDWARTQPACQRVEKVPGVGLMTATYLVVSVGNGRQFDTAKQFASWLGLTPREHSSGGKQKFGGISKRGDSYFRCLLVHGARAVLRHISKNEKTMPWLAALVRRKHRNVAAVAQACKTARILWSMLFHETEYRPLTEA

SEQ ID NO: 474009 - protein, 322 aa, unidentified
MDTLYTHCAGLDVHQKEIVVCVLMGSSDEELMKEVRTFPTMTKNLYEMLRWLEELRITHIAMESTGIYWKPVFNILEDYFDITLANAQRIKNVPGRKTDVADAEWIAKLLRYGLIEKSFVPPADIRELRDLTRLRKKWIGDMTAEKNRIQKTLECSNIKLGSVISDVFGVSGRKLLTRLVERGYVSPKEVEETIHTRMMPKASAISDSLFGTLNEHQIFLIRQSWNHILFLEQSIEQIEIRIQELLVPYQEQVELLLTIPGVKQNSVASIIAEIGMDMSQFPSASHLASWAGLSPGNHESAGKKKVPEPPKGTHISNQRFAK

SEQ ID NO: 474010 - protein, 437 aa, unidentified
MSLNRLQVGIDFSQKRADFCLLFPDGQPLVAHQAFPNSRPGYQQARQLLLDNLRAQSFDGLDVSGEATSYYWLPYFWQMAHDRELSACDLSLFLLNPRQVFWFKKSLPPDDKTDNVDPFYIAERTRTRRPPSSWDPQDEWMPLRFYTRLRFHLAQDLTREKNYYLIYLFLMHNTYQRIKPFSNTFGVTSQQVLGAELSLAELVALPENDLAEKLEVWSGGTLDDPLETAQKLHQVAAESFALSEPLALPVQRILDLTLEHINFIEKQIQQVEQWIAAEVDNRHPEVRFLDSVPGVGLVLAAGITAEIGDLERFFRTKKWNKRHKCYRARTLREVEDAVAKLAGLWWPQNSSGDFVSENRPLAKTGNRYLRYYLVQAANGMRRHIPAYVSFYGSKSREATRFKHKRALVLTARKSIGLFVGLLHRKEAYRPQEVSGHL

SEQ ID NO: 474011 - protein, 357 aa, unidentified
MDNVTRIGVDLAKNVIQLHGVDSAGRVVLKKSISRHKFLDYFANLPSCLVAMEACSASHYWARKLRALGHEARLIAPQFAAPYRKGGKPVKNDARDAEAVCEAAGRPQMRFVPVKTADQQNTLVVHRMRTGFVEERTALVNRLRAELVEFGVFLPQGIDALRAHFLDALEDGATELNGTARTALLRGWEHWQALDREIAWFDGQIAAQVKHDPNAQRVMAIVGIGPLTASAAIATVGYARQFRNGRQMAAWLGAVPKQASSGGKTRLGHITKQGNTYLRTLLFQGARTAVTTAHRRDDRLSRWIVQLRARVGLYRTVVAVANKHARILWAILAKGERFDPSHVPTRPTPARCHKATR

SEQ ID NO: 474012 - protein, 484 aa, unidentified
MARRKLSTFERLQRGERLNRKQCREVQQRLNLDDPGLDIIHRDAAGIDVGNESHFVSVPPDRDPQAIREFGSWTAALEEMARWLKDCRIRTVVMQSTGVYWIALFDVLRRYGLEVNLVDARGTKNVPGRKSDVQECQWLRKLHTYGLLRPCFLPPPEIQAVRTLWRLHLQHVRDAGRCIQRMQKAMIQMNVQLHNALSDISGASGQAIIRAVLKGERDAKVLAKLRDLRCQATEEEIVQSLQGNWKEDLLFELQQAVEAYDFCQRQMKTCDQQLRRYMAALPTRATVPAPGSVSSLPSAKKGKQGRARKPRRQGNQPAFDLASELERVLGVNVATIDGIDVLTIQTVLAEVGSDLSAWKTEQHWTSWLNLAPKRDVSGGRVIRHVRQHRTNRAGNAFRMAAQSLVRSQTYLGARYRYLRAKLGGLKAVKAMARYLACLYYRLLTQGQIWVDRGTEEFNRRSQQRELTALERKARKHGLQLVPAA

SEQ ID NO: 474013 - protein, 344 aa, unidentified
MTEVITIGVDIAKSVFQIHAVDAAGEPVIRRQLRRRQVLPFFKKQPPCLIGIEACATSHHWAREISKFGHEVRLMPPRYVKPYVKRNKNDAADAEAICEAVRRPNMRFVPVKTPEQQSVLMLHRTRELFVRQRTSLTNAIRAHMAEFGIVAGIGRNGVEVLLKLITEGEDDRMPAEARACLMALADQLELIKRQIVEADRRVLAWHRSSETSKRLEAIPGVGPLIASALVASIPDPAVFRSGRDLSAWIGLVPKQHSTGGKERLGSISKAGNRYLRQLLVIGALSVIRRAKQLGYTRHPWLVRLLERRSTKIAAVALANKIARIAWAMMARNEKYQPSRLSPVT

SEQ ID NO: 474014 - protein, 352 aa, unidentified
MQHFIGCDMHTRNQMVAWIDPETGEIRKRRLEHGGEEVGKFYGQFPAGTVVGIESTFPAYWFERLLEELGHELWVGDAARIRASEVRYQKTDARDAELILDLLRRERFPRIWVPSAAERDLRQLLVHRIKQVRARTQVKNQLQALAISQGVCRKRKLWSGKGRAELERLALLPWAARRRQELLEGLDRLDAQVRELDRAVEEAGRARPEVALLRTQPGVGMVVALAFDLTVGPVTRFLHSRQLVSYLGLNPSEDSSAGRQRLGSISKQGNTMMRWLLVEAAQTAARLDPQLRRTYQRLKSRRNSGVAKVAVARRLAIRLYWMLRTRHNYAQPVHMSGSPSTAVAPPQGGPNL

SEQ ID NO: 474015 - protein, 448 aa, unidentified
MAAVMIGVDPHKASHTAVAISAAEEPLGELRVRACVAQVERLLAWAEAWPARTWAVEGAGGTGHLLAQQLVSAGERVLDVQPKLGARVRLLAAGDVNKNDPNDARSVAVAALRSAGVPEVRSDDHAAVLKIWSKRYRDLGRTRTQVVCRLHAVLGELIAGGVPKAITVSRAARVLRALRPEGAVQAARCELAAAFLEDLRRIDAQLRDTKRKLAVTVAAAGTSLTGLSGVGPVIAAAVIGDVRDVSRFPSRDHFAAYNGTAPIEVSSGQRKVCRLSRRGNRRLNHAIHMAAITQIRCQHSQGRACYDKKLAEGKTGKEALRALKRQVSNAIFACLQADARRGAARAGGPGGQQGNDSASSAAGSHPRHRLFGQATPGPGHHPTTAASNPAPGPAGALGRAGHSSIAANPPSATPQVQVERPQRSKDERPGRAARRRPHSAARKASGTP

SEQ ID NO: 474016 - protein, 431 aa, unidentified
MREITQEELFVERVAALDLGKAGLEACVRTPHPDRPDRRVQEIRSFATTTARLLELADWLRCEQVTVVVMESTSDYWKGVYYLLEAEGFDCQLANAREVKNVPGRAKTDKADAVWLAKVAERGMFRPSLVHPEPIRRLRDFTRYRRSLIRDRTRERQRVEKLLEDAQIKLSSVISDLFGVSGRAMLDALTAGQRNPAVLADMARASMRGKIAVLREALTGFFTDHHAMLLQMMLGNIDRLTAQIAVLEQHIEELVAPFCRQVEQLTTIPCVGRFTAAELIAELGVDITRFPTAGHLVSWARFCPNTHESAGKTKPKGRTKGNPWLAASIGNTIGALTRTPTFLGARYRRVARRRGKGKAMVAAGNSLLTSVYHLLADPTATYHDLGPHHHDTLINRDRQARQLAAALQAVTGQTILIRDGKVQIHDTPQAA

SEQ ID NO: 474017 - protein, 356 aa, unidentified
MVIVAIESHQGALHMQISTIGLDIAKNVFQVHGIDAAEKVVVRKRLRRRQVLEFFKALPPCLIGMEACATAHYWARELTKLGHEVRLMPAKDVKAYVKRNKNDAADAEAICEAVRRPTMRFVRIKSAEQQGQLMQHRTRDVLIRQRTQIINALRAHLAELGLVAAQGNAGVNELRAIVTDEQDTRLPIDARASVIVLAAQLEALESVIGAIEKRIKMQHRSSEASQRVEAIPGIGVIGATAIVATVADPTIFRSGRDFAAWIGLVPRQDSTGGKQKLGPISKQGDRYLRRILVVGAIAVLRRAQENPGKYPWLTQLLARRPFKVVAVALANKMARMAWALLAHGGTYRAPELAETA

SEQ ID NO: 474018 - protein, 438 aa, unidentified
MSNKVIFNLDELFISVGIDVGADFSWMSIALPNQQFVGKPYKILHNSIDSLTTAVSKIKEAEELYSLESRIFLESTGIYHYPLFCYLRDKGFNCSVINPIITKNSTNINIRKVHNDRFDSKKAALVGLKPDLKVSLMPSDLALNCRNLCREYYDLMDNRSAYVNKLQGELRMAFPQYLGIFSKVTINTSLTLLETYTSPSAFLEADKQEIIDLIKSTARFGLTYAQNKYNAIIQAATDANQFGYIIESNIKRIRLYISFIRKYDEEINNILESLHELVDANEDADFVKQIHLIETFKGAGFLSAATIMGEIGDFSAFSKPKQLFAYFGLDPAVKQSGKFEGTKVQMSKRGSSIARRVIHTLSLQSISISRNGKAKNPVLREYYLKKCDSKPKLVAMGAVSHKVCNMIFAILRDNKPFKIIAPQEHIKQYNAAKCDMTA

SEQ ID NO: 474019 - protein, 317 aa, unidentified
MKYYTSTTEYNCGIDLHARQMYVCVMDRQGKKLVHSNVKDNDFTYFLRLVGPYKHDLTVCCECMFGWYWLSDACQAAGLTFVLAHALYVKAIHGGKNKNDRIDSEKLTHLLRSNLIPPAYVYPAEKRPLRALLRQRIFFVWRRAELLARIYSHQLAHNRTPAKQTRRVRDSWEEALLAAEAHPLRQLALKNDLAMIKHFDHQIFQLEEELQRQTKQVACREYALLQTVPGIGETLGLTILFEIGDIERFPTVKDFLSYCRLVKGTVASAGKIKGLRGAKLGNPYLRWAFGEAAVIAKRDHFRIRPLAQRLEQQMWRQ

SEQ ID NO: 474020 - protein, 339 aa, unidentified
MEQIIGIDLAKRVFQVNIVSAQGEKKANKMITREKLTAFIVQQPPSRIVMEACGSANYWSRQFRQYGHEVKQISPQYVAPFRMGSKNDKNDAAAIVEADSRPGMRYVPEKSIEQQDIQCLHRVRQRLMKNKTALINQIRGLGLEYGIAIPEGAHKIMAHLPEHLEDAENELTTLSRELFHEMLQELQDNQQRIKTLDLRLALISQQNEDTLRLKSIPGIGPLGASALTVALGDSADFQNGRHFASYLGLVPKEHSSGGKVRLLGITKRGDGYLRGLLIHGARSVVYRVINLPEERCGGLQRWLKGIIARSGVNKAVVALANKNARIAWALINQKNRVYR

SEQ ID NO: 474021 - protein, 386 aa, unidentified
MRGKTFIPQDYDVFAGLDVDKRSISVTFTNHEGLIRSLRMPYSVEHLVNHVRKHFPDQKIAFAYEAGPTGYALYDGLMAQAYPCLIASPSMIPRAPGQRVKTNRLDSVGLSENLRGGQLRSIHVPSPLYRELRHLTQLRDTFVCELVAMKLRIKSLLLLEGIRFPPAPPGSQWSSMVKAKLRQLPCSGTVRFKLDQLLDSLAFCETQVLKTTREIRRFCQHDAELSQCIKYLMTVPGIGWIVASQLLARIGDWREIQNIRQLAGFLGVVPTEHSTGETIARGSITHTGDGRLRSKLIQASWSAIRQDGELREFYRSVCQTHPRDRAARVAIVAVARKLTTRISAVLMQQRPYVVRDQVPSAPVTQAETVPQGTPRRQAEPGATNDS

SEQ ID NO: 474022 - protein, 328 aa, unidentified
MTMSPTHVAFNHIVAFEVAKETLVIHVLPGDGQHTIANKPKAIRKLLMRELRRNALADLGSLLVVCEATGGYESYVLEICVELGLAAHKAHGARVRHFAKYLGLLAKTDPIDARVLALYGLKTQGLRLYVPLTPVVMALKDLKTRRDQVQQMLIAETNRLEHAHHASVTRSLKVHIASLRKALATLEADIAAHLKANDELARKARLMRSLKGVGPMTAATLLAYMPELGTFRKGEVTCLAGLAPIANDSGKSQAPRHIAAGRSNIRTALYMAALVALRHNAVMRRFAASLRQNGKPFKVVITAVMRKLIVTLNAILRSGEPWSHAKQA

SEQ ID NO: 474023 - protein, 389 aa, unidentified
MKIYVGIDIAKLNHFAAAISSDGEILIEPFKFTNDADGFQLLVSKLESFDKNSLIIGLESTAHYGDNLVRYLVTELYQVCVLNPIKTCQMRKNNVRKTKTDKVDTYVIAKTLMIQDNLRFVSFFDLDMMDLKALGRFRQKTIKQRTRLKIQLTTYVDQVFPEIQYFFKSGLHQHAVYALLKEAPSPKEIASMHMTHLANLLKVNSHGHFTKEQAKELRVLAQKSVGANDSAISIQITQTIQQIELLDSQLEKIEAEMTDIMKFNDSVIMTIPGIGYINGGMILGEIGDIHRFSNPNKLLAFAGLDPSVYQSGNFQAKTTRMSKRGSRVLRYALVNAAWNVVRNNATFKAYYDAKRAEGRSHYNALGHCAGKLVRVIWKMLTDEVEFNLE

SEQ ID NO: 474024 - protein, 515 aa, unidentified
MRVPSEPLLLDGLCRTSASSRWLRGRSRGELRHQNASTGLTIRRSGLNGKDQTVQSIEFPFELYVGIDWAWDDYDVTVLARDGGIVAHRKVAHNGKAMQEFLTWLADLSAQKPATTAITIEMTRGALVESLLDHNFALFSINPKQMERFRDRHSVAGAKDDPLDSFVAADALRTDLKRFLPLYIDEPSIVRLRELSRLDQATQCDLTRALNQMSEQLHRYYPQLLTLCRAAEEAWIWDLWEMAPLPAQGAKLTPARIGKLLKRHRIRRLSVKEVKQALGAPSLPVAAGVAEAAAEHVAILLERVRLLNQQRKRLQSTLERMLKDLCQPEAASDRQPQGKADPAPPLQALPDEPQETKEPQEKQEPQEKQEPQEKQEHRDAQILLSLPAVGTIVGATMLAEAHQALRNRDYHALRAYCGVAPITRRSGRRSSVTMRRACNVRLRNALHYWALGSLVVDPRSKAHYAKLRAAGHSHNRALRGLADRWLSVLISMLKNRTLFDKQRWNHTSAGAVPVH

SEQ ID NO: 474025 - protein, 377 aa, unidentified
MKRIKFVGLDVHAETIAVAVAEQEGEIRSLGMIPNREESVRKLVKKLGPVEQLRFCYEAGVTGYALYWQLTRLGAKCEVVAPTLVPVKAGDRVKTDRRDALKLARNYRAGELTAVWVPDAEHEALRDLVRAREAAKKDQLRARHRLSKFLLRHGRRPPVGVALWTVKYLEWVKRDVHFAVKAQEATLLDYLHEVEHMAARIVRLDSAIEEAVKVTPAKMRAVIEGLQALRGIAQISAVTIVAELGEVMRFTKARELMGYAGIVASEDSSGERQRRGGITKTGNTHLRRVVVEAAWAYRHRPAIGFTLRKRQKNLSEEVKEIAWKAQHRLHARYGKLLAKGKNKGVVVTAVGRELLGFIWAIGVQVEAEQKESLRQAA

SEQ ID NO: 474026 - protein, 407 aa, unidentified
MEVLYPRCAGLDVHAGSVTACVRVATGSEVTRHHDTVPTTTQGLLALGEWLTAHGCTHVAMEAIGVYWKPVWHVLEDNFTLILANAMHIRNVPGRKSDMNDATWMADLLAHGLIRSSFVPPAPIQQLRDLTRTRKQLMREMTRHIQRIQKTLEDANLKIIHVMSNIVGTSGRAILDALVAGETDPERLADLTRGRLKATRAELVHALHGRVADHHRFMTKLHLTQIDALDAAVHDIDTRVGNALGPFRAAVSLLTTMPGLSDTTARVLVAEIGTDMTRFPSAGHLISWAGLCPRLDESAGKRRSTRTRQATPWLKTTLVTAAWAATRKKEYLSSSAVSADSKPSRREEGHPRRGQLDADRDVLHASRWSRVPRFGGQYFVHRDKEQMAKRLIDRLRKLGIAVEVKAA

SEQ ID NO: 474027 - protein, 366 aa, unidentified
MQHIGIDLGSMESQLCTRSADGGLLWEERIKTTEIGALLEKEQFSRVILESCSEAFLIADTLKEQGHEVRIVPATMVRALGVAHRGIKTDRRDAQILSEVSTRVELPSVHIRSLQARDWKTQLGMRQALVEVRTKLINCIRGWLRTNLSTVRSGVSESFPTRVREAMEKRDDGTPAHVELVLLVLDEINKRIREADILLALAAESDPICKLLQTVPGVGVLTAMYFVWAVDNIERFANAHALESYLGITPGENSTGFRRQVTSITKAGPPQVRRMLNQACWVMLMHRPDDPLVKWAKRVAARRGKKVAVVAMSRKLAGILYAMWRDGTSYHHKKSAALKEGAQEDVQKISPKRPKKTGRRQKPIKG

SEQ ID NO: 474028 - protein, 412 aa, unidentified
MQVLFPRCAGLDVHRDTVAAAVRIQTGSGKAVTEVRTFTTTGGSLGLLADWLTECRVTIVGMESTGVYWKPVFHLLEDRFECWLLNATHVRNVPGRKTDVADAAWISDLVAHGLVRASFVPPKPQRDLRDLTRARRIVVEEKTREIQRLEKLMQDAGVKLTSVASKLLGVSGRAILEKMIEGEQSLEYLADQARGRLRSKIPQLQEALAGTFRSGHHGFLAAQLLARIDLCDEQIDELDHRIEVMIAPFRETVDRIRTITGVGEVTATVLLAEVGLDMSRFPTAGHLASWAGICPGNNTSGGKRLSGRTRHGNKWLRTALTEAAHAAARSKDTYLASHHAQVRGRRGVLKAIGATRHDILIAYWHIIANKTVYQDLGGDWHARRRRDPERRRKNLVGELEKLGYTVTITPAA

SEQ ID NO: 474029 - protein, 407 aa, unidentified
MEVVYRCCCGIDVHKRVIVACLNNGGKRELRELGTTTGEIRELANWLTEAGCEMIAMESTGVFWKPLYNLFEVLGLDAMVVNASHMKALPGRKTDVKDAEWIANLLMHGLLRASFIPDREQRERREIARYRKSLIDERAREINRLQKVLEGANIKLASVVRNINGTSSRKLIGTIIADESPSADEVVQLLHPKMRKNLDQIMLSIEGITTSLQRKLIAKIVDHIDDMTHRIDDMDDFIRDYESEYEDAIAKLEKVPGIARRSAEVILAEIGVDMTRFPSAAHLCSWAGVAPGNNQSAGRQKSGRTTKGNKALKTTLTQCAQAVKKCKDSYFSAQYQRIAARRGKNRATMAVAHSMLIAIYHMLKNDSSFCDLGSDYYDNFNRDHKINNYLKRLRALGWSPIPVVVSA

SEQ ID NO: 474030 - protein, 367 aa, unidentified
MFNSDYKLGCDAHKHFSLFAIRGPNGQIVDRVRINHFPGAIQSFLSQFPEGTLVALETVGNWYWIVDEIEASGCIPLLAHAHFAKKMMAHIHKTDKLDADGLATLLHNGTLPSVWIPPGELRDERELPRTRMAFSRIRTMLKNRTHSTLAKYNLSLTEASDIFVPKWRPDLLELFDRLPPETARCAQQQLDLLDTVQDHIDQLETHILAKVKITPSIQLIQTVPGPAKVLSIVIDREVGSIDRFPAAKNFTSYSGLVPKVSASAGRAYYGRLVKQCNTYLKWAFIEAANVIVRHRHHPNWRVKYVAHLYERIKRRKGHSVAVGATARYLAEATYWVLTKEVPYKEPPYWRSAAGMSAASLSQRQARA

SEQ ID NO: 474031 - protein, 351 aa, unidentified
MKVQITAQPKLYIGIDIHKRSWKIHCSTDLFSGKSFSMEPEPELLQKYVLKHFADYQVSVAYEAGCCGYYAHRCFTSYGWLSLVVNPADIHRKGKEKYTKTDRIDAQLISRELKDGRLDSIHIPTIEREELRSLFRRRNDLVKDFRRIKSYIKMQLLYFGIKEPVHFDNDHWSHAYRKWLDDMIFKHPTAKATLDSRMRFFRFVDKELRDVSTQIRGYCRKHHKKDYYLLRSIPGIGGIVACGIISELGDLRRFNSIKHLAGYVGLAPGVHQSGGNYKSMGITMRAHRLMRSYFVEASWQAIRADPVMLAYYRKHHGKNVKSVIIKVARKLLSRTLAVIKTETPYAIGVLE

SEQ ID NO: 474032 - protein, 365 aa, unidentified
MTEIAAIAIDTAKRVFEVGLFDAEGALVSRKRLTRAQFMRFMDKEAPRVLVGMEASGGVHYWARWLRARGFPVKVMPARVVRAYRVGPHKSDQRDVWAVGEAMVRPHVPSVPVKSERAQTLQALVRVRNRIIRQRVQAAGQMRGLLAEFGIVAPKGVTRFRRFLVTLEDRPEWAALPSVSRELFDFLSAELDELEARETAADKQLKVAQRDDEDCKRLRSVPSFGPVNAATLAALLEAPELFPRGRAFSSYLGIVPGRDSSADRDRQRSITKAGPREARRLLMLAAQSLINMARRRRNAGRELDRLQAWALALAERKGGKKRNVAVVAIANKLARIAWAVMVRRTYYRAMPVDKPAPDAAACKSV

SEQ ID NO: 474033 - protein, 465 aa, unidentified
MDLILGIDLACRAAHQASLARADGSLVWTGRKFFTRPDELRRLWDDLGLSGDDSVMVVMEPTRNAWAPVASWFRRRGAKVSMVPTTQSADLRAYYSKHTKNDHLDSKLLARLPLLHPEGLREHTGDGPAEPLRRIVKVRASIVKRRTAVFQRLDAQLELLGPAWYDALGSSYGKAALAVLARYADPHILLRLGQARLTRFLIRHSRGAWRDDHARTLLAAARQSLELWGPDGIDFAELAADIAVEAEQAQMLTEQIEDLDERVANLYAEADPTGIVASAPGVGPVTSGIIAGRIGDPHRFTSLAAIRAYSGLVPKLAQSGQAHHQHGLTKAGDPLLREALFAAADQARKTDPQLAAKYKRLMSADRHHDSAICHIATVLLTRIATCWRTGQHYILRDTDGRHITPEQGRRIVREHHTVDRQTRIKAANTRASQRRKHKTSRESQESPSAPTSRPANTSIEATAVA

SEQ ID NO: 474034 - protein, 385 aa, unidentified
MAKVVIGVDPHKRINAVVVLNSRARVLGRAQFVNDAQGFRELRAFSRQWRPRTWAIEGCNGVGKHVAQRLVAAGERVVDVSTRRAALVRVFAGGNGRKNDDTDAHSIALVGLHTPDLPEVHADDRRTGLRLLSNRRRELVGQRTQCVNRLHRDLVGLVAGGAPRALTAKKARALLASVRPRDEIGRLRRQLAAELLTELVTLDKKVAAIENEVRALVRSTPTGLPKIYGVGPVITALTLGEVGDVARFADRNHFASYNGTAPDDKGSAGSPAHCVNIKGNRKLNHAIHMIAITQIRNRKSPGRAYYDRKLAQSKTKKEALRALKRRISDVIYRQLVADAQLEAGPGGQAGTTLTASVTDPTPTVGTSNKPHPGPAPNSTPLANTA

SEQ ID NO: 474035 - protein, 346 aa, unidentified
MLYAGLDLSRKRLDFHVLDADGATVEVGAAPPDADGLHRLTQRLDRYRTPICAAIESMNGARFVHDRLELAGWQVEIADAQKVKGLAPLACKTDRIDAWVLAELSRRELVPAIWLPDPAVRGERERARWRLHLVRHRSSLKQRVHAVLLAHGKPCPVSDLFGVRGRQLLAQLGLPEPWQGTLEASLRLIDELDREIGDCERELRRLGAGHRYVPLLCSVPGIGWVLAYTIAAELGDIDRFPTPRKLTGYSGLCPRVYQSGERDLRGPLTKQGPRYLRWALVEAATHACTAPVYRDRYQQTKARIGKQRGAKVAQIDLARRLSEAIWHMLTRNQPFAPKGATDPLAA

SEQ ID NO: 474036 - protein, 451 aa, unidentified
MSRRKPPDPAAALHVVHPHAAAVDVHSDNHVACVGPDHVRTFGAYSADLHALADWFAACGVATVVLESTGVYWIPLFELLEARGLEVFLIEPSQASHCGARPKTDRLDCQWLQRLHTYGLLRPSFRPPEAVLALRGYWRQRQMLVRYASHHVQHMQKALEQMNVKLTEVVSSITGVTGTAIIAAILQGERDPKRLAKLRHEKCARSEDEIGLALEGTWRAEHLFALKQAFALYEHLHRQIDECDEEIARELDRLPARSGDEPIAPKPRRRGRKPNDARFDAPAKLTRALGVDVTAIEGIDTATALVILAEIGVDVSRFPTEKHFASWLGLCPRTARSNKTEKRRTPRKGKNRVAQALRMAAQAVGRTQTALGMFYRRIKSRIGGRGAITATAHKLSRLVYRMLRFGTEYVAQSLVEYEVKVREKLERSLRRKAQALGYELVPKGSVAPAPT

SEQ ID NO: 474037 - protein, 412 aa, unidentified
MNQDKLYVGIDVSSKNNVCYLMYSDGSKHSSFSVPNNRNGAKIIVDRVISVLLLQDIPQVVIGMEATSVYGDNLIRFLRESGSLGRFERSLHMLNPKQVKKFRDAYSDLPKNDYVDSYVIADHLRFGRINKEVYMDDYKYQALKMYTRARHQLVQELTREKQRFLNTVFISFSGLTQEKIFSNKFGATSMALIEEFSSLDELAYMSTDELVDYIRKKGKNHFENPEEIAEAVQRAAKNSYRPPQVIADAAKQMLAISMNTIRLLQKQIKEYDKAIEKMLEAFPQTLTSVKGIGNIYAAGIIAEIGDINRFPSQASLAKYAGLVWTQHQSSDFEAEDKRMIQGGNHHLKYYLCEAANALRRCDPEFKRFYALKYKEANKHNHKRALALTARKLVRLVYTLLKTNRLYIPPEEY

SEQ ID NO: 474038 - protein, 410 aa, unidentified
MEVLHAHCAGLDVHKGSVVACVRHMVEGKVTTGVRTFMTTTRELMALSEWLSVEGVTHVAMEATGVYWKPVWHILSDGEVALVLANAAHVKNVPGRKTDVNDAAWLADLMAHGLIRPSFVPEEPTQQMRDLLRTRKQFVGERSSHTQRIQKTLEDANIKLDSVISDILGVSGRRMIEALIAGQTDPEALAALAHERIHATRAELEASLRGRVTAHHRFLLRLHMNHLDALNAAIAGIDQEVDGKLEPFRGAIARLSTIPGLSDLSAAVLVSEIGLDMSRFPREGNLISWAGLCPRSDESAGKRRSNRMKKSTRWLKTTLIQCAWAATRKKGSYLQAQYLRLRSRRGAKKAIGAVAASILTAAYYMLKNATPYQEPGANYFDNRTKGKQVLRLVNRLRNLGFAVQITPMEA

SEQ ID NO: 474039 - protein, 345 aa, unidentified
MTSMNYIGLDVHKKTISYCLKDVSGRVRQEGKIGSTRCELDCWMKTLPQPWTVALEATIFSGWIYEHLLPHAAQIKVAHPLMLRAIAAAKKKNDRIDAGKLADCLRCDFLPECHMMPAEFRDRRRTLRYRHLLVKQMVQMKNRVSGLLMETGVEHNKQRLHKVGYFHELLSTNQEVHPSIRPLLKLSRETIERCQKTEYALVSSLQRDPMLAERIKRLRTIPGVGPITALTWALEIGDVSRFQTIKQAISYCGLCGEEKSSADKMMRTPLSKQRNKHIQHVLIEAAKLAPRQSYELALVHEKEMQKGNRNRATLAVARKMVAYLLAVDRQQRDFVPAEERRAGVA

SEQ ID NO: 474040 - protein, 339 aa, unidentified
MYATTIGLDIAKSVFQVHGESSGKVVLVKRLRRSQMVDFFAKLPPARIGIEACGSSHHWGRTLRALGHEVLLIPAGYVKPFVRRNKTDARDAAAICAALGRPDMRFVPIKSVEQQAARGLERSRDLLVKQQTQLMNSVRSQLAELGIIAAQGRRGFNDIVALLAAGDDDVPPVLLSVLRLLVRQLDQLGTAIVILEKQIVARARENETMRRLATIPGVGPLTAHAIVTAVGDGKQFACARDFAAWCGLTRRVDQSADKRRERGISHQGEMRLRKLLALGSSTLMRHVRACPERATEWQRGILARRPVKVAVLAQAARNARIAWAMMQSGECYRRPVLAA

SEQ ID NO: 474041 - protein, 394 aa, unidentified
MCQQYKAEASMIKHNILFIGLDTHKTFTEVAYIEDQRGAKSIHLGKILSNKAAFKKLARQLQSKYPDATLHFVYEAGPCGYWIYRLLTSLHHCCYVIAPSLIPKKPGERIKTDKRDALKLAKLLKSEDLTTIYVPEPEDEAVRDLSRSRETGMKDLKDAKYQLKALLLRNNINSKVKDNWSLQHLRWLAELVLPHPCQQIVLQEAVSTITERLKRLKRLDNELTHQVKSWRYYPVVKAIQAMRGVRLLVATGVIAELGDLSRFDHPRKLMSYLGLVPSEHSSGGKRRLGAITKCGNSRARRLLVEGAHSYKHNANISKEMQLRQEGLSKEIIDMAWQAQLRLCRRYSRLMHKGKHRNVVVTAIAREMIAYIWAISREIVLPVVDVKLRMARMPA

SEQ ID NO: 474042 - protein, 342 aa, unidentified
MNSTKTVVGVDTAKQVFQLHWVDTETGEVFSKQLKRTRFLEHFANMAPCLVGMEACGGSQHWARRLQEMGHEVKLMPGKAVKAFVSGNKNDVADARAIWLAVQQPGVRAVAVKTEAQQAVLALHRMRQQLVKFRTMQSNGLRGLLTEYGEVMAVGRAALNRGIKDALARLAERLPAVLIDTLREQWDMLAKLDEQIAQIEQRLLAWMKQDKASKTIAQIPGVGLLTATAAVATMGDASTFKSGREFAAWLGLVPGQVGTGGKVRLLGISKRGDTYLRMLLIHGARSVLCHAKESGAWVERIQKRRPSNVVAVAMANKTARTIWAMLAHDRQYQKDYVSLKPA

SEQ ID NO: 474043 - protein, 417 aa, unidentified
MQYVPSVLPAEPINGLTCGIDWARDDHAITIVDEHGRQVHRSTVEHSSAGLHELVGLLARTGATEVAIERPDGPVVDALLDAGITVVVISPNQMKNLRGRYGSAGNKDDRFDAFVLADTLRTDRARLRPLVPNSSATVALRAVVRARRELVIHRVAVANQLREHLKRVFPGALGLFEDLDSAISLKFLTRFDCQDRADWLTPQRLGAWLKSVGYTGRTDPATLHTRLTAAPRGATGTEGAAHVCITRALVASLTSLVEQIKTLEKRIGEQLATHADAHTFTSLPRSGTLRAARLLAEIGDCRARFPTPEALMCLAGVAPSTRQSGKMRSVGFRWSCDKQLRDAVCDFANDSRHANPWAADIYNRAIDRGKDHPHAVRILARAWLYVIWHCWQENTAYNPAKHKALQALLEQRENPAA

SEQ ID NO: 474044 - protein, 326 aa, unidentified
MSSPTPPSGSVPLGPLSVGIDVAKDTLEVALGERGELRSFANTAADHARIVAWLLPSAPSYVVLEATGRYEQPLVAALATAGLPVHVVNPRQVRDFAKALGILAKTDAIDARVLARFGADVRPETRPLPDEQTRQLQELLARRAQLVVMRTAESNRLAQATAKPVHKSVLATIEFLDKQLKKLDDELDERLQASPLWKAKQDLLKSVPGVGDQTARILIAALPELGTCSRQKIAALVGLAPLNDDSGKHRGTRFIRGGRAVVRRVLYMAALVAVRHNPLLRTHYQKLRAAGKKTKVALVACMHKLLTILNALVRTNSPWKSIPQNT

SEQ ID NO: 474045 - protein, 384 aa, unidentified
MNKKQTRNKEYSEATQVLYLAFDLGAPNWKLAFSIGSGQKPRQRNVVARDLAGLQKEILKAKKRFGVAEEAAVVSCYEAGRDGFWLDRYLACAGIKNLVVDSSSIEVNRRKRRAKTDKLDAASLLRLLIRHHLHGEHKVWSLVRPPSPEEEDRRQLNRERSTLKKEKERTSSRIRGLLATQGIRLSGPLDLSDRCLESIRLWDGSRLPERLKNRLRREWKHLTFLKEQMAAVEQEGKGELRRGEEPDLEKVEALQKLRGIGPVGSWVLVREMFGWRRLRNRRQVASLAGLTPTPFNSGTSIHEQGISKAGNRRIRAVAIELAWCWVRFQPDSALTRWYIQRFEEGGKRARKVGIVALARRLLIELWRFLETGVLPEGAQLKAQA

SEQ ID NO: 474046 - protein, 352 aa, unidentified
MTVAIVEARAETRAITGGVDTHADVHVAAALDPIGGLLGVREFAATRAGYARLLDWLGGFGTVCLVGIEGTGSYGAGLARHMATAGVRVVEVDRSDRQDRRRQGKSDPLDAVSAARAAQSGRARGAPKGRDGAVEAMRALMVARRSAARERTRAINQARALILTGPDDLRARFTRRTPAALVAGIARLRPRPGDVMGYAVRVALRELGRRAEFLDGQLECLDELIAPLAAARAPGLLALYGIGPHTAALLLIAAGDHPGRLRSEAAWAHLCAVAPIPASSGKVTRHRLNPGGDRQANHALWRIVFTRMGSDAATRAYVERRMKEGKSKAEIIRCLKRYVAREVYAHLRPAAG

SEQ ID NO: 474047 - protein, 428 aa, unidentified
MTSQEDRLQRFHELRSTIRGSEAMLVVGVDVAKDRHHAFFGTAAGKTLWKTLVFDNSMQGFQSLQAMTDNLVTQHGLQDRVYGVEPTASYHKPLAEYLIRTGEQVVYVSNVVVKNNRTSLDGRWDKNDTKDAANIADLISRGRCQFYDLAEDDIRELRSLLAYRAKLKKQEHAVRMRIRNNLLAQYFPELDKQMPQGGQDALILDIITQGFAPAQIAAMPFEAFRSRLKLQQRHIVQEGRLRSIWEASRDSVGCVMPEAAAWEGRMLVEQLRQTRQIKQELETQLKTIGQRFPAYRCLLTIPGFGPIVSAMTIAALGDAQRFTSRKQVLRLAGLDLSAYRSGTKSESAIPVISKQGKAGLRYALVQAATIASYKDATLRTYCTRLLKGRELERGIKLKMRVKLAAKLLVVAWTLMKRNEAFDPGYFRP

SEQ ID NO: 474048 - protein, 330 aa, unidentified
MIARKSVTDNVLGIDIAKGKFDVVLMRADGKRRWRTFANRAEGFEALRGWLDQQGARPVHACLEATGTYGLALATFLHQAGQPVSVVNPACIKAFADSELKRTKTDKVDAGLIARFCRAMRPALWQPPSPELATLQGLVRRLESLQEMAVQERNRLAAPGLTAPVKESLVRTRELLEEEMKRLRSQIEDHLKGHPRLKQQRELLTSIIGVGPTTANVLLAEIWERDFEKAREVAAYAGLVPQERQSGSSVRGKARLSKKGNQRLRKALYWPAIVAMRYNPVLAAFARRLREAGKPKMVAIAAVMRKLLHLAFGVLKHQRPFDPNWTACRA

SEQ ID NO: 474049 - protein, 368 aa, unidentified
MPSMQLRHDDVIVGVDTHKDEHVAVLLDGFGGRLAELFIPATIAGYEQLLAFCLTHVGADGQLVSFGVEGTGSYGVGLARFLRRHGQTVREVHRPPRRGERRMSGKSDTIDAEHAARQLLSGITMAQPKTADGAIEALRLIKIARDTAVKSRTTAMITLKATLVTANDELRAELEHLTDFKLVQACAQLPSESSPTDPQAAMRHALGSLARRWFDLHEEVKIHSRHLKKQTRAAAPQLVEAVGIGLDIAAEMLVTAGDNSTRIRSEAAFAKMCGACPIPAGSGKTNGRHRLNRGGNRQANAALYRAVIVRMRWHQPTIAYVARRTTEGLSKREIIRCLKRYLAREIYHLLPPLGPARRQEDASLRSVA

SEQ ID NO: 474050 - protein, 345 aa, unidentified
MMVIGIDAHKRSHTAVTVDEMGRQGFVKTVGTTTQDHLRLLKWAVGFAEERLWAIEDCRHLTRRLERDLIAAGESVVRVSPKLMAHVRDSARSYGKSDPIDALAVARAALRESDLPIARLDGIEREIRLLVDHREDLVAERTRIIARLRWHLHELDPGWTAPTKLERHSAFDKVKAHLSDHNDGAMVRRLALRLVEHLRLLTDEIDELTAEITVRVTKIAPSLLAIVGCGALSAAKIVGETAHAGRFRSKDAYARHNGTAPLPVWSSNKQRHRLSRTGNRQLNAALHRIALTQARCYQPARELLDRRKNGGDGGREGLRVLKRRLSDVVYRAMLTDETGPLPRTA

SEQ ID NO: 474051 - protein, 319 aa, unidentified
MVEGTEGSHHKEGSTKMSKDTTLCAGIDTGKHKLDVAIDGGAERVQVDNNSEGHRSLLAWLRQREVERIGIEASGGYEQAVVSSLRADGFVVIIFQPVQVRAYARFVLQHAKNDTIDAALIARCTAAATDIREPPDARLALLAQHLTMIEQLTEDVGQLKTRREACREERIREFWKREVDRLKVLQNSELKQLVAAIRAHRDLSHRLDLIASVDGVGLRTAVAILVRMPEIGRVTREQAAAIAGLAPYDDDSGLRRGSRHIKGGRQRLRQSLYAAALPAVFYWNPQLKAFYRRLLAAGKPHTLALVACAPASSSSSSTP

SEQ ID NO: 474052 - protein, 402 aa, unidentified
MNAVGIDVSKGKSMVAVMRPFGEVVFSPFEVSHTDKDLTDLAKRLKSLPGETRVVMEHTGYYHAPVAVALHEAGIYVSAVNAMLVHDYGNNSLRRAKTDKKDAIRLANYALDHWLSLPRYLPVGDTRLMLKTCYRQYEQFNKIRTMQKNNLISLLDVTFPDANKLFSSPPRADGSEKWVDFVAQYWHCECVCGMSEKAFAKSYEKWCSKHGYNFSVDKALDVYASACGHICIMPKCENTKLMIQQTVAQLQASSSALAVLKKQMLDLAATLPEYPVVMQMYGVGPSLGPQLMAEIGDVRRFHSKSALVAFAGIDAPPYQSGQIDIHSRSISKRGSAKLRRTLFLVMSVLLQTSPIEEPIYQYMDKKRAEGKPYKVYMLASANKFLRRYYATVKAYLNDLDSI

SEQ ID NO: 474053 - protein, 341 aa, unidentified
MNEVTLIGIDLGKHVFHLHAQDAKGHEVFRKKLSRAQLLPFFSNLKAVTVVMEACAGSHWLARKLNELGHVARLVSPQYVRPFVKSNKNDYIDAEAICEAASRPAMRFVEPRTEAQQLLAALHRAREGLVTERTATINRIHGILLEFGIVVPLSRATLRRLPDVLAVHDLPPRLVQLIHRLHAHYRYLDQQVDDIERDLTLQLREDENAARLLSIPGIGPITASLLASEVGNVAQFEGGRNFAASIGLVPRQHSTGGRSVLCGISKRGDKHLRHLLVQGARAVIQRAEQRTDKLGAWIRSMLTRRHANVVACAVANKLARIAWAVLTKHTAYDAAHLKLAN

SEQ ID NO: 474054 - protein, 322 aa, unidentified
MAMLSFGGIDVSKDRLDVVVLPEEECSSVPNDAAGWAELVERLRGFSITAIGIEPSGGYERGAMRALLAAGMPVRQVNPFKLRQFARASGVLAKNDPLDARMIASFVTIMPTRPAQRQTPAAERLAEMLAIRRQLSTEKVAAENASRLLEDAMLQRLSRRRIVRLAADIDLLDKRMVEIVATDDALVHRYRLLTSMPGVGAVLACTLIALLPELGRMSRKQVAALVGVAPYAFESGTLKGRRCIWGGRAHVRQVLYMAAMSASNWNPVLKAFHDRLTAAGKLPKVVIVAVMRKMITMLNAMVRDDVVWADRPSGRNSVTTAR

SEQ ID NO: 474055 - protein, 359 aa, unidentified
MDGSREQPKTTAGLDLGDKYSYLCLIDTGSGEVIEEGRLRTTPEAIRRRFASERPLRIAIETGTHSPWVSRLLEECGHEVLVANARRLRLIYSNKRKTDEIDAENLARLARLDPKLLYPVRHRGEQSQAHMALIRSRQALVDCRTQLVNHVRGAVKSFGHRLPKCPARTFHKRVQEHIPEALLPALEPLLEQIASLTERIRDYDRRLVAISEEHYPETALLRQVEGIGPLTALTFVLTLEDPYRFEKSRSVGAYLGLVPATDRSGDSDPQKRISKEGDEMLRKLLVGSAHYVLGPFGSDSDLRRHGEKIASRGGKNAKKRAAVAVARKLSVLLHRLWVTAEVYDPLHNAHRRQGQGEAA

SEQ ID NO: 474056 - protein, 350 aa, unidentified
MTIVENPTITVTGGVDTHLEFHVAAAVDANGGVLGVETFDTTVGGFRRLVAWLASFGEVTLVGVEGTGSYGAGLARHLTGKGIEVVEVDRPNRQARHRAGKSDAIDAIAAARAALAGTATGIPKSRTGSIEAIRVLTVARRSAASEWIAIVTQIRHVVFCAPDEIRARFLGLSPITLVRTTAALKPRRSDPDIVRFTTLSTLRELGRRALFVREQKMRLNAQMRPLIREVAPSLLEIRGVGFDVAAKLLIAAGDNPHRIRSEAAWAHLCGVAPIPASSGKVQRHRLNRGGNRQANSALYRIVLTRMSNDERTKTYVARRTAEGKTMGEIARILKRYVAREIYPHLPAAMT

SEQ ID NO: 474057 - protein, 368 aa, unidentified
MKKGSTTAAKQSRNFSRQQKLTIGLDLGDRTSYYCVLDESGQIVLEQRVATTVKALGEVFGGMPRSRIALETGMHSPWVSRLLSGLDDEVIVAHARNVRLIGESRKKDDRLDAQTLARLARIDPQLLCPVKHRSAKAQADLTVIRARAGLVRARTALANTARGLAKSYGERLRGCNVRNLNPEKAEGLSAELQRALGPLLAASAALSEQIAEYNERIEQMAKESYPQVALLQQVKGVGTLIALTFLLTLEDGHRFQKSRDVGCYLGLQPGRRNSGQSEPQMHISKEGDPYLRTLLVQGAQHILGPFGVDCDLRRWGLKLAERGGRSGKKRAIIAVARKLAVLLHHLWVSAEVYEPLHNSQQKAVAIAA

SEQ ID NO: 474058 - protein, 357 aa, unidentified
MGRMRYVGIDVHKNFCQFAMMDDAGHIVKEDRFPNNDEGMRSFISRLVGYDDVRVVMESTGSLWMKLYDVIEEHGLEAVLSNPYKTRLIAEARIKTDKLDARILAHLLRADLIPRCYVPSKEVREVRSLVRHRAKLSKTRTEIKNRIHALLDKQRLKAPCSGLFSKEGLEWLKGLELSSVDDAVLKSDLGILRALDEQVGYVESKIASVALKDPNVELLITMPGIDFYSAMVLSSEMGSVERFSTDKKLVAWAGMAPSLRQSGDVLRVGRITKEGNKMVRWIMVQAALNAIRSDARLRAFYERCRSRKGHQKAIIAVAHEMLRIVWFMLKRGMPYRDENKRLSLRKHNRMSRIAVDG

SEQ ID NO: 474059 - protein, 313 aa, unidentified
MIIPLRCVGIDVSKQYLDIFDEGLGVPERIANATQAITQIAARWRCDVLVVFEATGVYDLELREALSEAGIRFARINPARARDFARASGQLAKTDPIDARMLAAFARAMQPATEPTANPARNALAGLAKRRDQLVRMRAQEKNRRSETDDRAMAERIGRLIEVLDGEIAEIEADIRGLIKAEREIADDARLMRSLPGVGPVACMQLIAKMPELGHVGAKQIAALAGLAPFNVDSGAFRGKRKIAGGRKRVREALYMAALNAVRRADPFKAFYARLRRAGKPAKLALIAVARKLLTVLNAMMRDRKPYLKANPT

SEQ ID NO: 474060 - protein, 430 aa, unidentified
MGKNMDGVVYPICCGVDVHKTFLVATIIKSKIGFIPTYQKRRFSTFNKSIREFKQWLLDNQCLDICMESTGKYYIPIYNLLEKDIHVTVANPKWVAAVPGNKDDDKDSKWIGNLFRFGLVPGSFIPDKPTRILREYTRYRFKLVSCRTSEKNRFQNALTVCNVALDAVVSDMFGKSASAIIDYILDVDADSVDPNHCVSLLHRSMIKKADQIVDSIEGFQMTEDQKQRIRFIRSHLCFVELLIERLDQHIDLMVEPLEKYISLLCTIIGIDRKTAITILAEIGTDMSVFSSSKRLCSWAGLTPGNNQSAGKKKSVRITRAGAYLKPALVQAAHAAVRSNDSSYYRIKYERIAKRRGKKRAIIAIARMMLTAVYHMLLTGEVWNPVDLYQVDMPPELLAKQKQKALQQAAKLLISQGVVKPEHIVLPGLSA

SEQ ID NO: 474061 - protein, 429 aa, unidentified
MNSTQNKKISQVKETTMIVGVDVGSEKHFFRAFNWRGIELTRKPVPFSNSMEGFNSFYSTVVELMQKNNLEEAMVGIEPTGHYWFDLGQFMGGKNIRFVMVNPNHVHKSKELDDNSPSKNDRKDPRVIAGLVRDGRYFYSYMPTGVYAELRNASNRRFVLVEEQTRAKNRLQKWIAVYFPEYKGIYTRIDSKGGLLVLKHAATPDEIVSLGVDGIIGIWKSEKLRGNGRKKAMQIVNAAMNSIGLKSGLTEARMEIRDLIEDYELHTKRLERVNDLIKELCQQIRHVDKLLEIKGIGITTVAGFIAEVGDITRFNDTKELQKLAGLELVADSSGKHKGKSRISKRGRKRLRYLLFEAAISVVGKNDEFRQIHEYYTTRDKNPLKKMQSLIAVSCKLIRIFHVILTKGVSYDASKMLGDIRHPGTQPKAA

SEQ ID NO: 474062 - protein, 346 aa, unidentified
MTIVGDRPAITGGVDTHGEEHVAAALDRIGGLLGVREFPATVTGYASLLGWLGEFGDLGVVGVEGTGSYGAGLARYLTAAGVRVVEVNRPDRQDRRRQGKSDPLDAVSAARAALSGKASGAPKSGDGAVEAIRALMVAKRSARRERTEAINQARALIVTGPDELRARLAGLGPAALAAAITALRPRPGAVPGYATRVALRELGRRVQFLDAQLGRLDEVIGPLVSARAPGLLALHGVGPDTAALLLVAAGDNPGRLRSESSWAHLCGAAPIPASSGKIQQRHRLNRGGDRQANHALWRIVITRLSNHPATRAYADRRAKEGLTKKEIIRCLKRYVARETYHYLRDA

SEQ ID NO: 474063 - protein, 361 aa, unidentified
MRIIGCDLHARQQVLAMLDTTTGEIVAMTLKHEGNNVREFYSKLPRPVRVGIEATGSMQWFVNLMEELGIECQVGHPANIRAAEPRKQKHDRRDADLILKLLVENRYPKIWLPSKEQQDLRALLRHRHQWVRIRTRIQNALQAIALANGLRRGPALWSQDGQRTIASLPLAPHAAYRRSELQAMYAKFAKEIEKLNQRVEEQACERPGARLLMTHPGVGPITALATEVFLGDAARFADSKALASYVGMIPSEYSSGERQRFGGLSKQGNPLLRFLWGEAAMHAVRRDPELQRFYRRKLVQKGLGKTRVAVARKLGIRLWIMLRDEIDYNEFCRRGQMQQKSSEACAGMPDTGHGAKQSPAD

SEQ ID NO: 474064 - protein, 461 aa, unidentified
MTRYGRKKKGLPQKGGSFPIVNNNAAGIDIGSEEHWVAVPEDRDENPVRPFGCFTSDLHAMARWLKACGVTTVAMESTGVYWIPPFQILEEHGFEVKLVNARHVKNVPGRKTDVSDCQWLQRLHTYGLLSGSFRPDDQICVLRSYWRHRANLVRYAADHVRHMQKALTQMNLHLHKVLSSVIGVTGMNIIRAIIAGERDPEKLALMRESGVKNTSEVIAKALEGDYRQEHLFALRQAVELYDFYHRQIEACDREIERHLRTFEAKVDLVQNPLPKPKKRGKKPIGNQSFVDLRTELYRMSGIDFTQIPGLDALTVQTILSEVGLDPAKFPTEKRFVSWLGLCPNNRITGGEVKSTKTRKTVNRAANAFRMGAQTLANSNAALGGFYRRIRSRLGSPKAITATAHKLARIFYRMWTTGQAYLDLGKDYYENRYKERMLRNITKRARELGYEAILQPIEQRVA

SEQ ID NO: 474065 - protein, 372 aa, unidentified
MTRASRIKTKETILDQRFRHFVGIDWGTQTHCVVLLDGEGRAIEQYNVAHSGEGLFTLVERLKQRTGCKPVEVAVAVEVAWGALIETLVENGFSLFSINPKQVDRFRDRLTVAGAKDDSRDALVLATSLRTDRKSYKRVEVESPDIIRLRELSRFEEELKAELRRATNRLWQQLHRYYPQMLSLSPAADDRFIWKLLSKVPTPAQGANISRLDIERILATHRIRKFTADEVLAEDAALPSDASLILSIPGIGPAVASTLLTEASRPIRERNYQALRCYAGTAPITKQSGKKKTIIMRNACSGRLRKAVYHWASTSINCDSRSRQQYDALRASGHHHARALRGLADRLLGILVSMLKHQTTFSHLRRQSSFAP

SEQ ID NO: 474066 - protein, 347 aa, unidentified
MVAVMIGVDPHKGSHTAVAISPAEEPLGELRVPASAAQAQRLLDWAAAWPQRTWAIEGAGGLGHLLAQQLLAAGERVLDVQPKLGARVRLLDTGAVNKNDPNDARSVAVAALRSPSRRQVQPDDHAVVLKVWSKRHRDLGRARTQVVCRLHAVLCELVAGGVSKEITAGHAARLLESITPSGAVEAARCELAAAFLDDLRCIDAQLLDAKKKLTVAVRASGTTLTSIFGVGPVVAATVIGDVRDVARFPGRDHFAAYNGTAPIEVSSGSRKIYRLSRRGNRRLNHVIHMAAVTQIRYRHSEGRTYYERKLAEGKSPKEALRALKRRVSDAIFSQLQADARRAAAGSR

SEQ ID NO: 474067 - protein, 403 aa, unidentified
MDTTVSDFMKGRYNLMIYVGIDIAKLNHFAAAVCSDGEILIEPFKFTNDYDGFYLLLSKLAPLDQNSIIIGLESTAHYGDNLVRFLISKDFKVCVLNPIQTSFMRKNNVRKTKTDKVDTFVIAKTLMMQDSLRFLTLEDLDYLELKELGRFRQKLVKQRTRLKIQLTSYVDQVFPELQYFFKSGLHQHSVYALLKEAPTPNAIASMHMTHLAHILEVASHGHFGKDKARDLRVLAQKSVGVNDSSLSIQITHTIEQIELLDSQLFHTELEMANLVTCLHSVIMTIPGIGFVNGGLILGEIGDIHRFSEPKKLLAFAGLDPSVHQSGNFQAKKTRMSKRGSRVLRYALMNAAHNVVKNNTTFKDYYDSKKAEGRSHYNALGHCAGKLVRVIWKMLTDNVEFNLE

SEQ ID NO: 474068 - protein, 339 aa, unidentified
MELYAGLDLHSRNTYIGIMDNAFNRVFKKRVPNHLEQILQTLDPFRDQIKGFVVESTYNWYWLVDGLMDAGYSSAHLANPSAIKQYEGLKYSDDQHDAFFLAQLLILGILPQGYIYPKKDRPVRDLVRKRMFLVRHKTAHILSLQSLLQRCCAMKVRTNDMRHLTVEELEMWLEEEHLVLSAQANLDSINFLKQKIKQLEKAIIQKVKLNKAFKYLLTVPGIGNILAMTIMLEVGDINRFSKVGNFTSYCRCVPSRRLSDGKSKGYGNRKNGNRYLSWAFTEAAQLGRRHNERFRRYYNRKVAQANTSLATKALGNKLARICYYIMRDQVPFREELFCQ

SEQ ID NO: 474069 - protein, 410 aa, unidentified
MKKHNYRTKKVNEINWPELGQQLGGEAVTFAVDVAKAQQYALLTNDTQSLSIIVKWELLETKGLIHELKQLNCPVTVVMESTGTYGDAMRHQFRQAGFILYQASAKRVHDAKEIFDGVPSLHDAKAACLIAKLHKEGLTKPWHELDEAGRELNAVRREYDMHQSQYERNQNRLEAYLSRHWPEVLGLFDLDSVTLEKLLITYGSPQAIAADAEQAAKDMKAWGGHFLSAEKIACAIDSAVGTIGQPCIDAERRYLQALATEMQHSRCQRQAAKQLLEASVEADAGLKEMAALIGKLTTAILIGLHLDPRNFSSAHSFLKALGLNLTEKSSGQYHGQLKLSKRGSATARKYLYLAALRLIQKDPVIGEWYRAKADPKVKMKTVIACLRKLAKALWHVARGERFDARKLVTI

SEQ ID NO: 474070 - protein, 331 aa, unidentified
MQKKEFFIGFDVSKLTLDVCVDGTKNHIRVPNSSEGFKQLMAWLKSLNIALRDCWFVMEYTGGYEYRLVQFCQSKQISFTRVPGLQIKKSLGMQRGKNDKIDSKRIAEYGYEKRDKLKEHKVCNAAITRLKQLLTQRRGFVKDKKANEHRMNELLAMMEFKANDQMMKRYKKLVDVALELIDKTEAEIKKIISKDEAMSRNFELITSIPGIGNVNSWMTIAYTENFECFPAGRAYGAYIGVVAYEHSSGTSIKGKSRVSKMANQQLKADLTMAAKASVQHDPEMKAYYDRRAAMGKHHMGIMNEVKFKLVLRMFAVVNKGEAYVKNLKLAA

SEQ ID NO: 474071 - protein, 343 aa, unidentified
MDYFAGLDVSVKETSVCIVDDAGKIVREVRVASEPEALLQVLTKKNYRFKRIGLEAGPLSQWLFSALAEAGLPVICVETRHMRAVLKAQINKTDRNDARGIGQMMRVGLYRPVHVKTLRSQKLRMLLIHRKLLQSKAIAIENDLRGTMRNFGLKVGMAGTVKFEVRIKELVENLPELALLVEPLLIVRRVVREQLGILHRRVLAIVRDDDVCRRLMTIPGVGPVVALTYRVTVDVPARFRSSKSVGAVFGLTPAKYQSGENDRTGAISRCGDEMMRMMLYEAAQSILVRVVKWSWLKAWAMKIARHRGMKKAIVALARRLAVIMHRIWVDGTEFRWTREVAAA

SEQ ID NO: 474072 - protein, 410 aa, unidentified
MEVLYPHCAGLDVHKDMVVACLRHVVDGTIKREVRTVKTTTKALLDLSQWLASEGCTHIVMEATGVYWKPVWHILEDGDFDLALANAAHVKTVPGRKTDVNDATWLADLLAHGLVRGSFVPNAQTQEMRGLLRTRKQLVRERTSHVQRLQKTLEDANIKLDSVISDVMGLSGRTMIAALIAGETDPDTLAALAHRRIRAPAEELCEALRGRVTKHHRFLLRLHLQQIDIFDAAIVEIDQEVDANVEPFRAAITILTTIPGVSDLSARAIVAEIGTDMSRFPTDGHLISWAGLCPRNDESAGKRRSNRMRKGAPWLKTTLIQCAWAATRKKGSYLQAQFHRLRARRGAKKAIAAVAASILTAIYHMLTNGTLYQDLGADHFDRRGKTAQTKRLVTKLQNLGYAVQITPLAA

SEQ ID NO: 474073 - protein, 352 aa, unidentified
MKDTQTVYIGIDLHSNTSTIGYMNEQGEYCGHCKVRTTPVNLINQVAVIPAQVKKCTLEQSNMAFWAAELLQDHVDEMIVCDPRHNALVSSGENKNDRLDTLNLCTLLRLNRLKEVWRPKQLGLRRLFFHQVKEYHRLTKSLAIHKRQFRDALRHWGINGKVVQADYDCPQELLSGVNNVLLAEEFAEKTEVIQYLSSRKKRQLQRIETTGTSFPEIKEFLRIPGIGPVGAHTFSGYIQTPHRFQRADQLIKYCKLAVRKFTSDGKPVRSERLSKAGHGRLKNLAHVGWKSSLGGDNEVNRYFHDCLNCVGDEVHARLTTQRKLLITMWALWKNAEPYDRSKFIYTCEDSIR

SEQ ID NO: 474074 - protein, 418 aa, unidentified
MAIQVMVQRSAGLDIAKASLVACAQVPTETGGGYRMVKARFGTTCQQLAGLAAWLTGLGVTRVGMESTGDYWKPVFYWLEPQLECWLLNARHIKAVPGRKTDATDAEWICDIVAYGLAHPSFVPPPPIRRLRDLTRRRTVLLAERTREKQRCEKTLEDAGVKLSVVATDIFGVSGRDMLAALIAGERDGQKLAALARGRMRRKKTALAEALVGHFTDHHGFCCGQILRNVDHLDALIGELDTRINTEIEPYQHKIDLLRTIPGVDRRTAEVIIAETGGDMSCFPSAAHLSSWAGVCPGNNKTGGKSRPGRLTPGDRWLKKALGTAALANARSKDTYLGAQFRRIARRGGDHARKRATAAVGHSILVAVWHMLTTNTTYHDLGADYFLDRTNPDHQVRTMLTRLNKLGFRVTLDPIEAA

SEQ ID NO: 474075 - protein, 381 aa, unidentified
MRNVCGLNVHKDNVFVCIDKEKGEKIQFKTGILTKDLDALRDTLVANDVTEIAMESTSVYWMPIWRVLENDFKLYLVNPYAIKQLPGRKSDIKDAEWIATCLRKELIRGSYVPDSTIQQLRQYNRRIFDINKQSVYIQNKIDAALQRCNIRIGNYISNVRAKSYCQIVDMLSEGKTSPELLIVKVHKRTVNKWGRETILAALEGVVNKTDCRILKQLKEELDMLRKHKIECLVMLREICMENYKEQLLDIQTIPGIGEQGAMQIIAETGVDMKAFITAAMLVGWAGLKPRNDESNGKFKSRSTTHGNKYLRKILIECAWGASRTQGCFFNKFSYHQTMVRKKNRQKVQVAIARKILVVIWNILEKGVVYNDVLEKNKTKDK

SEQ ID NO: 474076 - protein, 317 aa, unidentified
MTTQSEKYIGIDVGKTWLDVAVWGAEEVWQVPNDDSGLEKIVDRLVEWIPALVAVEASGGYEQRVVQELILRGFAVAVVNPTRVRALAKATGKLAKTDAIDARLIAEYAFKIQPETMDAKEANEIRLKAMVSRREQLVQMCTAEQNRLATTHSSVKADVQEHIDWISSRIEALEEEIKKLLAFLPELKALADRLDTIPGVGFITAITVVAEMPELGQLDRQKIAALAGLAPFNRDSGKKRGKRRIFGGRKGVRRVLYMACLSAIVHNPNIRRMYNRLTENGKIFKVAITACMRKLLTIMNAMIRDQADWRLPTLIPA

SEQ ID NO: 474077 - protein, 365 aa, unidentified
MEKLLKQSIGIDCAKDDFVASFGKYYENSEVKITATQTIKNDSQGFKKLEAFVRKNAEKQTPLFMVMEATGVYHEKLASYLYDKGYQVSVVLPQRAKAFMKTLKTKTVTDKESSKGLTVMGLEKKLDLWKKPDEIFNTLKQLTREREQVQKSLAQIKNQMHAEKTGAWPNSRSIQRMQFLQKIYNNQIKEIEKDIHAIIKSNPDLEERINHLITIPGIGLLTAVTVVAETNGFNMISNKKQLVSYAGYDVVEKTSGTSVRGKTHISHKGNRHIRKAMHMPALTAIRHTDHNKMLFIRLVSKHGIKMKGVVAVQRKLLILIYALWKKQENYDKSKVQPQKIEQPIMTALNELDHVRSLESVDSMQR

SEQ ID NO: 474078 - protein, 329 aa, unidentified
MNCVGIDVSCKELVVVISVKGKARKAKTFKNTPSGHTLIIRLLSKLKGEVRVCLEATGVYHFDLAVALSRSDELEVMVINPKVAHNFAKALMKRSKTDAVDAEILAIYCEKMTFKAWKRPRDEYITLKAIARRIAALTKLKAQTKNQLHALISTEETPQIVIDQTKELIKLLEQQIKAHRDAGLKLIQQHGELEKAFQLIISIKGIAAASAIQLLAELLVLPQDMSARQWVAFAGLDPRHYESGTSVAKKPRISKAGNKYIRQALYMPALVASNHEPHIKGYYTHMIDDNGLKPMQALCAIMRKLLHAIHGMFKTNKSFDGERFYTFPV

SEQ ID NO: 474079 - protein, 359 aa, unidentified
MHSTTIAVDLAKSVFEVAVSQRPGKVAERHRLSRGQFSRFLAEQAPATVVMEACGTAHFWGREAGARGHRVVLLPPHAVRPYVLRNKTDGADAKGLLEALRNDDVRPVPVKSVDQHVLAGLHRLRSAWMATRTARLNTLRGLLRELGFSIPVGARQVLPHVGALVSDADSGLPGALRPVLAEAAREIRELEARVREVERALETMARGSEILVRLRTIPGVGLLTATALVAFVGDVQRFPSGRHFASYLGLTPRESSSGLRRRLGAISKRGDPYLRMLLIHGARSVLLHAKKKTAEHDRLRTWALDRERARGHNKAAVALANKLARIVWAVWRSERAYDDSIAKGTQSSTHHAAASSTRR

SEQ ID NO: 474080 - protein, 421 aa, unidentified
MNTDQKRAYAATFPVHVGVDTAKVFHKLVVRGPDGQRTKAYKVLVSRAGFEAAHAHLRDSYPGIAPQQMLVGLEFAGHHGFTFAHFLAQRGYVVVNVLAAHTKASKEIEDNNPRKDDAKDAAQVCKLVGDGIFVRFPFLEHPYLELRLLTVHRHRLTVEATRFKNRLQGLLDLAWPEFLGQFSTLHKATPRAILERWPLPADLLAAPIRTVRKEIHAASRGHVSREQIDALVASARTTIALTQAAPERRLEIQSLLVRWALVRRQLAVLERRITALVDQCPEARILTTVPEVSAVCAATIVAELGTPKDYAHYRQVLKLAGMNLASRSSGQTEGRKWQSKRGRPMLRRQLFLLAGRWCLTRGLYHQDYLALKARNGGAGTKAVCTLARKLVPLLLKVMQSGEAFDKDRWLANRRRREVLVS

SEQ ID NO: 474081 - protein, 357 aa, unidentified
MVVIGVDPHKRQHTAAVVEQPTQRQLGKLTIEATLADYRRLLAWARQWPERTWAVENARGLGRHLAQWLLVRGERVQDVPATATTRVRELSRGGRRKNDVIDAAAAASVAALHGDATSVIAEEDTTAVLALLDERRVNLAAQRTRLVNQLHALLRDLLPGGAPTKLTADQAAALLRPIRPAGTVERTRKDLAREMITELRGVDARLKHSEQRIREVVASSGSRLCEVDGVGPVLAARVLGRTGTASRFPSGSHYASYTGTAPIEVASAEHARHRLSRSGDHQLNSALHLVAVTQVRMSNAEGHAYFGRKIDEGKTRSEALRCLKRRIAAHLWGIMLADERRARAAAAPPPDAGMSCA

SEQ ID NO: 474082 - protein, 366 aa, unidentified
MSSVASAAGLIHLGMDTSKNTIMVATLLPGEENPVTDRITNEEAAIRRLVGRFADRSVLRCCYEAGPGGYELFRLLASMGVACDVVAPSLIPKGGSDKVKTDRRDSRRLARLHRAGELTAVRVPSPAEEAVRDLVRARGAVLEDRKRAQQRLTAVLMRHGRIWRGASYWTAAHRAWIAAQRYGEPALAAAIGYYRATLAVREAELAALEAELAPWAGREPLAGPVARLGCYRGIAELGGLTLAAEVVDWRRFPAARAFMSYTGLVPSEYSSGERTRRGHITKAGSEPVRTALTEAAWSCRHAPAIGAGLRRRQAGATPETLARSWTAQRRLHARYTHLLHGGKAAPEAAVAVARELAGFVWAEMTA

SEQ ID NO: 474083 - protein, 343 aa, unidentified
MTIKTLGIDIGKNVFHLIGVDARGSIVLRKRLSRRQLPVYMANLPACLIGMEACSGAHHLARSFKAQGHDVCLMAPQYVRPFVKSHKNDYRDAEAIAEAVQRPTMRFVTIKTVEQLDLQALHRVRDRLVTRRTALINQIRAFLQERGCVIAQGAAKLRQQMPWLLDPENDVGLSSSMNRLLWALWREWRQLDDDIDTLSDELAAIARREEACRRLCSIPGIGPITATALVAAVGDASGFSNGRGLAAWLGLVPRQHTTGGKPKLLGISKRGNRSIRRLLVQGAHAVLQFAERQPGRVGAWLRNLQARVHRNVAAVALANKLARIAWALLTRKENYRTSIVATI

SEQ ID NO: 474084 - protein, 420 aa, unidentified
MKSFVPVAGVDVSKRFSDLCVLSPDNNVLLRQKIYHDMVSMKLAEKKLHEIKLEYGARPVVVMESTSHYHLILFQFFTDAGFEVIVVNPIQSGALKNINVRKVKNDRVDAYRIAMLYRLKVLRPSQIPTSSLRGLRLLTRQRSELKGDVARFKNRMTAYLDQIFPGYGEVFSDVGGSASRAVLHMCPTPEELLNADGSLLAKAICEAGNKGPKFGAEKAAKLREAAGSAQVIGVRSASNASLIKNVLDIIEGLLAAIQRIEGEIKELVTQDTRLDEDVKLLCSIPGIGFSSAVVIVAEMGDISLFRKPKQLAAYFGLDPGERQSGTFKGRKNKLSKRGSPQVRAALHMAAVSSVSRNRDGTYRNPVLAEYYERKCAEKPCKVARVAVMRKLSNIIYAVLRDRRPFELRTPQEHMALLAAA

SEQ ID NO: 474085 - protein, 445 aa, unidentified
MQIVNPHAAGIDVGSRFHLVGVGQSSEDVRQFGVYNCDIAAIIAWLKVRGVTTVAMESTGTYWQSLYAALVAAGFEVFLFNGKFTKNIKGKKSDVQDCQWIQKLHSLGMLTSSFLPGASTEELRTYCRHRAGLINSAASATNKMQKYLRLLNLRLDVVVKDITGVTGLSIIRAVCLGETCPEKLSGYRHGNCKKSKEEIALALQSNGRKDYLFALQQELEMYDHLQKKISACDAEIDIKLKEIIDADNNKKQHSIEPKPHKKANKNAPKGIDMNLRSYQMFEGTDFLAIEGVSYSTLLTLMSEVGIEGIRKFNSAKQFTSWLRLAPNNKVSGGKVLSSKVPKGSSRLKIAMRNAANTIGNLKEPTPLRDFFQRINYRKGRVSAISATARKLAVIIWNMATKGTAYSNQDGYQYYEQKRKLGLVKRIKKQIEKYSLSPDDLGMAMS

SEQ ID NO: 474086 - protein, 345 aa, unidentified
MTNNIQFSSVCGIDIAKSVMQVYKVSSDGVVSNKAVKRADFLDEFRNIPPALIGIEACGGSQHWAHELQSLGHTVRLMPPKLVKPYVTGLKNDKNDARGIYTALVMDVREVPVKSAAIRDLALLQTMRTKRQREKVAKINHIRGILSEYGLIMGKSVNAFLAKAGSLIVELKERADVSPYIVSELDALFQEVKEAIAKIKELETNIESIAKTLKHYDLFQSAPGVGPITAATMLVLLCNPEVFKNGREFAAYIGLAPKSSGSGGKNFVTHIPKKYECKNEVRTLLVQCAHAICRSRHKSDWVSSILARKPKKLAIIAVANKLARQLWIMAKKGEKFERRFILAAV

SEQ ID NO: 474087 - protein, 469 aa, unidentified
MRRNQRRSPGKPRVSPTVLDRINRNVAGIDCGSAEHFVAVPPDRDPTPVQSFKTFTTDLLRLADWLTACRMTSVAMEATGVYWIPIYEILEARGFEVLLVNARHLKNVPGRKSDVSDCEWIRELHSVGLLRGSFRPTDAIVALRAYLRHRQTLIESAGAYIQRMQKALVQMNVQLPLVVSDITGVTGLRILRDIVAGHRDPHQLAEHRDHRCRASKAEIIAALTGHYRPEHLFVLQQNLALFDGCQAQLAACDVAIEAHLLTLTALVEPPATALPAPRVTKKPRDNEPRFEVRAPLHRLTGGVDLTQIDGFTPYTALKLLSEIGTDMRRWPTEKHFTSWLTLAPKNKISGGRLLSSRTQPSANRAAAVLRMSVMSLSRTQTALGAFYRRLAARIGKPQAITAAARKLAIVVYRVLSGTLDYRDTGADAYTTQQLTRVLRRVRQRAATLGFDLVNRETGEILQGGASLSN

SEQ ID NO: 474088 - protein, 343 aa, unidentified
MQAITTIGLDIAKSVFQVHGVDADGQVVIRRQLKRRYVLAFFQKLSPCLVGIEACASSHHWSRELKTLGHTVRLMPPAYVKPYVKRQKNDMADAEAICEAVTRANMRFVPTKTPEQQSCLMLHRTRHLLIRQQTAVINSIRAHLAEFGIVAPVGRRGVEELLHVVADPADKRVPDIARECLAALGAHLRRLKDQILEFDRMIMAWHRSNETSKRLDAIPGVGPMLATALVAGVADPKAFRSGRNFSAWIGLVPKQHSSGGKDRLGSISKQGDRYLRGLFVAGALAVIRYAKIHGTKHRPWLTALLARRPTKVAAIALANKIARMAWAMMTRGERYKQPVALAA

SEQ ID NO: 474089 - protein, 368 aa, unidentified
MSQPTMWVGLDVHQNSVIAAVLEGDSHDPELHTMTGDLNEVRRFFRSLSKRGPIRACYEASGAGFVLHRTLASDGFCCDVIAPSRIPRASGDRIKTDRRDAIHLALQFRNGSLRPIHVPTRDQEALRGLVRQRLSYQELITATKNRISAFLRSSGLRFTGTKSAWTQGHRLWLQATRKQLTGPAATTFDTDLNFLEYLESVVAALDAEIDRYARSESYRPLVEALMCLRGVKTLTAMTLVTEIGDPRRFASPTSLMSWAGVVPSESSSGDRRRQGSITKTGNRYIRRVLVEAAQNHRYRTAASLVVNRRRQGQDPAIVAIALKAQHRLFRKFHRLIYRKHHNVAVTAVARELCGFVWAIMNQGELQQS

SEQ ID NO: 474090 - protein, 326 aa, unidentified
MQGKEASEQETKVKSSVGIDVSKDWLDVHVLPSGEVLRLPNTSEGIRRLKRWLARFDLALVVVEATGKWHRPLRRSLDASAIPVAVVDPFRVRMFAKAQGILAKTDRLDARVLAQFAAVMAPPVRAAEPQMLEELRELVVARASAVAQQTALKNQRSVATVKFLQRQLDRRIERGDQDIAALDTAILERINVDDGLARRYAILTSIAGIGFVVAATLLASLPELGSSTVKQIAMLAGLAPIADQSGKREAVRVVWGGRANVRRILYLAALTATRFNVDMKAFYQRMIAAGKPPKLAIIAIARKLAVLANTLIRQNRTWLPVAPKHA

SEQ ID NO: 474091 - protein, 354 aa, unidentified
MENYTIGCDAHKRYSQFSVLDWKACIRERRRVEHTSGAIKKYLSKFPDGTPVAVECVGNWYWIVDEIEEAGCRPMLTNAGKAKLMMGNVNKTDKLDADGLALLLHNGTLPTVWIPGGELRDLRELPRTRMALTKQRTAMKNRIHATLAKYGIRVEGSSDIFVGKGLAALEKKLVHLPEETKRCVEQELELLDQLRDHIHYLEQRIRKRIDQTKNMQLLKSLPGVGDILAIVIASEFGSVDRFPDAEHFASYAGTTPKVKSSGGKTYYGHMRKESNQYLKWAFIEAGNAIVSSHNRPGWKNKHVVQLYERIRQRKGHGIAVGAVARHLAEASYWMLRKGETYHEPAHRKTLPKQG

SEQ ID NO: 474092 - protein, 339 aa, unidentified
MEIDILGIDLAKHVFQLHGAERSGRAVHRSKVGRGALIETVHKLRPRIIAMEACSSAHHWARRFIALGIEVRLISPQYVSPFVKTNKNDRNDAEAIVEAVSRPTMRFVSIKSVEQEDIQAVHRMRAILVRQRTAVINQIRGVLAERGLTIARSPQAFKRAIPSLLGNEGSELTAFCQALLTEMLQHLQALEARIHGLEVSIKEFVKDSELCRKITAVEGVGPLTATAIVGAIGDAKQFSNGRHLAAWLGLVPRQYSSGGKARLQGISKRGDTYLRTLLIHGARTVLQYAAAKTDKRSRWLQQLITRRGYNCAAVALANKNARILQVLLSSDAAYRPAAA

SEQ ID NO: 474093 - protein, 427 aa, unidentified
MGSEAVVISVGEGVEEEPVRTFGTTTAQLRKGGEWMLSCGIDTVAIEATGVYWVPAYEIWQEQGLKPVLVDSSSIHSLNGKKKSDFIDADWLQLLHTFGLLRPCQRAERSMIELRGYMRRRREVIEASSASIQHMHAALTLMNVRLDQAVSDITGLTGMRIIRAILKGTRDPMELAQMRDERCAKTEQQIAEALTGHYRDEQVFVLDQAVQAWDFHQQQLRQCDQQIEKVLETLPSKSDRKNLPKPRRSAGKPRKNEIRINDGRTLLYERLGVDLTLIDGLQVITILTVISECGIDLSRFPTYKHFCSWLGLCAGTRRSGKRVLSSRSRRTTNRAATALRLAAQSLHRSQTALGAFYRRMKARLGPEKATTATANKLAKLIYLTLTTGSVYLDPGPDYFEQTNQTKALKQLRRRATKLGYQLTPIAA

SEQ ID NO: 474094 - protein, 388 aa, unidentified
MSFTIDPGVRTETTIRPDHATVFVSLELSRSKWLITALLPCSDKMSKYCVDSGDGTALLDRLARLRARAEPRIGTAVHMVVIQEAGLDGFWIHRLLESNGMESHVVEPASIAVPRRHRRAKTDVIDGEMLVRTLMAFKRGERRVCSMVVAPSPVEEDRRRVSRERRTLIRERIEHANRIKGLLATQGIVGLEPMRKDFRDRVEGLQTGEGQPLRPHLKAEIIRELDRIDLVVRQVGVVEAERDALVKSDNIDTTAPAALLMKLRGIGPEFAAVLWLEGLFRNFANRRQLAAYAGLAPSPWKSGSIDREQGISKSGNPRLRTTMVELAWLWLRYQPGSALSAWFRERAGSERGRSRRIMIVALARKPLVALWRYTTLGELPKGAALKIA

SEQ ID NO: 474095 - protein, 401 aa, unidentified
MATMRDNVQRVKRFRELKATLRSNRSRLLVGLDVAQAEHVVHLRHAHTRVVVPTLTIPNTTQGFAALWARIQQAQRATGCREVVCGLEPTGTYHEALAQFLEAQGADVVLISSSVAYWNRRTQDGTWDKNDRKDAANCADLLEQGKVLFYSQPDGPLAELRRLVRCLRRARGELAACKARWRTTLRPALGPMGEPLPNRLWAELPPVLQAWEPAAPGRPAQAKGRLPLGLATACADLGAQIASVQARITTIEQACTPLAERLPAYGLLRTIPGVGPTVGAILLAEIGDIAWYTQFSQLRKLAGLDIVRGQTGTFAGQWRISKCGRGLLRWALYHAAVGVARTAAGRARLAALKAKRHGDRFAGFKAIVELAAKVLRIVWGVWRSGTPYDPRRAGGLRRQPR

SEQ ID NO: 474096 - protein, 324 aa, unidentified
MSSHEIVGIDVAARKLVVIGERLALAEYENTAAGRGKLVKGLCRNQRPVRVVLEATGIYFLDLACELAAAGIAVMVVNPKATHHFAEAILQRRKNDPVDAAMLREYGRRMDFISWQPPRHDLFGFRALTREVQALSKTVAAARNRLHAITATQLAPTTLIGALERQIAHNQALIDELVAAAVAQTESDPELARLLARTDSMPGFAAKAAVLVIGELSVLPPMTARQWVAQAGLDVREETSGTSLARRPRLSKRGNKRLREALFYPALTAARCCPAAAAFVERLVAHGKTRLQAIVALMRKLLHGLHAMWRNDEDFDAEKLFAPA

SEQ ID NO: 474097 - protein, 337 aa, unidentified
MKVTLIGIDLAKSIFQVCGVNQAGKRVFNRQIRRAKLMEFLMQHPGVTMAMEACSGSNYWGRELQKRGFKVMLIPPQHVKPFVKGNKNDRNDAFAITEAARRPDLRCVEPRTLAQTDMIQIHRVLDRMIRQRTALINQIRGFLNEYGVVVARGKEKLLAAMPDLLEDAENGLTQQSRALYLELHGQWRQSNEAIGRLEKRLKGQARADEAAQRLMKMRGVAEKIATATIAHAGNGHGYKNGRHFSANLGLVPKEHSSGGKQKLGGITKRGNQYLRRMLIQGAWSVIRNVDKNDDRMSRWARQLIERRGKHKAVVAVANKMARIMWSMLYHQTEYRST

SEQ ID NO: 474098 - protein, 379 aa, unidentified
MKRVRFVGLDVHAETIVVAVAEPGRSGEVRSVCVIPNRPEAVRRLVKKLGPAEHLQACYEAGPTGYALYWQLTELGVKCDVIAPTLVPVKAGDRVKTDRRDAEKLARSYRAGDLTPVWVPDAAHEALRDLVRAREAAKKDQLRARHRLSKFLLRHGRRPPEGVKAWTLRHLSWVKRDVRFEQQAQEATLLDYLGEVEHAAARIERLEGAIDEAVTNAPAGMRAVIEALQALRGVAKVSAVTIACEVGEFSRFEKAPQLMGYSGAVAREHSSGERIWRGGITKSGNAHLRRIVVEAAWAYRHRPEVGRVLRKRQDGISEDVKEIAWKAQHRLHGRYRKLTARGKSSQLAITAVARELLGFIWAIGVKVEQRTREHSGLAA

SEQ ID NO: 474099 - protein, 283 aa, unidentified
MLIIGCDYHPAFQQIAFVDTATGDCGERRLEHREEAETFYRDLAAQEMKVRVGMEASGHARWFERLLAELNFELWIGDATVIHAKRVRKQKTDRQDAQLILRLMLKDDFPQIWVPSWENRDLRQLLWHRHRMVQARTRIMNQLQAVAINEGLRSKKRLWRESGREQLEAFRLAPWASRRREDLLKLLDGLNPTIAELTQAIEQEVEKCPAAQRLRTHPGVGPLTALAFVLIIGKADRFQCGKQIASYLGLVPLEDSSGNRRRLGHITKKGTLCCVSCWWKRRK

SEQ ID NO: 474100 - protein, 348 aa, unidentified
MDQVIIGVDTHKSNHIAVAINTHGARLGEKTIPTTSRGYRDLEIWASGFGQVKAFGIEGTGSFGANLSRALMAKGHVVMDVMRPNRQIRYLQGKSDALDAEGAARSVLNGQTTALAKTQTGTSEMLRHLKVARDSAVKARSQAMITLKTLIINAPVELRDTLEKINGRITLIRHLAAWHQPTQINSPTASAKMVLRSIARRCLALHEEVDGHDRELERMAHEKAPGLMASHGISTMTVAEMLILVGDNPERIRSEAALAKLCGVCPVPASSGKTNRMRLNRGGNRQANAALYRVAIVRMRDHEMTRAYVAKRTTEGKTRREIVRCLERYIVREIYRHLCGSQTSPRPV

SEQ ID NO: 474101 - protein, 360 aa, unidentified
MQNKVNEKLFEGQSIYVGIDCHKKNWTVTILGEQYEHKTMSQNPDPDILAAYLKRNFPGADYHAVYEAGFNGFYPCRQLRQLGINCNVIHAADVPTMNKEKIQKMDPVDSRKLARSLRSKEFEAIHVPEPFLEADRALVRQRFRVMKDVTRTKSRIRSLLFQFNINVPDRFTTSQTRSWSRVYINWLKGLQVGHESLKLTLDNYIRIGELQRKELLSVNRQVRSLSQTDAYRGSYNLLISIPGIGFLTAMTFLVQIGDIKRFERLDDLCDYIGLVPMMKGSGPKMYTGKMINRGRKELKIMIIESAWDAVRMDPALMAKFNELTRRMNKNKAIIRIARKLVSRMRYVLMAQEPYKMGISE

SEQ ID NO: 474102 - protein, 414 aa, unidentified
MTETAYAAYVGIDWGTATHQVAVLDAQRAPLGERAVAHDGAALQAFTEWLTLLTGGEPARVAVGLEVPRGAVVDTLLERGFHVFALNPKQLDRFRDRYTVAGAKDDRRDAFVLATALATDRPAFRRLEFEAPLIVELREWSRVEDELREEWGRLANRLREQLHRFSPQLLALCPAADESWFWALIALAPTPPAAQRLRRAAVVTLLREHRIRRLSADQVLAVLRSTPLRVAPGTVEAASAHVALLIPRLELIDRQRRDCARRIEHLLDALATTGEHQGHRDVTILRSLPGVGRVVAATMLAEASRLLAARDYHGLRTQAGVAPVTRQSGKRLLVGMRYACNPRLRNALYYWGFISVRYDAPSRQHYRRLRGHGHSHGRALRGVADRLLTVLMAMLAQQTMYDPARRRAALEQTP

SEQ ID NO: 474103 - protein, 413 aa, unidentified
MIPIEKMYVGIDVSKRSLMAHAMDQDGKDIFHSFNIKNNKPGCNKLIDFIYKHANQSDFESIKIAMEATNVYWEHSYRLINNSEKLNSNFKLSTHILNPKVVRNFKDAYNSLPKTDSIDAWVIADKIRFNRVPEPAIPEEVYRPLRELTRFRYKLIKNIRSEKNRALSLVFLKFSNLEEETPFDVFSEASMTILETFTLEEIADKDLEELAAFLHENSNNRLGGSTPLNEIITDLKKAARNSYRLKPKMNQAITQTLSMTFDNIRFLQSQLNRSKKVLARELKAIPQTLDTVNGIGVVLTSGIIAEIGDIDRFHNQAALASYAGLTWTKHQSGSFVAEETSMTKTGNKYLRYYLVEAANSLRVHNDEYRSYYYKKYHESQKHKHKRALVLTARKFVRLVFALLSKGEIYQPRR

SEQ ID NO: 474104 - protein, 375 aa, unidentified
MATIARLGIDTSKSLFQLHGVDERGAAVLRKQVRRSQFLAFITKLEPTEIGLEACGASHYWGRQLQALGHEVRLLPPQHVKPYAGHNKNDKIDAAAICEAMSRPPLRQRFVAIKSAEQSAAQMLMGTRDGLLQRRTQLSNIIRGNAAEFGLVTPKGLAHVKPLLERIASDETVPALAKELFATLGEEFVELAPRIAQLEKKLKAFQRGNEVCRRLVEIPIIGPVIASSMVIKIPNPAAFRSGRKCAAWVGLTPKDHSTAGKMRHGGITRAGDERLRAALVSGATAYIQQVKRGRTKPSPWLAGLLKRKPEKLVAVALANKTMRIAWKLMVSGERYDRARAEAHEALGAAQHGSSAPSASLQPQIAANGTPAVTAA

SEQ ID NO: 474105 - protein, 461 aa, unidentified
MQKLTKKTALPDVVQMSMVNPYAAGVDIGDTIHAVAIPEGLDDKRVQTFGTMTCDLEAIADWLVKTGITTVAMESTGVYWKPLFSLLNKKGFEVYLVNARQVKNVTGRKTDEDDAMWLQKLHSCGLLKSAFLPDAEQEALRSLVRYRHSLVEDCSRFKNRMQKSLELMNIKFHTLFADLFGKTSQLFIEAILAGERNPAAFLPLVANNVKAENAAILKSLEGNWRTEHLFTLRHSYEMTKAYQQHIAATDIAIETQLQQYEASVNEGELSVAAIADKPLDETKSDRKKKKKQQGAPLFNIRNYLEKIYGTDVLAIYGLNEMSGLEILSETGTDLTKWETAKHFVSWLNLCPNNKISGGKLISSKLLKKKPNTASQAFRTAANAVQRSNHWLGDYFRRMKSKGGNKFACVATANKIATIFYNMVTQKKIFTPQDLKAYQEKQRTAKIAFYERKLIELKSAAA

SEQ ID NO: 474106 - protein, 382 aa, unidentified
MQPIDTVNPTILLAIELSASTWLVAARVPGLEKPHLHRIDGGDTAALLALISSLRARVARRLDATIGIVCCFEAGRDGFWLHRLLTAHGVACHILEPTSILVNRRARRAKTDRLDAEGMLRVLAAYLRGDHQACSMIRVPTPEEEDAKRTHREREKLVQERLRIENRIEALLFTQGIRKRPSLRSWERDLAVLRTGDGREIPRHLRAELDRLRRRLVMTLELIREVEAERDQAAKAKPQDQACHKIAALSRIRGIGENFAAVLTREVFYRSFDNRRQIASYVGITPMRYQSGGMDRDRRISRAGNPRARTTMIQLAWLWLRYQPGSELAEWFRERVGTLAGRTRRIAIVAMARKLLIALWRYAETGVIPAGAEIRAETTVAA

SEQ ID NO: 474107 - protein, 364 aa, unidentified
MTIVAHAHPFVIGVDTHAKTHALSILATPSGEIIEEATFPTTRSGLARAVAWAGRRTGGDLAVLWVIECAATYGAQLARAVADTGYTAVEAARMNAKANRGIGKSDQLDARRIAAAVLPLEVDRMRQLRSDDAVRAGLRVLVTARELMTGERTANVNALLALLRMVDLGIDARKPLTRTQIGEVSHWRVRHEEVGIATARNEAVRLARRITALDSELAENIAATTALLAQSPAKVLLEKIGIGPVTAAVAMAAWSHDGRVRDEAAFASLAGVSPIPASSGNTVRHRLNRGGDRRLNRALHMAVVTRMAYDPTTRAYAERRTAEGLSKKEIRRVLKRYLARQIYRTLTAESRAAIAVPESAPSPA

SEQ ID NO: 474108 - protein, 324 aa, unidentified
MRFYTTQHPFYCGIDLHARTMYVCVLSQSGDVLVHRKMQTDPETFLKAIAPYRQGLVVAVACLFTWYWLADLWADEGLPLVLGHALSMQAIHGGKATNDKSDSHKIAARRRGGMLPQASVYPAQMRATRDLLRRRMPLAHTRAELLAHVHKTTSPYHLPAIGKKIAYKANREGVAARCADPAVHKSLEVALALITSYDELLRDGELPIVTTAQYHDAHTRYLLQTVPGIGTMLSLGLLYDIHQIDRFPRGQDVVSSCRLVKWARESAGKRYGTSGTTIGNAHLKGAFSEAAVLCLRDHPAAQQYLTRLEKKHEKGTALTILAQK

SEQ ID NO: 474109 - protein, 410 aa, unidentified
MLVIMNEAGPVSHNVGYAGRGSTSTEPHTKGAGIMQYNTKFVGLDVSKDDIAVAIADARGGEARYYGKIEHTPEAVRKLMKKLGQPQQLVTCYEAGPTGYELYRLLKEMGIRCMVVAPTLIPVRVGDRVKTDRRDAVRLAQLLRAGELQPVWVPDESHEALRDLTRAREDAKEDQHRARQRLLKFLLRHGLRSPAGVRPWSRRYREWLDRLSFDHAAQQMAFQEYLRAIDEIDGRLHRLEAEIHIQATEGEHAAVIQALQTMRGVAEVTATTLVAEIGYFSRFEHPKQLMAYAGLVPSEYSSGGTRRQGRITKTGNAHVRRVVVEAAWSYRYPPAVKGELRKRQEGQQPEVCQIAWKAQDRLYRKRRRLIAKGKNPALAATAIARELLGFVWAIACHVERNREHASPTAA

SEQ ID NO: 474110 - protein, 346 aa, unidentified
MNQIIRIGIDTSKHIFQLHGVDAAEQPVLRKRLRRQQVVAFFAKLPPTVIGMEACGAAHYWARELRKLGHEVKLIAPQHVKPYVKRNKNDGRDAEGTCEAMGRPTMRFVPVKTAEQQAALMLVGIRERLIARRTQLSNAIRGYAAEFGLVAAKGLDKIEPLLAWVTQDENVPTLARELFAMQGREYTQLQVELKAIEARLKAWHRANACSQRLAQIPGLGPIGATALVMKTPDPRAFPSGRHFAAWLGLTPKDHSTAGKTRLGKITRAGDEFLRSMLVAGATAVIQQVRRGRGHPSRWLLALLKRKPPKLAAVALANKIARIAWKLMTTGESYDGARMPRVSAVAA

SEQ ID NO: 474111 - protein, 499 aa, unidentified
MGKGSGQNPTEPESFEEGTRMIYSVGIDLHQGRHRARCLDERAQSCDGLSFQTTPEGLALLEERIFRDGANPIIVLEPAGLPWKMVAVYLRSRHPDCRLVKAKTQKVAALRRYLRGPVKSDRLDALTLAKMPFIDPEKLVEIYLPPAEIHALQRLTRQRKRIESDISGRKIRISAIVDGYLPGVRRAFDDAWSLPVRAFLRSRLNPYAVVREGEEALHDYLSKACPRSKWSRAESHLVFLACHSVAEVCELSWSAGTLDEEFFLDLQDEIARELRLMESEEAESESLACRIAELYRKLHPSDNLTSIPGVGEHTAPIFLSAVGDPARFHSQSAFANWEGVVPGARQSSDVEVKGLRMTKAGPSIMRMGLYQAGDIGRRWDPQLAAVYYREMVYHGKNHRQAMGAVMSHLGARVFAVLKEDRPYELRDTEGKPIGKDVARRLILSKYQVPEDIRKERRRRNPKAINVLESPRKEGETPTYRVHEAARAPQPVKVKTVSQR

SEQ ID NO: 474112 - protein, 429 aa, unidentified
MNCTQNKKIEQVKETTMIVGIDVGSEKHYFRAFNWRGIELTRKPVAFSNSMEGFNSFYNTIVELMQKSELEEALVGIEPTGHYWFDLGQFMGEKDIKFVMVNPHHVHKTKELDDNSPSKNDRKDPRVIAGLVRDGRYFYSYMPTGAYAELRNASNRRFVLVEEQTRAKNRLQKWIAVYFPEYKGIYTHIDAKGGMLVLKKAPTPEEIVRLGVEGIIKIWKDAKLRGNGHKKAMLILAAAMRSIGLKAGLTEARMEIQDLIEDYELQTKRLERVNDLIKGLCQQVRYADKLLEIKGIGITTVAGFIAEVGDITRFDSTKELQKLAGLELVADSSGKHNGKTKISKRGRKRLRYLLFEAAISVGGKNEEFKEIHRYYTTREKNPLKKMQSLIVVACKLIRVFHAILTKGIRYDASKMLKDIRHPGEQLKAA

SEQ ID NO: 474113 - protein, 357 aa, unidentified
MPSSDVKYIGLDVHKEAITIAVLNGASKLVMESIVETKASTLLDFLHGLRGELHVTLEEGTWAAWLYDVLKPHVREVVVCNPRRNALLKEGSKNDKVDARKLAELLRTGMLRTVYHGENGLRTLRELARSYEAVSKDLGRVMNRVKALYRGWGIPCMGMQVYSRRHREPWLNKILEPGVRRRAELFYQQLDGLQTLRRTVRGELLAESRKHAGVKLLRQVPFIGPMRAAQLVALMQTPHRFRSKRQLWTYSGLAVETHDSGQYRYVDGQLQRSKKPQQVRGLNHNHNHAMKEIFKGAALSAALRAGPFQDFYEGLLARGMKPELARVTLARKIAAITLTLWKKGECFDAGYVKPHAA

SEQ ID NO: 474114 - protein, 317 aa, unidentified
MDIKTMKECFIGIDVAKNSVAVHVRPDNLAFNCDTDPRSLTVLAARLKSLQPALVVLEATGGYESIVAAALAEAGLPVAIVNPRQTRKFAGAIGRLAKTDTIDAAVIAHFAEAVRPESRPLADAETQRLGALLARRAQLVVMVSSEQQRPDRAADVQTRRSCATMLRGLKAETMRIEKLIDQQITASPVFQAKQDLLKSIPGIGDVVARVFIAELPELGTVDRHKIAALVGLAPINRDSGRSRGQRHIQGGRPQVRAPLYAACMSAIQHNPALKVFYQRLLAAGKVKQLAMIAAMRKLLTIANAVLRDNRPWDVARI

SEQ ID NO: 474115 - protein, 408 aa, unidentified
MNAVGIDVSKGKSMVAALRPMGEVALLPQEFLHTEVGLEQMAYAIIALGEDTRGVMEATGRYHEPVAAALHEYGIYVCVLNPLYIKQRGGGSIRKVKTDKADAMKIAKYGLDNWVDLREYTPMDTVRQQLKLCSRQYNLYMKTVVSLQNNLISLTDKTFPGVNELFSSPERADGHQKWVDFVMTFYHCDCICRVSENAFAERYQKWCKRKGYHFSAEKAQDVYLGSCGHFTTLPKNDNTKLLITTAAQQLLAGKMTLAALRTEMTRLAKQLPEYDIVRAMYGVGETTAVQLMAEIGDVRRFPRRSSIVGFAGVDPAVDQSGKHSAKSVPTTKRGSPHLRKTLYQIVCTYLRKAPEDEPVYQFLDKKRAEGKPYFVYMTAAQNKFLRIYYARVKECLEAFDAQQDTSQR

SEQ ID NO: 474116 - protein, 382 aa, unidentified
MQTIDPVNPTILLAIELSTSTWLVAARVPGLDKPRLSRIDGGDTAALLALISSLQARAACGLGATMGIVCCFEAGRDGFWLHRLLTAHGVVSYVLEPTSILVNRRARRAKTDRLDAEGMLRVLAAYLRGDHQACSMVRVPTPDQEDAKRTHREREHLVQERLRIENRIEALLFTQGIRKRPSLRSWERDLTVLRTGDGRKIPHHLRAELDRLRRRLVLTLELIREVEAERDQVTKTNSQDQAHHKITALCRIRGIGENFAAVLTREVFYRSFDNRRQIASYVGITPMPYQSGGMDRDRRISRAGNPRARTTMIQLAWLWLRYQPDSELAEWFRERVGTLAGRTRRIAIVAMARKLLIALWRYVETGVIPTGAEIRAETTVAA

SEQ ID NO: 474117 - protein, 322 aa, unidentified
MSQPNPLCVGIDVSKATLDIAASSDIAQFTVSNDSDGFDAVITGLRRHSVALVLMEATGGLEVAVACSLQAEGFEVAVVNPRQARDFARAMGYLAKTDRIDARVLAQMAEVINHHPERKRFIRALPDAERQALAAMVVRRRQLIAMLVAERNRLHPFHPQNKKSINTIIKALEDELVRLEKEMDSHIRNHFKEIAERLSSIKGVGTMTVSAMLAEIPELGTLSRREISALIGVAPVNRDSGTMRGRRTIFGGRAGVRSALYMAALVATRFNPVIKTFYVRLLAAGKAKKVALVACMRKLLTILNAMLRKNEEWDESYHHVAP

SEQ ID NO: 474118 - protein, 411 aa, unidentified
MKFNTQNAKIEAITEKTLVLGIDVGSEMHYARAFDHRGIEYTKKPFKFSNTEAGFMALQAWILDLKEKHEKDKVVPGMEPTGHYWFNLGKFLQDNEMKPVLVNPHHVKKSKELDDNNPTKNDRKDPKVIAGLVREGRYMIPYLPDGVYADLRAASNIRFQLQAELTRIQNRISRWFHIYFPEYKTVYGKPDAKSGILILKTAPLPEDILTLGVDGVNQIWRDAKLRAVGKARAKTLVEAAEHSVGNKEGAVSARMEIRMLLEDYESRNIRLQEVMALIEELVDQIPMAEKLLEIKGVGIRTVSGFLAEVGDISRFNNPKELQKLAGLALVENSSGKHKGETTISRRGRKRLRYLLFEVAMSLVAKNQEFRELHVYYTTRKLNPLKKMQSLMAVATKLLRVFYAMLTKENGK

SEQ ID NO: 474119 - protein, 456 aa, unidentified
MQSYMKKEKENLKKKYSKNLSVINEHAAGIDIGDKEHYVAVESEESYDVRCFGSFTEDLRAIVAWLIVRGITTVAMESTGVYWLSLYIMLEEAGIEVYLVNAKHVKNVHGRKKDDTDSIWIQKLHRCGLLQKSYQPENEQRILRTYIRQRKNLIKIASDSVRRMQKALELMNIKIHLVISDILGKTGMQMLKSILGGERNPKELIKLKDRRIKAKEEDIIKSLEGIWKEEYLFMLQQGYDEYLFYQNQILDCELNIQKQLLEQVAIINDGDISDLEKALSKIKKKRKPKRNEFNFPVKPYLDALTGIDLTKIVGIKEASAIEFISEVGTDMSKWQSGKHFAAWLNIAPNTKITGGKIISSKMMKKKNYAGQILKMAVSSLHSNKSPLGDYYRRMRGKFGGKGAVLATAHKVARIIYSMLKDKKEFDIKMMKESQEKFKKQRIKQLEKQLTKLKNAA

SEQ ID NO: 474120 - protein, 405 aa, unidentified
MYKRQVLSVDVAKNKSMIMLMNSDGEILIDTKEIKHNLEDFEKAKEEIKEISPENITVFMESTGTYHLPVERYFKENGFNTLVINSLTTKNNYDTIRKTKTDKKDCYRLAKLFFVNEVEYHELSKKDLYANLKAMTRQYFYLLQQNVSCKNRYKRLLNICFPELEKIFKSTRIYDDTALNFIKEFPHAEIVKEKRIDALYNNLYKTNGRNLNFYKRLSETIKIASANSYPGVDKEHKDVKNLSDMAKIVQNNNNVINELRDKMIETAKKSPYYEIINSFYGIGEILTAEILGELGDITRFDSPKQLIAFCGLDPTIKQSGKSINVKGAISKRGNKYARYILFNCSQMVVKLGASNYPEHPVYIYYQNKKAEGKHYYESLTACSTKILRMLYSCLLYTSPSPRDTR

SEQ ID NO: 474121 - protein, 342 aa, unidentified
MFYAALDVSLRSVAICIIDQDGKVRLERSVPSEVPDLVRCLREFGEPVHQVGLEAGTLTQHLTYGLTEAGFDVVCMEARQVNAALLAMRNKTDKHDARGIAQILRSGWYSRVHVKSIESHHLRALISCRKVMQRKCIDLENEIRGLLKIFGVKLPLRLSRGGFDIAVRDTIQSDPALSHALLPMLQARRVLFDTFTELDRRVRKAAHADPVCQRFMGVPGVGEITALSSKAAVDDPARFKSSRTVGAHFGLTPRRFQSGEKDNPGRISHAGDADVRATLYAAANAMLMRSIRCTSLKAWGVKLMKTKGRRRAIVAVARKIAVILHRMWVDGADFRLGSEAAA

SEQ ID NO: 474122 - protein, 345 aa, unidentified
MPVVTIGLDLAKTVFQAHGVDAAGQTVLRRRLGRGELLAFFAKLPPCLIAMEACSSAHHWARELVILGHDVRLIPPQYVKPYVKRNKTDAADAEAICEAAGRPNMRFVPIKTRDQQAVLVLHRSRSLLVRQRTASINAVRGLVGEFGLIASKGRYRMSELRQRMNAMTSDQLPSIACQAINTLFDHIDVLEEQIAAVERQIVEWHKSNEDSLRLATAPGIGPITASAIVAAVGNGRQFQSARHFAAWLGLTPRMHASGKKERIGRISKGGDRYLRALLIHGARAIVGTLFRKNVTPRPWLLALAARRPTNVTAVAVAHKTARALWAMLTREEKYRKPIAAASSAA

SEQ ID NO: 474123 - protein, 327 aa, unidentified
MSLFVGLDLHKVYSEFAVMDIFGNVLRQGRIENTLDKMREFSESVPEHSSMVMESSSTWYWAHRLLSERHNVTLSNPVKNKAIASAKVKTDKIDSITLANLLRGGWAAECYVPSKETIEFRELVRFRANLVRQRTRMKNRIHAYLLMNNISVDAGPFTKGFVEKVRGIGDVRVQSYLRLIDGLNREIREASLTIRQKAGSNEDANLLMTIPGISYYSALLIVSEIAEIERFDDSASLVGYSGLAPSTHSSGGKTYHGPITKTGSSYLRWIMGQCTRVHMRAEPEGTVANFYARLARKKGDQKAIVAASAKLLKIVFWVLKERRAYHS

SEQ ID NO: 474124 - protein, 427 aa, unidentified
MYRIAGIDVHKKKLAVVVTDVEVHGEYQFERCWFAANPEQLRLLSQWLAEHQVEEVVMESTALYWKPVWGALERYWQPICQKREGAGPTSGILHLAQAQSNRGPRGRKKDFRDAERLVKRLVADELKLSFVPDTEQRLWRTLTRRRYQLTRARVQLQNQLEALLEEAHLKLSSIVSDLLGVSARRMLQAIAHGETNPEALAGLGDRRLRATPAQLCDALGACTELHPVYRRLIKMMLEELKVIEEHTAELNQELATLLRPHQDAVERLAEVPGLGVDSAQQILAEVGAKAATFASDKNLCSWVGVCPGDEESAGESSSHRSPQGNRQMRRLLNQAANAAVKSKGSIFEIAYRRLVPRLGHNQTIGAVAHRLCRLIWLILHKGVRYEERGPAVSQRSRQNRTGKMIRELRMLGYRVEFLNAVPSVPIP

SEQ ID NO: 474125 - protein, 341 aa, unidentified
MQITTIGLDLAKNVFQVHAIDASEKVVARKQLKRSQMMAYFKALPPCLVGMEACATAHYWARELVKLGHEVRLMPAKDVKAYVKRNKNDAADAEAICEAVRRPTMRFVRVKSPEQQGRLMQHRARDLLMRQRTQLINAMRAHLAELGIVSAQGREGLSELLSVISNEQEIQMPIDARATLMVLAAQLHALQTLIGTLDKRIMAQHRTSDESKRLETIPGIGPIGATTIVAVVPDPMVFKSGRDFAAWIGLVPRQDSTGGKQKLGPISKQGDRYLRRILVVGAHAVLRRARQNPAKYPWLTQLLARRPFKVVAVALANKMARIAWALLAKGGTYRSPELAAA

SEQ ID NO: 474126 - protein, 350 aa, unidentified
MLIIGCDLHTRYQQIAMLDKETGEVVEHRLEHESGETRAFYASLPCGAVVGIEATTPAHWFERMLTEFHHELWVGDAAQIRAMSVRRQKHDPRDAWHLMDLMASGRFPRIWTPSPRERDLRQLLAHRDKLVRIRTAVKNQLHALALSHGLCRGHRLWSARGQAELQSLTLLPWAGRRRQDLRELLTPLDTTIAELDKAVAREAEAREEVKLLMTHPGVGPVVGLAFVLTLGAIERFPRSKQVVSYLGLNPREHSSGGRQRLGRISKQGNVMMRWLLVEAAQTAARFDPELHRRYHRLKFRRGSSLAKVAIARQLAVRLYWMLRNQKGYAQLVRMQGSPGSGVVDPGPSTN

SEQ ID NO: 474127 - protein, 341 aa, unidentified
MQVTTVGLDLAKNVFQVHGVNAKGKVVVRRRLRRAKVREFFAGLEPCLIGLEACGTAHFWARELRALGHEVRIMPPSYVKAYVRRGKNDAVDAEAICEAVTRPTMRFVPIKTEDQQSALMLHKARELLIRQRTMLVNALRAHMAELGMIAPQGKEKIDDLIAVIEDGEDESIPALAKAALKPLVAQLRAAEEAIAAADAEIMAWHKGNEASRRLETIPGVGFRTASAIAANVPDPSFFRSGREFAAWLGLVPRQNSSGGKERLGRISKQGNRYIRSLLVLGATSTLRSARAGRAPGADWVNGLLERRPPRLVTVAMANKTARIAWALLAKGETYRAPGAAA

SEQ ID NO: 474128 - protein, 250 aa, unidentified
MNNINNQNEINVGVDTGKTQLDIYIRPLGIYFVVSNDESGIKEAITTIKKHKVTRVVIEATGRLEQPFIMACAKANIPFVIANPVNIKRFAGAINQKAKTDKLDAQLIAHYAEVIKPKLSQLKPEQIRLMSDLLSRRRQLMGMQTMEKNRLQIMPKEITSSIKPVLTVLKNQLEKIDNKLHKLIESCDEYKIKNDIIQSVPGVGKVVAFNLISEMPELGYINNKEASSLVGVAPFNRESGSYKRQANDTW

SEQ ID NO: 474129 - protein, 415 aa, unidentified
MNRLIERCAMLDIHKSQITACVRVPDGDGGRRQEIREFVTTTSGLLTLADWLRSYAVTVVGMESTGVYWRPVYYLLEDEFECQLFNARHLRHVPGRKSDVQDAEWGCQLVEHGLVRPSFVPPRPLRELRDLVRYRKAKIQERTREVQRVEKTLQDAGIKLSSVASEVLGVSARRMLDALISGTNDPDVLAELAKGVLRKKIPALREALQGRFTGHHALLVGQMLAQIDFLDETIATLSARVEELTAPFSRELELLDTIPGIDRRAAELILAEIGPDMSIFPTDAHLASWAGMCPGQRESAGKQHSGKTRKGSKWLRGTLTESAKAVVRTKGTYLSARYHRIKSRRGHAKATIATAHKILTAAYHVLQQGVPYQELGEEFFYRRDTENTERHRRRLIKQLERLGHKVTLEPLPEAA

SEQ ID NO: 474130 - protein, 437 aa, unidentified
MTQTTAFRLLLLISLLTHRRFYLRDYTAEFSVEDSSAKYYFRRYISMSMYFVGIDISKYKHDCCIISAADQQIVSKFTVKNDKDGFEHLLTTLNSLSNPEDIKIGFESTAHYALNLELFLENAHHSFMEVNPVLIKEYKKSTTLRRTKTDSVDCESIARWLMTVEYKPHSKGFYHAYSLKSLTRLRDRLIRQRSFYLVKITNVLDHTFPEFKPFFNERLSKTALYLLENYGSAEKMARMNSVSYEKLRSISRGKFSPQQFIALKELASNTVGVNNSIFDVELNSLLTLYKTLVTEINTLEKEINLLIEEVHPHYLSVPGIGPISAAIIYSEYGDISNFDNPGQMLAFAGIEPGINESGTESHGGRMVKRGSSQLRYALINCCLPLIRFDMTFATYYAKKRAEGKPHRVAITHVAKKLIRVIYALERQDTDFCVQKLR

SEQ ID NO: 474131 - protein, 346 aa, unidentified
MLYAGLDLSRKRLDFHLLDGEGATVEVGAAPPDADGLRGLSDRLDRHGAPIRAAIESMNGARFVHDRLELAGWQVEIADAQKVKGLAPLACKTDRIDAWVLAELARRDLVPAIWLPDPRVRAERERARWRLHLVRHRSSLKQRVHAVLLTHGKPCPVSDLFGVRGRQLLANLGLPEPWQGTIDASLRLIDELDREIGECEWELRRLGADHHYVPLLLTVPGISWVLAYTIAAEIGDIERFASPRKLAGYSGLCPRVYQSGERDLRGPLSKQGPRHLRWALVEAATHACTHPAYRDRYQQTKARIGKQRGAKVAQIDLARRLSEAIWHMLSRGEAFAPKGATDPLAA

SEQ ID NO: 474132 - protein, 331 aa, unidentified
MQAGEMIIGVDISKATFDVVLRTQTSEKHQVFSNDPKGYAAMVAWVEKQPEKVVHICSEATGSYWEGLAEYLYGRGYTVSVINPYQIKKYAEHLLNRNKTDKADARLIAEFCDKEQEHLRVWKPYSEDIKALRSMERRLDELQGMRQQEQNRLKSGVTDLVVIESLQDNLKHLEESIKQLKKKINDHIDQHPDLKEKEKLLISISGIGKITATKLLAEIGDIGAFESASQLAAYAGLSPKQFRSGSSVHKQTRISKQGRSQLRTCLYMPAVTAIAHNPVVKDLKKRMLASGHIMMEIVVAAMKKLLHLVYGVLKNNRPFDPYYTLNSKVTP

SEQ ID NO: 474133 - protein, 376 aa, unidentified
MSISKKFIGLDVSKSKIAVAIAEEGREEARYWGTISHTKEQVVKLMHRLRNTEEVALEVCYEAGPTGYVLYRWLLEMDIPCTIVAPSLIPKRAGDRVKTDKRDALRLAQLFRAGELTSIYVPTPEDEALRDLIRAREDAKEDLNRHKQRLGKFLLRHQLTDPKGSKPWSHAYEVWLDTLKFPHDCQRLAFEEYRQAIWETQERIKRYDQEIERQAETHPTQAPLIQALQALRGVQVLTATTIASEMIHAPRFPSPTHFMSYCGLVPSERSTGDSRRQGSITKAGNAHLRRVLVESSWSYRYSPAIKKKMRERISGLPPQIQAIAWEAQHRLHKKYKSMMRMGKPKGTIMVAIARELAGFVWAIATEMENMQRKAAA

SEQ ID NO: 474134 - protein, 430 aa, unidentified
MNFLPNYISVGIDVAADFSWFCILTPDGKEFKKPFKVEHDNADSLKNAVLTIKKAEEQFSMKSKIFLESTGIYHFPLFCHLKKLGFEVFVINPLITNSNKNIGIRKVKNDRLDAKRIAAIGYSPDTKVSVMPAELILNLRCLCREYYSLADNRTSYVNKLKAQLHIVFPGFCKVFSDITGITAISVLKRFPTPEDVINAQPDEIIELISISSRKGLNYAKAKYDKLFKAAKNALNFRYNLSSVYDVLKMYIYFIEEFDKKINLILSEIKAFVDKNKSEKFVQQIYYLDSIPGVGFLSAVTLVCEIGDFSAFSKPKQLFAYFGVDPSVNESGNFKGTDNKMSKRGSKIARRVLYAIALASVRVKRNGIAINPVLYDYYQKKKESKPKKVALGAIMHKISDIVFAVLRDNKSFVLKTPDEHKLQYQNIHKAA

SEQ ID NO: 474135 - protein, 370 aa, unidentified
MAQSTALFVGLDVHKDSIAVAHAQGQSADPPVYVGTIGTRSADLSKLIRRLQAKTPTLVFTYEAGPCGYGLYRDLTDQGFDCRVVAPSLIPKKPGDKVKTDRRDAVELARLLRSGDLTRVSVPTVEDEAIRDLCRARDAARLTLKNAKLRLKAFLLRLGLHYVGRADWNDAHRRYLAKVVCPTPTQQVVFQESVRAVDEQVDRLQRLEAELLERAPAWRLYPVVQAVQALRGVQWLVAITVVAELGDLTRFENPRQLAAYVGLIPSEYSSGHARRQGGITKAGNGRARRALIEAAWAYRYPAKVSEHIQRRIDHLPKAMQDIGWKAQVRLCKRFRRLTARGKHPNVAVTAIARELIAFMWAIAKEVPVHA

SEQ ID NO: 474136 - protein, 340 aa, unidentified
MQVSIVGIDLGKNSCSLVGLDAVGKVILRRRIRRDGVATFLAKLPKCVVAMEACCGAHHLGRTLVEAGHEVRLMSPEYVRPYVKAQKNDDRDAEAIAEAATRPTMRFVALKSEAQLDMQSLHRVRDRLVGERTALMNQIRGLLLERGLVVPQGKAKLAVALADLLDGDADTLAPRMRTLMRDLREQWRALDERISAFDAEFAETAKADDGARRLLSVPGIGVLNATALVAAVGDAAAFARGRDLAAWLGLVPRQITTGGRPKLVGITKRGSKYLRKMLIQGARAAMPTLRTGDTKIGAWLRGLLARAHSNTVVVALAGKMARIAWALLRRGQIYSAAPAA

SEQ ID NO: 474137 - protein, 332 aa, unidentified
MYYIGIDLHKQDLVMAVEDACGPIGRPRRLACCDVAAIRAAVERWGPFRAAVEASASYRWLYDLVSPLGKVVLAHPLRLRAIATARAKTDRLDAALLARLLRANLIPASYVPPARYQTLRDLTRCRARLSSSATLAKNQVHALLARANVHPPFKKPFGKRGRQWLARLDLGLSGNLSRDELLRRLEHYGREAAILDGHLERLASEFPEAAALDVLHGVGRYSALLIVAEIGEPTRFKTARQVGAYAGLTARVHQSGQTEHRGGISKQGSRWLRWILVQAAMKLVRQDDRLANFYTRIRKRAGRNVARVAVARKLAGICWVRLRAWQRAHVAA

SEQ ID NO: 474138 - protein, 365 aa, unidentified
MVNHIFVGIDLGDKNSVARIALNREKTERIGFVNNRRGRVRLFEELRRRAEKVDEAQIVLAYEASSCGFILRDEAEAQGMKCWVLAPTKMEKSVEQRKHKNDDRDADDVVEKLRGHILAGNRLPTVWIPDTHMRDDRELVRSRMDVVEKQTQLKTQIQMLIKRHGLEKPSGSGVGWTIRYRQWLDALSESDRLGNGTRTALRSLLRQLSFLEGEIERMEEPIRQLAQQPRHKPIIEELTQEHGVGLITAMVYRTEIGYAGRFRRGRRVGKFVGLTPTSHESGQQQDRKGHISRQGPPRLRKILCQASWVHGQRDPQAKRFYQQLVSRNPKKKKIAIVAVMRRLAVRLWHRMRAAELGMMAVTEMN

SEQ ID NO: 474139 - protein, 415 aa, unidentified
MPPDSAGFSATLTAIPPDPRDFFILLEPTGSYGLTVLLYLLGKGYRVLQVENRAVKDYREKIFGSETKTDDTDARLMARMGFLHELVGEEFSIQPVLLMNPDAAALRGMVHDLAKLQKEITRRRNQLQQMAALTFPELKTFFKGSTAAPAARALLEHFATPQDLAAASTEHVTEVLRSAHAYSHATRAAELQALAQATAGVPTLTHHQWRQAWLIKQLSVLERARQELVDEVALATATHPYARIIESLPVKSPIWTATLIGAIGDVSRFSNVNQFKAYLGWSPQLTRSGSSVDHSELAKTGVRPARNVLGQMTVIMLSSRIKATPFREVYHRLTGRGMRPASALGHVAGKLSVVLYGMLKNMTPYDQDQHRRQLGLVHSADQTDSLPVDVSLELVDLAESQNDLVADDQSATAAL

SEQ ID NO: 474140 - protein, 400 aa, unidentified
MSGLKGSFDSFVGIDVSKDKFDACGITGDEAKIFQFSTTMDRKGFEKLKGHLAAVSISSVLIGMESTASYHVNLFSYLVSEGYRVILINPLLISNYVKMQLRKTKTDKKDAVVIAQFLLANGDTLVQRATPSLISDLRDLSRQRESLVDEMTALKIEIKQLLNITFPELEHMAGIFTKSILKLLQQYPSAFALRDADLVQLSQMLIADSYGHKREAFAAALIKAAHSSIGSKSPAKEMILKQKIALLFHIEDALQEITGMFIEMSRKLMDEEIDLMTSLKGIGEKAAANFLIEMGGDINQFERSGKIIAMAGLDPAVYQSGKHDGKGRITKRGNRHLRKIIWLMTTKVIQYTDTFSVYYLKRRKEGLPYKMAVLATAHKLIRVIYAMLTHRTTFCAQVNS

SEQ ID NO: 474141 - protein, 331 aa, unidentified
MSVCVGLDIGSRTSIVGVRKDGRPAGQWDIAQTPAGRKAAVKKLLALKPKSIVMEATGIYYLDLALELQAADLPVSVINPKSFHNFAKLMLVNSKTDAIDAQLLSEYGERMTPRLWTPPSPVQLELRALGRHINRLVGHRTRAKNELHALQATSTTVSMLIEDQEEAIASLDNRIERFRKAGREMVAQCPTLTRQYKQLLAGPGIGEVSALAALAELTTLPQMLKSSQVARHAGLDVRQTQSGTSIDKPGRLGKSGNAYLRAAMYMPALTAVRCDPYAKAFYESLVSRGKKKMQAIAAVMRKYLTGIWACMRGDVPFDTVKLFSSEHLGKA

SEQ ID NO: 474142 - protein, 316 aa, unidentified
MSASPLFVGIDVAKAELVVALGPSRDLVAVPNDEGGIRHILEHLQAASPALIVLEATGGYETAAVAALAAAGLPVVVANPRQVRAFAKAMGILAKTDNIDAHVLALFAERVRPPMRSLPDEALRMLDALLTRRRQLIEMLVAERNRLAHALPPVEKSLKQHIRWLERRLADVDSDMDQAIQQSPVWRAKEDLLRSVPGVGPVVSRTLLADLPELGALNRKQIAALVGVAPLAKDSGTLRGKRMVWGGRAPVRAVLYMGALIASRHNPVIRDFYQRLVAAGKPKKVALTACMRKLLVILNTMVRNNTRWGERYALSA

SEQ ID NO: 474143 - protein, 359 aa, unidentified
MNTRLSKKQMFFNKVKLTKDDNLYIGIDVHKESYGVALWLNDTPAIDFIMPADNEELLKLLEKVRIALKRIVYEAGPTGYTLARTLQKANLPTTVVAPSKTPRQSARDSKTDQLDAKTLARYAAKGLLRPIAIPTKRQEADRQLTRTRDQLVSKQSEVKLQIKSFLLQHGIEQPPAVRAWSANAARALDALKLSKQLRFCLDLLVQELQFQQNQLTTMEEQLKQTYDNDRHAREVALLKTHPGVGPVIARQYTAELFNPKRFKHTTEVAKYVGLAPTIIQSGQSRRDGPVSKTGRPRFRSNLIQGAWVWVTKDPKAHITFLRILHNTGSKNKAITAMARRLAVHLWKMLCDNKPFTNIA

SEQ ID NO: 474144 - protein, 458 aa, unidentified
MYRELQPLRQALSQQLQADLFPATAGIDPNKLLETYLDRLTMYIGVDVADRTFTALAEDASGQVLSTLEACPNRPQGFRRFMAWAEALRDKHGLRILAVACETAGIFYWALWDFLAPQPGLARVLYNPRTTKHMGEVLSKRVRDDLVDALLLAEQLRLGSTPEVQLQEDANLLAARYYSRAARDLAQQINRKKNQLRALLRAYCPPLCQVFPGSKLHHPAVYALLQENLFPDEFVQAGAEALSTTLAIHCRDAFGLTEAQQLVEASCQALTRPIGRDAIHHLVHAHTEDVTTFQQRKAFYLKTGYALIKDRQETELLRTVKGAGVSNTLALVSEIGDVQRFPSGEHLASFLGLTTSKHISGTTLFRAKRITKQGSPNGRYAAVNVAHHLSRYVPRYQAMYKRIKDRKPPRKGHFIALVAVARDFVTNVLYDIWRYQRPFFLEVSDYRDYRRKNQRTDD

SEQ ID NO: 474145 - protein, 402 aa, unidentified
MAGGPTRFFGLDIHKEYFVAVGVNVQREVIFGPQRVSNYQLAEWAERVLALEDAVALEMSTNTYLFYDTLVPHVRSVIAVHPPSVALVTNAQVKTDKKAALALAQLHAAGMLTGVWIPPHEGRDLRALIARRDKMVRLSTMAKNRLHSTLQRNHLVLPEKPFSPEQRSWWKNLSLSATEKFLVLSDLDTLEFAQKQVEQVEDCLKQKSAEDERIPLLVQLPGVAMLTAITILAAIGDITRFPNAKKLVGYAGLGTRVHDSGMTHTSGRITKTGRKDLRRAMVNAANHAVIHHVHWKKEFERMEPRLGRSKAIIAIARKLLVAVWHVLGKQVADRFAEPRDVANSFFAHAYRIGVKNLPDGQSALAFTREQLDRLGIGKELQEIGWGMKPRKLPPSKMLLQKK

SEQ ID NO: 474146 - protein, 411 aa, unidentified
MSQMLVGVDVSLKSHHVHFMKGDGSTIADFSVSNDQNGAETLIKRMLEAAEKSQANQLKIGMEATDLYSWHLAHYLQDKMKGYEPKFQASIYVLNARKVARFKKGYDSLVKNDRIDAWVIADHLRFGRLPAQMKDAIHYEALQRLTRTRFHFMREIARNKTYFLNQLFLKFSGLRQDNPFSDKFGATSMAIMEELEPETIAEMSLEELVEFLQDKGKNRFEKPEEIAKYLQKLAKSSYRLNKAMQDPVNISMSVTLSTIQHIESQVKRLDKEIAKLMKGIPQTLTSVKGIGDVYAAGLIAEIGDIKRFKDHHALAKYAGLVWNQNQSGEFESQETARMRTGNKYLRYYLIQAADKIRKYDAEYKAFYTKKYDEVPKHKHKRALVLTARKLVRLVFSLLRTNQLYTPPERRD

SEQ ID NO: 474147 - protein, 349 aa, unidentified
MTMVETRLVCGGVDTHSLVHVAAVVDHNGGLLGIEEFEVTRAGYEKLLDWMRGFGEVFRVGVEGTGSYGVDLARHLAREGVEVVEVDRPDRVERNRSGKSDPIDAVAAARAALSGRASGQPKGRNGAVEAMRVLCVAKRSARNQRISGLCQIRHLGFCAPDELRVQLKGLNTNQLIAKTVGLRPARNGDVVMSMTKLALRELGRRVQQLETEIARIDVELKTLIVATAPQLLDVYGCGVHAASLLLVAAGDNPDRLKSEAAWAHLCGAAPIPASSGKVTRHRLNHGGDRQANHALFRIAIVRMRHDARTRVYVERRRAEGRTNGEIVRCLKRYIAREIFNVLPRSILID

SEQ ID NO: 474148 - protein, 418 aa, unidentified
MVEDVHWFIGIDWATQSHRAVLLDAEGSQVGEREFSHGGAGLTELCDWLLQKTGAAPEQIAVAIEMPHGPVVEMLLEHGFAVFAINPKQLDRFRDRFTAAGAKDDSRDALVLGDSLRTDRKAFRKLATDNPTVIELREWSRITDELQQERTRLANRLRQQLWRYYPQMAELTDDVGDEWFLALWHKVPTPAAAAKVTEKAVARILKDHRIRRLDAATVLQTLRKTALFVAPGTTEAACVHIRSLVARMRLVNQQIKEACNALDSLCAKLGVPDEESPSGQSHEQCDVTILRSWPGIGRIVLATLLTEAAQALQARDYHALRALAGVAPVTRQSGKKRLVSRRLACNRRLQTAVHHWSRVAIQHDAAARRCYDALRQRGRGHARALRSVGDRLLSALCATLKRQVLYDANRRSPQPATP

SEQ ID NO: 474149 - protein, 368 aa, unidentified
MHEGITAYIGLDVHKDSIAIAAAGNDREVPHFVGTVRPDFKRVRKALSHYGSASSLQVVYEAGPCGYTLARQLLADGFRCQVIAASRITRSPTERIKTDRRDAITLARLARSGDLIAVRIPDERDEAIRDLSRARQDAVTACLKTRQQLKAFLLRHGRPLRGSKPWSPTGELYLSKISFAHPAQNIAFADYRQAVLDTRARVERLTEALRAQCAHWRMQPLVSALACLRGVDFLTAVILVAEIGDFSRFAHPKELMGYLGLVPSEYSTGERHHRGDITKTGNAHARRVLVEAAWNYRFPARLSHTITRRQEGQSKPVRDIAWKAQLRLGHRYRRLQSRKLHQNKIIVAIARELTGFLWDIARHVPLVA

SEQ ID NO: 474150 - protein, 418 aa, unidentified
MDQQFGWFVGLDWASTLHRVCVLDGEGERVAERDVDHSGAALAELCAWLCQVTGAAPAEIAVAIETPRGPVVEALLEHGFAVFSINTKQLDRFRDRFSLAGAKDDSRDALVLGHSLHTDRHAFRRVAVDDPLVIELREWSRMYDELKQEQNRLANRVRDQLWRYYPQMCAFSEDFASDWFLDLWHAVPTPDASARATNTAIRRILKSHRIRRFDAATVRGILRQPPLTVAPGTIAAATAHIRTVAARLRLVNAQIKETERRLDELCPAIEAAAETAPGQICEQRDVAILRSYPGLGRINVATLLAEACEPLQRRDYHALRTLSGVAPVTKRSGKSCVVIQRHACNKRLQNAVYHWGRVAIQHDPTSRQRYTTLRARGHNHARALRSVVDRLLYVLCTLLERQVLFDPGYAEAPTTAAA

SEQ ID NO: 474151 - protein, 472 aa, unidentified
MPGKRRSKTRTTKRARPTAKQRQRFLERVHLNAAGIDVGSQAHWVAVPEDRDERPMQKFSSFTHDLHRLADWLEACGVETVAMESTGVYWIPLYEILEERGFEVLLVNARHVKNVPGRKTDLLDCQWLQQLHSFGLLRGSFRPQAEIAALRSYLRHRDKLVEGAAAFIQRMQKALILMNLQLHNVISDLTGLTGMRILRDIAAGQTDPERLAEHRHTRIRASKQEIADSLRGHYRDEHVFQLRQALEFYDFYQQQIQACDREIEARVRTLEVRCERPTTPLPALQGPRRTSHAPDFEIRSPLFVLCGGVDLTELPGIGPYGALRLISEVGLDMTRWPSEKHFASWLTLSPNAKISGGKLLASATQPSANRAARIFRIAAMSLGRSDHALGAFYRRLAARTGKAKAITATGRKLAVLFYRTLRDKRPYREQSAGDYDARQRSRILRHLRKRAESLGFQLVDRATGELLGAPVS

SEQ ID NO: 474152 - protein, 387 aa, unidentified
MPQVDDLSRSLATFDQDATLTVVVEMSLSSWLVAGMVPGVDRQPLKKLGPDPDALLRLVERWRDQAVKAGKRIERIALAFEAGRDGFWLARWLQARGIEVHVIHSTSVAVSREHRRAKTDRLDTAMLMRVFLGWLRGERGHCGMVAIPTLEDEDARRPSRERESLVGERTRIINRMKAILAWLGIRGFNPKLRKAPQRLDALRTPEDLPLPPNTVDELRRDMARLAMVCEQIKALEQARLAHLEQAPGTGPHAMVRLIANVIGVGIETADMLVQEVLSRKLRDRRAVARYAGLTGAPNESGSRRREKGLAKSGNARVRRGLIQLAWRFLRFQKDSALAQWYRVRTEGPAAARKTKMIVALARKLLIAFWRMVTVGEIPAGFALRQPV

SEQ ID NO: 474153 - protein, 390 aa, unidentified
MTPLPSQRFAAYVGIDWADAKHDICIQPAGGGKRVFECVAHQVSRIDEWAKSMRQRYGVPIAVALELAKGPIVAALQKYDFFVLFRINPSTLAKYREAFKPSRAKDDPTDAQLALDLLLHYPERFAPLKPQSVPMRSLLTLIEQRRELVDDKTRITNRLGHTLKQYYPQALEWFDKLDNRIVCDFLARWPTLPAARRAHRATLEEFFRSHNCRRSKVIDSRISAIQSAVALTEDPAIVNPCRLHVQVLIEQLRVTLAAIEQFDQQIDAVAQTIPDYPLFRALPGAGPSLAPRLLAAFGEQRERYAGAAALQMYAGIAPVTERSGKKRWVHWRWQCPTFLRQTFLEWAGQTINKSSWARAYYYQQRAKGSTYQAAVRALAYKWIRILYRCW

SEQ ID NO: 474154 - protein, 350 aa, unidentified
MTTIAEPRPVVTGGVDTHLDMHVAAVVTVVGGVLGTAEFPTTAAGYRRLLAWMRTFGELGQVGVEGTGTYGVSLARHLRSEQVKVVEVMRPNRQVRRRHGKTDVVDAIAAARAVLSGEANAIPKTHDGPVEALRTLKVLQRSATKARTQALNQLRALLVTAPDELRARLRDLTQRELLKTCAGFRVAAEDDSLAAITRFALRELGQRVLYLNDQLAQVRLRLQRITEQVAPALAALKGVGPDVASTLLLAAGDNPERLTNERSFASLCGVSPVQASSGKTRRHRLNRGGDRQANAALWRITLVRLNCDPRTKDYLAKRVTDGKSKTEAIRCLKRYIAREVFAALPIPAVA

SEQ ID NO: 474155 - protein, 350 aa, unidentified
MSKTAYERSHPIHVTTIGLDLAKNVFQVHGITLDDEVAFNRPLRRAQLLPFFSKLNPCLIGMEACSSAHHWARELTNFGHDVRLIPPIYVKPYVKRGKSDAIDAEAICEAVTRPTMRFVAIKTVEQQSLLSVHRARSLLVRQRTQLINGLRGMVAEFGVYIARGLARVIGFAENILTGEVLELPDIANEVIHNMCEHLMALHARVHWYEDRLKQVAKEDARVRLLRTIPGVGAVTASAIIASIGDGHQFSNGREFAAWLGLTPANKSSGGKEKLGRITKMGDQYLRSLLVVGMTSLVRQTKSHPERASKWLTSLLERKPARVATVAMANKTARIVWAVLTRNEPYTPHTA

SEQ ID NO: 474156 - protein, 384 aa, unidentified
MSTDPRPEQTAIRTDLGAIFVSLELSRATWLITSLSPGRQKMSKHQVHGGDAAGLLARLAELQARAHARTGQLFPLIVIQEAGLDGFWIHRVLQSESIESHVVDPASIATSRRRRRAKTDKIDGEALIRTLLAYKRGEPRVCAMVKAPTPREEDERRIGRERKVLTAERVAHVNRIKGLLFAQGICDYQPMHRHRRARLDDLTTSDGRRLPQHLKAQISRELDRLELLLEQLKAVEAERDALLAATESPAKLASAALLLDLKGIGPEFASVLWSEGLCRSFANRRQVAAYAGLAPTPWQSGAVDHEQGVSKAGNPRLRTTMIQLAWLWLRHQPGSTLSHWFHERVERRGGLRKTMIVALARKLLVALWRYVTAGVVIQGATMKR

SEQ ID NO: 474157 - protein, 410 aa, unidentified
MVKENFIYVGIDLHKETHTAVMIDCYNQKLGEITFPNRPADFPKLVTKVKKCNTDAKEVVYGLENAYGYGRPLAVWLIDKGYFVKDVNTAISHRQAKHRGAMYRKSDSDDAEAIALATLNMLDKLPDACPNDAYWSLGQLVHRRDNIMKQRTRLVNQLHEQLCIAYPSYKQFFNDISRPTALYFWEHYPSRKYLKGKSVEDLRTELVPVSHNRCSTKNCEKILDAVASDKVKNNAYQDARDMVTLSIVSDLQHYDSQLAEVDKMLEQMYKMLGCTLTTIPGVNVITAVKILAEIGDIKRFSNANKLAQFAGIAPLHLSSSGKGKDVATKQGNRRLQATIYFLAIQMVQVSSKSTPRNSVVRAYYEKRKAEGKTSQQALICISRRLFSIIYGMLNHGTEYRMPVVESAGEK

SEQ ID NO: 474158 - protein, 382 aa, unidentified
MQASTVGTPTAGHCGTIFVAIELSQKTWLVTLHSPDRDRISRHKFEGGDHGGLLSLIEKVRARVAERLGSVPRVVSCYEAGYDGFWLHRLLEAAGILNFVFDAASIAVEQRSRRSKTDRIDGELQLRTLMAYLRGEPRVVRIVRVPSVEQEDARRASRERDRLVEEQTAHTNRIKALLRLVGMAVGNPRRRDWLAWLERQRDWQGQPVPPHLLAEVKREHARLMLLRDQLAALEQAQAAPDATVPAAMVDRRNQLQRLKALGPAFSTTLVNEVFYKDFRNRREVASYNGLAPSPWKSGGIDREQGISKAGNHRARLKAIELAWLWLRHQPDSALSCWFRARTLNAGKRARRIAIVALARKLIVALWRYLTTGLVPEGAAMKA

SEQ ID NO: 474159 - protein, 402 aa, unidentified
MFYCGIDIAKYKHEATVIDQAGAAVQESISFANSKEGCEKLLALFQRLDISKEGLLIGMEATGHYWLSVYGYLLEQGFEVKVINPIQSEAFRKMYIRQTKNDRKDSFIIAQIMRFGQFSATNLAEEGIVAMRQLSRYRLALVDTCGDCKRRVIALLDQVFPEYDSLFSDTFGVTSKEVLSQYPTPEGMLTVSIRKLTTLLEKASHGRFGKEKAEQLKAAAASSFGVNFAKDAFAFQIRQLIEQLEFLERQVAELEEQIFSLLKQTGSYITTIPGIGDTLGAIILSEIGDIHRFDAPNKLVAFAGLDVRVTQSGEFTGTRQKISKRGSPYLRRAIWLAASRAAFCDPILSEYYQGMRARGKHHLTAVGAVSRKLCNTIYTILKEDRPWQPIPPKGKKVSNYTE

SEQ ID NO: 474160 - protein, 428 aa, unidentified
MSNQEIIRRRRYCQIIKEISGSDQYLVVGIDAGKDKHHAFMGSATGMSLYRKLIFENNLNGFSRLINTADQIKAQHGLTKVVFGLEPTGNYHKPLALHLIGCDRDLVLVTGQAVKNNRQILNGRWDKNDTKDAANVADLVSRGRCLFYDVPSQEIVELRCLLSLRRRLKKEEHSLRMRIRNGLLAQYFPELDRFYNACESENLAIVRWCLNPDKIAVMEFDQFFKMVTSSRRGIAQKLRLEKIYQAAIESVGCPLGPAAEFEAELLVEKLNHVRGQVHDTEEHIEDICLTFPEYSYLLTMPGFGPYISAKLLAAIADPFRFENRNQVLKMGGYDLCANRSGKTSDQAVPVISKNGNSELRYALYQAAHVAASRNDHFRAYFTKMLQGRQREKGIKTKMKVKLAAKMLVIAWTLMKKKEVFDPAHLNID

SEQ ID NO: 474161 - protein, 379 aa, unidentified
MTETTRSLECSAATFYLALELGSTKWTLAFSPSIAARPRLRVIAAGDLAGLQREIGRAAERFGVPRETPVWSCYEAGRDGFWLHRWLVAQGIRNLVVDSSSIEVNRRRRRAKTDRLDVSHLLTSLQRWVAGERRVWSVVHVPSPEAEAARQLTRELATIREDRTRIRNRLLGLLATQGIRCALTRRFPGQVARVETGDGRPLPPAFHARLLREWAQLEAIEARRGVLRAERAARIRDGGDRVAQVARALCTVRGIADSSAAIFSAELFGTRTFQNGRQLGALTGLAPVPYRSDQRVADQGISKAGRGELRRLSIQLAWCWLRWQPDSALAQWFRHRFATAGGRSRRIGIVAVARKLVIALWRYVDQGVIPAGARLKRAH

SEQ ID NO: 474162 - protein, 360 aa, unidentified
MKIDKYVALDVDSANIVIGVYDVKGQQIMRGCIRTNGNDIRQFFKGLNGTVHVVFEEGTQAAWLYDLIRPLVAGVTVCDPRENKLLKSGNKSDDIDVDKLARLLRLGDLQAVYHGEETIQGLKHLVGAYENLVSDTIRAMNRLKAMFRGRGIGNRGTKVFSNDGRDEWLSKLTIEGLRARAGYLYREIDCLLKLRTEAKKAMCSEAIKHSGYKLIKSVPGIGPVRTAQIIATAGTPHRFRTKRQWWPYCGLAVVTRTSADYEWVGENVRKRKRAPQTRGLNKNYNRRLKQVFKGAALNAIRTNEQFKQYYQRLIDKGIRPEMAQLTVARKLSAITLAVWKKGEKFDPERLNQAEQSTGNQ

SEQ ID NO: 474163 - protein, 307 aa, unidentified
MADVFVGIDVSKAYLDVAVDGASKVTRHGNDNAGRSELATRLKAARLVVVEATGGYELDLVRALQAAGAAVAVVNPRRIRDFARASGRLAKTDRIDALAIAQFARAMRPAQTPRIEDGRMALAGLVARRRQVIDMAVAEENRLEHAAPALAGMIHEHIAQLKDQLAGIDVAIALAIDADAALQARRAILESVPGVGQVTAAVLIAELPELGAIDDKKIAALVGVAPVAHDSGTMRGQRHIAGGRGSVRCALYMAALSAVRFNPTIKAFHRRLRDNGKRPKVALVAAMRKLIILLNTLVRRNQIWKPA

SEQ ID NO: 474164 - protein, 340 aa, unidentified
MRQLYAGCDLHGNSNFLGIIDEQGKRIFKKALPNELPLIRHTLQPFQGELGGIVVESTYNWYWLVDGLMEEGYRVHLANPSAIQQYGGLKHADDKHDAFWLAEMLRLGILPEGYIYPKEERPVRDLLRKRGHLVRLRTSLVISLENILSRNLGKKVSAHDVEGLREDRVTPLLERNEDLALAGRVSKDAIDHLTRQIHKIEGAVQKRMGVKESYRYLLTLPGVGKILALTIMLETGPISRFETVGDYVSYCRKVPSQWISNGKWKGSGNRKNGNKYLSWAYAEASEFARRLYPEPRSYYHRKLQKTNEAVAHSALSNKLARAAYYVMRDQVPFRPEKLFG

SEQ ID NO: 474165 - protein, 360 aa, unidentified
MFSERTSVGLDVHARSVAAAAIDGLTGEVFRARLTPSHGEVLNWIGRLPGPCAVVYESGPTGFGLARALIGAGWRCEVAASSKLQRPGGDRVKTDARDALRLARLLRLDEIVPVRIPGPAEEAARDLVRAREASRADLMRARHRLSKLLLRHGIVYSGGKAWTELHDRWLRQQRFDSMPTQAAFDDAYETVVLAAGRRARLDEKIIALAGDSEFTPIARRLGCLRGISTLTGFALAVEIGDWDRFTGASIGAYVGLVPSEHSSGQSRVQGAITKTGNTHVRRLLVEAAWHHRTAYRPGVVLQRRWDQAPAAARARGHAGNQRLHARWVNLNLRKKRPVIANVAVARELAGWCWSLAVLPD

SEQ ID NO: 474166 - protein, 344 aa, unidentified
MEQIIRIGMDTSKSVFQLHGVNAAEQPILRKKLSRSAMVKFFEKAVPTTIAIEACGGSHHWARLLGSQGHEVKLIAPQLAKPYVKRGKNDAADAEALCEAMSRPTMRFVPVKTADQQAALMLVGLRERLIRNRTQLANAIRGFAMEFGIVAATGMCRIEPLLERIAADQSLPELARELFAMHGVEYRNLLAETKAVEEKLVALHRSDECSRRLAEIPGVGPVGASLLMMKTPDPRLFKSGRDFAAWIGLTPKDHSTAGKARPGAITRAGDEMLRSVLVVGATALLQHVRAGRSRHASRWLTELLQRKKPKLVAVALANKIARIAWKLMVSGESYRWMEEQPQAI

SEQ ID NO: 474167 - protein, 337 aa, unidentified
MEYFAGLDVSMAETHVCVVTRNGTVIHQAKVPSTPADIAAELTQVPTCRRVLFETGRMAPMLYHGLSQLGLPVVCVESRQAYQALKSLATHKTDRNDARGLAHLARTGFFKPVHVKSLPAHAVRSLIIARKKLVGQRVTLENQIRGLAVVFGVRLPRALSSTFIRQALQASEGIPGLSAAMQGLVAARTAVLAAIVAIDGDIRRMVRASDACRRLMSIPGVGQLTALAFTAAVDNPGRFRRSRDIGAYLGLVPRRHQSGEIDYSGSISKCGDRRLRTLLYEAANVMLTRYKGALKLKEWAFAVAKRSTMRKARIALARRLAIIMHAMLRHGTEFKAA

SEQ ID NO: 474168 - protein, 460 aa, unidentified
MNHKQRREVMRKIQSEDLSLEVVHPDAAGIDIGNESHYVAVPPTRDCQTVRRFGCTTAELKAMADWLKQCKIRTIALQSTGVYWVSVYDILEEAGFEVYLVNARETKNLPGRKSDVQESQWLMKLHTYGLLRNSFRPSQEIRTMRTYWRQRNDLVRTAGRHIQRMQKALTQMNIQLANVLSDVSGMTGQAIVKAILAGERDPYELAALRNWRVKASEEEIALSLEGNWQEEQLFVLQQEQDGYEFCLKQMAECDQRLQQYLQQQQDRSQGASLPEEKRKERLRKKKKGNAPQFDLRAELFRMTGTDLTQIDSIDGTTAMTILSEAGWDMSKWKTEDHFVSWLRLCPDNKISGDKIIGKGRLPTNNRATLALKMAASTLRRSNTYLGAQFRRLRSKLGAPVAIKAMAAKLARLLYRMLRYGMSFIDRGEAFYESQHRKLQINYLKRKAANLGFQIIEAPAA

SEQ ID NO: 474169 - protein, 314 aa, unidentified
MKNTQETNVGIDTGKRQLDIYIRPVGEYFTVENNEKGIKEAIKRIKKHKPTRITIEATGRLEMPFACAASKAKLPVAIANPRHVHNFAKSTGKHAKTDKLDAAMIAYYGEALKPRLTEIKPENTRRISDLLVRRSQLVDMRTMEKNRYSILSKEIKRSNTRLIKQLQKEIDWVEKHLDSLIEETPDWNKILTILLSVKGVGKVLAYTLLSDLPELGQLNRKEIAALVGVAPINRESGLYKGKRRIRGGRARVRTVLFMAMMSTIQSNPRFKRDYQCLVAKGKPKKVAIVACMRKMITILNVMVKTETVWDEKLA

SEQ ID NO: 474170 - protein, 402 aa, unidentified
MKASKRYLRFCGIDMAKQKHVACIIDQDGQYLLRPKSIRNDADGYQQILNCLKQSGRTKSILTGMEATGHYWYSLHDFLTRQGYTVAVLNPIQTAQQAKQAIRKCKTDKYDAFHIANLLRTGQYKAAVIPGEFAMTCRQITRLRYRIVKQAAMIKQLVNSRLHPAWPEYEGLFSNKFGTTSMKLLQTASTPKELMELDPDDLGELIRKASRGRFGPAHTQKILHSAKNSVGMQRGHYGISTGIKFLLEQIVALEPVRKKLDVEIEKLAAKLPEYLFTLPGATELTIVSLYGEVDPIETFKRPSQLTAFAGLDPKVFQSGQYDAPRRHVSKRGCPYLRRTLWQMAYRAVCNEGDLRDFWRRKHRQNKHHLVAVTAAANKLCHIVWRIMTDRRDYIQKGYNRKS

SEQ ID NO: 474171 - protein, 351 aa, unidentified
MPNVTRQPLKKLRSDPDALLGLLLRWRDQATKAGGRIKRIVLAFEAGRDGFWLARWLRARGIEAYVIHPASIPVSREHRRAKTDRLDAGLLMRAVLGWLRGEPKHCSMAAIPTVAEEDARRPTRERETLVGEQTRAVNRIKSTLIRFGIRAFKARLRQASKHLGELRSPEGEPLPPNTMAELRRDLVRLQVIREQIRAIERARLERLKRAPRQGTHPMMRMLARILGIGIETADLLVHEVLTRKLRDQRAVARYGGLTGSPDESGTKRRERGLARAGNARVRHGMIQLAWRWLKFQNKSALAQWYGARTTGGKPGLRKTMIAALARKLLIALWRYVTIGEVPAGAVLRPVT

SEQ ID NO: 474172 - protein, 346 aa, unidentified
MEIHTLGIDLGKTIFHIVGLNTSGETVVRKKLSRKQLLLFTATSQVRLIGMEACGGAHFLGRALRQQGHDVRLMPAQYVKPYVKTNKNDYIDAEAIAEAVGRPKMRFVPIKSDDQLDMQSLHRVRERWVGRRTSVVNQIRGLLLERGITVRKGRRHAEAALPGILEDPESNLSGPLRMLLVQLQRELRQLQSQIEEVDAVILKAAHEHEACQRLMAIPAIGPVIATAIVSAIGNGAEFKKGRGFAAWLGLVPAQYSTGGKQKLLGISKRGNCYLRSLLVHGARAVMQCREKKSSGLSAWLGQLASRVHCNVAVVALANKLARIAWALLAKGETYRPPVLAANAVAV

SEQ ID NO: 474173 - protein, 361 aa, unidentified
MLTITIGVDLAKSVFAICELDEYGRVRMRRELRRDAFAAWLAQLPAGTVVAMEACSGAHHWGRRCLAFGLQPKLIAAQFVKPFRKSQKTKNDRNDAEAIATAARQGNMRFVPIKTIDQQTRLSWHRAREGYKTEALAIGNRMRGLLAEFGVVVAKSDAALRTLLADLSAHALPEPLVEMLGDLNTHWQMVRERVTAYGKRIEQHARTDVRCKRASAITGVGALTTDALVAMVGSAQEFRNGRQMAAWIGITPSQHSSGSRKLLGKISCRGDGYLRTLLIQGARSSLQRAKAVTREKATPEQIWIMSLAARLPFGKVLVAIANKHARQLWAILARGEDYDPNAWIKHPMVQRAASKRAANAI

SEQ ID NO: 474174 - protein, 319 aa, unidentified
MGKSKVEYEQVIDRGCGLDVHRDTVVATVMGKGIKTETRTFGTTTSSLNELGEWLQSLKVTDGAMESTGIYWKPVLHVLRAYPLNLIVVNARHIKNVPGRKTDKADSQWICKLLISGLLKGSFIPPENIQELRDLHRYKKKLIGIVASEKNRIIRVLEDANIKLSSVVSDTSGVTASYLIKGLIEGRKDLEKLISECYHRKLQANPQQIKEAINGRLTAHHGFILKSMQKHIASVEEQIAEIDEEIEKYIKDFEKEIELLQTIPGVGKEGAIGIVSEIGVDMDVFPDEHHLASHSGMCPGNNESAGKKKVQKHDMEIKI

SEQ ID NO: 474175 - protein, 344 aa, unidentified
MDHFGGLDVSVKETSICIVDDTGRIVKEVKVASEPATLLKVLGNPTYRFKRIGLEAGPLSQWLFSALAEAELPVICVETRHMQAVLKAQINKTDRNDARGIAQMIRVGLYRPVHVKTLRSQKLRMLLTHRKLLQSKAIAIENDLRGTLRNFGLKVGMVGKVRFEARIQELVENIPDLTVLVEPLLIVRRVLREQIVTLHRRLLAIVRDDEVCQRLMTTPGVGPVVALTYRATVDVPARFRKSKAVGAVFGLTCARYQSGEVDWSGRISRCGDEMMRVMLYEAAQSMLRSKKWSWLKAWAMQIARRRGMKKAIVALARRLAVIMHRIWVDGTEFRWTREQAVAAA

SEQ ID NO: 474176 - protein, 372 aa, unidentified
MNYNTVYVGMDVHKESFSLCAYTIDSEKASYFQRTEADYKKVLKYLEFLRTIYGDEASFICGYEAGCLGYSLYHQLAAQNVKCVILAPTTMLEQRSKKRIKTDKRDAEIIAKCLAQRNYSSVHIPTAKDEETKEFLRMRDDHKLALKKIKQQILSLCLRHNWCYDGKTHWTAAHIKWLRSLEVEALYKELLEEYLLSYQTLSDKLDRLDKRIEELASQDEYKDSVKKLCCFIGVKTHTALSVVVEVGDFKRFASAEKFASYLGLVPGENSSGDDKTRLSITKAGNRHVRLLLTEAAQRYGRGTVGYKSQALKARQAGNTPQVIAYADKANERLRRRFYKMILAKGKKHNVAKTAITRELACFMWGMMTDNIA

SEQ ID NO: 474177 - protein, 341 aa, unidentified
MEDLTRVFVDTSKQVFQLHGVNGREEPVLRRKLSRGQFLDFFAGLEPTLVGLEACGSSHHWAQQLMELGHDVRLIAPQHVKPYVRRGKNDAADAEAGCEALGRPRTRFVRVKDPQAQAALMLVSVRDRLIRQRTQLSNAIRGHAAEFGLVAAKGLDKIALLLDRVADDETLPALAKDLFAGLSDEWARLSEEIKAIEKAFLAWHRQNALSRRLATIPAVGPVGACLLVIKAPDATAFKSGRDFSAWIGLTPKDHSTGGKQRLGRITRAGDERLRATLVAGATAVIRQVRIGKSSPWPWLTQLLKKKPPKLAAVALANKLARIAWKMMISGEAYDQRRALAA

SEQ ID NO: 474178 - protein, 364 aa, unidentified
MDPALPAGRNVGRGLQRGRIIMQVVRIGLDLAKYVFEVHGVDGQGNLVIRKTLRRGSVSTFFANLPPCLVGMEASNGAHYWARVLTELGHKVRLISPQFVAPYVKSNKNDRNDAEAICEAVGRPTMRFVPPKSPEQLAIQALHRIRQRLVRSRTKLVNQIRGILAEHGIVIARDIWRLRRALAEITGHVPDDLNTLVRVLIIEAQAELMELDRRIASCDRRIRELYRTSELCQRLGEIAGIGPVTATALVAAVGDRSCFKNGRQFAAWLGLVPKQRSSGGRHRLFGISKRGDRYLRTLMIHGARAALGKAGGKQDPRSRWLVSLRQRRHANVAAVALANKNARIVWAMLAGNVSYEPARSVQAA

SEQ ID NO: 474179 - protein, 354 aa, unidentified
MHYVGVDYHKRSSYVTVMDERGKVVKEGQIANTPEALAALLDGRAQGASAVLEAGRNWPVMYDWLEELVDEVTLAHPAKVRVIAEAKVKTDRIDSRMLAHLLRADLIPAAYVPGAVTREQRRRLRQRMFLVRLSTMVKNRIHTLVDRHPELSRQAGGWSDLFGKAGCAWLEQLELPAGEAQLLRTDLDLLEAIQEHIKSSNRWVSQLARKDARAKLLATLPGIGDFFGVLLAVEIDDVGRFLRPEKLAAYAGLVPSTYASGGYTHHGRITKRGNKWIRWACIEAAYPAIRQDPELAALYHRLKVAKGANVAKVAVAKRLLTIAYRVLKESRSYRPADEQARLRRRNSPAALISH

SEQ ID NO: 474180 - protein, 459 aa, unidentified
MAQRKSRPKRAKPPEILPTVHARAAGLDVGSTFHVVAIPRALSDEPVQTFRSFTGDLHRLADWLQSVGITTIAMESTGVYWIPVFEILEARGFEVLLVNARDVKNVPGRKTDVNDAQWLQQLHQFGLLRGSFRPHERVIQLRAILRHRERLTDSGATQIQLMQKALMQMNVQLQHAVTDITGLTGMRIIRAIIDGVHDPATLAQFRDVRCKESVETIREALTGNYRPEHVFALRHALEIYDFFYAKIAECDTEIASVLAALNSDRSAPTQPLPPARHQRGKNEPRFDVRAALYTLLGADLSQIHGLGPYTVLRLIGECGDDMRKWPTAKHFTSWLTLAPGNKISGGRVLSSKTRRSASRAASLLRMAAVNVGRTQTALGAFYRRLAARVGKAKAVTATARKLAVLFYNALRFGLSYVDAGVDSYEERYRERVVYNLQRRARQMGFVLVDAANIPAHGVS

SEQ ID NO: 474181 - protein, 343 aa, unidentified
MLYAGVDAHRTATHITIMDENGKVLARKRVPSSSDELHKLFANYQEPIKAVVEATYNWGPVYDWLDEIVDEVVLAHPTKVRAIADARIKTDTIDSQTLAHLLRADLIPTAYAPSKETRAIKRVLRQRMFFVRVQTMVKNRIHALLTQHAIALPDVTDLYGKAGLAWLHQLSLPDPDGQLLRDDLSLLATLRERIIGTDRLIAQLAEGDEIVIWLASLPGIGPFFAMLLRYEVDDMTRFRSAKKFAHYTGLIPSTYASNTRVYHGPLTKQGNRWLRWAFIEAVGPALRASSSLRQYYDRIKARRGAHDARVCTARKLAELAWIVWTERRCYEDRPAPFSAKATS

SEQ ID NO: 474182 - protein, 421 aa, unidentified
MRGLRGKRVRTVKQGTLIATVDIGLTNNTGYCTTLDGRDTNPFRFDNTKEGFEKFWWMTMASKNRFGCDEVLVGYESTGPYAEPLLHYLANKRVKIGQVNPMHTKKMKEVNDNSPLKTDDKDPRVIADIIRLGRALTIVVPEGDAASLRRLNNARERHVGEQTALLNQLQQLVFLIFPEFKTVLKNMKGKTAQYILKRYTLPESIGTLSKEVLGEEMRKRSRGKFGIKDAEALIGLARETVGIKEGIGGIFIDIRHILLQLEAEGRFISEIEGEMGAILERIPCSARLLSIKGLGIVSVAGLIGEVGDFSKFSTQSEILKLAGLDLYEISSGKRKGQRRISKRGRGLLRKILFYAAIQMIRKNGIMYEYYARLTGRGMERMRALIAVSRKLLRIIHAIVRDDRDYVGQYQAPERRVIKKAA

SEQ ID NO: 474183 - protein, 409 aa, unidentified
MNPLYVGIDVSSRSNVVYLMKPDGSKIKNFSVANSNDGSKKLVKEILAALSSFSLTDVIIGMESTSVYGENLVYFLREDGSLTPYNRKIHVLNPKQVNKFKESYNDLPKNDYVDSFVIADCLRFGRINKEVYLEDYRYKALQNLTRARYFAVQNLTREKQRFMNVLFKKYSSLAQEKVFSNTFSTTALAVYEEFESADTLAYMDLHELTEFLQKKGKNHFSNPEEVAKAIQKAARSSYRLPKTVNDSVNQVLSISISSMKALESQIKEFDKAIAAQMELIPNTLTSIKGIGPVYSAGIIAEIGDINRFPNQAKLAKYAGLAWQQHQSGGFESENTRLIKTGNRFLKYYLGEAAMSLVRCDAEYSRFYHLKYNEVNKYQHKRALALTARKFVRLVFRLLKDNRLYIAPEA

SEQ ID NO: 474184 - protein, 322 aa, unidentified
MTISAQSERVANIGIDVGKAQLDVVWHETGEHQAIENTPKDIKVLIKRLMKEQVQRIVLEATGRYERAFVLAAVEAGLPVIVVNPLMVRRYAGAIGRLAKTDKLDAGLIAEFAAVIKPKVRLATNAKTLQIKDLLLRRRQLMGMRTMELNRQQQYAAAQASSCKRVIALLEKEVALVERQLDLAIDDVAEWKAKKEVLLSVPGVGPTLAYTLLGDMPELGELNQRQIAALTGVAPFNRDSGSQRGKRRIHGGRAGVRTVLFMATLSATQHNPVIRAFYQRLVAAGKHKKVALVACMRKLMGILNTMLREGTCWDEKKAQIPA

SEQ ID NO: 474185 - protein, 372 aa, unidentified
MSEIIAACRSFVGVDLHKTTVTLVAVAPDGTEIARLTINTKCREKVRAWLLALPRPSHLAVEAVGFVEWFIDCFRPSVDRIDIADATELANRRGKRRKNDYRDALDVAQRLARGECPCGYIADDELMQLRKLGRHWRQLSSVLARSKQFMKSILLAANLRGPKFDGASAQRWLLAHGKRLKPAQRRAFANFTRIVQLIELQRQPLRFAIIEASRSERFAPMTKLLQSVPGIGEIWSCIITAEIGPFDRFPNADALEFWSGLTSDMKESAGRTQPGRITKAGSRTLRWALCSAALTLCHSDAGQEAIRQRLIRKTGGIKGKANTAMGRRLLRLLYAMVRDNKPYRAGPSRKRNAAANKARAAKRARNNRKEAA

SEQ ID NO: 474186 - protein, 347 aa, unidentified
MTTIEDARVITGGVDTRADMHVAAALDSIGGLLGVQEFPATAAGYASLLGWLRGFGTLAVAGVEGTGSYGAGLARHLAAAGVRVVEVDRPDRQDRARQGKSDPLDAVSAARAALSGRASGAPRGRDGAVEAIRALMVAKRSARQERTQAINQARALIMTGPEELRARFARRSPAQLIEAIAALRPRPGDVPGYATRVALRELGRRAQFLDAQLDRLDELIGPLVTARAPGLLALHGVGPDTAAMLLVAAGDHPERLRSESSWAHLCGVAPIPASSGKTAGRYRLNRGGDRQANSALWRIVIVRMNSHPATRAYADRRSEEGLSKKEIIRCLKRYVAREVYRQLRNGA

SEQ ID NO: 474187 - protein, 356 aa, unidentified
MEEYIAFDSHKHYTLAEREKVATGEVKQCRIAHEPGAIRGFLGACDPGTAVAVEATGNWYWIVDEIEQAGLEPRLVHPRKAKMMMAMVNKTDKLDVHGLNRLQRSGTLPTVWIPPGEIRDLRELTRTRMFVARHRTRLKNRIHATLAKYGLSLTEYSDVYCKGARQGLESLISKLPPQTQYVTRMLLEQLDFVERQIQAQEERLKALITVTPEMQLLQSLPGVGMILAAVIAFEIGDVSRFAYAEHLASYAGTTPRVHASGGKVRYGPLRKDVNNYLKWAFSEAANSVAVNHERRPERHVSRIYRHIQRRSGHPTAIGAVARHLAEAAFHVLKKRKEYREPSLIRKQTKRGRTKEA

SEQ ID NO: 474188 - protein, 337 aa, unidentified
MNEVTTIGLDLAKRVFQVHGADAKGRPVLQKKLRREEVLSFFAKLPPCVVGMEACASSHHWAREIRALGHDARMIPASYVKPYVARQKNDAADAAAICEAVTRPAVRTAPIKSLTQQALRVLHRTHELLSRQRVSLINAIRSHMAEFGVIAPAGPQHVGSLIERISDPKTPIPDAVRAPLGILVDEYVALNARINALEAEMRKSCREEPESARLLSIPGVGPITVSAILAGVPNIRGFRSGRDFAAWLGLVPRQNSSGGKERLGRITKMGDRTIRRLLVIGAMSTIRWSRSKQNFAQSWLGRIIARKPIKLAAVALANKMATIIWAVMTREETYRPA

SEQ ID NO: 474189 - protein, 365 aa, unidentified
MTESIWVGLDVHQDSITAAILRGGAMQPEVVRLSGDLMKVRRLFRRLGAEGAVRSCYEASGAGFVLHRVLREDGFHCEVIAPSLIPKKPGDRRKTDRIDAVNLAFLYRSGHLTPVHVPSSEQVELRQLLRLRGRYQQQTKSTKLRVTSILRTHGFRFTDGASLWTKKHRTWLERMRTTLTGPLGIVIAAELEHHEYLEMQRNSFDAEIERVAQSPTYRSFVEALCCFRGIKTLTAMTILCEVGDIRRFDSPRRLAAYLGLVPSERSSGEVQRRGPITKAGNTHARRLLVEAAWNNRHRSGADLILNRRRQGQPPEIVAIAVKAQHRLSKRFYHLAQRKHLNVAVTAVAREMCGFIWAALRALPQR

SEQ ID NO: 474190 - protein, 355 aa, unidentified
MTIAKYIGMDVHKESISIAVMNSTGKLVMECVIETKASMLLQFIDGLRGDVRVTFEEGTWAAWLYDLLKPHVSEVVVCNPRKNALLKDGSKSDRIDARKLAELLRGNQLKPVYHGEQGLRTLKELARSYLNISKDVTRVMNRLKALYRSWGIACAGTQVYARRHRSEWLGRISEAGVRRRAEHCYQQLDVLRLLRQQVRRDLLLESKKHQAWRLLGLIPGIGPIRAALLIALIQTPHRFRTKRQLWTYSGLGLETHDSAQYRVVEGQLRSKKSVTLRGLNQDHNHDLKDIFKGAATRVSSSSNGPLHDFYEHLLAQGRKPTMARLTLARKIAAITLIVWKKEVHFDASYLKSQAA

SEQ ID NO: 474191 - protein, 398 aa, unidentified
MNLNIGIDIAKNVHEACLVNENGEQIGKFIQLRNSKKSIEKFTKHIELVSKELNAKPRIGMEATGIYWYSLFSELSKKYKIHVYNPSQISGFASVNIRESKTDKIDAKTIANMLRFGESPKTNYSDTQRLELREYGRFYFKLTSIKINLKKRLRRNLHLIFPGYDEIFKNLYTATSKEIITNITTPEKVLELGEKKLLELMKEKSKNHIDPEKAKILMEKAEDTIPSEIIKESSLFEFQMMLEMIENFENQIASIENKMMSIWNKVREEHYIQTIGGVTELRAAMIWAEMGNVDDFKHPDQIVAFAGYDPKVRKSGKKEVIGGPNKRGSKILRWVLGWTVQEAKSSNPVIGQYFDKKINEGKHYNNARCAAAKKLIRIIWSVEKNKKPFQIPDNLLSS

SEQ ID NO: 474192 - protein, 415 aa, unidentified
MEASYTIAGIDVHKKMLAVVVTDVGKEGEFQFERRKFGALDSDLRALAKWLAEREVREAVLESTAQYWKPVWRQLEAQCKLYLAQAQSNRAPRGRKRDFADAERLVRRHVAGELILSFVPDPEQRLWRTVTRSKYQLTGDRVRLQNQLEALLEDSRIKLGSCVSDLLGLSSRRILRAMADGETDPACLAALVEPEVRASQETLRDALTAAATLNGLHRRILKLFLDRQELIDQQMAELDQAIAEELRPFQEAVQRLAEVPGYGVDSAQQVIAEVGPQAATFPSAAQMASWVGACPGREESAEVSKTNRSPKGNRQMRRVLTQVAHSAVRTKGSVFQILYYRLLPRLGQNKAIWAVAHRLCRLTWKILHQGVVYKELGQRIDPKLIKQRTNKLIRQLRTLGYQVQLTPLSAGGATV

SEQ ID NO: 474193 - protein, 386 aa, unidentified
MSIVMGIDQHRAQITAEWIELETGEIGRARVRPADRTGVRRFLARFAGQQLEVATEATTGWRFLVEELRAAGATVHLAEPAETAALRGNKKRAKSDRADARHLRELLLAGRVPESWIAPDHILDLRARVRLRHTLIDQHCEWQQRIQAVLYHHGCPRRRGLMVGDGRDWLAVQPLPDTAREQIMVALAMIDALEVQIAPLDRELRAYARAQTGCKALIDAYYGIGELTAVTVIAELGDCQRFANSRDAVRYSGFDITVYQSDKHRAPGHLSRQGPPALRWALYEAAQVARNPRSPDRAYYEQAAEHLGGNRACLALARKLLKRCYHTLRELGDDALAPPVEQTRARTRSTATRRPATVPAGKRPAKPGESACAGRLTRPSTAPRRS

SEQ ID NO: 474194 - protein, 452 aa, unidentified
MAKKGKRRCDTLPVLHPDAAGIDVGASELFVAVSADRDPHPVRSFPTFTRDLHALADWLEQCGIHSVAMESTSVYWIPIYQILEARGLEVYLVNAQHVKNVPGRKTDVSDCQWLQYLHSVGLLRASFRPPGFICAIRSLWRHRSSLIQMAAEHVLHMQKALDQMNLQIHRVLNDITGVSGLKILDAILAGERDPLTLARLCHGGVKNSEDTIAKSLEGDYRPEHLFALRQSLAAYRYYQNLVLEVDQEIKLQLGELQTAATAERTTPARTKASAYQRRRYEPKTFDLRGELYRVFGVDLTNVPGISAITAQTILCEIGTDVSRFRNASAFASWLGLCPEKKVSGGKVLFTKSRRVRSRVATALRMGAQSLHHAKDYLGEFFRRITRKLGRPQAITATAHKLARIVYHLLGTKEAYNESVFHKSEADTIRRAEYRLRRQAAQLGFQVIPAENG

SEQ ID NO: 474195 - protein, 328 aa, unidentified
MMNIIIGIDVSKATIDCAWLRDIETSKVKTKVLKNKAEGFQSLINWAELNTQQPLSTIRFVMEATGIYHEALAYALHDAGAEVCVVNPAYIHNYAKSLGKRSKTDKKDSIVIARYGAAHSLELWQPEADEIRHLKALIDRHEAIEKDLQRESNRLEKAEITQVSAEVISSINTVIIELTKEKNRIRQLIDDHIDQSPTLKKDATLLKSIPGVGPVITQRMIALIHSRKFISARQCAAFIGLNPVMRESGSSVRGRSRLSKMGDAKIRAKLYMAAVVAIQYNPDIKRQYERLLKNGKSKMAALGAAMRKLVQICFGVLKHQTPYQPQTI

SEQ ID NO: 474196 - protein, 400 aa, unidentified
MLSIGIDVSKGKSTVCGMKPGGEIVYAPFEVQHTREGMLELVSLLRSSGEEVRAVLESTGSYHCPVVAALLENGIFVSVVNSLRMKRFCSQSIRKVKTDRIDAMQIALYGLAYWQELQPARLPEDTYRELQLLARQYYQMTSLLIKAKVDFNAICDQVLPGMQELMSDHAGRHKLSDFVLRYRHTTHILEMGETRFRKDYCKWAEKKGYRNCERMAALIFATAQNGIPVLPNAPSTQIVITEAIRVLHTVEASRDAILTQMQALAKTLPEYSLVREMPCIGDTLAPRLIAEIGDVRRFHSKRALIAYAGIDAPPYQSGKFRANNRHISKRGNRYLRKTGYEVMQSYVMHKPANDPIFTFIEKKRGEGKSGKLAMVAGLNKFLRVYYGKVTELYRSLPAIE

SEQ ID NO: 474197 - protein, 330 aa, unidentified
MTMTPTQQTYNHVVAFEVSKEVLVVHTLPADEQCTIANERRAVRRILKAQLKRNRKERLGPMLIVCEATGGYERHVLDAAIDLGLPVHRAHGTRVRFFARYRGLIAKTDPIDARLLAYYGAKTDKLRLYEPPPPETVALRALHARRTEIQQMMIAETCRLDQAHHKSVVKSLKAHIAQLKSALEAIEDEITQLLRESATLKKKVELMRTVTGIGPVSAMVLLAYLPDIGSLTKGEVARLSGLAPINNDSGKKRGPRHVEAGRTAIRRALYMAAVVAMKANPVIKRFADRLRGKGYPFKYVAVAVMRKLVVILNAVLRDGQRWKGAQAASA

SEQ ID NO: 474198 - protein, 343 aa, unidentified
MDIIATIGLDLAKSVFQIHAIDSSGDVIVRRALRRAKLLDFFRKLTPCLVGMEACASAHFWARHMRACGHDVRIIPPIYVKAYVKRSKTDAADAEAICEAVTRPTMRFVPIKTPEQQAAGMVLKTHDLLVRQRSQTANAFRAHMSELGVVAAAGMASLAKLAGAIRDPEYRDIPDFARQALLEMVQQIDTLSVRIERLDRDILTCVKEDETARRLTTIPGVGPIIAATVRAAVHDAHGFRTGRDFAAWTGLAPRAHSSGGKERLGSISKRGNRQLRTLLIVGATSIIKLGKRGVKLPRWLTGLILRKPYKLVAVALANKMARIIWALLTKGGVYKKSPVAIAA

SEQ ID NO: 474199 - protein, 394 aa, unidentified
MLYVGIDVAKRSHEVILLDDAGEARGKPFSIPNSHAGLSRLIDRVEQANPEQQPVVFGLEATSHYWLALYSHLRKCGHEVIALNPLRTSAYRRLQIRPVKNDRRDAWCIAEVLRLEPIVRTTLASDAVLGLRHLSRLRSEMVDQIADQKRRVVGVLDQVFPEFGTLFSDIFGTTAAALLQEHPTPEEMAELDLDQLTSLLHKHSRGRFGRAKAEQIQEAARTSFGVTLALDALTAGLQMLLAQIRFLQEQVAELEERIAGYLEQVPQHLTSIPGIGSVLAAAILGEIGDIRRFKNGSALVAFAGIDPRVFQTGQFVARSTRMSKRGSRYLRRAVWQAAQVAARDDPALKPAYEEKRRAGKHHFAAVGAVANKLVHIIYAVLRDNKPYEPAVRQM

SEQ ID NO: 474200 - protein, 350 aa, unidentified
MRTEYFITMDTHCRTTDACVKTGHGKLVRRAHLSTGIPQLRDLIESFPRPRRLSFEESSMAGWLYRNLKQHVDELIVCDPRRNAYVARDGDKDDPIDAEKLNDLYRGGFLKSVHQLDSIEKVAAKQIVGMYHDRVAHRVSEGNRLLALGKRWGVMLQRSRLLREDGKAWLKSSLQNATPAEIVELAEDLRQGVVRAVEQEELLYAKVCRIAAADKMMSRVAELPGYGPLRAATLISHLDTPFRFKSKSALWKYVGIGLCREKSGDGLAITKVEQSCNRLLRNVVIGAARTAIQQKENVFARRYARWIQAGVSPRNARRNVARDQVTVVWGMWKSDSAFDEKLICDLSAGG

SEQ ID NO: 474201 - protein, 369 aa, unidentified
MISVGVDVSKEESTVCVMKPYGEIISKPFELSHTEKDLSELANMLLRLDGEVRVIMEVTGVYHLPILMYLKEQGFFVSVVNPYEMKKYRSQGLRRVKTYKQDAITICKGLDYWYQLKNYEANGAIYEELKLLGRQYRNYMKMHIEGVQNLAHLLDCVMPGIKLLLGGWNESSGKNKLSDFASEYWHFDNITKKSERQFSANYIKWAKKNGYHQNQDKAEKIYLLAKSGITTISSGNPTTKMLMQEAVKVLKEVDNTLKKILTQMQLLAKSLPEYAVVRAMGGVGEVLAAKLIAEIGDVRRFHHGKSLIAYDGIDSPPYQSGQFTAQNRRISKHGSAYLRKVGYEVMQSLKTHDAPTDDCVYQFILKKRT

SEQ ID NO: 474202 - protein, 355 aa, unidentified
MNDAKYIGMDVHQATISAAVRDSSGNLVMEATIETKAETIFAFVHGLRGSLRVSFEEGTWAAWLHDLLKPHVTEVLVCDSRKNALLRVGNKNDREDARKLSELLFLNKLHPVYHGETGIRTLKELARSYLTITRDLTRVMNRLKAIYRGWGIPCSGQQVYAPRYRAEWLAKITEAGVRRRAEIYYQQFDALAALRQEVRRELLAESRKHPAMRLLRQIPSIGPIRAALLIALMQTPHRFRTKRQLWAYCGLALRTYDSGEYRFVGGQLKRSKKAATIRGLNKNYNHDLKNIFKGAATRAAATAGPFQNFYEARVASGMKPPMARLTLARKIAAITLLVWKKGVCFDAEQLKQQAA

SEQ ID NO: 474203 - protein, 381 aa, unidentified
MKTNSDTTRTLYFGLDVHKEQTVIAILESDRDAEPRQYGSIATTQHALERAMRRIAKQQHRTLTDLHVCYEASGCGFWIARRLLQMGVRCDVIAPSLIPTRSGDRVKTDKRDAAKLAKMLRSNDLVPVHIPDAPDEAIRDLCRARTDAVDDLRRAKTRLLALLRRLGYRYDGKTHWTHSHRNYLRDLKMPDPAHNRVLEDNITTIDFHEARIARLEQEMLQLLADWQRKPLVEALMAFKGFQLVAAMVTVSEIGTFSRFEHPKKLMAFLGLVPSENSSGKSRKQGGISKCGNPHARWLLVEQATHYRVPPKISPQLSERQRDTPRWIKELSWKTQTRLSHRFTLLRKRGMHHNKIKTAIARELTGFVWELGTRFESKQAAI

SEQ ID NO: 474204 - protein, 435 aa, unidentified
MRRSETALKGEVYMSYCPVAGIDVSKRFSDMCILSPDNKIFAQEKIYHDETSINRANALLQKAERLFFRKPVIVMESTSHYHLILFQFFSEHGYDVIVVNPLQSNSMKDFSIRKRKTDRVDAFKLAMMYRTKTLRPSQIPQTATRALRQLCRHRAELLNDVSSYKNRLTALLDQTFPGYDKVFSDVGGVTSCAVLVRFPTPTILLVEEESELVEVIASASKSGYSFAKKKAGLLISAAQKAQAWGIHSCADETLIVCTIQMLRTLSESVLQIETAIDNLLAQIKEMRNNVSLLQSIPGVGSHSAALLLGEIGDISLFKKPKQLAAYFGLDPTERQSGSFRGTKNKLSKRGSPYARAALHMGVVNSICKRGKDSAANPVLLSYYEKKCKNKPAKVAQAASMHKLVFIVFAVLRDQKPFELKTPEQHAVEQGFVKAA

SEQ ID NO: 474205 - protein, 457 aa, unidentified
MTVNASPTRTTAGPGVVRVSVGIDAAITAKHHVSVRETNADGSVSMHRFVVPPTLTGLSQLSRRLARYPGVVAVAEPTSMTWLPLALSLSSGGGRLALVGTRHSARLRGAISGKNKSDVIDADVLARADEVFDLPPLVLPSPAELALRRAVTRRASAVIDANRCWRRLVSLARWAFPDVWTAFAGSLATAKAVLGRWPHLDQLACARRASLTAVVAEHTRSVADVPDRVEQIRSAARDWAQFWAGRLDLDALAWEVSEHLTDLAAGNDRVDRAAEQATMYWERLYGDDALLVSLPGMGPVTAPAVRAFLGDGSRFDTAKAVANYVGITPSNWSSGTVNQPSRAITKEGPAALRLAFYLAGNAARRTDPQLAALYHRLMTRAGHCHSQATIAVARKLAERTWTVLTRGTPYRLQDPDGAPITSRAAKVLIAQQFTVPNEVRERARAHTAATHRSKLTR

SEQ ID NO: 474206 - protein, 385 aa, unidentified
MSAHPTPIQAAAQLQANTLFASLELSKARWLVTVSAPGSDKLSRHQVPGGDGQALLELLWRLQAAAARRTGAPVMIIVIQEAGLDGFWIHRLLVQNGITSHVVDPASIAVNRRHRRAKTDKIDGVKLLRTLMAWMRGERQVCTMVQPPSPEDEDRRRLARERARLLKERIQHTNRIKGLLSGQGIPDYDPLHRDRRRCLAALTTGDGRPLPERLKAEIGRELDRLEMVVSQLTVVERERDALVARTAEADACAAPAALARLRGVGPELAALLWLEALFRRFDNRRQIAAYAGLTPSPWQSGGIDREQGIAKSGNPRLRRAMIELAWFWVRHQTGSALSRWFVERVGTARGRVRRIAIVALARKLLVALWRYVTQGVVPQGAVLKA

SEQ ID NO: 474207 - protein, 319 aa, unidentified
MAQNDLIVVGIDVAKDKVDACIRALALRQTCPSTAQGHRKLVAWLRKHKVTKAVMEASGGYERDWARTLRQAGIEVRIVDPKRVRSFALSAGRLAKNDVIDAEMIAWFAETFSDAPGQKYDAAREELQTLVKARLSLIDLRMRLVSQSEHAAPGLVQKAHVHILKSLASEIAKLEAAISAKVKSTPDFAERADIIESVPGFAETSSANLVAGMPELGKVSKEIAAALLGAAPYDDDSGKRRGERHIKGGRRWVRNAIYMPCVGAATQNNPVLKAYYQRLIAKGKEPKVALVACMRKLIIILNTMIARRQKWDPSRYAVS

SEQ ID NO: 474208 - protein, 375 aa, unidentified
MKEKVRFLGLDVHAETIAVAVAEQDGEVRSLGTIANREESIRKLVKKLGPVEQLRACYEAGPTGYVLYWQLTQLGVECAVVAPTLVPVKVGDRVKTDRRDAAKLARSHRSDDLTAVWVPDEGSEALRDLVRAREAAKQDQLRARHRLSKFLLRTGRRPAMGLKAWTERYLAWVQQIQFSQPAQEFTLLDYLHEVQHMDERVQRLEQAIAEAVKLASPQVQEVIRGLQALRGVAHLSAVTIAAELGNISRFESARKLMGYSGAVPSEDSSGKRQRRGNITKTGNAHLRRIAVESAWSYRFRPAIGPRLRQRQEGVPEEIKEIAWKAQIRLHKRYLKLMAAGKDKQKIITAVGRELLGFVWAIGIKAETAGKLQMAA

SEQ ID NO: 474209 - protein, 347 aa, unidentified
MKILALDLGKYKTVGCAYESESGAHQFQRTFTTPADLQRLVQEIKPDRVVIEVCSIAGWVCDLMGRLGVEVQVANTSDDAWRWRKVKQKDDRRDALKAARLSAVNQVREVYIPQITVRQWRALITYRRHLVGRRTKIKNHIRDLLVREGQILARGSRCWTKLGQELLSSMARPLAEVGVAELWRGELWEELQQLQMVQARIASVEEKLNAIGEADKRVQLLRTIPGVGPRLAEAIVALLDQPQRFRKASQVSGYIGMVPKAFDSGESERRGHITRQGSGLVRSLLVEVAWAGLRHNAWMRQTYQRLSGGGKKVRKKIAIVAVGRKLLVRCWAMLRDNCAWDWQPQIT

SEQ ID NO: 474210 - protein, 411 aa, unidentified
MVKENFIYVGIDLHKETHTAVMIDCYNQKLGEITFPNRPADFPKLVTKVKKCNTDAKEVVYGLENAYGYGRPLAVWLIDKGYFVKDVNTAISHRQAKHRGAMYRKSDSDDAEAIALATLNMLDKLPDACPNDAYWSLGQLVHRRDNIMKQRTRLVNQLHEQLCIAYPSYKQFFNDISRPTALYFWEHYPSRKYLKGKSVEDLRAELVPVSHNKCSTRTCEKILDAIAGDKVKNNAYQDARDMVTLSIVSDLQHYDKQLAEVDKMLEQMYKMLGCTLTTIPGVNVITAVKILAEIGDIKRFSNANKLAQFAGIAPLHLSSSGKGKDLATKQGNRRLQATIYFLAIQMVQISSKGTPRNPVVRAYYEKRKAEGKTSQQALICISRRLISIIYGMLKSGTEYRMPVVENAGENR

SEQ ID NO: 474211 - protein, 334 aa, unidentified
MSKVTTVGIDLAKNTFVLFGLGPKGHSGWKRKVRRKQLLDQLVRLEPCTVALEACGSSHYWARQIRALGHQVELLPPQHVKGYLRGQKNDYNDAQAIAEASEHGRIRPVPIKDVEQQDDQMLHKLRQGVSKDRVRISNQLRGLLAEYGVIMPQGIAAQRRELSLALEDADNGLSERARQLLCRQYQRFLEVEQELAWYDQQVKQRSRQDETCRRLQAIPGIGEIVASLLKGWMVDGRQFRRGRDAAAALGLIPCQNSTGGKDVLLGISKRGDPYVRAQLVHGARAVVARADGKADRLSLWLQRLKALANKLVRIAWVIIARGEHYQPSEQRLAV

SEQ ID NO: 474212 - protein, 388 aa, unidentified
MAQSSDTRSHPIALDFDSTLVLAIELSNTSWVLAAQVPGLPRVKAKQSIEPTAEALLAAIDGYRDRARAAGKTVQRVVATYEASWSGFWLARWLARRGVETHVVQPSSVPVDRRARRAKSDGIDAELLLRTLLAWLRGEPRVCSMVPIPDEADEDERRRVREREDLLAERVRLVNRIGAVLATLGVRDYNPLRRDRRERLDALRTALGDPLPPHARARILRMLDRLELVCAQIAELERERDAVLDEEAPGKAEAMIQQLAGLRGIGVQSATVLVREAFVREFANGKALGSYAGLTATPFSSGGTEREQGIDKAGNRRLRAVMIELAWLWQRYQPGSAQVIWFRERVGGTGKRMRKVMVVAMARRLLIALWRFATQGVVPEGAVTKPVS

SEQ ID NO: 474213 - protein, 376 aa, unidentified
MEKPSAIADVTWVGMDAHKSTIEVARLTGSSSRVDAWQLEYTPQAVRRLTRRLRRDAGAGEIRCCYEAGPIGFTLKRLIEDSGQGIVCEVVAPSLIPVKPGERVKTDRRDARKLALLFRACTLTEVHPPSPDQESIRDLCRCRESAKQDLLRARHRLSKFLLRRGFIWRDGQAWTVRHWAWIRSVEMGHWADRQTLESYQQVIEQIVARVRDLERAIEEAGQLEPYRTAVHALRCYRGIDTITAVTLAAELHDIGRFHTPRELMAYLGLTPSVHSSGGRTRRGGITKAGNAHARRVLVEAAWSQRHKPGIGVTLRKRRDGQPAWAITHADRAMKRLYQRYTRMLHRGKPQGTIIVAIARELTGFVWATLRTSAAVA

SEQ ID NO: 474214 - protein, 407 aa, unidentified
MDLLYPRCAGVDVHKDMVMVRVRCVSEPRVDETRSFATTTGALTELQEWMSAQGVTHVAMEATGVYWKPVWHLLEEHFELILANAQHIKNVPGRKTDVNDAAWIADLLAHGLIRASFVPPAPIQELRDLTRTRKQLVREIAQHSLRIQKTLEDANLKLGSVLSNILGRSGRAILGALIAGERDPEKLADLAQGHARKKRAALIEALHGRITAHHRSLLKIHLNLIAALEQALEHVDTEVGKALAPIQEGARLLTTIPGVSDLTAHIVVAEIGVDMARFPTAGHLLSWATMCPRNDESAGKRRSTRTRKGAPWLKTALVTAAWAAVRVKGSYLQGQFLRLKARRGAKKAILAVAASMLTAVWHMLKNSAEYKDLGADHFARRDRSKAILRLVRRLNDLGCEVQIAQAA

SEQ ID NO: 474215 - protein, 360 aa, unidentified
MKESSRGQSLHARNTGSSSPLRIVHPDAGGIDIGSRQHYAAVPADRDAEAVRCFGCLTPDLHRMARWLKACRVTTVAIESTGVYWIPVMQVLEEYGLEVYLVDARQAKNLPGRKTDVKDCQWLQQLHSHGLLSRAFRPADAICVLRSYWRHRKELVEMASMQVQWMHKSLEQMNLQLHKVLSDITGVTGMKILKAILDGQRDAVVLAQMKHPLVQSSEDTLAQALTGDWRVEHLFTLRQAVELYEVYQQKIEACDQEIERYMQSLDVRGDAKDLPSRVGGTRRKNQPHFDLRRRLYELTGTDLTSIDGIDAMTAQTVVSESGIDMSRFATEKHYSSWLGLCPNHQITGGESASTPDAKGS

SEQ ID NO: 474216 - protein, 363 aa, unidentified
MEEGKRRYVGIDLGKREYTMAIIGKDGKMSIHQGRTSIPGREALYRKMERTDKVAVEAGNLAFTMAKELTERVGSEVRVLNSAKLPFIWDAPTKTDKEDAMKLAHLVQERGDEKLPIVPLPSEKEQERRKVVASYSREIHSRTRAINQLHALFVSQGITTVVKKNLATAERREREVQVLRGIEREEAEYVLKHLELYEGRIKGLKKKIQGEAKTDEDMKVLQTIAGVGPIVAYAYVAHVGDGRRFSKGAQVSNYLGFVPRLDYSGTIQRQGHITKRGNGYVRGLLVQAAWATVVSRSGGALKERYLYMTKIQGKSKKKTIVSIGRRMTELMYSVLRNKTTYEVRSWKGPLNRPGRLAEKAIGV

SEQ ID NO: 474217 - protein, 342 aa, unidentified
MEQIKVIGLEIAKNVFQVHGVDGDGEVVVRRQLKRARVLPFFASIEPCRIGIEACATSHFWARELGALGHDVKLMPPAYVKPYVKRQKNDAGDAEAICEAVTRPTMRFVPVKTVEQQGVMVLHRARELLMGQRVRLSNAIRGHMAEFGLIAPIGRNGLQRLIETIDDETDERVPTGARLCIKMLVDQLLLVNVQVLENDRQIRSSARSSEIGRRLMEIPGIGPVIASALIATVPDPKAFRCGRNLSAWIGLVPRQNSSGGKERLGGITKQGNRYLRKMLFIGAMAVIRYAQRNGTRRPWLVQLMARRTPKIAAVALANKTVRIVWAIMMSGERYREPVAQAA

SEQ ID NO: 474218 - protein, 344 aa, unidentified
MQIASIGIDLGKTTFHLVALGERNQVLVRKKFSRTQLLAYTAKIPSALIGIEACAGSHFMGARLREQGHEVRLIPAQFVKPYRKSNKNDFKDAEAIAEAVRKENMRFVPIKTQEQLDIQGMHRVRDRLVQRRTALINEIRGFLLDRGIIFAADPQHLRKNLPAVIEDAEQNLTPRLRWLLDRMWQEWKQLELDIETMSDELERISAENELCRRLRKIPGFGPLVSTATVAAIGNGAAFGCGRDFAAWVGVVPRQYSTGGKQKLLGISKRGNRYLRRMLIHGARAVLFRVKYDTGGFGEWFRRLAQRAPRNKVVVAIANKLARMAWAVLSSGKEYQYQRLQATAA

SEQ ID NO: 474219 - protein, 357 aa, unidentified
MEFFAGVDTHRDTHSIAVVNHLGELLESFTTIANSSGYAEALARTAKYAGLIWGLEGTGSYGRPFADALIRAGHTVYEVPGVITKRHRRRLRRRGKSDPQDAHAIAEAVLRERDSLPRHLEADAEEATRLLYDRRDRYVRERTAKINRIRALALRLELDLPDDLTSVRALNAVETTLKDRPTYGYTDYEAVDEIRDLLGDLRRIVDRIVEVEARTGPFVKRLAPALLELRGCSVISAAGLIGNTGRTTNYRTPDAFASHAGAAPVSCSSGKYESFRLNTGGNRQLNRCLHNIANVQMRTLGHAGKLYYDRKRAEGKTHREAMRCLKRRLAAVVFRMLRAAQAGRESAPTANLALAIA

SEQ ID NO: 474220 - protein, 333 aa, unidentified
MVAGTLGSLHKAGSTKMTHTTITTAGIDTSKAKLDIAIHGQAACWCVDNTSVGWQQLARDLAKAGVMRVGIEATGGYERGVVRYLREKGFTVLILQPMQVRAFARVHLRRAKNDALDAILIAACTAMTDQPNRELDERLAELAGHLTFIEQIEEDIARLKTRIEHIEEPRLRRMVIADITRLKTRRAAEIGRIISALRCYSDLAHRFDLVFSIPGIGERTALALIIRMPELGRVSREEAAALAGLAPFDHDSGTHKGERHIAGGRARLRRSLFAAALPAAFRWNKALMDLYARLMARGKAHNAALIACARKLLIYANTVVQRGTPWVDRPIPA

SEQ ID NO: 474221 - protein, 430 aa, unidentified
MKSNTQNAKIEAITEKTLVLGIDVGSETHYARAFDYRGIEYSKKPFKFSNTEAGFATFKEWILDLKERHEKDKVVPGMEPTGHYWFNLGKFLQDNEMKPVLVNPHHVKKSKELDDNNPTKNDRKDPKVIAGLVREGRYMIPYLPEGVYADLRTASNIRFQLQAELTRIQNRISRWFNIYFPEYKTVYGKPDAKSGMLILKAAPLPEDILTLGIDGVNQIWRDAKLRAVGKARAKTLIEAAEHSVGSKEGSVSARMEIRMLLEDYESRNTRLQEVMVLIEELVRKIPMAEKLLEIKGVGIRTVSGFLAEVGDISRFNNPKELQKLAGLALVENSSGKHKGETTISRRGRKRLRYLLFEVAMSLVAKNPEFRELHNYYTTRRLNPLKKMQSLMAIAAKLIRVFYAMLTKGVDYDPKKMVSDIKRPAVYLQAA

SEQ ID NO: 474222 - protein, 311 aa, unidentified
MENYIGIDIAKHTFDLCCLHQKEIRRFENNTKGIRQTTRMLAKLKPKLVVMEATGGYEAMLAAELYAAGLPVAVVNPRRIRDFARANGQLAKTDKLDATVIATFAAKMQPPAQEQIDQNSRLMKALVSRRHQLIRMRTAENNRREHAIDKVIAQSLNRMLRTIDREIQKIEQMIREQLASMPELKTRAKILDSAPGIGETTAAMLVTEVPELGRLNRRQIAMLIGVAPINRDSGTFRGKRMTGAGRRDVRARLFMPTLVATRHNPVIRRFYERLLAKGKTKMTAIIACMRKLITILNTMLARNEAWNPKFA

SEQ ID NO: 474223 - protein, 354 aa, unidentified
MKYYTSTTQFNCGIDLHARQMYVCVMDRDGKKLVHTNIRNNDFAFFLKLVAPYRHDLTVCAECMFGWYWLADACQEAGLNFVLAHALYLKAIHGGKNKNDRIDSEKIAHLLRTNLIPPAYVYPAAKRPLRALLRQRILYVWRRSELLARIQSHQLAYNRPTLPQTRSNRDRWEEKLLTQEDNPIRQLALQNDLALIRHYDTQITALEAQLQRLTKAAAWRDYTLLQTVPGIGEHLGLTLLYEIGDIHRFPTVKDFLSYCRLVKGTVASAGKLKGLRGAKLGNAYLRWVFGEAAVIAKRDHTVIGPLAARLEAKLGNKFKANTVLAIKLARAVYFMLRDHTVFDPERLVAALTHK

SEQ ID NO: 474224 - protein, 317 aa, unidentified
MEVVPIFVGIDVSKARLDVAIVPSGERESVVNDESGITSLIKRLVGLNPALIVLEATGGIERAATRGLASAELPVVVVNPRQVRDFAKATGQLAKTDRIDAWVLARFAEAVRPAIRPLPDEMTLELRALIARRRQITEMIVAERNRLSGASKVVRKRIEAHLRWLQADLKRADKDLDQSIGQSPLWQESQDLLKSVPGIGPVISRTLLAELPELGLLNPKQIAALVGIAPLNRDSGTLKGRRTIWGGRATVRAVLYMAALVASRRNVVIRAFYKRLRVAGKAPKVALVACMRKLLTILNSMIKHKTRWSETFSVQTS

SEQ ID NO: 474225 - protein, 367 aa, unidentified
MEKSSKVFVGMDVHKESIDITLAEQGGEVRRLGQIGGDRGSLLKMVRKQQSKGGERVFVYEAGPCGFWIYREITALGQACMVVSPALVPRRAGDHVKTDRRDSERLASLARAGELEAIHVPDIRDEAIRDLVRGRDDAVIAQRRVRQQLKALLLRNDIRYVGKTSWTGAHRRWLSELKLPEPAQQIAFEEYVDAIAVATGRIERLTRAIETEVLTWRFAPVVGALQAMRGIQFVHAVTLVAELGDLTRFGSARSLMGYLGLVPREDSSGEHRRQGSITKAGNSYARRALIEAAWAYRYPARVTRIIATRQTGLPKAACDIAWRAQLRLSAKYRRLAARHLHHNKIVVALARELSGFVWAIGQSVKLT

SEQ ID NO: 474226 - protein, 396 aa, unidentified
MYYLGIDIAKKEHEAGLIDQQGKSIGKTLLISTAKPGSDKLLTFINKHQLTPDNCVCGLEATGHYWISVFTFLSQLGFKVTAFNPLQSDALRNFYIRKTKTDTRDAFLIAQVIRIDAPEATPFLEEELLQIRHLERLRYSLVDQSSDIKRKVITLLDQIFPEYEDLFSEVFGASSSELLFHYPMPEDIQSIDTDSLATFLNEASNRAYGKKRARKKATQIKESAAESFGITMGTDSFRTQIHLLLEQLSLLDRQIQQIDEKLSTLIQQQATYLPTINGIGDVTTAVIIGEIGSIKRFDRPAQLVAFAGLDPAVKQSGKFNATEVHISKRGSPYLRRAIWGAAFSASQCDPALSQFYNKLRDNGKGHYVAVGAVARKLTHIIFAILRDNKPYEPHMK

SEQ ID NO: 474227 - protein, 354 aa, unidentified
MSQTQNAAIAVVGIDIGKNSFHIVGHDERGAIVLRQKWSRGQVEARFANMPPCLVGMEACVGAHHLSRKLNSLGHNARLMPAKYVRPYSRGQKNDFRDAEAIAEAVQRPTMKFVATKTAEQLDLQALHRVRERLVSQRTGIINQIRAFLLERGIAVRQGQRFLRAELPRILAMPPDVLSPRMVRIIEDLAGDWRRLDERVESLSNEIETIARQDAGCERLMSVPGIGPIISSAMVAAIGAGDVFTKGRDFAAWLGLVPKQISTGDRTILGKLSRRGNRYLRVLFVQAAWVVLIKPKIWERHGLKLWIEAARKRLHHNVLAIALANKLARIAWSVLARGRAFEARKIDQAANQSA

SEQ ID NO: 474228 - protein, 365 aa, unidentified
MKKVSTAAAKQSRNFSEQELTIGLDLGDRSSWYCVFDETGSVLLEQRVSTTPKAMREVFGGMPRSRIALETGMHSPWVSRALSELGHEVIVAHARNVRLIGESRKKDDRRDARTLARLARIDPQLLCPVKHRSAKAQADLTVIRARAGLVRARTALINTARGLAKSYGERLRGCNPRNLNPEKAQGLSPELQAALEPLLAAVESLSDRIREYNERIEQLAQQSYPQVALLKQVKGVGTLIALTFLLTLEDAHRFRKSRDVGCYLGLQPGRRNSGRSEPQMHISKEGDPYLRTLLVQGAQHILGPFGADSDLRRWGLKLAERGGRNGKKRAIIATARKLAVLLHRLWVSGEAYEPLRNSSQVPAAA

SEQ ID NO: 474229 - protein, 416 aa, unidentified
MEIVYERVAGIDVGKKEIAVAVRTPGPGPGQRRQVIRKYKTFWQALLEMSGWLLKEQVTHVTMEATGIYWRPVFHALCEVTDVEVLLVNARHVKNVPGRKTDAKDAEWLAQLLECGLLRGSFIAPAQIAAIRDLTRYRKKLIASRGSEVQRLSKVLEDGGIKIDSVASSLTTASARHMVEALIAGERDPKVLAQLAMSRMRGKIPELEQACVGRFGEQHALLARLHLEHIDHLSLMIDELDHRIQTMTVPFAAQTQLLTTIPGIGERAAQVIISEIGVDMSRFPTAAHLASWAGLCPGNNESAGRRISGRTRKGNREIRDLLTECAWSAARTNTYVGARYRRLHRRFGKQGGGKAAIAIAHTLIVIIWHVLHDNTDYHDLGADYFTRRYDNPEAKKNRLIRELHNLGLQVEVHPAA

SEQ ID NO: 474230 - protein, 425 aa, unidentified
MSERIDTDTLQVDDMHVVWPRAAGLDVHKMCITAAVRLCEAGRGLARTAVREFSALPDGLRAMTDWLRSHCVTAAAMEGTGVYWKAPFEALEDAGIHAELFHAQHVKQIRGKKTDVNDSLWLARICQFGLALPSYVPSRQFRQLRQLTRYRRTLVAERSRNRNRVHKTLDHDGLRLGGILSDIFGVNGRHILDGLVVGHPPDRILAGLTNHVHAKLKPLAEALAAALDPLALIKLKMQIEALDRADAAIAELDTRIRTELAEYQRPLRLLQTIPGIDVGSASTILVEIGPDLGAFRQARHLGAWAGVAPGNNTSAGKRRSGRARQGNSTLRATLAECAHGAVRTKNSQFYGYHRALAGRIGYKRAILATAHKLLRVIHAVLRNDRPYTDPGIDYQQMVVERNAPRWLRMLRQYGFLEEARATARS

SEQ ID NO: 474231 - protein, 409 aa, unidentified
MDQLIERCCGLDVHRDTVAACVRVPGPNGKQRHEVRPFGTTAVELLALRDWLEAHGVTHVAMESTGVYWKPVFYVLEEAFTCLLVNAAHIKQVPGRKTDVKDCMWIAQCLEHGLLRGSFVPPAAIREIRDLTRHRKVLIQERTRAANRVHKLLEDAGIKLASVATNILGVSGRAMLEALVHGTTDAEVLADLARGKLRKKLPALRQALAGRFRPHHAFLVSQLLAHVDYLDEAIATVSEEVEGRLAPFAAQLTQLDTIPGINKRTAEVIIAELGVDMSCFPSDRHLASWAGICPGNNESAGKHKSGKTRKGNRWLRMTLIEAAAAATRTKDSALQARYRRVMRHRGHKKAVVAVAHAMLRAVYHLLAEGTTYREPGADYYDRRHTHRVTRRAIQLLERQGYRVVLEPAA

SEQ ID NO: 474232 - protein, 342 aa, unidentified
MDHFAGLDVSVKETSICIVDETGRIVREARVASEPQALLKVLGNPIYRFKRIGLEAGPLSQWLFSALAEAGLPAVCVETRHMQAVLKAQINKTDRNDARGIAQMIRAGLYRPVHVKTLRSQKLRMLLTHRKLLQSKAIAIENDLRGTLRNFGLKVGMVGKARFEARIQELVEHFPDLEVLVEPLLIVRRALREQIVLLHRRLLAIVREDEVCRRLMTTPGVGPVVALTYRATVDVPARFRKSKSVGAVFGLTCSKYQSGEIDWSGRISRCGDEMMRVMLYEAAQSMLRSKKWSWLKAWAMQIARRRGMKKAIVALARRLAVILHRIWIDGTEFHWTRETAAA

SEQ ID NO: 474233 - protein, 376 aa, unidentified
MKRHKPLKVVRNVSPLLNLQDHGQFVRTLILFSVWIWPVITSALTGFTIHIKSKKIMREYQFIGVDISKDSFEVFGLKSSQNSFSNQRKGFTSFSNKLSANSWVVMEASGPYFHPLACYLHHQGFRVSVINPLIIRRFIQMQMERTKTDKKDAFHIYSYANMQSDKLKVWIPDSEEMVTIRQMETLLVRYKKQRGSANTQLMSFQAAGKVSIEISDAVKKEVKLLDKQIKALEEKLEILITKSYPGLYENLKTIPGIGNKSASLLIIACRGFHNFNNHRQVISYLGLAPKIYQSGTLKGRSPICKMGMGHVRAVLYMAARAARKGNKVCKQLYERLVAKGKPHKVAMIAVVNKLIKQVFAIAKSGVAYQHDYVLSH

SEQ ID NO: 474234 - protein, 405 aa, unidentified
MNSLWVGVDAGKQHHHAVAIDADGTRKLSRRVANDEASLVELVDTVGRIAMDGLVTWAVDLNSGGAAMLIAVLLARGEQVLYIPGRIVHHAAGGYRGDGKTDAKDAAIIADQARMRRDLQPMRVDDEISSELAILTSRRTDLMRDRTRAINRLRALLSMYFPALERALDISNVKGAIILLTGHQTPDGLRRVGHARLESWLRKNKAYNASGLAQLAFDAARSQHVRVPGQDAAGATVAKWAHHIRYLDREMAEVDRDIKTRFRRHRKAAVIESMPGFGPLLGAELLAATGGDVSVFGTADRFAAVAGLAPVPRDSGRVSGNIHRPRRYDRRLLRTAYLSAQLSIRSCAESRIYYDRKRAEGKRHTQAVLALARRRSNVLWAMLRDDTPYRPGPKPAQPPPARAAA

SEQ ID NO: 474235 - protein, 391 aa, unidentified
MVDNSLIGKSGVGEASVASRANTSRRREIVRAQVFKAVTEQDPRRHRGTSPNSRLNRQRPTRSASSHLQVREKTMFESVYVGIDVAKDTFSVACCPAVLKTSLPNTPQGHHQLRQNLQKFSIARIVLEATGGYERPIVAELLEAGLPVVVANPRQVRDFARGLGQLAKTDSIDAEILAKFAQLVQPAARPQKTAQISDLAELVHRRRQLNDLRTQESNRLSLVHHREVRNSVQRMLKMLDRQIAEIDELISRHIRSNDDFRQKDRILRSTPGIGPQTSAMLLAQMPELGSLNRQEAAALAGLAPWDRASGKWLGKGHIWGGRKDVRSILYMAALSARNCNPVIRQFAQRLEQEGKAFKVVITACMRKLLIILNTMIRNQSLWTPKIFLKNT

SEQ ID NO: 474236 - protein, 346 aa, unidentified
MRIIGCDYHPSWQQVCWMETTTGETGEEKLEHGTGEAERYYRRLPGRALIGMESTGNCPWFVEMLGKMEHELWVGDAGQIRASEVRQQKNDRRDAALILKLLLEGRFPRIWVPTGEEKDLRQLLLHRHKLVRMRATVKTELQHLAMNQGVTRKRKLWSQAGEKALRELALRPWGSRRREDLWKIREMLDRQIGPLEEAVAAEAEKNETARLLMTQPGVGPITSMAFVLTMGDVKRFPRGKQVASYLGLIPREYSSGGKQRFGSISKQGNRFMRMLLVEAAQSAVRCDPGMKNEYMHRCHRKAKGVAKVAMARKLAIRLYWMLRTNTAYPEVVGVESSPRVPLVSAS

SEQ ID NO: 474237 - protein, 362 aa, unidentified
MTKNAVAAAVHAALNAEHPVGRETPRAAGAEEPGPRQEPATPVVAPPLPAECWVGIDIAKAHLDVATWPGLDRWRVARDDAGLMALTAWLRTRTPLLIVLEATGGLETPVVTALVEAGFPVAVINPRQARDFAKATGRLAKTDALDAAVLAHFGHAIRPEPRSWKDAEAQALTALIQRRRQVVEMLTAEKNRLASAHPHVKPDIEATIAWLEQRLQDHDGDLQQRLRASPVWRAADDLLRGVPGIGPVTAATLLALLPELGTLDRRQISALVGVCPFNRDSGQSRGRRMIFGGRAGVRAVLYMATVTASRCNPVIKTFYQRLRAAGKPAKVALTACMRKLLTILNAILKAKTPWQPPAECKP

SEQ ID NO: 474238 - protein, 355 aa, unidentified
MNSEKYIGLDVHQATISVAVMDSMGKLIMESILETKAATILEFVAGLRGTLSVTFEEGTWAAWLYDLLKPHVDELVVCNPRKIALLKDGNKSDRIDARKLADRLRLNDLKPVYHGETGVRMLRELARSYLNLVKDQTRVMNRLKAMYRSWAIPCAGRDVYYARHRAEWLGKIREAGVRRRAEHLYQQLDMLQHLRQQARRELLAESRQHPITAKLRQIPSLGPIRSALAVALIRTPHRFRTRRQLWAYSGLALETRTSGEYRCVEGQIRRSKKQISIRGLNKDHNHDLKGLFKGAATRASVQPGPFQDFYQRSLAKGIKPTMVRLTLARKIAAITLTLWKKGENFDAEKLKSQAA

SEQ ID NO: 474239 - protein, 343 aa, unidentified
MEISVLGVDLGKNVCSVVGLDASGAVVMRRKVRRETLIALEKLPACIVGMEACCGAHHLGRVFSAHGHDVRLMSPEYVRPYVKAQKNDDRDAEGIAEAATRPTMRFVELKSQDQLDTQTLHRSRDRLVGERTALINQLRAILLERGFVAPQGKRKLEGFLALLMDEQGGAGLTPRIILLVADARKQWAELDRRIAAFDAEFVRWVKENDEARRLTTIPGIGAIVASALVAAVGRAESFDRGRDLAAWLGLVPRQFTTGGRPKLLGISKRGNKYLRKQLIHGARAALPYVAERDTPLGRWAKGLISRAHRNVAIVAFANKLARIAWAVLRRHERFAAIRTPVAA

SEQ ID NO: 474240 - protein, 385 aa, unidentified
MITIGMDVHVRNSYLHVTDDAGVRLRHGRCRNTLMDLAKFLGPLEREARQRGEPIHVVLESTTNSRAIQRLLTQYGEAAGIDLTAEVLDARKIRIIAESVCKCDRLDAKVLCELARSNLKLPTCYMPDDEEFALREHLRARTDLVRMRTMFKNRVHAVLHRRGILAPTATLFTKTGRTYLAQLSLETAGREILDRYLGMMDEIDRTIDSSTASMRELMRRPRWVKPAALLQTMPGIGLITAMTILAELGNLNRFRSRAAVANYAGLVPICRSSNDKRYSGAITHRGSKLLRAVLGEAACSAMPRVPVYRAMFERIEQKKNKLVAITAVARRMLEDAFTMLKRDEAFRYVPASTASAEKTRDSCVGRPCASRTVIEGPKVATSVAG

SEQ ID NO: 474241 - protein, 343 aa, unidentified
MSEISTVGLDLAKNVFWVHGVDGSGGVVLRRQLRRGAVEKFFAQLSPCTVGVEACGSAHHWARVIGRYGHQVRLMPPGYVKPYLKRNKNDGRDAEAICEAVSRPTMRFVPVKSVEQQATMAVHTTRALLVRQRTMVANSLRAALSELGIVAAQGIKGLRELMAKLEASNEEVPEIMRAALLLLAEHWQALDADERALERQIAKAARSDREARRLMEVPCVGPIIASTVLAKVPDAKVFRSGRDFAAWIGLTGRDHGTGGKHRPGRISKQGDRMLRALLISGASAYLRHQRTRGVSDPWLRDLLARRPYKVVMVALAAKTARILWAMLVKREPYRDRASASAAA

SEQ ID NO: 474242 - protein, 405 aa, unidentified
MYNAVGIDASKGKSTVTVLQPGGRVVRKPFDVTHSLSELKKLTDYILSLDGDTKVVMESTGRYHEPLLRTLSDQGIFVSVVNAHLIKNFGNNTIRKVKSDPADSRKIARYTLDNWADLRQYSSMDTTREQLKTLNSQMSFFTRQKVAAKNNLISLLDMTYPGVNTLFDSQTRSDGSEKWVDYAASFWHVDCVRKIGLKSFTERYRAFCKRHGYCFKEGKPEELFNASLDLVAVFPKEKAYKDMIQMSIKQLNIISANVEHIRQEMDRLASTLPEYNTVMGMRGVGPTFGPQLIAEIGDITRFSHREALTAYAGVDPGVNESGSFKSKSNSASKCGPARLRKTLYLIMASLLQSKPLDDPVYRFLDKKRMEGKPYHVYMTAGANKFLRIYYGTVKAYFRSLEKPEI

SEQ ID NO: 474243 - protein, 344 aa, unidentified
MNITTIGLDLAKNSFHVFGVNAHGKKLVSKALTRKQVLPYFANLPRCLVGMEACGGSHYWAREVGKLGHTVKLMAPQFVKPYVKSNKNDAADAEAICEAVTRPGMRFVTVKTVEQQSVLSLHRVRESTVAARTEQANLIRGLLLEYGLVIPQGIRAVFVEVPKIQEDAGNGLDGRMRSLLQDMADHLKALDERVERLDLMIAESNRQDARVARLEAVPGIGPLTASALVASLGNVENFDEGRSLAAYLGLVPRQHSTGGKSTLLGISKRGDRCLRTLLIHGARSVVRCAEKRQDALGAWIRQLLSRRSKNVAAVALASKNARTIWALLKHQRDFDTAYQTQAVA

SEQ ID NO: 474244 - protein, 302 aa, unidentified
MIIIRADYHPGFQQIAFVDTDSGEFQERRLQHREEAEKFYRDLAAQEMQVRVGMEASGQARWFERLLSELHFELWIGDAAEIRTMRVRKQKTDRQDAQLILQLLLEDRFPKIWVPSWENRDLRQLLWHRHRMVQARTRIMNQLQSVALNEGLRCKKRLWREHGRQQLEAFRLAPWASRRRRDLLELMDRLNPTIAELTQAIEREVEKCPPAKRLMTHPGVGALTALAFVLIIGQAERFACGKQVASYLGLVPLEDSSGNRRRLGHITKQGSSMMRFLLVEAVQVTVRSVPEWRSKYLHLMMR

SEQ ID NO: 474245 - protein, 350 aa, unidentified
MSVDPAYKVVRSGALAKEAKWKGCRVVIDGVLGIDVSKNTLDASMSSCNKVRSKSFANSPDGWRHLLGWLIGQKIRRVHACLESTGRYSLGIACKLNEAGHVVSIVNPAQIRDFARTKLGRNKTDAVDASHIREYCELFKPPPWAPPSHAHRQLGELQTIRAGIVAGLTEWKNRKNSGMVDAMAQSLADATISHFTSQLGAVEKAIAQAIDNDSDLRRKRDLLLSISGVGETLAGVVLAELPGPDVLRSSAEAVAYTGLNPRRHQSGTSIDRLTRISKIGNAVLRAALYMPAMSAMRYNPAIVALVTRLKAKGRLNPKQIVVAAMRKLLVLCFGILKTGRPFDPALAMGC

SEQ ID NO: 474246 - protein, 367 aa, unidentified
MKKGSTAAKQRVRNISGQTLTIGLDLGDRNRWYCVLDEAGRIQLEQRVRTNAKALQEVFGAMPRNRIALEIGTHSPWVSRLLSELGHEVIVANARKVRLIGESRKKDDRLDAQTLARLARIDPELLYPVKHRSAQAQADLMMIRGRAGLVRARTGLVNTARGLAKSYGERLRGCNARHLNPEKAEGLSPELQAALEPLLNAIESLSERIVEYNERIEKLAQQDYPQVALLKQGKGVGTLIALTYLLTLEDPHRFQKSRDVGCYLGLQPGRRNSGRSEPQLHISKEGDPYLRTLLVQGAQHILGPFGIDCDLRRWGLRLAERGGKSGKKRAIVATARKLAVLLHHLWVSGEAYEPLHNRNRGAVAAAA

SEQ ID NO: 474247 - protein, 386 aa, unidentified
MRVNDMSRAVVPFEQSTTLVLVVEMGAKSWLVAGNVPGVERQPMKKLEPDPAAVLGLIERWRGEAIKAGRTISRVVLAYEAGRDGFWLARWLIARGIEVHVIHSASVAVSRERKRAKTDRLDAAMLMRVFLGWLRGERGHCGMVAVPTLEEEDARRPSRERESLVNEKSRITNRMKSALARLGIRGFKAHLRKAALRLEGLRTPECTGLPANITEEFRRDMARLALVREQIAAIEKARIERLQRAPNTGPNLMVRLLARVIGIAIETADMLVREILSRNWRDRRAVARYAGLTGSPDESGTKRREKGLAKAGNARVRRGLIQLAWRFLQFQKESALTKWFRSRTEGPSGVRKTTMIVALARKLLIALWRLVTTGEVPEGVVLRPAV

SEQ ID NO: 474248 - protein, 416 aa, unidentified
MKAWQDITHYAGFDWAKDHHAVVIVNSQGHIVADFQFDHSLEGWKIFGEKTSLCPNLAVAIETSQGAAVDQLLQREYTLYPVHPVAAQSYRERKAPSGTKTDHLDAWGLADALRVDGHGWKTLQPLDSLTQQLRLLCRDEVTLIEQRTALVNQLQQALAEYYPAALQAFDDWTDGFTWEFVLAFPTPDLLVTAGKRRWEKFLHSHKLWRPATVEKRLKLFAEADQFKASEPIVRAKSQLAVSLCKLLCTLGKQLALYRKQIEALFRDHPDHDLFGSLPGAKKMLAPRLLAAVGADPSRYGSHEVLQSIAGTAPVSYQSGKLNKVHVRWACDKFLRHTMHLWAECFRRASAWGQTYYEQKRKQGMSHACTLRCLGQRLLKILFRMLTDKKPYDAELHARNQKKHGSWVLKLDNKPVA

SEQ ID NO: 474249 - protein, 441 aa, unidentified
MERFGLLFPRSAGIDVGSMLMVVSYTDRNDMINVREFNSFTQSLVELSELLQGEGVEQVVMEATGEYWKTLYCILESHGIQVLMANPSHYRNVSAQKTDINDAQWLHQLLAHGLIRSSHIATELYRQLRRYVHERKTCQDLKSDTLNRIQKTLTLMNIKFQHLISDIEGISGMKILRAIISGVSEPETLLNLVSLNRLKASPEDLVSSLEGDYQEHHIHILTSMMKAYDFHKSQMLEYETYIEATLEKLVPVSGSGEALAVIGKKKVKARKNEYHFNLRDYLESIFGVDLTAVDGLDEIGLLAILSVTGTDMRKWPTASHFASWLNLSPRPKISGGKKIGNEKRSTNNPATQAFRLAANSLWQNKGPIGQQYRKLAATKGSAKAIKAIARKLATVFYNMVLKKEAFDPKKIQQNVEIREAKRIARLSKDAANMGYTIQKVA

SEQ ID NO: 474250 - protein, 356 aa, unidentified
MSSNIKYIGLDVHKEAVVIAVLNDAGKLVMESIIETKAATLVQFLQGLRGELHVTLEEGTWAAWLYDVLQPHVHELVVCNPRRNALLKEGSKSDKVDARKLAELLRTGMLRPVYHGENGLRTLRELARSYETISKDLRRVMNRVKALYRSWGIPCGGTRVYAPRDREQWLNKIGHAGVRRRAELFYQHLDGLQVLRRQVRGEFLVESRKHKAVKVLRQIPCIGPIRAALLLALMQTPHRFRSKRQLWTYSGLGVKTRDSAQHCYVDGRLKRSKRPQQVRGLNQNHNHEMKEIFKSTAMSASRCGGPFGDFYAGLLAKGMKPEMARLTLARKIAAITLTLWKKGGRFDAEHLKAQAA

SEQ ID NO: 474251 - protein, 317 aa, unidentified
MLGIDVSKDTLVATLVDPTTRKPRWTHSFPNTEAGIRRLLARTPAAVSWVLEPTGRYSLLVVQQAQAAGRTVLIADPKAAAHYLKSLSPRAKTDRIDSVGLALFALDRSLRPYPVKSAPLEEVDQLLSARRGIAEAISRLKQQLRELPHAAGPLKQALDALAKQQTELERQIAQRTKSEPALARVAELDRVHGIGLITATSAASRLAARGFARVEQWVAYLGLDVRIRQSGKRKGEWGLTKQGDAELRRLFYLCAKSTVTRKTSPFAAQYERELKKGMKKTAALCAVARKMAKVVWSLHEHGGQYEPSRVYGAQAAA

SEQ ID NO: 474252 - protein, 449 aa, unidentified
MGKGSGITRGDRRRNAKKARLRALVPHGNAVAGLDLGEKRQALAVTGADGQVLARRSPQVSVHDLGPYLDWAVRQARAAGCAGLSVACEPTGSRWMAVQDLCAARGLPFVCVQPLVSHLAREQEDLTGDKTDEGDSGLIARLARELHCYEPERLEGAWAELREEGRRRAQLITNATAAKQLLRDKLGLVAPALLETACEPFDSATWLASLEVVLERCDADAARVTVMGFEAFAARTAAVLREWGGRRLGGTCRQLFAALGDDRGVARMRRAALRRARGALADLKYARARRARAEAGMITLLGELGVDTDRICQIPGLSPVTLAAILAETGDLRRHESSSSVVKHAGMSPARNESGGFRGQAKISRRGRPGLRLAAWRATWAVLRHCDVLAAKHAALTSRDDDSRLTAEQARVACAASLLRWIWSLMVHGTCWDARIAAGQLSHHHAIAA

SEQ ID NO: 474253 - protein, 408 aa, unidentified
MKYLKQIVGIDVARKELVVTLGRMREDLSIELCARKTFANDKNGFWSLVCWAKKLTDSSVSVRYVMEATGAYHELLAYYLDERDDEVSIILPSKISNYVRTLETKTVTDKTSADAIARFGLERQLDRWHRPSHVYATLRQLTRERNQLLDEQTVAKNQLHAELAGALVNKQSVKRLEERLALCERQSKEIVAELSAVVKADKKVGEQVVLLCSIPGIGFLTAVTLLGETNGFDLIRNKRQLTSYAGLDVREKQSGTSVKGQSRISKRGNKHIRKALYFPALAAIRCDERYKSLYQRILSRTGKTMKGAVAVQRKILEMAYTVFSTGVKYDKQYLAKQEAQATAAQSQATQAEQEKVAGQPTEELSTVAATSPAAAAEPSVASEQPQSKGMIRKEKNILQLVRKAELVE

SEQ ID NO: 474254 - protein, 338 aa, unidentified
MKLYGAIDLHSNNNVTVLTDETDKVVYQKRLTNHLPLILEQLSPYGPSIEGIVVESTYNWYWLVDGLMDKGHRVHLANTAAIQQYAGLKYTDDDSDARWLAHLFRLGVLPEGYIYPKEERAVRDLLRKRSQLVRQKTANLLSIQNLYSRNTGSSISANRIRQLTSEKVDALFTHSDRALVVKANLTVMRSLENEIRILERVVKDRIKVKPVYRYLLTVSGIGQILALTIMLETGDIRRFPQVGNFASYCRCVGSEKLSNGKRKGTGNTKNGNKYLCWAFVEAANFAIRFEPLIARYYQRKKAKTHRVVAIKAVAHKLARASYYVMRDEVPFDANRAFA

SEQ ID NO: 474255 - protein, 421 aa, unidentified
MSYRIAAIDIHKKVLMVVVVTAAEEVADATGEALEFACRRFGTGSSERSQLVAWLQQRGVVEVVMESTAQYWKPVWLDLEPHFAKLHLAQAHSNRAPKGRKNDFGDAKRLGRRLLAGELLLSFVPDAEQRNWRTLTRSKQQLVRDRVQLHNQLEALLEEMRIKLSSVISDLLGVSGRRILTALAEGEADPVKLAQLGDERLKCTQAELADALRGAPMPVHLAVLRLFLKRLKLLDEQIRELDKLVAEELKKHEEAVLRVTEIPGFGVDSAQQIIAEVGVDAETFPSAGEFSSWVGVCPGSNVSAEQNHSSRSPKGNRFVRRILTQAAQAAVRKKGCHFQSVFRRFLPKLGYNGAIWAIAHRLAGVLWKILHNGVRYIEQGNETNPRAKKRRAQKLAQALRRLGYAVTLTPISPDAPVADQG

SEQ ID NO: 474256 - protein, 351 aa, unidentified
MMIIGVDYHPSFQEIAFLVEETGEYGEQKLNHSEGEAERFYRDLHARGIHVQVGMEATGFSRWFERLLAELDFELWMGDPAEIKAKRVKKQKYDREDARLLLRLMRENNFPKIWVPSPENRDLRQLLWHRHRLVQMRTRIMNQLQALAMNEGKRWKKKLWSAQGRTELEKLPLAPWASRRRRELLELLDRLDPSIEELSKAVEREARKRSDVLRLMTHPGVGALTALAFVLIIGTTERFERGKQIGTYVGMIPSEDSSAGKQRLGHISKQGNSLLRFLLVEAAQAAARINPHWRRRYMHLAMRRHKSIAKVAMGRRLGVRLYWMWRNGCDYSSSLEFGSYVGQLGTGHGVK

SEQ ID NO: 474257 - protein, 408 aa, unidentified
MNKLFVGIDVGSRNNEVYIMLPDGEKHSSFSVQNNLGGAQTLSKRVVSAMTELNLANVVIGIEATSVYGDNLMCFLREDGSFGQFERKFHILNPKQVKKFKDIHPDLPKNDPVDAFVIADNLRFGRITNAVCLDDYRYKALQNLTRARFYAVTNLAREKQRFMNYLFMKCSGLAQDKIFSDNYGAAALAVFEEFDSPDDIVSMDVDELAAFISVKGKNRSPRPDEIAKAVQAAAKGSYRLPKTVNDSVNQVLAISISSMRAMQSQIKALDKEISRQLDNIPNPLISVTGIGPVFSAGIIAEIGDVNRFVKGQSALAKYAGLVWNENKSGMFEGQNTRLIKSGNRFLKYYLCEAAFSLVRCDTEYKRYYDLKFKEVNKYQHKRALAFTARKLVRLVFRLLKDNRLYRPV

SEQ ID NO: 474258 - protein, 365 aa, unidentified
MAKARSLVGLDVHAAKIVAAVLDAETGELQVFGMSGDVGQAAGFCAGLPRPVRATYEAGPTGYGLARELARRGVECVVAAPSKIPRASGDRVKTDRRDAEHLVRLLLAGKLHAVRVPGAEEEALRDLVRARDAVRQDLMRARHRLSKLLLRHGVRFDDGPAWSQRHRDWLATITLDWPAAQATLLDAQGAIDALCHRRDGLEREIVAMLPDSPWQVQAGRLRCLRGIDTLSAVGLCSEIGDFERFARAEQMMSYVGLVPSESTTGQQRRLGAITKTGSGHARRLLVEAAWHYRRAPRLSKALTERHDGQPPEAVAIAWSAQRRLYRTWARLEKRAKRRTIIAVAAARELTGFCWAITQIGESPRA

SEQ ID NO: 474259 - protein, 340 aa, unidentified
MPLYGGIDLHANNSVIVLLNEQDKVIYRKRLSNDLPTILEQLAPYHTEIEGVVVESTYNWYWLVDGLMEAEYRVHLANPAAMQQYSGLKYTDDDSDARWLAHLLRLGVLPEGYIYPKAERAVRDLLRKRAHLVRQHTANVLSVQNILARNTGARFSGKRIHELTKQELTTLLAEDTQVLAVTSSLMVLDCLRQQINRLEQSVHKQLHHTSAYEQLLTVQGIGMILAQTITLETGAISRFPTVGHYASYCRCVDSTRLSNGKRKGTGNVKNGNPYLAWAYMEAAQFAMRFQPEAQRFYQRKLAKSRNNMVLARKAVAHKLSRACYYLMRDRVPYEATKAFG

SEQ ID NO: 474260 - protein, 362 aa, unidentified
MRIIGCDLHARQQTLAMLDTTTGEVVKMTLTHEGNNVREFYSTLPRPVRVGIEATGSMQWFVNLMEELGIECQVGNPAVIRAAEPRKQKHDRRDADLILTLLVENRFPAIWLPSKELQDLRALLRHRHQWVRMRTRIQNALQAIALANGLRRGPSLWSRDGQNTIASLPLAPHTAHRRSELQAMYVKFESDIEKLNQRVEEQAGQRSGARLLMTHPGVGPITALATDVFLGDPKRFADGKALSSYVGIIPREYSSGGRQKFGGLSKQGNPLLRFLWGEAGTHAVRRDPELQRFYRRKLVQKGLGKARVAVARKLGIRLWIMLRNEINYNEFCRRGQKQQKSGDACAGMPGTRYGATSHRPVD

SEQ ID NO: 474261 - protein, 421 aa, unidentified
MKNSVARKMKQVPEGYLIIGVDPHKKRHAAVAITHDFTLRDRFKFDNTREGLEGMINRARLKMTDAGCRGIMFAIETGGHYWRNIAYFLDERGIPFRFINQYTLKRRREGKDLNRRKNDYRDSEVAAQLLCTGEFTESRIPQGVYAELRTAHNTYRRLVKERTRITNLIKSLLDSLFPEFVKVCKNPCGLTAATVLSTCAIPGVIASMSEEEFIALSKATKRPQLKRNKLRAIHDVAKTSIGIKAGAESLSFEISFLIEKVELIKRQVSVVERRLIGLVDEAEEGKYLLSIRGLNYISVGGLLAELGCFRAYRSAKQMIKMAGSNPTESESGGKKKSRTPMSKQGRPVLRYCAWTAVVPMMRFNDDFRTWAKRLRERPVYANPLGGREILGAALNRLLRLAFALVKNRAYYSLPAAVLVSR

SEQ ID NO: 474262 - protein, 368 aa, unidentified
MKKHNNSRKNSELTSKRAKSRGPVQRDTKEVLAELVEKLKEKLDPKKVAARSAGEEHPSGKLRPNLDRLTVGVDLGDQGSHYCILGLEGETLAEGQLRTTQEDFATFFQGLNGARVVVEVGTHSAWVQEVISSCGHEVLVANPRLMDGSKRGKRKNDRIDANKLARLGRVDPESLYPIPHRGREVRQDLVMLRARDALVAARTEIINTTRGLVKSMGTRLPKCSSRSFAHKAEETVPVEIREALLPLVRLAATLSADIKEYDKKMEELGREKYGHTTILRQVKGVGPITALAYVLTLENAQRFAKSRDVGPYLGLVPKQEDWGESQSAIRNQPSRRYDGAQAAGGEGAVYLGAVWTGHRPTTIWVAAL

SEQ ID NO: 474263 - protein, 439 aa, unidentified
MAVRKRNLEVVFPHAAGIDVGGEMHYVAVPPECCEESVRSFRCYTADLDAMADWLLGCAIDTVVMESTGVYWIPVYELLESRGLTVYLVNARHVKNVSGRKSDVLDCQWLQQLMSFGLLAGAFRPREEICALRAVSRHRQTLLEEQSRWIQRMQKALTQMNVQLAHAVTDITGATGMAIMRAIVAGERDARVLARLRNYRCHKSEEELARALEGTWRQEHLFTLGQALLMYGVYRERIADADAQLQAMLGRLRRHAGTVAAQRNKGRAKNAPNFDIRQALYELCGVDLTRIEGVDVTTALKVLTEVGDDLGRFATAKQFCSWLGLCPGTRISGGKRLSGASKRLANPVARALKLAAMGLSRSQCSLGAYYRRLAARLGAGKAITATAHKLARIVYAMLTRGEAFKVEDMQAYEERYRHRTLTYLRRKAASMGFELQPVG

SEQ ID NO: 474264 - protein, 427 aa, unidentified
MYRMAGIDVHKKKLAVVVSDVEVHGEYQFERCWFGANPEQLRLLSPWLAEHQVEEVVMESTALYWQPVWGALERYWQPICQKREGAGATSGILHLAQAQSNRAPRGRKKDFRDAERLVKRLVADELKLSFVPDREQRLWRTLTRRRYQLTRARVQLQNQLEAMLEEAQLKLSSLVSDLLGVSARRMLQAIADGESNPEALAGLADRRLRATPAQLSDALGACTELHPVYRRLLNMMLGEWKVIEEHTAELNQELATLLRPHQDAVERLAEVPGLGVDSAQQILAEVGANAAVFASDKNLCSWVGICPGDQESAGESSSHRSPQGNRQMRRLLNQAANAAVKTKGSIFEIVYRRLVPRLGHNQTIGAVAHRLCRLIWLILRKGVHYEERGPAVSQRSKQNRTSKMIRELRTLGYRVEFLNPVPSNPMP

SEQ ID NO: 474265 - protein, 337 aa, unidentified
MKQIKFFIGTDVSKGWLDMCIVLEGEVLSNERIENKQAAIRKWLKGTQKQFGYVMNSTLFAMEFTGIYNHHLLEVLHEAGANIWLVSGIEINASRGLERSKNDRQDAKLIAEYACKNLKKVRLFKKPRTAVKKLSALLMMREKLITSKHGYSVTGKEYKGFSIKEEYLIIKEYSAAMLRTIDKELKKIEDQIKDLIKGDERLLELNEYISSVDGVGLITSANTIVETNEFLDINEAKKFSNHSGVVPHSEDSGKKIKKQRVSHKACKKMKKLLHLAAMSAIRKKGELKDYYERKIAEGKNKMSVLNAIRNKLVLRIFACVNNKRKYEKNYVYSLAKP

SEQ ID NO: 474266 - protein, 317 aa, unidentified
MAMQAGRLIVGADVAKAELVIHHDNSDEVIKLKNSKADIKRWLKQQPLNTAIAVEATNVYHLDLVELAHGLGFSVYVVDGFQLSNYRKSVGGRVKTDPSDARLLSRFLRNEGEDLRPWSPPPAVYGKLQSLLRRRAALVSARTAMTQSWANETLLKAAFEAFVTSIDRLDLLMQKKMKEVLREAGLHEQVARCQAVEGIGFLTATALVMAFVRGEFKSSDSYIAFLGMDLRVSDSGQKAGRRRLTKRGCSEIRRLLHNAAMAASKSKAWKGIYEQHRNSGKATTQALVILARKLARVAFALMKNQDEYVTKASKPAC

SEQ ID NO: 474267 - protein, 419 aa, unidentified
MTKIHSITQDTVLVAIDVSKRRNDVLIQVPGSPRRRRLVVLNQRAEHDRFIEQLKAFDRPVVTGFEATGNYHRALAWRLVDAGIETRLISSMALARQREAIHNGWDKNDPRDAQVILHMLATGVSQTYQDPLAAGLSDIQELSKTHEAVSRARTQTIHRILTHYLPLYFPEIERFLHSSRRDWFFALLEKFPTPASITALSPEDFSAAIWETVGKKTAKARLIADIYETAKESIGLPVQTDSKAITMFRMVLAEARSLIRQRDAIEAEAEALLGGTRDYEALKQIPGIGPIISLTILAEAGDLRRFGHHRQFLKFCGLDLSTHQSGTFRGQTKRSKFGNARLRKALWMAAQVAIRQRENSFRDKYTRYIARDPDNADLKRKALTAVTAKMARTAHAVIKSGKAYRPFYEGPVPGGRTSL

SEQ ID NO: 474268 - protein, 354 aa, unidentified
MSEIATIGLDIAKNVFQLHAVDRSGKIVLRKALRRSQVQGFFSRLPPCLIGMEACATAHHWARTLMAFGHDVRLIPPAYVKPYLRRQKNDAADAAAICEAVTRPSMRFVPVKSPQQQSTLMRHRARDLLIGQRTALINALRGHFAELGIVVAQAARNTRQLLAFLHEEANPDFPTAARIALQPLATMLLGIETQIARLDKAILAAHRSDPISVRLAAIPGIGPIVASCLSASVPDASLFQGSREFAASLGLVPRQHSTGGKARLGSISKMGNRHLRKLLVVGAHAALYSMKSGKTRTDLADWARSLLAKKPFKVVAVALANKIARIAWAVMARNTAYEPGNKGAAAPTASYTAA

SEQ ID NO: 474269 - protein, 415 aa, unidentified
MALKIVYKICCGIDVHKTFVVACIASTNDKGVTSYESHRFSTYTSGLKTLLQWLLDRNCKDVCMESTGKYWIPVYNILESDCSIVLAHPKYVKAIRGKKTDKKDAKWIADLFKHDLVAGSFMPPADIRQLRDLMRYRFKLTCFKSSEKNRLQNCLTVSNIQLGNVVSDTFGKSAQAILDKILENPADTSFDLEPLVFKSLKKKLPELRDAIDGYITTEQAGKLKVIKAHYENLESRKAELEELILALAAPYQQELAILQTAPGISSDFTAIGIISEIGTNMEAFPSAKHLCSWAGLTPTNNESAGKKKSVRVSKAGCYIKPLLVQCANAVVTSKKHPEIRNRYLRLKKRRGHKKAIIAIARMLLTALYHMLKNGENYNAELYRKSDLPPVNREITVEQALMIARNQGYKIKSATA

SEQ ID NO: 474270 - protein, 356 aa, unidentified
MHSMNQEIRRVIGGVDSHADTHHAAALDERGCLLGTKWFVVSATGYRELLAWLASFGVIDRVGVESTGSYAAGLTRHLVSEGVRVLEVNQPHAHTRRRRGKTDAIDAEMAARHALSLATAVTPKQTTGIVESIRQLRIARDSAVKSRSIAMLQLGDLVRTAPSELREQLAIRKTLKGKAALCRRLRPDTDGLSEPVNAAKLALRSLARRIALLDDEIAELDTQLTPLVATAAPRTTALLGISTGHAGQLLITAGQNIDRLHNEGAFAALCGASPIPVASGKRGRYRLNPGGDRQANRALHMIAVCRLRHCAQTRAYAQRRTSEGKTKKEIMRCLKRYIARQAYATLRDDLRSLSPS

SEQ ID NO: 474271 - protein, 422 aa, unidentified
MRRIMFPVCCGIDVHKNKLSCCIVIAHQITDEPVYHFREFSCHQPDLVKLVNWLNKFNCHDVCMESTGKYWIPVFNHLENSGIHAIITHPKYVRSRDGKKTDHNDSSSIADAFQLGQASPSFVPSKEWRQLRDLSRYRFKITCMIASEKNRVQNCQTMSNITLASVVSDPFGVSASDIFAELLTSSEVDETRIRSLLHGRLRKKHKEIMDSIQGYRLESDQSLKALLALNHIQYLDDIKDTVTKEMLNRLKPYQAFIKLACSMPGIGTDSSLTILSETGTDMSIFPSANHFASWIGLSPRSRESNNKKKSVRINHAGTYLKPLLVQCALAAIKSNKDPYFRIKYNKIKKRRGHKRAIIAIARMMAICLYHMFKTGEPFNPSDYEELRNPRPMKPEKDDLQAALELIRSTGQYTITSIEQAAQ

SEQ ID NO: 474272 - protein, 328 aa, unidentified
MSLLPALGLDIAKAKLDAALLVGGQVHHRVFANTPAGHAELLAWLGQKGQAQVHVCLEATGTYGEAVALALHAAEHVVSYINPARLKAFGQTTMTRTKTDKTDAILLARFCEAHHPAPWTPPAPELRELQALVRRVESLQQMRQQEVNRLASGVTLAAVQASLEHMIALLDDELAKVQQLIHDHLDQHPGLKEQHALLDSIPGIGDTTATALLAELPNWQTFASAREVAAQAGLTPKQKLSGSSVHGKPRLSKTGSARLRKLLYFPAVVAKTHNPLIKAFCDRLLARGKPMMLVLGAAMRKLLHLIYGVLKSGKPFDPNYRPAAKIAA

SEQ ID NO: 474273 - protein, 339 aa, unidentified
MKVNVVGVDIAKRVIQLHWFDAATGQSMSMQVKRGKFLEHFANREPSLVGMESCGGSQHWARELIKLGHEVKLMSARIVKAFVCGNKDDAADARAIWMAVQQPDVKAVVIKTEEQQAVLALHRMRQQLVKFRTAQVNNLRGLLTEYGEVMPQGRRGMQRDVPDVLGRLQVRLPALLIDTLREQYARLAELDTQIKQIEQRLSRWHRENEACKRIAAIPGVGLLSATAAIALIGDGKSFKSGREFAAWLGLVPRHTGTGGKIRLLGISKRGDVYLRTLLIHGARASVLCGKAPSEWLKNMLKRRPKNVVIVALANKIARTIWALVTHERKYQSGYVGQCT

SEQ ID NO: 474274 - protein, 360 aa, unidentified
MRTQSNKINSNCQNIYVGFDVHKKDWRVTIMTEKIAHKTYTQPPIPEVLYSYLKKNFPGCAYHSVYEAGFCGYWIHNRLLELGINSIVVNPADVPTTGKERDQKTDKRDSIKLARSLRAQELTPIYVPSLKTLEDRSLVRFRSTLVKDLTRNKNRVKSFLHFHGIQIPESYKNSHWSKKFINWLQSIEMKEQSGKMTLDNMLEAAIRLRETLLKVTKQVQTLSKSEPYKTKVDLLRSISGIGIITSMIILTELENIQRFSNIDHLCGFVGLVPSSKSSGEKDGTGDLTSRGHSFLRSCLIESAWVAARTDPSLAIAYNKYCKRMKSNEAIIRIAKKLVARINFVLKNNCKYDYTKSLQKN

SEQ ID NO: 474275 - protein, 394 aa, unidentified
MRFVGIDVAAERHVVAVVDETDRVLIKATPFSEDAEGYAKLLGLLGAPTDALVAMEATGHYWKNLVAALVAAGFAVALLNPLRTRRFAGEDLQRTQTDAIDAVGIARFAAQKRPPASRLPDRATEELRELVRFRDRLRQDFGDRVRQLHRLVDLGFPEFTRHVRDLGSELATALLSAYPTAAGFHDVPVRHVAALRYDGRHKVGDELAGALISAAGTSVGRHHGEAYRLQVRYTCEDLDGLRRRLRDLERDSDRLLEQHEIGRLLTTIEGIGPQTSARLVATFGDFSSFRSAGALASYVGAVPALKQSGQRTFQRASLTPIGAAHLRAKLWMPVLTAVRTNPWLRAYYERLIARGKLPKVALVAAMRKLLHAVYSVATHRRPFVADLATAEVRP

SEQ ID NO: 474276 - protein, 420 aa, unidentified
MDVAIGAVDEAGQKHDRRMHVIETGDIDVYLGLDIGKGEHHATAVTPAGKKAFDKRLPNIEPKLRELFSKLQAKHGTVLVMVDQPASTGALPLAVARDMGCPVAYLPGLTMRRIADLYPGEAKTDARDAFIIADAARAMPHTLRSVDLEDETIAELEMIVGFDDDLTGEATRVANRLHGLLAQIHPSLERVLGPRLQHPAVLTLLERFGSPAQIRKAGRRRLVTLLRPRAPRMAERLVEDIFTALDEQAVVVPGTEAAALIVPSLAGSLTAVLDQRKLLAGRIEELLKAHPLSQVLISMPGVGIRTGARILIEVGDGSSFPSAAHLAAYAGLAPATRNSGSSIRGEQPSRRGNKQLKRAFFLSAFAALGDPASRAYYDKKIGQGKHHTQALLCLARRRADVLFAMLRDGTFYEPQPATAR

SEQ ID NO: 474277 - protein, 377 aa, unidentified
MEVMHERVAGLDVHKAMIVACVRIMAGGKISRECRTFETSTAGLEALLGWLTQSGCTDVAMEATGVYWKPVWNILSDGEFKLIVANAAHIKNVPDRKTDVNDAMRIADLVACGLIKASFVPEQEIQELRSLLRARKQLTREQTSHIQRIQKTLEEANINPGFNPGDILGVSGRRMIEAMIAGVRSPLRLAELADRRLKVSPKALYDALHGRLTDHHRFMLELYLGQHDALSGAIARIDQAVEALIARMDEEVAAGQATFLSLITLLCTIPGVSILSATVILWEIGRDMSRFPTAGHLLAWAGLCPGQNESAGKRKSSRLRKSLPLRKRGAPLGSRQCSSNALGRRAAGKTATTRRSSTDCAASAARRKPSALSPPRC

SEQ ID NO: 474278 - protein, 372 aa, unidentified
MLADRVDYIIGVDTHTATHTAAVVAPTGAALAHRTVPADADGYLHVYRFAIEQAPGRRVWAIEGTGSYGAGLTTHLLEQGEWVVEVDRPARPARRNGTKTDDLDAVRAAREALGREHLAQPRQRGDREAIRVLVTTRQSAMQARTCAINHLKALVVNAPERLRQQLRALATDQLLARCARLRSHPTQPIEYRATIAALRRTAQRSLALAAEADDLHAELDTLIRRRAPWLLAEPGIGVICAAQLLNAWSHAGRLRSEAAFAMLGGAAPIEASSGKVVRHRLNRSGDRQLNRALHTIVLSRMAYHAETRAYVARRIAEGKTAREIQRCLIGGVSGAQPAQESGLLVVRVRGWPRCLATQMASLSSAASGRAEP

SEQ ID NO: 474279 - protein, 361 aa, unidentified
MSRMAKIAGPVTGGVDTHADVHVAAVVDQVGRVLGTESFPADADGYAGLLAWLRGHGELIAVGVEGTGSYGAGLARHLASAGVMVLEVIRPDRQRRRRRGKSDAVDAVSAALSALGEEDCGTPKSSDGAAESIRALRVARAGAMKARTQASNQLRDLITTAPEPVRAQLQGMSTVRRVRTAMAFTCGDAADPAEGTKAAMASVAARWLELDAEAARLEAALEELVTRVAAPEFLARTGAGCLSVSALIAAAGDNPGRIRSEAAYAALCGVSPVDCSSGKQQRHRLNRGGDRQANSALWRIATTRLQHDPRTQDYAARRTAAGKTRKEIIRELKRYIAREAYRELIRPGFATAAVPPSRQAA

SEQ ID NO: 474280 - protein, 355 aa, unidentified
MNDTKYIGLDVHQATISVAVLDSAGKLVMEAVLETKAETILQFVHGLRGSLHVTFEEGTCAAWLHGLLKPHVTQVLVCDPRKNALIKAGNKSDRIDARKLADLLYLDKLNPVYHGETGIRALQEVARSYLALTRDTTRVMNRVKALYRSWAIPCAGQRVYAPLYRSEWLAKISEAGVRRRAEIYYQQLDALRSLREQVRRDLLAEGRKHRAMRLLRQIPSIGPIRAVLLIALMQTPHRFRTKRQLWAYCGLALQTSTSGEYRIVDGQLKRSQKFLAVRGLNVNHNHDLKNIFKGAATRAAAVAGPFQEFHAGLVARGMKPTMARLTLARKIAAITLIVWKKGVSFDAEHLKQQAA

SEQ ID NO: 474281 - protein, 368 aa, unidentified
MEWPAPPSGEIILPETQTEERIMKIAIAVLGIDLGKNVCSVVGLDTSGAVVLRRRVRRDTLIDLTAKLPACIVGMEACCGAHHLGRLLAAQGHGVRLMSPEYVRPYVKAQKNDDRDAEGIAEAATRPTMRFVELKTVDQLDMQTLHRSRERLVGERTALINQLRAILLERGIVAPQGKRKLEQYLVALMDEHDGEGLSARMRMLVTDTRAQWRELDRRIVSFDAEFARWAKENEDARRLATIPGVGVTISTALIAAVGKAETFEHARDLAAWLGLVPRQSTTGGKPRLMGISKRGNKYLRTLLIHGARAALPHLAEKETTLGRWAKNLLSRVHQNVAVVALANKLARICWAILRSGQKFTTKGAPLAV

SEQ ID NO: 474282 - protein, 384 aa, unidentified
MQASTIDTPTAVHCGTIFVAIELSQKSWLVTLHCPDTDKISHHKLEGGDHTGLLALIERMRERAARTLGAVPAVVSCYEAGYDGFWLHRLLLAAGITNYVFDPSSIAVDQRARRVKTDRIDGERMLRTLMAYLRGEPRVVRIVRVPTPEQEDARRASRERGRLTKEQTAHTNRIKALLRLLGMAVGNPRRCDWLTWLVKQRDWQGQAVPPQIMAEIKREHARLMLVREQLDALAQAPADLTPAAAQMAQRSELLLRLKSLGPAFATTLTNEVFYKDFRNRREVASYFGLTPSPWQSGGIDRDQGISKAGNPRARCAAIEMAWLWLRHQPDSKLTQEYRRRTLDASKRIKRVAIVALARKLIVALWRYLTTGLVPEGAMLKTVEV

SEQ ID NO: 474283 - protein, 351 aa, unidentified
MPRMSMVHAVTIIKMDMGKNTLHMIGLDSRGAIVLREKVSRGRITSRLANLPCCLIGIEAGLATHYVARELAALGHNVKQVPPTYAKPFRQGHKNDFRDAHSVAEAVQRPTTRFVPAKTDEQLDLQALHRVRSRLVSERTAVINQIRGFLLERGIIIRQGLPFLRQALPDILAKRTDVLSPRMVRIVADLASDWRQLDERIEPVTDEIETLAKSDDGCRRVMTVPGIGPIISSAMVAAIGNGAAFARGRDFSAWIGLVPKQMSTGDRTILGCITKRGNGYLRTLFVQAARVILLRPTSWPKHSFGVWLARAAQRLHRNVLAAALANKLARIAWTVLAQQRNYQARVTKAAA

SEQ ID NO: 474284 - protein, 401 aa, unidentified
MNAVGIDVSKGKSMVCVMRPFGEVVLEPFEVLHTAQNLNDLAGKLKALDGETRVVLEATGNYHKPVAFVLHDAGLFVSVVNPILIHDYDNNSLRRVKTDRKDAVKIANYTLDKWTRLRQYLPEDDTRLALKNCYRQYQQAVAIRTMLKNNLISSLDLTFPDANKLFTSPAKSNGCEKWVDFIGDFWHSECVSSLSADAFATKYLKWCQKHGYNFTRSKSNEIYTCAVNSASLPKSPTSKLLIQQQVAQLKAVSQSVAAFQQEMFRLSQQLPEFDTVMEMYGVGPSLGPQLMAEIGDVRRFSSKKSLIAFAGIEPQPNDSGKIVGNDKGISKVGSAVLRRTLFLIMTVILQTQPQDEPVFQFMNKKRSEGKPYKVYMMASANKFLRIYYARVKAVMDFEHSQ

SEQ ID NO: 474285 - protein, 376 aa, unidentified
MEILYTHCAGLDVHKKTVKVCLLTQGANEQPHKEFRTYLTTTQELLKLSDWLHEQGCTHVAFEATGGYWKPIFNLLEGHFELLVVNAQHIKAVPGRKTDVRDAEWIADLLRHGLLKASFIPSGPQRELRDLTRYRVKLTEEKAREINRVQKTLEDTNLKLGDVGSSIMGKASRMILHAIADGEKDPSRLAAFAVGRVRASQEQLEAALKGHATDHHRFLLREHLTQIHHLEQAIDRVTAEIIRRFTPPSSPEEPTSAAEKEDETTPERTSDPPSASPEGAVPPKAALSWAQAVVLLSSIPGISERSAIGILAEIGTNMQQFPTAAHLASWAGVCPGNHESAGKRLGGEDAQGQSLSTMPARAGCSFGLSSEAMLFG

SEQ ID NO: 474286 - protein, 344 aa, unidentified
MEHYAAIDVSLEWSSVCVVDAAGQIVREAKVRSEREALVAFFAESGLSLARIGLEAGPLSQWLYAGLVEAGLPAILIETRHVKAALKAMTVKTDRNDARGMAQLMRMGWFRAVHVKAPMVQEIRALLTARKLLVAKLRDVESSLRGILRGFGLKVGAISKGKFEARIRELVAGQAMLERIAEALLRARAALRAESASLHGELLKAVRADEVCHRLMTIPGVGAVVAMTFKAAVDQPERFARSKAVGADFGLTPKKYQSGEIDRTGRISKVGDAMVRTALFEAANVMLTRAVRCSGLKAWALRVASRQGMKKAKVALARKLAVVMHRMWVDGTSFCWGEASMKAA

SEQ ID NO: 474287 - protein, 338 aa, unidentified
MTYYAGIDVSLESASVCVVDAAGKTIREGKVASEPEALTDWLKAVGSSLERVGLEAGPLSQWLHAGLRQAGIAAELLETRHVRRAFEIMPVKTDRKDAHGIADLMRLGWFRPVHCKSIDAQETRAMLTARKLVQKQVFEVESSLRGILRGVGLKVGKTTPVKFEGRVKELVAGNPSLERITASLLATRAVLRREFNGFERQLRGMARNDTRTRLLMSTPGVGTIVALTYAAAIDDPSRFTSSKTVGAHFGLTPKRYQSGETDYTGRISKLGDASVRAALYEAAHVILTKPLRGCTALKSWAMRIARRAGMSKAKVALARKLAVIMHRMLANGTTFQSA

SEQ ID NO: 474288 - protein, 494 aa, unidentified
MRKRKTDAAASAKVGKIADVAKAYRQRRAKAQAKVAAQEEVEVRRVEGLSVLHGHAAGIDIGSRSHWVCVGVSADQDADVIREFAAYTEGLHEIVAYLRHYQVTTVAMESTGIYWIPLYELLEANGFEVLLVDPSYTKQVKGRPKTDRLDCQWIYRLHSVGLLAAAFRPDEKTCQLRAYLRQRANLIRYAGQHIQHMEKALEQMNLKLTETISDITGVTGQAILKAILRGTRDPVKLAKYRDARIKASEEQIARALTGSYRDEHLSELKLAFEAWQFYQKQLGQIDALIEQQLGRMKQDRALPPLKPHKRSGGRKPNHPRFDVRTALYYAVGIDLTEIEGIEEMTALTIISEIGVDMARFATAQHFCSWLGLCPLVKKTGGRVKSSRTRPGVNRAAVAFRLAANGLHASKGALGAFLRRKKAHLGAPKAITAAAHKLARIVYLALKHGMTYVRQTQAEYEARVREQQVKSLHKKARALGMAVIETSAPATPPTV

SEQ ID NO: 474289 - protein, 343 aa, unidentified
MQTITTIGLDIAKSVFQVHGVDADGQVVIRRQLKRRYVPAFFQKLPPCLVGIEACASSHHWSRELQALGHTVRLMPPAYVKPYVKRHKNDATDAEAICEAVTRANMRFVATKTPEQQSCLTLHRTRHLFIRQQTAVINAIRAHLAEFGIVAPVGRKGVEQLLGVVSDASDKRLPEVARGCVAALGAQLQTLKAQILQFDRMIMAWHRSSEASRRLDDIPGVGPVLATALVASVADPKVFRSGRDFSAWIGLVPKQNSSGGKDRLGNISKRGDRYLRSLFTTGALAVIRYVKIHGTRHRPWLTALLARRPTKVAAIALANKIARMAWAIMAKGERYKEPAALAA

SEQ ID NO: 474290 - protein, 361 aa, unidentified
MAEGPNDWEWQVGLASQPLKKLAADETALLQLLSRWRDEATKAGRTISRIAVAYEAGRDGFWLARWLRGRGIEAHVIHPTSVAVSREHRRAKTDRLDTELLKRAFLGWLRGEQRHCSMAMIPTLEEEDAKRPNRERENLVSERTRFVNRMKSALARLGIRGFKPHLRKAPERLDTLRTAEGMALPPNTLAELRRDMARLRFVMDQIREIEAARLAGLEQHPEQANHAMVRLLARVVGVGIETADMLVHEILSRHLRDRKAVARYAGLTGSPDESGARRREKGLSRAGNARVRRGMIQLAWRFLMFQKDSALAQWYRRQTTDGRGATRKTMIVALARKLLVALWQLVTTGEVPEGVVLRRAA

SEQ ID NO: 474291 - protein, 401 aa, unidentified
MWYAGLDWADSHHDVVVIDDGGRQVASRRVAHSAQGLAELTAFLRQIAPLDQIACIVETNQGLLISTLLEAGCTLYPVNPKTIDRRRNASGAKTDLIDAYLLAKTGRSDLRDLRKLTPDSAIIQELKALTRDQDSLVQSQTRLVNQLTACLKAYYPVALQLFSKLQQRSTLIFLQTYPTLEAARQASVEEITSVLKEVGHPKPSKVAPKIRETLHQPQLHANAITTRTKSRLMLALAAQLLPLIEQIASYDKKITAFFLTHADHEIFSSLPGAGQRLDPRLLAEWGDDRTRYTASTSVQALAGTAPVAFQSGNYAKAHKRYACLKPLRNVLHQLAWQSTKQEAWALTYYKRKRAEGKSHSMAVRSLANVWVRIIYAMWFEHKSYKTATFEAAQHHHAKRAA

SEQ ID NO: 474292 - protein, 400 aa, unidentified
MTAVWAGIDSGKRAHHCAVIDAAGRMVLSRRVANDESALLELITSVLALAGGDQVVWATDLNAGGAALVIALLADRGQQVLYIPGRIVHHAAATYRGDGKTDAKDARIIADQARMRTDLQPVHGGDQISTDLRLLTARRTDLVCDRVRAINRLRATMLEYFPALEAAFDYSKKAPLILLSGYQTPEAIRRTGASRLAAWLKKRGCRGSANVARKAVEAANAQHTVLRTEPVAAQLVAAIAGQITAIDTEIAQLDDVISERFAQHPDAPILLSMPGFGPVLAAAFLANTGGDLRAFQSADRLASVAGLAPAPRDSGRISGNHHRPRRFNRRLMRTCYLAALSSLKNSPASRAFYERKRAEGKSHKQALIALARRRISTLWAMLRDRTTYREPAPPALAPAA

SEQ ID NO: 474293 - protein, 376 aa, unidentified
MISVGIDVSKGKSTVCILKPYGEIVSKPFNITHTQKDLSELSSMLFRLNDEVKIVMEATGIYHLPVLTYLQEKGFFVSVINPYLMKSYRNESLRKAKTDKIDSRIIANYGIDHWFKMKEFQTSGEIYEELKLLGQQYRHYMKLHLLSLAELTHLLDLTMPGIKNLLASWNETNRKDKRSDFVERFWHYDVITSMSEQEFTEEYILWAKEKKYVPSQEKAKVIYTLAQESIPTLPSETSSIKMLVTEAVRVLKEVDATLGLILSRMQEIAKTLPEYSVVREMGGVGNTLAPKLIAEIGDVRRFRNGKALVAFAGIDPPPYESGQFVGCNRKISKRGSASLRKVGYETMRSLKMRSRPEDPVYRYVCLLYTSDAADEL

SEQ ID NO: 474294 - protein, 373 aa, unidentified
MNNHTTVYIGMDVHKESFTLCCFALGEKEPCHVQTIPSDYILVVKYVNQLRKLYGEGTEFICGYEAGCLGYTLYHQLKECGLECVILAPTTMMEQKGKKRIKTDKRDAKNIAKCLAYHTYSPVHIPTEEDEQVKEYIRMRDDIKANLKRTKQQILSFCLRHGLVYTQTKTTWTQAHLKWLHDQKLDGLYQEILDEYILQLTKHMETVERLDKRIEELSNWETYRESVDHLTCFIGIKRPTALATVVEIGDFKRFATARQFSSYLGLTPGEDSSGDDQKRLGITKAGNTHVRRLLVEAAQSYGRGKAGYKSKALKDRQEGNPPQVIAYADRANERLRRKYYNMLFRGKRANVAKTALARELACFIWGMMNEKLA

SEQ ID NO: 474295 - protein, 339 aa, unidentified
MHVTTVGLDLAKNIFQVHGVAENGEVAFNQALRRAQLLAFFDALAPCLIGMEACGSSHYWARQLTKLGHDVRLIPANYVKPYVKRGKSDATDAEAICEAVTRPTMRFVAIKSEEQQGVLFLHRARDLIVRQRTQLSNMLRGLLAEFGIVIAQGIGSAIKFAKNVIDGDRPEIPEVAVDVLANLSNQLVALHLRVRWYEMRMRLQAKQDPRVMLLRTIPGVGPVTASAVVATIGDATQFKNGRELAAWLGLTPLNRSSGGKERLGRISKMGDRYIRRLLVTGMTSRLRQMKFNPDRADPWAQALLARKPARLATVAMANKTARIIWAVLTRNEHYRPHTA

SEQ ID NO: 474296 - protein, 351 aa, unidentified
MKTQTKTVSKLWIGIDFHKKTWRVHFRCDAFSGNPFSMEPDPDALHRKVMNEFKDYEVEVVYECGCFGYWAHRKFIAFGWRSIVVNPCDIPRISKQKFTKTDSIDARSLSKLLKAGLLKSVTIPDREREHLRSLFRRRVHTVMYTRSIKSRLKAQLLYFGIKIPHDMDNAAWTKNFKQWVREIEWEHETGKQMMLSNIKQVEFLHKETNEINNHLRKYCRDNHKKVYDLLRSVPGVGPLTAICFISEVGDIKRFNNFKQLACLVGMMPTTYQSSDTHRTQGLTPRALKIMRSYLVEAAWQAVRIDPVLRAYYKSHKGKKSNDIIVKVARKLLSRIYGVLRTETEYQIGLIK

SEQ ID NO: 474297 - protein, 450 aa, unidentified
MDKKTKSFQSLQLAVINPCSAAIDVGSMMMMVSYSQSDGNQKLLEIDAFTESLQSLATTLQQAGVTHIAMEATGIYWVAVYEILEQHGFKVTLVNAKHFKNVDAQKTDVKDCQWLHQLHANGLLRASHIAKEEYRELKCYLHERNILQKQKSDTLNRIHKLLTQMNIKVQHLLSDIEGVSAMKLLRAIAKGINDPEELLSIIDVTKLKADKEDLLKSLQGLYKKQYVVILQNSLTAFDFFKEQMKNYETLIENVLKAMLPADANGNKPLVESKKRYVRKNQYSINLKQYLKHIIGVDVTEIEGIDEISALEIIAVTGQHMNKWPSAEHFASWLNLSPRPKKSGGKIIGHEKRFTNNKATQAFRMAAQTMWQNKGSLGHLYRRLSAQKGSKKAIKAIARKLAVIFYHMVKNKTRYDKNKLQINTERQRAKRITFLQKEAIKYGYVLQNAVA

SEQ ID NO: 474298 - protein, 364 aa, unidentified
MKTKPTTNPVRLNLDKLVKRVLAEKSAQVKLGIDQHARDVVVSMQQDASMPQRAQKMHPDDLLGLVRGLVSGGVRVFACYEAGPCGYWLYRALRAAGAEAYVIAPQALGGARKQKTDQLDALALCDALDRYLRGNRKAFTVVTVPSEEAERKRVRSRVRNQLKQERTRLAAQGRSLMLSQGYHIEGSWWLKSHWENLKDTLPGWLIECLEELRGLLLKADEQEKSLRKELEADAQGAPRPKAIGPLTWVMLTRELCDWSRFKNRRQVAGYTGLCPGVDQSGTHHRDGSINRCGNPRVRALLIEAIWRLSIWQPDYAPVRKLAAGIAKGAARRKLAVAAARRLAIDLWRLATGKTTLEKLKLLPA

SEQ ID NO: 474299 - protein, 388 aa, unidentified
MRQVCGLDIHKDSVFVCILNENGVVFQEKCGVLTTDLEQMLEIMQRHDVSEVCMESTSVYWMPVWRVLEPYFELKLVNPFFIKQLPGKKSDMKDAEWIATCLHKDLIKGSYVPEDRIQQLRQYDRRIFDLDKDIVYKLTKLDAALQRCNIRISNYLSNTSTKGYKDVVDMIAEGTTDPEVLVKAIHGRTINRVGRNVVLGALTGVITEADVDMIRQLRDEVALAEKHKDECQSKMDTLCRQWFPDEYALLQTIPGVKARSATSVLAELGNDVSAFPDAAHLTSWCGLKPRNDESAGKIKSRKITHGNKYLRKTLIECSWAARRTQGSFYSRFSYHQTVVRRKNSMKVQVAVARKMLAAIWFILHDHVPYRDYTPPTTEETSSDIVPTE

SEQ ID NO: 474300 - protein, 322 aa, unidentified
MAMPARKVILGCDVSQEWLDYCQFGSPHTTHVRNQRRDIDRWLSSLAGQPAAIAVEATNTYHELLVERARHFGLEVYLVSGYQLRHYALSLNVRMRNDQVDAQLLARLLDREIDALRPYEPRSSQHQRLMRLLKRRALLVRQRQQLRQSFAGLPELRTSVRSVSRRLQQLIALIDRRLQRLARELGWQHDLGRLRSLPGVGPLNALALCAAYRCGHFSHRDPFIAFLGLDVRTKDSGKHKGRRKLTKKGDPEYRRLLYNAAMAASRDGHYFNGEYQALQARGLSKTAALVAVSRKIARLAFGVLKSQTTFNPQRNRRPCLAT

SEQ ID NO: 474301 - protein, 318 aa, unidentified
MDCSAVTWIGIDVAKLSLDVAWELDAQPRRLQVENSRQGVAQLVAQAPPPSQVCFVVEATGGYERQLVVALLEAGYGVAVVNPRQVRDFAKALGILAKTDRIDAMVLALFGQRVQPRLLEENPAQRAELAQLVARRRQLIDLRTMESNRLGQATARAACKSIRQLLQALDRQIAKIEAEIAALLQSNDDWTTKIRLLRSTPGVAEVTSATLVAELPELGKLNRQAISALVGVAPFNDDSGRHRGKRRISGGRAAVRQALYMAALSARRYNPVIRAFAERLAAQSKPAKLILTACMRKLLVILNTMVRNNAPWQSQAAT

SEQ ID NO: 474302 - protein, 386 aa, unidentified
MTLAYWGFGQRTSLLTNFFNRMNICERSKTLFVGIDVHKDTHTAVGLSPFGEKIFEMKIGNEAHDFMSLVERTQGEAARAGLIPSFGLEDVHSWGERLSSFLVQEGLPVRAIAPILVDHIRKHATHPEKNDSLDAQGVAEVMIRKIDSLPAYTLTKDGETAKNIRDISLDREHLVKERTRLKNQLHTLLYRIFNTAYAKEFKDPFSVKALRHWMKSRPKDVSPFLLRSMKRKVKRLMDIRQEIQELEQELGTLIQESGHTIQTASGCGAVIAGEVIGEVGDITRFRSPAQLAKYAGCAPRECSSGKTVRWRKTRSGNRRLNRAFHRMALSQISRMGNPAAQAYFKRKVSEGKLKSQALVCLRRQMVNIIWMMMKHKVVYRYPQKND

SEQ ID NO: 474303 - protein, 330 aa, unidentified
MAASSQQLTPSSPTPQGALYVRIDVSKRQIAFCYRRADSPPQHGQLERTSKDLAKWAKQLARLKPKTVVVEATGGLERLVVAALADAGVAVAVVNPRQARAFAQAIGRLAKTDPIDAALLAELAERLEPEARPLPPAAVQALRDLLSRREDLITMRTAERNRQGQAVEPRVRRSIAKVLRLLDQQLAHIERELDDFFGSQPQLAGREQRLRTVKGVGPQVSRTLLLEVPELGTLNRRQVAALVGVAPYNADSGQWRGRRKICGGRGTARSKLYMAALSASRTNAVMKPFYDRLIAAGKRPKVALVAVASRLLIHLNSLLRGWPPLTEAWS

SEQ ID NO: 474304 - protein, 359 aa, unidentified
MDNNEDGTRHVVGGVDTHKDLHVAAVVDGQDRVLGTACFATTRQGYRQMLVWMRSFGDLRRIGIESTGSYGAGLLRFMQQAGIDVLEVTAPDKHDRRRRGKNDDLDAQNAAHAALAGRRTVTPRSRDGMVESLRVLTVCRKTAVAARRVAIQIIQTTIVSAPDGLRDTLRSMTRMQLVRTLAAWRPDLTAYREVEAAYRISLKSLARRYLELHDEIADLDAMIGAIVDDLAPELIARNSIGYTGAAQLLLTAGDNPERLRSEASFAALCGVSPVPASSGKTIRHRLNRGGDRAANSALHIIAIGRIRTDSATKAYVARRTSGGHSKLDAIRALKRYIAREVFHIITRRHREINQTRIAA

SEQ ID NO: 474305 - protein, 385 aa, unidentified
MQANTTKAPAAIRVDLAAIFVSLELSRSKWLVTSLSPGGGERMSRHLVSGGDIPGLLDHVAELQRKAEVRTGQSFRVISIQEAGLDGFWIHRVLEREGIESYVVDPASIATSRRRRRAKTDRIDGEALVRALLAYNRGEPRVCAMLRVPTPEEEDRRRLVRERKALTNERIRHVNRIKGLLFSQGVSGYEPLKEDRRKRLDALITGDGRPLPPALKAQISRELDRIELLIQQIKDVEEARDAMLVAADVPTPALLLSLKGIGPEFAAVLWSEGLSRKFDNRRQVAAYAGLVPTPWQSGQINCEQGVSKSGNPRLRSTLVQVAWLWVRHQPNSALSQWFRARVTQNGGRYKKTAIIALARKLLVALWKYVNAGVVIEGALLTKPSA

SEQ ID NO: 474306 - protein, 394 aa, unidentified
MACVRSPGEGRRRVENVAEFQTTVQGLLTLRDWLEAHEVDQVAMEATGVYWKPIWAVLEDRFKCLLVNARHVKQVPGRKTDVMDAQWLCQLLEAGLLRPSLVPPKPVRTLRNLTRYRKSQIRDRQREMNRLHKVMQDTGIKLDCVATDMMGKSGRAMLDALVSGTTDPVVLADLARGQLRKKLPALRAALEGRFDAEHVLVVGRILAHIDFLDEAIDELSAAIEEQLGPFAPAVELLCTIPGVGRRAAEVIIAETGGDMSVFPTAKHLASWAGMCPGNDESAGKRRSGKTRKGSKWLSQTLVECAKSANRTKNTYLAAQYARLRARRGANKATIAVCHSILTAVWHMLSTGETYTDPGGDFFARRDPERTRKRLVGQLERLGYTVTVQQGAAAA

SEQ ID NO: 474307 - protein, 471 aa, unidentified
MVMAAYPAWQVCLVHRTKGAASTQGFGNNQSAMKNPMDLPILNPHAAGVDVGSEKFFASVGGKEPKVFLTVTEQMRELCRHFQAEGVRTVAMEATGVYWINLYGALEAAGFEVVVVNGAHCRNFPGRKTDMKDCQWLAVLHAHGLLTSGFVPPADLRRLRDYLRVREDLVGMAAQHVQHMQKALDRLNVKLHVVISDITGASGRRIIEAILGGQRDPEKLLELCDEQILKTKRAAVLESLRGLWRQEHLFALELAWESYHGYQKQIARCDEQVAAVIHQMRTGKPKPELGPTKELRHNALDIDDLQGSMAQIYGKDLTRLPCLNPSTVAMLLAEIGTDMSRWKDWRHFGSWLAVAPCSAQSGQRRRREKRYLSQAGRILCRAVQCMAVGKHTWLASFYRRIRAKRGAKVAIKATAYKLAKLIYLVLTQGWEYVEQGIAKYQERVREQQLKALQKLAKALDYVVLPKTLATN

SEQ ID NO: 474308 - protein, 304 aa, unidentified
MNGIGIDVSKRRLDIGTTDGETLQVSNSPSGYAELDAWLRARPAIQIVLEATGGYEQAVLDFLHKAGHPVIRANALRARRLAQGLGKAAKTDRLDALVLAQMAALVELPSYQPLESWQRKLREFVRARRQTMQALTVARQQQELVTDRELRRLMQGNIIRLQSMVERLGKQIAEQVAQQPQLAVLKSMKGVGPALQAVLASYLPELGQISGKAIASLVGVAPISHDSGTMRGRRSIHGGRAEIRQVLYMAAMSAMRHEPRLRDFYRSLRARGKEGKVAIVAVMRKMLVILNARVRDASSGPIPA

SEQ ID NO: 474309 - protein, 421 aa, unidentified
MTQPYGNMGGVALVAIDVAKKQNAVLIQLPGGVRKKLTVTNDLTGYRELAHYLKKLKRPCKIGFEATGNYHRTLAFYLRQQGFELELISSVAASRTREAMYNSWDKNDPKDAQVILHMLLTGLTQTYHDPLEHRINDIQELSQTYCQVSLRKTRVQHSIMTHYLPLYFPEAAKYFHSSRAAWFTSLLMTFPNPAAVLKYSREGFIKAAQAVSGRKVNKAAWLRDFYENARESISLPVPEESEAIRMFRLVLQEHQDLCRMRRAIEERAELYLKDNADYLRLRTIPGIGAVIALIILAEAGDLRRFSHYKKFLKYCGLNLSTQQSGAFRGLSKLSKYGNSRLRYAFWIAGTSAIRMRENTFRKKYENYVKSDPQNPDLKRKAYTAVAAKIARVAYGLVKSGCDYRCYHESSVPSGIILSTGR

SEQ ID NO: 474310 - protein, 405 aa, unidentified
MLVEADRSKAPSAVRTELSAIFISLELSQSKWLITSLAPGNGEKMSKFIVAARDVAGLLNCFAEVQRKAQDRTGTRYGFVVMQEAGLDGFWLHRKLEAEGIESYVVDPASIAVPRRARRVKTDRIDGEMLLRTLLAYMRGDPRVCAMVKAPTPEDEDRRRISRERKTLTNERIRHVNRIKGLLFSQGVTGYEPLRRDRRKQLDALVTGDGRPLPAHLKAQIGRELDRIELLLEQIEAVEEIRDAMLTAVEPEATPATNDTKQSTGGVAFRPSVPAMLIQLKGIGPEIASVLWLEGLSRTFDNRRQLGAYAGLAASHWQSGNINNDQGVSKAGNPRLRTTLVQLAWLWVRHQPDSALSRWFIARVTERGPRSKKPAIIALARKLLVALWKYVTAGVVIEGAIVQAK

SEQ ID NO: 474311 - protein, 320 aa, unidentified
MAPETEDVIIGVDVCKDRLDLFEYHSERAYSISNDAAAIKTWLDGLHGRAKLALEPTNRYHLELAEAAHARGHEVYLIDPYRLSHYRAGLGRRAKTDAQDARLLARFLEREIGELRAWEPMDPGQQRFWQLLKRRAALVRCKVQLNQSLVGLGLLQEDAEALVKQCEQMIGKLDRALLKQARELGWGEWIERCQALPGVGPLTAMALVACFNRAQFRSADAFIAFLGLDVRVKQSGRWQGRCKLTKKGDGEVRRLLYNAAMQGRRSPQWEPYYLRLRGRGMSSTAALVALGRKLAKVSFALMRTDARFVPTVPEKACVTT

SEQ ID NO: 474312 - protein, 318 aa, unidentified
MKKAFFCGVDVSKDKIDVYFLTSITSEKAKFETLPNNHELIKVYFDSFKNDEILVVFEATSNYHLALQKALSDLGIRYCVTNPYKSSLFLKHLSTIKTDTSDSYGLAVYARTFKSEIAPDKYNAEYLEIKSYNSTLNLLQKINTQLKNFKSSQKTLNNKVIDDVIANLINEIAKLQAMLQKLAFDLVKKTIPETEEIIKENKGFGIDLALNLFPQLHFNRDKSEKQFISFIGLSPRIFQSGSSVHKSQKINKMGNSNIRRILFMTALCAIRFNAKFKLRYERLLANGKKKMTAIVAVMCAIVRYLKSLFPFNPEIKAI

SEQ ID NO: 474313 - protein, 586 aa, unidentified
MKLLQVDSSARAISVTRRLTAKFTEEWRKNHPDGDVIQRDLSATALPLITDDWLATRLEESKLTPEQRSYLSTSDELIEELQAADTVVIGAPMYNFSIPSSLKAWIDQIVRLGKTVGYGPNGPQGLLARKKVVVITSRGAAYEKGTARGAFDFQEPYLLHILAFIGLTDVTFIHAENQGREEAALFFAAAAERISGIVIDQDQQVVTQYKRRPLCGRLWLFVSPPTERSAVMSQEKYIGMDVHQATISVAVLDSRGKLIMESILETKAATILEFLQGLHGSLSVTFEEGTSAAWLHDLLKPHVTRLVVCDPRRNALLKDGSKSDRIDARKLAELLRGNQLTSVYHGEHGMRTLKELGRSYVTITQDLVRVMSRIKALYRSWAIPCSGTSVYAPRHRAEWLGKIPEPGVRLRAERLYQQLDLLQPVRQQARRDLLTESRKHHAVKLLRQIPSIGPIRAALLVAQLQTPHRFRTKRQLWAYSGFALKTHDSGEYRYVRGKLQRNQERMTVRGLNNNHNPDVKNLFKGAAISASTHPGPLYDFYVALLEKGMRPTMARLTLARKIASITLTIWKKGADFDATQLHRQEA

SEQ ID NO: 474314 - protein, 318 aa, unidentified
MSDSVFVGIDVSSQTLEVASSDQAKTWQVSNDAAGLETLVSRLLEFKPALVVLEATGGYEFEAACALQAASLAVAVVNPRTARDFARAMGALAKTDALDARMLAAFARVLHQHPERERFVKPLADAELQRLQALVLRRRQLVQMITAERQRMRISHAAARPSIERVIEFLKAELGDSDAEVAAHIERHHADLAAALSSVPGIGAASVAVLLAELPELGKLDRRRVAALVGVAPLNRDSGQMRGQRSIWGGRADVRRTLYMATLTAVRHNPVLKAHYEHLLAAGKRKKVALVACMRKLLTMINAIAKHGSKWDPTLHLA

SEQ ID NO: 474315 - protein, 355 aa, unidentified
MKKITFVQVGIALDISKADFRACIMGSNGQKVFKVIASRKFSNNTKGFSEFNHWVQKNLNKHSITEAEYLMEATGVYHENLAWTLYEKAHKVIVVLPNQAKAFLKSEGIKSKTDKIDAQGLAKMVLVKNLRYWKPISPVLKELRTIARYYEVIQKELTQNYNRLHALEHSHDPNKFVLKQLKNHLKFLEKQKESVHQQILETTKKDEVLHEKMKRLTTIYGIGILTVAVVVAETNGFELFSSQKQLTSYAGYDIVEHQSGKYVGQTRISKKGNTHIRRALHFPALKTVKQENIFQELYSRVFERTKKKMKAYTAVQRKLLVVMYTLWKKEENFDLNYAKQKVVEEQECPPTLGSY

SEQ ID NO: 474316 - protein, 391 aa, unidentified
MIYVGIDVAKDKHDCFITNSDGEVLFQVFTIQNNRDGFDDLFAKILSISSDLSNIKVGLEATGHYSYNLLGYLINKGLPTFVINPLHTNLYRKSLSLRKTKTDKVDARTIAMMLMSDVNLKSYSDTSYHNEELKSLTRYRFDKVQERAQLKQSVSRLVTILFPELEKLVPTLHIASVYALLSELPSAGKIASCHLTHLTKLLENASKGRYSREKAIEIRKAARVSIGSNMPAKSLELRHTLKLIAELDSEISEIESEIKRIMDQISSPILTIPGISYRMGAMILAEIGDFSRFDSPDKILAYAGASPSTYQSGQLESSYSHMEKRGSRYLRFALINAAKYVCHWDETFGAYLQKKISEGKHYNVAITHATKKLVRLIYAMEKSGKPYIKTA

SEQ ID NO: 474317 - protein, 344 aa, unidentified
MDHFAGLDVSVKETSVCILDDAGKIVKEVKVASEPPALLKVLGNPAYRFKRIGLEAGPLSQWLFSALAEAELPVICVETRHMQAVLKAQINKTDRNDARGIAQMMRAGLYRPVHVKTLRSQKLRMLLTHRKLLQSKAIAIENDLRGTLRNFGLKVGMVGKVRFEARIQELVKNQPDLAVLVEPLLIVRRALREQIVILHRRLLAIVRDDEVCRRLMTTPGVGPVVALTYRATVDVPARFRKSKSVGAVFGLTSSRYQSGEIDWDGKISRCGDEMMRVMLYEAAQSMLRSKKWSWLKAWAMQIARRRGMKKAIVALARRLAVIMHRIWVDGTEFRWTREQAAAAA

SEQ ID NO: 474318 - protein, 424 aa, unidentified
MKVTYQTCCGVDVHKSFLVATIVKTTGGIEPSYQKKRFSTFNNSILEFKQWLLDNHCHDVCMESTGKYWVPVFNLLEDKINVVIANPKWVKAVKGNKDDTKDSKWIGDLFRLGLVKGSYIPCKKVRILREYTRYRYKLVSCRSSEKNRYQNALTVCNVALDSIVSDIFGKSSTSIIDYLLEQSGTSINHEEIASKLLRSLKSKEDAVIESVEGYQMTDAQKYRMRLVRAHMDYITAEINDVDKMIENMISSNPDFENAVQFLCTIPGVKRDSAITIISEIGTDMSQFSGSKRLCCWAGITPGSNESAGKKKSVRITRAGVYLKPALVQCAHAAVKSDKSPYYKKKYESLVKRRGKKRAIIAIARMILTAIYQMLSTGEQWNPSDLYKIDMPVALVEKQKAKAIKQAKKLLQREGLLPPDEPLAS

SEQ ID NO: 474319 - protein, 316 aa, unidentified
MSESTSFVGIDVSKNVLDVHVLPAGEHWQVSNDEVGCASLVERLKPLGETVLVVMEATNVFWRMAAAGLASAGLACAVVNPRQVRDFAKSMGKLAKTDAIDAQVLALFAQRVKPPVRALPSAQCQVAAEMLARRAQLMGMRVAEKNRLATASAKKVRKDIEATIAFLEKRLGALDQEIDTWLQSTPIDQSRANLLQSFTGIGQNTARSLLITLPELGSLNGKQIGALAGLAPFARDSGRKRGERHISGGRSIVRAALYMPAITAIQHNPVIRALYQRLVQVGKHHYVAITACMRKMLVILNAMLRSNQPWKAPQNA

SEQ ID NO: 474320 - protein, 317 aa, unidentified
MNTIGIDISKEWVDCFCSTRRLAGQFPNNPTGWKQLSEWIEDDPLVVLEASGPYYLGLASYLYEQDIKISVVNPLVIRRYGQMKLTRTKTDAKDAGLIAQYGIDQQPELWCPPSKARQGLKKLMTMREGLLRQKAILTGQAEAFSQNKDVEPMVNELNRKMQTEIQEHITRIDKRMEALAEEHYEEVMEALLTIPGIGKKTAIELVTVTDGFGRFDSARTLASYVGICPRIWESGTSVRGRGSISKLGCPQLRKLLYMCSWSAKHSNPACKKMYDRLKKRGKPEKVIKVAIAHKLLRQAFAVGSKCEPFEEKKALAA

SEQ ID NO: 474321 - protein, 375 aa, unidentified
MSKSTVFVGMDVHAETIAVAVAAGRDQVRSVGTIANRPEAVRRLVGKLGKPAKLKVCYEAGPTGYALYWELTRLGVQCEVIAPSLVPTKAGERIKTDRRDAEKLARSYRSGDLTPVWVPDARHEALRDLVRAREAAKEDQLRAKHRLGKYLLRNGQRPAEGCRAWTAAWWQWVRALELPYADQNTTLLDYIMQVDHQAQRIELLEGAIDRAVAAAPAELRAIVDALQALRGVAKVTAVTLATEFGSFSRFERAAQVMSYTGVVPSEHSSGPKTRRSGITKTGNSHLRRVLVEAAWHYRHQPRICQRQHALQAALPPKVAAIAWRAQERLHRRYWALAQKSKPAGKIVTALARELVGFVWAIGIETEQQLHRSKTG

SEQ ID NO: 474322 - protein, 367 aa, unidentified
MKKVSTVGAKPSKKISQQKLTVGLDLGDRNSWYCILDESGQIQLEQRVRSNAKALREVFGQLPHSRIALEVGTHSPWISRLLSELGHEVIVANARKVRLIGESRKKDDRLDAQTLARLARIDPGFLSPVKHRSAQAQADLMMIRARAGLVRARTALVNTVRGLAKSYGERLRGCNVRNMNPEKADGLSPELQSALEPLLAGIEELSEQIREYNERIEKLAQESYPQVALLRQIKGVGTLIALTFLLTLEDPHRFRRSRDVGCYLGLQPGRRNSGQSEPQLHISKEGDPYLRTLLVQGAQHILGPFGVDCDLRRWGLKLAERGGRSGKKRAIVATARKLAVLLHHLWVSGEVYEPLHNSRRTTVAAAA

SEQ ID NO: 474323 - protein, 468 aa, unidentified
MARSQSHARSLAEGEIRSTEGLPVVNPHAAGADIGAEAIFVCLPGPDQTQIVRSFGTYTADLNAIADWLAEHGIQTIAMESTGVYWIPLFEVLEGRGLHCCLISGNLARRLPARHKTDVLDCQWIQTLHSLGLLTQSFRPDADLIALRTLLRHRGQLIEHRSPHILHMQKALIHMNIRLDQAVSDPTGDTGLRILRAIVAGERDPRKLAALRHPNCKKSEAEIARALTGTWREEHLFVLKQSLELYDFYTRQIEACDAEIERTYSAIRPTWPYPNPADQEPLPAHKRGSRSKNLPRDSAVHVRQHLRRLTGIDLTAVDGLSLDLAQKIVSEIGTDMSKFPTEQHFTSWLKLAPNNQVTGGKIIRSSTGKSHNRARQAFLQAAASVARSHCAFGAFYRRLKARVGPAQAQVATAHKIARVVYHLLKNKIEYQQMSAEEYAQQFRERELRHLQRKAARLGFTLTPAGAVS

SEQ ID NO: 474324 - protein, 343 aa, unidentified
MYFIGLDVHKKTISYCVKDAAGRVYQEGKIGSTRRELDEWIRTMPQPRTIAMEATIFTGWIYDHLLPHAEKVKVAHPLMLRAIAAAKKKNDRIDAGKIADCLRCDFLPECHMATTEIRDRRRTLRYRSLVIKQMVQIKNRVSGLLMETGVSYNKQRLHKVGYFAELMTGNEDVHESIRPLLKLSRELISRSQKLDYALLSSLQRDPLLKERLRRLRTVPGVGPITALTWALEIGDFTRFSSIKQAISYCGLCGDEKSSADKVMRMPISKQRNKHIQRVLIEAAKLAPRESPELAVIRARELERGNPNRATLAVARKMVSYMLAVERRKQDFVPAEEFSRTAAA

SEQ ID NO: 474325 - protein, 384 aa, unidentified
MAAREGVSPRLRTVSGDPGISLGSPDHKVWSGETRSPFKEIRNMMIVSNTTSQTAKIVWVGIDLSKKTLDAAIWHGNTKYSWRKFDNNPRSFSTIVDWATKFAIDGSELRFCMESTGDYGTLLALYLLELGYYVSVENPARIKHFGIQKGVLTKTDKADAKVIAWFATDNSPKACPLKDPLTRELLRLHRRRLQLTEMIASEKCRRECPTVIGAECMDSIKVVLKALRAELRRIEEKLRELIDSNEKLKEKSELILSIPGLGWASVFVILIEMPDIEDVAHAPSYAAAAGVQPTAKRSGERQPESSPMSRAGRRIVRRSLYMPSIHASWKIPELEMLYTRLVGKGKRRMQARVACLRKLLMIVYGVLRNKKKFATRYPQSDTTT

SEQ ID NO: 474326 - protein, 316 aa, unidentified
MTTNSVVVGVDVAKDRLDVAVRPSGEVWSEANDEAGITALVARLRPLGPVLIVCEATGGFERAAIAALAAAGFPVVVANPRQVRDFARATGQLAKTDQLDAALLALFAERVRPTPRPLPDAAAQLLDAVLTRRRQLLEMLVAEKNRLGFAPKPLHRGIQAHVRWLERQLDDVTKELAGLIEASPVWRAKDNLLQSVPGVGPIVSSTLLGELPELGTLSHKQIAALVGVAPLARDSGTLRGKRLVWGGRASVRTALFMAAMCGRRWNPTLKVFYERLKAAGKPTKVALIACARKLLTILNAMMRDQARWTSNVQYSC

SEQ ID NO: 474327 - protein, 315 aa, unidentified
MNQTNWVGVDTHKDSLACYKDGQFKEFKTTPKGFSAALEWAGKDSKWAIEGAYCYGKPFTANLISNGCEVYEVNSLLTKTWRRSLAINNSKNDYGDAKVISLNANNARLQKISLETIQLKEKITAREHFVKDRTRAINAIKMLFSARGLDLPFEDLTTLKAGKWLSEHDDSVIKHFGKVLSDFNRAIKDLEKEIEKSLPEKARKLKQIKGIGDLTAAIIYTETKGKVISPEALASYAGIAPVEHSSGKSRKHRNNKAGNRRLNCIFYRISIHQSRFDEKGKAYYEKKLAEGKTKRHARKCLARQLVRLVFHLLKD

SEQ ID NO: 474328 - protein, 420 aa, unidentified
MGTLDQVAFTAYVGIDWADKKHDACIQQANSKQREFVVIPHKVKLIDEWARSLHKQFGSPIAVAVELTKGPIISALQKYDFFVIYPVNPATLAKYRETFKPSRAKDDPTDAELAVDLILRHPEHFKPLTPQSVEMRTLASLVEQRKTLVNDKNRLTNRLRQTLKQYYPQVLEWFEHIDTVLFCDFIERWPTLPQAKRARKTTLKTFFAQHNMRFANVLDRRVIAIKEAMALTTDEAVIVPHRLQALVFIEQLRVTLKALKQFDKEIAKLADSHVDYGLFRLLPGAGPTMAPRLLVAFGEDRERYQNAAEVQKYSAVAPVTERSGNKHWVHWRWKCSTFLRQTFIEWAGQTINKSYWAGAYYRQQRAKGSKHQAAVRALAFKWIRILYRCWQDRVPYDESKYLKALERRGSPLVKQPAEIA

SEQ ID NO: 474329 - protein, 346 aa, unidentified
MTIVDTRAITGGVDTHADVHVAAALDPIGGLLGVQEFPATPAGYGQLLGWLAGFGTVSLVGIEGTGSYGAGLARYITRAGVRVVEVDRSDRQDRRRQGKSDPLDAVSAARAAQSGRATGASKGRDGAVEAIRALMVVKRTARSERTQTINQARSLVLTGPDDIRVRFIHHTTSGLVADLAGLRPRPGATVGYATRIALRELGRRAQFLDGQLESPGELIVPLVTARAPGLLALYGVGPDTAALLLIAAGDHPGRLRSEAAWAHLCAAAPIPASSGKTVRHRLNPGGDRQANHALWRIVITRMSSHPPTRAYVERRSKEGLSKTEIIRCLKRYVAREVYLHLRPPAG

SEQ ID NO: 474330 - protein, 455 aa, unidentified
MGKQELSLQVVNLHAAGIDVGSRSHVVAIDQNKENVREFGVYTKDHEQLIIHLRSVGVTTVAMESTGSYWQTLFNSLQTAGFEVLLVGGNQTKNVKGRKTDVIDCIWIQKLHSLGLLSGSFLLSNILQELRTYYYHRQHLIEQASMYVHKMQKSLRLMNIRLDIVIRDIVGKSGLNIVEAILAGDRDPVYLASLVDIRVKRTQREIAEALEGSWRGELLYELKSSLDFYKLYDKALLDCDRAIENLLLKYLPKTPIAHKEQKAQKGTSKKSRKHAPAFNVSNIAFQYFGTDLFAIPGVSHTTVLCLMTNIGHDLHKFPSAKSFASWLRLVPNNKISGGRVISSRTPSGKNYIATALRQAANSIGNQKDHDLTPFFRRIAFKNGRIAAITATARKLAVIIWNMITKVQPYRKKDPQLNNEKQKATQLRHIEKRIGALQLNQDELNKLFTRSSFLTN

SEQ ID NO: 474331 - protein, 353 aa, unidentified
MEQFIGCDAHKKFSVFVAVNEKGQAGEALRVTHDRQLYREFLARLPAHSAIAVEASGSYSWLVDEMERSGHRPKLCNPLEAKRRMGLTKKTDTLDARGLAILLRNGTLPEVWIPPSELRDQRELLRLRIFLVRLRTRVKNRIHGTLSRHNVQVPGADLFGVAARMHLGTRLPELPLHSREAVEQELATLDFLETQIESAEQRLEAIMKVSVEADLLKTLPCVGKILSMVLMLEIGRVDRFPTAAHLASYAGLVPRVHSSGGHTRMGQVCGNVNRNLKWAFVEIGNLVVVNQRRLAGSHVVRRYQRIRRAKNHQKAVVAVARHLAEAAWWVLTKQEVYREPQGPRQQALSSTHG

SEQ ID NO: 474332 - protein, 398 aa, unidentified
MTESSDYESVQVFIGVDVGKDTHHAVAINRSGKRLFDKALPNDENKLRSLISDLKQHGQILLVVDQPATIGALPVAVARSEGVLVGYLPGLAMRRIADLHAGEAKTDARDAAIIAEAARTLPHALRTLKLADEQIAELSMLCGFDDDLAAQTTQASNRIRGLLPQIHPALERVLGPRLEHPAVLDLLQRYPSPEKLASLGEKKLAAQLCKLAPRLGKRLAADIAQALAEQTVVVPGTNAAAVVLPRLALQLITLRKQRDEVALEVEQRVIAHPLYPVLTSMPGVGVRTAARLLTEVACRAFASAAHLAAYAGLAPVTRRSGSSIRGEHPSRRGNKALKRALFLSAFAALRDPLSRAYYTRKMSQGKRHNQALIALARRRCDVLFAMMRDGTFYTPQGS

SEQ ID NO: 474333 - protein, 341 aa, unidentified
MTLIKAVGIDLAKLVFSIHGIDEHDKCKLRKTIKRNKLLAEITKLPPCIIGMEACSGAHYWAREFTKLGHDVRIMASKFVIPYRQNEKNDANDAEAICEAATRPKTRFVSIKSEEQQAVLCLHRIRQSAIKDRTARINRLRGLLAEFGIIMPKGRYPAQRAIADILEDGDNNLPFLARELLDDLWQSIKGLNEEILKYDRKLYALANQMKDAKRLMSIPGIGEITATAVVATVNDAKHFETSRSFAAWIGLVPRQYSTGGKVHLGRISKRGEKHIRTSLIHGARAVIANCKNKTDRTSLWVKDLVERRGFKRATVALAAKNARLIWALLHSNKEYQVDYVK

SEQ ID NO: 474334 - protein, 364 aa, unidentified
MKQLSKKQSAIAAESKPEKVVGLDLGDRYSHYCMLTSTGELMEEGRIQSTTAALGKQFGNEPRMRIALETGTHSPWVSRLLEGFGHQVIVANARKIPTVTASESKNDRNDAEQLARMAAFDPKLLHPVEHRSLERQQDLNLIHTRSVLVRARTMLVNSVRGLVKSAGSRLAAASPEAFPGKARLTMPAELKPACEPLLEQIARMNATLAAMDKQIESLYKKYAEIGLLRTVPGVGPVVAACYALTLDGPEAIETNRQAGAFLGLRPRQQQSGDSNPQCGITKTGNNYLRTLLVQSAQYILGRFGPDSALRRWGLKLAASGGKRGKKRAIVAVARKLSVLLLSMWRNRKPFQPFPQGAPQISAAA

SEQ ID NO: 474335 - protein, 366 aa, unidentified
MKKSITPIGTPVGIDVHKRRCKVVEFHQGEIKVRKPMGNTREDWLELLTELPPDAEIGLEVSTAGYFAMSVLEAAGWRERAHWVHTAGIDSNRRQKNDRLDAERLARKLAAHHVDPLPEAWFPPPAIRALRLRARQRCWLALLRTQAKNHVQSLLEMHGLQIPGSDPFGTAGQRWLAAQKLPPPLTESIPQTLRLLGLLEEEIHTSEQYLQAADKQFPELMLIRTIPGIGPILAPVIWSEIGTIERFRSAKALANGTGLVASFYDSGEVKTTGPITHQGSRWLRWAFVTAANVAIQGRNPFARRYHRLRRGKKANVAKAAIAHSLARCVYGVLKHGCPYREDRWGRQVGALEPETRAGARYTKTAL

SEQ ID NO: 474336 - protein, 427 aa, unidentified
MPYQIAGIDVHKKMLAIVVADVAVEDDYHFERLKVGTSPAQLRALADWLVEREVEEVVMESTAQYWRPVWEALEQYWRPVRRTRAGASPVSGTLHLAQAQSNRGAGGRKRDFPDAERLVKRLVAQELTLSFVPDAEQRLWRTVMRRKYQVTRNRVQLHNRLESLLEEAHIKLSSLVSDLLGTSARRMLQALANGETDPATLASLADARLRATAAQLSDAFGACTTLHPVYRRLLKLTLDELRLIEDHLGQLDQQMADLLAEHHEPVQRLAEVPGLGVDSAQQIIAEVGATAATFPSPKHLASWMGACPGNEESAGVNYSHRCPKGNRQMRRVLNQAANAAVKAKGTIFAIVYRRLVPRLGHAQAIGAIAHRLCRLIWKILHQGIRYEERGPAVSDEAKKVRARKMIRELRSLGYRVELLAAPSSSPA

SEQ ID NO: 474337 - protein, 384 aa, unidentified
MTNPMLQTNDTASTPQATIVLLVAMEMSLKTWRLVMAVKGQPRKRVKTVDGGDYPALLKAVEEVKERFQLPAETPVIFCYEAGRDGFYPYRRLTELGHEVWVIDSASIEVSRKQRRAKSDGIDAEKLSDLMQRKASGEKKALRIVWVPSVEEEDQRGLPREREALLQDRQRVWNRIESWLFNQGYREIPKSAAALTEWLQARRELCPQLRERLTRDIERLALLEKQVRATEKEMNRQVQQEHKTEMARVAYALMGLCGIGLIGAWVLASELFGWRKFRNRREVGGALGLTPTPYSSGEDQREQGISKAGNERARALLVELSWLWLRYQPDSALTRWFQERFAGGGKRLRRIGIVALARRLAIALWRYVDQGVMPAGATLKAATA

SEQ ID NO: 474338 - protein, 406 aa, unidentified
MKSDNLSTINQIKMTLKYSVGLDVSSKDIKAAICTIDLEQRVKVVGTKTIANTQSGFVALQDWIGRKRRESSVPLSICMEATGVYHENCSLYFHMKEFRVSIILPNKAKKYLESLGIKSKNDSIDAKGLAQMGAEQVLKQWEPMNGFFHTLRGLTRHYQSLQEQKTVAIGQLHAHEHGMATDKFIAKQLKARIQFLEKQVAAVLRQINTHIASEKEVAQRIDRICAIKGLSTLSVSTVVAEVGGFELFSSYKQLVSYAGYDVVENQSGKRIGKTKISKKGNSRIRRILHMPAFRAVSCKEPVLLSLYQRTFARHGIKMKSYVAVQKKLLLMIYYLWKNDTVYDKNHFMNNIQEQEQKPLSGSLPKTEKEVAPLEGEATQGKHPTNNRSMPPLGKTKLKKTGKLLAL

SEQ ID NO: 474339 - protein, 433 aa, unidentified
MSKSKAYRSTDVKNVVLDEVLSKAAPGRVTVGTDIGKFSIFAVIRFSDGTFLRPWKVANPSEIEYFVWLLQRLSKDHDVTVAMESTGTYGDALRFELAEVGLAVARVSGKAARDYGEIFDGVASQHDGKDAAVVAELCALGKSRLWCYQAPKEEDAEMAYWVDKLDAQQRVQNLWTGHLEALLARHWPELTRLIDLTSVTLLNAVAHYGGPAALAADPEVRQQLRRWSRNALKEASIEEIVSSAGQTFGAGQNVYDVKRLQEAAASALSALREKQVAHAALEELAQSNEILRRQALVVGSVTACVLWVAIGDPRDYHCGPAYRKAMGLNLKERSSGQYQGQLKISKRGSAIARRWLYFAALRTVQKPAAHDWYEAKKAKDKGRGKGALVAVMRKLSLASYAVGARGETYDPERLFPGKPWVEQACQTPSAVEI

SEQ ID NO: 474340 - protein, 409 aa, unidentified
MQVIHPRCAAVDVHKKHVTVWTRIARGSKVEREFRTYGTHTGQLMQLADWLHGAKITHVVMESTGPYWRPVWHVLEGMFELTLANARDVKNVPGRKSDVKDPEWLSDLFAHGLVRSSFVPDEPIQELRDLTRTRKQIQRERVRQVQRIQKILEYANVKLASVISDILGVSGRRILVAIIGGEKDPERLAELGGSRLRASKEELREALRGYVTEHHRFMLKLHLDHIGAIDHTIQEIETRMEKCLEPFRSEVERLDTIPGIERNGAAAIIAEIGVDMSRFPTDGHLLSWAGLCPRLDESGGRTRSRRIRQGDRWLKTMLVQAAWGAVKSKDSYFHAKFIRIRRRRGDKKAIIAVAASILTAAYHMIKNQKDFLDLGADYLRGIDREKMAKRLMHRLAELGLQVEVRNIAA

SEQ ID NO: 474341 - protein, 316 aa, unidentified
MNGQPIYAGLDVSKARLDVAVRPNGEFFSEANDKPAVSRLVKRLTALDCTRVVVEATGGYETIIVAALYAAGVPVVVVNPRWVRNFAKGLGWLEKTDRIDAKLLASYAEHAELKRQQLPDEATRRLAELCARRIDVLEMMESERNRLEHASSAVRRAINSHIDYLRKQLKRIEHDIDGAVRGSELWRHKNELMDSVPGVGPTLRACMLAWLPELGQLNRGEAGKLVGVAPLPDDSGTIRGVRRIFGGRAPLRKVLYMATMGAMLHNPQLRAHYDRLRARGKLHKVALVATMRKLLLILNAIIKTDTPWRESCLESA

SEQ ID NO: 474342 - protein, 400 aa, unidentified
MLSIGIDVSKGKSTVCGMKPGGEIVYTPFEVQHTRKGMSELVSLLRGSGEEVRVVLESTGSYHCPVVAALLENGIFVSVVNSLRMKRFCSQSIRRVKTDQIDAMQIALYGLAYWQELQPTRLPENTYRELQLLARQYYQMTSLLIKAKVDFNALCDQVLPGMQELMNDHAGRHKLSDFVLRYRHTTHILEMGETRFRKDYCKWAEKKGYRNRERMAALIFATAQNGIPVLPNAPSTQIVITEAIRVLHTVEASRDAILTQMQALAKTLPEYSLVREMPCIGDTLAPRLIAEIGDVRRFHSKRALIAYAGIDAPPYQSGKFCANNRHISKRGNRYLRKTGYEVMQSYVMHKPANDPIFTFIEKKRGEGKSGKLAMVAGLNKFLRVYYGKVTELYRSLPAIE

SEQ ID NO: 474343 - protein, 405 aa, unidentified
MGAEQVAHGWAGIDVGKAHHWVCLIDEAGSTLWSSKVVNDEAAILDAIAEVLARAQRVSWAVDITGTSSALLLALLTAHGQAATYVPGRTVNQMSTAYAGEAKTDARDAYVIAETVRLRGDLTPVDVPATLVAELRLLVTHRTDLVADRVRMINRLRDVLSGYFPSLEREFDYSTSRGAVVLLTGYQTPAAIRARGRARLSTWLRARKVRSAEQIATAAVRAANAQHTTVPGQDVAASIVAEIAAALLELDQRIRVLDARIGETFHAHPQAQIIESMPGIGTILGAELIAAAGDLSRYVDAGHLASAAGLVPVPRDSGRRTGNLHRPMRYSRKLRRVFYLSAQTSMMREGPNRDFYLKKRGQGHGHVQALIALARRRVDVLWALLRDDRVFEVAPPPRQQLPQTA

SEQ ID NO: 474344 - protein, 345 aa, unidentified
MKIVGCDLHTRYQQIAMLDTETGEVIERRLEHANGEARAFYASLPGPVRVGIEATGHTRWFERLLAELGHELWIGDAAQIRAAMVRKQKTDANDAAHLLQLLVEDRFPCIWRPSRAERDLRQLVWHRQKLVWMRNAIGNQLHALAMGEGLCRKKQLWTKQGRAELEGLGRDEWASYRRQELLQMIAQLDHSLKKLDEAVEKQSQQNAAAVLLRTHPGVGPVTSLAFVLTLGPVTRFACSKQVASCLGLNPREHSSGGKQRLGAISKQGNPMMRSLLVEAGHSAARLDAELRKDYQRLKLRRGSGVAKVAIARKPAVRMYWMLRQQANYAQLVRMQGSPWATLVQK

SEQ ID NO: 474345 - protein, 433 aa, unidentified
MEEVTDEPLYRDRVCGIDIGKAEMHATIRVPSDRDRSRRAAETRSFATTKRGVLALADWLRCWQVPAVVMEATSDYWKPVFYRLEAEGFECVLADAKQVRNLPGRPKRDPSDSSWLAVCFERGAVTSCFVATPEFRIIREHTRYRRDLTGERTREKNRAEKLLESAAVKLSSVVTDLHGVTGRDIMDHLIAGERNPKVLAQLARARARRKITELEQALEGAEFFTPELAALLAAMLARIDSVNAEIGKLSLVIERLLAPYEEQLQQAESMPGWGRRAAQDAIAETGVDMSRFATPGHLASWAGRIPLDKQSGKRAGQARHKRGNRYLGAITGETAVAAGKTDTREGARHRRISRKRGKAKACVATGNTQMRVYHALLSHPGTRYQDLGADYYEQHADARRRARSHVRDLERLGYKVTIEPLAPETGELITSAG

SEQ ID NO: 474346 - protein, 416 aa, unidentified
MDQRRYNVCCGADIHKKFLVATILLLDGTKLTKRFSMDLRSLFEFRDWVNANGCEAVAVESTGSYWVPIYRVLEGHVELIVANAYKIKNVPGRKTDTIDSEWIAELCRNGQINPSRIFPKDSRDLRSLTRARERYVDDKTRVKNRIHHVLDSNCIRLSSVLSDIFGKSGRYILNCLLEGTDIDEIIEAIPVKRIKKKEDQIREALIIQLSCTDIILIRGYLEQIDSIQKNIEGLESEIRKRIAPLRKDMAIVMSVPGIGFISALVILAEIGNYNDFDKAEQLAAWCGLVPSVYQSADKIYMGSITKQGSGHIRRILVEVAHVIARTKGRSKLKSFFLRIKAKKGNNIAAVALARKVLCVLHHLLKAHEMYQEEEKDGDAEVEDLGIPRQGISLDDMIRHLAKAGYEVRKRAPGAGG

SEQ ID NO: 474347 - protein, 428 aa, unidentified
MAPEPMPARTWTFVAIDVAKQTNDVLMEYPDGTRQRWRMTNTLHHYRLLRDRLQALTVPPLIGFEATGNYHRPLAYFLGQAGFDLRLISSLAMARTRDALYNSWDKNDPKDAQVLLHLLKSGVTQRYHDPLVHELNDWQELAQAHFQVSLRKTRVQHSILTHYLPLYFPEMERYYTQSRSQWFSRLLHRFPCPAAITRYSKEAFHQEAWSVVGRKVNKRGFLDDLYATAQESIGLPVTEECEAMQSFRLMLQHHQELCTARASLEQRADQKLSGHPDYQRLRTLPGVGPILALTILAEAGDLRRFSHHRQFLKFCGLDLSTQQSGQFRGQSKLSKHGNGRLRCAFWMAAQGAIRMRENSFRQKYDRYLKGDPRNADRKRKAMSAVAAKMARVAHGLMKTGTDYRPFFEAAVPSGALRSLVPSRHAVTS

SEQ ID NO: 474348 - protein, 339 aa, unidentified
MREVYAALDVSDKSTQVCVVDGGGERVWTGSCPTDPAAIASVLGKRAPHLARVVLETGALSTFLYHGLIEREVPAVCVCARHAKGVLSARVNKSDVNDAEGLAQMARTGWFKAVQVKGEATHLQRTALKVREQLVGAHNAMANQLRGLLKLYGLRLGAAKAPSRRRERLAALLAQKPELAPLLAPLIDALEAIEVQLARATRQLKAAAATDPVTARLMSVPGVGPVCAVSFKTTIEDPDRFARGEDVGAFAGLVPRRSQSGEKDVKGHISKAGDPMLRAALYESANNLLAIVKRPCALRTWGLALAERKGSKRARVAVARKLAILLHKLWQSQTEFRWA

SEQ ID NO: 474349 - protein, 332 aa, unidentified
MKIKKEVIGIDVSKLTLDVFIHSLKHHFIVSNNPVGFSKLLQVIWKELPDNKENLFFCFEDTGKYSLPLCIFLNGEKLSFSMVPALDIKRSIGLVRGKNDKKDAGFIALYAWRKRDEIKPTIFPAGAIVRIKQLLSLRNKLVKHKKAYQTAMCDIQDYFKEGDSQFYLDVNKRVIKSLSSEMESIEKEIETIIKSDPEVQKNYKILKTIPGIGKIIAFYLIAYTHNFTKFENARKFCCYCGIAPFENRSGTSLKGRTKVNPLANKMIKALLNMGALSAVRNYPEFRSYYNQRVENGYNKMSTINIIRNKIVFRAFSVIKRGTPYINLHKFAA

SEQ ID NO: 474350 - protein, 320 aa, unidentified
MNMEKKYVGVDISKDSLDMAVFDSNQRWHFNNSPIGIAKAIAALEAVKPVFAVFEATGGMEIPFWEALYKAGIDAAPINPRQIRDFAKAKGRLAKTDTLDAQVIAHYAQAMQPRPMPFPDTQELKEVMARRNQLVEMISAEKNRLKAARKEDIKEDIRAHIKWLETRVDNVDKELRKAIEASPVWREKDQLLRSTPGVGPVLSATLLTQLPELGELNRHQVAALVGVAPLNRDSGLMRGKRTVWGGRGRVRGALYMAALVATRCNPVIRAFYQRLCSLGKPKKLALTACMRKLLAILNSMVKYHTAWTHCATPILIGTCQ

SEQ ID NO: 474351 - protein, 338 aa, unidentified
MHVAGIDAHATYVVVAIVSNGGALVQKPVRIRNREIGKLRSVLQPFEPLEVVVEASPSWPWLYDLLDGPDCHFVLAHPKRLRAIAESNYKNDAIDATLLARMRVVDLIPEVYCKPIEQREQATLVRHRARLARLRTQAASRIHAELHSIGLSLPRGRLLTRDGRRWVHTTAWPLFGPEQQNLVRTHERIADALKKLIKGLDRRVREVGSEIPSVALLETVPGIGPYRGLLIATEVLPIERFQSPKHLVSYAGLAPRSSRSGMSVRYGPIPAGANRWLRNAFVQTAMVHVRRAPDSWLSQYYVQLKERLEWRVARIAVARKLARAVHAMLRTGEVWRHA

SEQ ID NO: 474352 - protein, 321 aa, unidentified
METAKLVGQTQPFTAGETATLFVSLELSRARWLVTSLSPGGSKISRHSVAGGNAAELLRLLGELRAKAERRIQAEVKIVTIQEIGFDGFWIHRILASNSVESHVVEAASIAVPRRRRRAKTDTIDGDLLLRTLMAFKRGEPRVCAMLTVPSPEEEDQRRLSRERKTMIKERIEHINRIKGLMACQGIAGFEPMHANAREKLEGLRTGDGRAIPQRMKAEIRRELDRLALLRQQIAEVEAERDALLHAEEAPRGSPGALLLKLRGIGPEFASVLWQEGFYRRFANRRQLAAYAGLAPSPWRSGDMKKEQGSRNLAMRACGLR

SEQ ID NO: 474353 - protein, 316 aa, unidentified
MLIESASACHPFWVGVDVGKESLSVYIAASDKALTIPNKTSAIKDFLRQYPAATLALEPTGGYETKIITLAIEAGCTVYRVNARRVRAFMESLGIYAKTDAIDAKALADFAVANVARLQPFLLPAPELKKLRQLARRREELISMRVQETNRLKAPDNACLQAGIKAVVTCLESQIEATEQQIAEITESSEALHEKIGVLTAVKGVGQVTAVSLLAAMPELGRLDGKQAASLAGLAPFPRDSGKRKGYRRTRGGRVDARNALFMASLSAARYNKDLKIFYDRLIKNGKRKLQALIAVARKLLVILNAKLRDAALKPA

SEQ ID NO: 474354 - protein, 362 aa, unidentified
MQKVITHVGVDVHLERIVIATLTGQSREPEVRDIPNDPKVIRRTFQRLLAEAYELRCCYEAGPCGFELHRQLTSMGITCEVVAPSLIPVRAGDRVKTDRRDARKLARLYRAGELTSITVPSAEQEAVRDLVRARDDVRKDLTAARHRLGKFLIRHGRHYTTGQKWTQRFWAWSSKLVFERECERLTFEHYVAEVQHLCGRRAALHREIERIAQTEPYAAAVQKLVCLRGISTLSALALVAEIGDFRRFESPRQLMAFVGLVPREYSSGGKEKRGGITKTGNKHIRRLLVEAAWSYRHRPALGERVRSALEGQPPAVAEYTRKAQVRLHRRYTRLLSRGKQPQVAVTAVARELCAFTWGLMTA

SEQ ID NO: 474355 - protein, 344 aa, unidentified
MDQFAGLDVSVKTTSVCIVDDTGKVVREVKVASEPEALLAVLKNPAYRFKRIGLEAGPLSQWLYGALAESELPMVCVETRHMQAVLKAQINKTDRNDARGIAQMMRVGLYRPVHVKTPRSQKLRMLLTHRKLLQSKAIAIENDLRGTLRNFGLKVGMVGKVKFEARIKELVENFPDLAELVEPLLIVRRVLREQFGILHRRLLAIVRDDEVCRRLMTTPGVGPVVSLTYRATVDVPARFRKSKAVGAVFGLTCSKYQSGEIDWSGRISRCGDEMMRVMLYEAAQSMLRSKKWSWLKAWAMQIARRRGMKKAIVALARRLAVIMHRIWVDGTEFRWTREQAGAAA

SEQ ID NO: 474356 - protein, 406 aa, unidentified
MNQNTCITIDVSQNKSHIQGFIGPNKPLSKARTMRHTKQGYQFILTLKNLIESKTNETPLIIFEFTGIYHKSLEKFLISQNLKYHIVAPLRAAKARNSEIREQKTDARDCLSLSKLFYSNNLGVFYSEDETYSNLRKLNRYYDTCMKHFVKIKVNFRETLAVIYPNYKKLFTSIYSDESLTFLKVFPHPSFYTSKSEDEIIEILKDKWNHVESWTSSKVKKLTPLINEVVPGCNVTEPDIIMLLSYITQIEYYLNQIKFTISKMNELAKKVPLYNLVHSLPGIQDILTCKFIAELGDISRFINYKQIVAYAGIDPMIRQSGDKDGLHLKMSKKGNKRLRTILHLMVSSLIKTNRESNAIKDKYQKKTHQLNPLKPKVASMACANQLVRIIFYMHKTSSTYTYQKCK

SEQ ID NO: 474357 - protein, 407 aa, unidentified
MICVGIDVSKRKSTVCFMAPGDKIIRRPFDVKHTKEELQPLVDEIRVQAKYDEIKVVMESTGVYHLSIAYFLQQNGIFVSVVNALKVANFNKAENFRHTKTDSIDSTNIARYGIAYWAKLPQFDLNGDKYFLLKRLCDAYLNFSEERSRILLQLQSQLEQTMPGIFDLFGGFDINSGKDKLLDFLERYCHIEDIIAKSEAEFVASYCGWAKEKGYRSNESKAATIYAQAKNGIPSIPNNPIVRETIMWYVGLLRRADEALMASLTRMEDIAKDLPEYELVGEMGGVGRVTRVALIAQIGDVRRFKNKHSLICFAGLTPSIHESGKFRASQNHIVKKGPARLRKVLYQVMMSLVMHKIPKDDAVYRFIKKKEAEGKYKKVAKVAGMAKFLRIYYGRVMHLYRDLGLAA

SEQ ID NO: 474358 - protein, 461 aa, unidentified
MGHDDRPTRTNSTEALEGFPVLRRDVAGIDIGSEQHWVCGPTPEGAEREVAVFAATTPGVQQLITWLQDRGVRSVALESTGVYWIVPHEMLEAAGVEVVLVDTRALGRVPGRPKTDRRDCEWIQRLHACGLLRGAFRPSEQVCILRTLMRDKGTLVAERADWLRRMQKSLDQMNVRVHRAVSDLDGVTGMAILRAIAQGERDPHRLAALRHRRCEKSEAEIATQLTGHWRADHLFSLQQALHRYDAITIRLEAYDQEIHRQLVQMTPDERRDLNAPPPPSATKAKAMKTRGNDPLRHALYRVSGVDLTSIDALGVETVSIVLSEYGTDLSRFPTEKQFVAHMRLAPYKPISGGKVVTNRKKPCSASARVGAALRMAALTARRSQTALGAYYRRIAQRCGADVAVFATARKLAQYIYRLLRWGQPYVDQGAAAYEKRYHEARVKRIAASANQLGYTLVSVTT

SEQ ID NO: 474359 - protein, 356 aa, unidentified
MVTLGVDAHKRIHVAVALDEAGREIAQWRGQNSAVGWQGLLEWAIGLECGRRQWGIEGAWNYGRGLAQHLVEAGETVYEVNSRWTAAGRRRARQTAKTDRLDARAVAHCVRQEAPGLPRVGADDETAVLDLLTSERAAVLNEATRLRNQLHALLMQLDPEYHQRLRNLDSPEGLAALESYQPPTPGALAEERAAAVRRMAQRLRLALGQTAELTQRIRGLTIQAGFTPLTEIFGVGLVMAGTLAGILGPGCRFATDAELAAYAGVAPIETSSAGLVRHRLNRGGNRRLNSLLHMIAITQLRSWTPAQIYVGRRSTEGKTRREGIRALKRFLVRAIWHAWRRCIEARTASRELPSAA

SEQ ID NO: 474360 - protein, 384 aa, unidentified
MVRTYVGIDAHKNMCHATVMSQDGNIVSEKRFSTNVKVLEAWVRTHPKNFIYAIEAGTPTKQLYWALKAMGREVHMAHPAEVRRMQGTKKKTDRTDSAFLADLLRMGRLPKSYVPDPEKDEERQLLRYRMDLGKKTIVVKNQVHAVLTSAGIPTSEFTDLFGKAGSEMLRRVRLHGHQQYILDGHLKQLELLTAQIEEVEGALAKLAQKNPVARTLMQMKGIDFYSALVILNEVGDVTRFPSAKHLTSYAGLVPKIYQSGDVARTGHIHKQGPKALRAIMGQCANAAVRGAGKFQRIYRRLAKRIGHQKAIIAVARRMLAVIFVLLTRGCQYEERDERNVWKKMRRMERIARALPGVDVDNAFAGLSENAREVLRGEKSFTDAG

SEQ ID NO: 474361 - protein, 322 aa, unidentified
MSVSVLGIDIAKQKFDAALLLDGKTKHKSCKNSVEGFETLIIWLEKQGIQKVHACLEATGNYGEDVAIYLHEAGHTVSIVNPARIKGFAQSELIRTKTDKIDAGIIARFCLAMKPEPWIPPAPEIRSLRALVRRVDSLIDMRSQEKNRISTAHESVMHLIKEHIAYLDKEIEKIRRQIADLIDQNPDLKQKKDLLDSIPGLGKATIPHLLAELNDLEKFRHVREVVAFIGLAPKETLSGSSIKGKPRLCKIGHVRLRKALYMPALVSIQCNPMMIAFYNRLKEKGKNGKVIVCAIMRKLVHVIFGVLKSGKMYDPNYKPTFA

SEQ ID NO: 474362 - protein, 392 aa, unidentified
MVISVGIDVSKDKHDCFIVSSEGEVLADVFTVPNNMDGFHCLLQRIQDCTTPQDKIRVGLEATGHYSYNLLGFLLDNGLAAYVLNPLRTNLYRKSLSLRKTKTDRVDARMIASMLLSDAGLKPYTNTAYHNEELKSLTRYRFDKVKERAKLKTSISRLVCILFPELEKLVPTLHMASVYALLEELPSAKQIAAAHLTRLKALLETASKGHYKRDMALEIRDAARNSIGSRMPAKSLELQHTIRLIRELNAEIAEIEEQIQSLMEELDSPITTIPGLGFRMAAMILAEVGDFTRFSSPDKLLAYAGMSPSTYQSGQLKNCYPHMEKRGSRYLRYAIYNATKYVCLWDPNFADYLAKKRAEGKHYNVAISHAAKKLVRLIFAMEKSGMPYLLAS

SEQ ID NO: 474363 - protein, 337 aa, unidentified
MSYLGVDLHTNSFTVCRRTKQGKNSIRTFQMVRIADFCKTLRKRDLLAVEATGNTAWFVSQVRDRIKKVTVVNPFQFEVIRRSVKKTDKNDSKTLALFLSKDMLPEARMKTKENAQLHSLATTRDKLVKQRTALINKVHNVLNSYGIKFKKESLGSEKGLKSVWAYDWDVIVRIELEVLIEQIRSLNKSIKTLDKEMTDHGQKLKGHNNLTSIKGIAGRSATVLLSVIGNVNDFADENKLAAYFGIVPRVSDSNETVRHGRITKHGSKLGRTTLVQCTLVAKRYSPYLSQYYERIKNHRGSGKAIIATARKFLGIIYNTLKNGWVFEDFPNFVIANT

SEQ ID NO: 474364 - protein, 351 aa, unidentified
MDATTMAVDLAKDVFEVAWATSTGRVLARKRLTRRQFERAIEGLSRECTVVMESCGSAHYWARRCQTRGAHVRLLPAQYVRPYVRRNKTDRTDTEALLEAHRCGGIQAVPVKTIDQQTLQALHRVRTQWQSARTARINVLRGLLREQGVAVPAGARTLVTRVATVLADTAAPVPDLLRQTLALVLDEVRALEARVHALDLQLARLAKTHPVAPRLMQVPGVGVITATAMVGAVNHIHAFRRGRDFASWLGLTPRESSSGGRRHLGAISKRGDSYLRCLLTHGARAVLLTAQRTARTTPARVTRLQQWAVALAARRGHNKAAIALANKLARIIWAVWRSDQAFCSPVADASA

SEQ ID NO: 474365 - protein, 338 aa, unidentified
MKLYVGMDLHATNTYVGMVDEENKVLQKQRFRNELPLILSSLDPFKKDIQGVVVESTFNWYWLVDGLMAEGYRVHLANVSAIKQYEGLKQIDDQRSAFWLANLLRLGILPTGYIYPKEERPTRDLLRKRLQLVRHRTSHILSVKNILARNLGMRMKSGDVKKLQAPEVKRFFPDREMRTAVLASLGLIRHLEEEITEIEAMILKKLKIKKEFARLLTLPGIGKILALTIMLEVGNIGRFPTVGDYSSYCRCVKSIRTSAGKVIGYGNRKNGNKYLSWAYVEAAQFARRFHETVRIYYQKKMARTNRIVAIKALSHKLTRASYYVMRDQVDYDPARLFR

SEQ ID NO: 474366 - protein, 456 aa, unidentified
MKIPQSTIRLLTGRLVKILLYREVSIMKSNTQNAKIEAITEKTLVLGIDVGSETHYARAFDYRGIEYSKKPFKFSNTEAGFVTFKEWILDLKEKHEKDKVVPGMEPTGHYWFNLGKFLQDNEMKPVLVNPHHVKKSKELDDNNPTKNDRKDPKVIAGLVREGRYMIPYLPDGVYADLRTASNIRFQLQAELTRIQNRISRWFNIYFPEYKTVYGKPDAKSGMLILKQAPLPEDILTLGIDGVNQIWRDAKMRAVGKARAKTLIEAAEHSVGSKEGAVSARMEIRMLLEDYESRNIRLQEIMTLIEELVNQIPMAEKLLEIKGVGIKTVSGFLAEVGDISRFNNPKELQKLAGLALVENSSGKHKGRTTISRRGRKRLRYLLFEVAMSLVAKNPEFRELHTYYTTRRLNPLKKMQSLMAVAAKLIRVFYVMLTKGVDYDPKKMVGDIKRPAVYLQAA

SEQ ID NO: 474367 - protein, 386 aa, unidentified
MQYPNDSRRCLTVLDQDSTLIAVIEMSLSSWLVAGIVPGVERQPLKKLAVDESVLLKLLHRWREEAEKAGYMIKRIAVAFEAGRDGFWLARWLRARDIEVHVIHTSSVAVSREHRRAKTDRLDSELLKRAFLGWLRGERDHCKMVAIPTIKDEDGKRPNRERESLVGEQSRIINRIKATLVRLGIRGFNPKLKKAAERLEGLRTPEGELIPPNTLSELYRDMERRRLVRDQIRQIESARLDRLEHAPGEGAHAMVRLLARVMGIGIETADMLVQEVLSRNLRDRRAVARYAGLTGSPDESGKKRREKGLARSGNARVRRGMIQLAWRFLLFQKDSALAQWFRARTENARGTRKTMIVALARKLLIALWRLVREDVMPDGVILRPAQ

SEQ ID NO: 474368 - protein, 419 aa, unidentified
MSFKILKFNCCGLDVHKTWIYACIGITDSNNRTEYKQARFSSFTKGLNELCDWLAKYNCKDVCMESTGKYWIPVFNILEQHGLWVTLSHPKYTKPMKGNKTDRKDAKWICDLYMCGMVKPSFIPPADIRELRDLVRYRFKLTCMITGEKNRAQNCLTVSNLKLDDVFSDVFGKSSRSITEQILQHPGEKFDVAPFVHGRCKTPIEEIQAAIDGAISKEQAVKLRQCLDHIDELQKHISEVEQEILRLSDKYEAALTLIRTVPGFDKNPMTAIQVLSEIGGDMSVFPTAKHLVSWAGCCPRNDKSDRKIKSTRISRAGSYFKPVLVQVANALIKSKKHPEFTTRYKRIKARRGHKKAIIAICRMILTAIWHILTDLKPYTPEGFLESRPVNKEKVLTTSQALNLLRQRGYLIKDDPSLAS

SEQ ID NO: 474369 - protein, 359 aa, unidentified
MDVIDPRCAGLDVHTETIVACALWEEEGEIQKEIQTFSTFSKGLGDLLEWLEDHGVTHVAMESTGVYWKPVFAFLEGYVDLTLANPQRIKNVPGRKTDVSDAEWIAKLLRHGLMEKSFVPPADIRELRDFTRLRKKWVGQLSSEKNRIQKVLESSNVKLGSVLSDLFGVSGRNILARLLEKGYVDKDELDQCLRGRLKTKKQAVYDSLLGTLTEHELCLLRLLWKHVEELEQLIEEVDQHIDRLLEPYREEVDLLMTMPGIKKQTAAVIIAEMGTDMSVFETPERAASWTGLSLGNHESAGKRKSTRTTKGNPHLRSALCEAAWSAARSKTHPLSRKFWSLAARCGKKKPSSPRLDECW

SEQ ID NO: 474370 - protein, 483 aa, unidentified
MMTVSNKSRESTSPTRRRSGSRKGRRGLCLEDRPVHNPNAAGIDVGAREIFVAVPAGRDEQPVRVFNTFTEDLEQMAKWLVGCGIATVAMESTGVYWIPLYEILERHHLELCLTDARHMKNVPGRRTDWHECQWIQYLHSVGLLRAAFRPPEQVCAVRTLMRHRGQLVEMASQHVQHMHKALTQMNLQIHHVLTDITGQTGLAIVDSILCGERDPDVLAGLRDPRVKASPETVRKSLVGTWRMEHLFTLKQSRELYRAYQTEVAACDQQIEQLLGQFSPRVDPTERPLPPDRKKRPHPKRSRKGEPAKPTTDLDLRTEAYKLFGVDVTQIPGIAVALALALFTELGRDLSKWPTSSEFASWLGLCTDNDKTGGRVVFRRARRGKHRAGQLFRLAAYSLHSASGPLGDYLRRMKTKLGPRAATTATAHKIAVIFYTIVRNQVEYDETIWAARDAARAQRLEAKLRRQAKGLGYQLIPIPEQPAA

SEQ ID NO: 474371 - protein, 352 aa, unidentified
MKRYKEINVKGKSLFVGIDLHQVQWHVTIRTEDVEIFRGSIPGTWESLRKLVDRYPGTELHTVYEAGYFGYWLHDKLVEYGAECVVTPPSLLPIEYGNKVKTDPRDSAKLAQLLAKGMLKRVWVPSAEERFHRQVIRRRRQLIGDRVRTQNRIKAELRFYGIQIPETTGKWSKVYEMNLRRLQFNNHWMQESFQRLLEEYEFLSDQVKKQTTVLQALAETPLYIERVKILRTVPGIGLIAAMELLLELQDIERFRRADQLAAYVGLTPSQYSSADKVRMGRITAIGKSNLRGTLIEVAWRVIGKDRAMRRKYERIKARSGAKRAIVAIARITLLRTRRMLLDNKPYVMGRAA

SEQ ID NO: 474372 - protein, 373 aa, unidentified
MFHFTTLFIGMDVHKESFSLCYYDMMANQFKHSTKVGPNVSYIVNYVNELRRLYGQDAEVLCGYEAGCLGFTLYHQLQAHGIPCIVMAPTTVMKEGSKRVKTDKKDAAQLAKALAFRSYRPVHIPTVEDEQVKEYIRMRTDHKVALKKIKQQILAFCLRHDFRYTEGSSNWTQKHVRWLRSLNPDGLYAEILTEYLLTYEKLVDQIERYDARIEQLGQSDSYQEKVLRLSCFIGIKTLTALSIVTEIGDFNRFATAQHFASYLGLTPNENSSGDKERRGAITKAGNSHVRRLLIEAAQSLAKGTIGYKSKELKRRQSGNRVEVIAYADKANERLRRRYRTLVLGKNKKQNVAKTAIARELSGFIWGMMTGRIA

SEQ ID NO: 474373 - protein, 342 aa, unidentified
MQITTIGLDIAKNVFQVHGIDAKEKVVVRKQLRRSRVITFFKALPPCLIGMEACATAHYWARELTKLGHEVRLMPAKDVKAYVKRNKNDAADAEAICEAVRRPTMRFVRIKSAEQQGQLMQHRARDVLIRQRTQSINALRAHLAELGIVAAQGDKGLKELLAIVADDEDTRLPIDARASVIVLAAQLEAVQTLIGSIEKRIKMQHRSNEASQRVETIPGIGVLGASAITATAVDPTVFRSGRDFAAWIGLVPRQDSTGGKQKLGPISKQGDRYLRRILIVGAISVLRRARENPGKYPWLTQLLARRPFKVVAVALANKMARMAWALLAHGGTYRAPVLAGAA

SEQ ID NO: 474374 - protein, 385 aa, unidentified
MAPIRMPEAVIGLDVGKSSHWACVATRDGEVLLSAPVANREDDLDSLFGRFPDALVVVDQSRNIGAPALARARAAGMSAAYLPGLAAHGAARLFAGDAKTDERDAMVIAKTALGIPDALLPVGDPGPTIAAARALAAQRNFLTCENTRNKNRLRSILLESCPAFEALVDLSDGPQLRLMASLGGAWSVADAGPRRAAALTRGAARGKIEALVRSTTSSTRPDASVVAAEDRAVKLLARRISENSAEIEAITAEISALLEGDDTYRCLLTVPGIGPKTASELAISIDIEDFPSHDRLASYCGLAPRNRQSGTSISSVTASRQGNKRLKNLLIFSCNCLTRTEGRWGDYYTRCRERGMSHGKALKALARKRLKVIYAVMRDRVPYAA

SEQ ID NO: 474375 - protein, 402 aa, unidentified
MNCVGIDVSKGKSMIAVMRPFGEVVVSPFEVRHTASELSELARLLKSLDGETRVVMESTGNYHAPVAWLLHDAGLYVSVVNAMLVHDYGNNSLRRAKTDKKDAVKLANYGLDHWLTLPRYIPEEDTRLMLKICYRQYQQYSKVQTMLKNNLISLLDTTFPDANRLFTSPPRADGSEKWVDFVATFWHCECVCGRSEKAFTTQYQKWCRKHGYNFSEDKALDIYASACRHFGVIPKTDTAKLLVEQAISQLQTTSSALAALKQEMQSLAASLPEYPVVMGMFGVGPTLGPQLLAEIGDVRRFHSKKALVAFAGIDAPPYQSGQIDVRSRSISKRGSASLRRTLFLVMSVILQCAPIDEPVYQFMDKKRSEGKPYRVYMMASANKFLRIYYASVKAYLESLEHD

SEQ ID NO: 474376 - protein, 476 aa, unidentified
MAVERRLTRKRRNDLARQLRADDPGLEVMHPHAAGIDVGNSTHYVAVRPDRDPDPVRRFACFTADLHRLADWLQQCGVTTVAMQSTGVYWIPLYEILDARGVEVFLVNARHTKNLPGRKSDVQESQWLLKLHTYGLLRNSFHPAVEIRVVRTYWRQRGDHVHAISTCIQRMQKALTQMNIQLANVISDLSGWTGQRIVRAILAGERDPATLAALSHPGIHATQETIAKSLEGTWQPDLLFVLQQEVAMYDAYQHRIAECDQALEQHLKGVADKGADTAPDAEPSHAPSQEARRSGPKRRRKTGSHAPQFDLGRELYRISGVDLTRIDGIDVGVAQTLISEVGVDMTRWTTEAHFASWLGLCPDNRITGGQVIRKGTRHVVNRAATALRLAATTLLRSQSYLGAQYRRLRGKLGAPKAITAMAHKLARLVYRLLKWGHAYVDKGQQYYEERHREQQVQLLTKRAAKLGLQLVAPEVA

SEQ ID NO: 474377 - protein, 400 aa, unidentified
MDRNRTVAGLDVHKDSIYLCIMRHDEVIIFEKKYGVLTPDLRQMCNDMVERGVTEAAMESTAVYWVPVWNELCESMELKLVNPFFIKQLPGRKSDVKDAQWIAECLLKNLIKGSFVPEPIVQDMRKLNRRIMDLNDDMTYNCNKLDAAMQRCGFRLSNYVTTIKSKSYQKVLQAIIDGTTDPDELVKMVHGRTVNKHGRETIRAAVTGLFSRIDITIFRQTKEVIDTIERQIEVCQKELTALCEQYFPEQYRRLQTIPGVKERAATAIIAETGVDMKMFATAACLVGWCGLKPRNDVSNGRYKSRKVTHGNKYLRQILIEIAWVASRTRNCFFSNFSYIQTTVKKKSKMKIQVAIARKILVAVWHMLTKEQDFIDIYLKRLEEQRKMEEQIKRLESTVIR

SEQ ID NO: 474378 - protein, 347 aa, unidentified
MYYIGLDVHKKTISYCVKDASGQVHREGTIGGNRNELDWWMKTLPQPWAVAMEATIFTGWIYDHLLPHAAQVKVAHPVMLRAIALAKKKNDRIDAGKIADCLRCDFLPECHMASTEIRDRRRSLRYRHLLVRQMVQMKNRVSGLLLETGVSHNKQRLHKVRYFQKLISNQEEVPESIRPLLKLSRETIVRCQKTEYALVSSLQRDPLLAERIKRLRTVPGVGPITAFTWALEIGDVSRFRSAKQAISYCGLCGDEKSSADKVLRTPLSKQRNKHIQSVLIEAAKLAPRHSHELALIHEREKQKGNANRATLAVAERWSRICWPWIAEERTSFLPKREARRRLSNAGQ

SEQ ID NO: 474379 - protein, 358 aa, unidentified
MSEHDKVEGQLTVGLDVGDRYTHACVLDPDGVILEETRLATNARALRHRFEGKERQRVVLEAGVHSPWISRLLVELGQEVYVANPRRLRAIYENENKCDRVDARYLARIGRLDPALLFPLSHRTAQAQADLAVLRSRAALVRARSSLIRFVRGVVKSSGGRIPACDARLFARKAELHLPAELRPALSLLLATIADMDARIGEYDNEIESMATERYPETDLLRQVAGVGPITAATFVLTVEDPTRFARCRSIGSYLGLRPRRDESGTINRQLRITKAGDGALRSLLVSCSQYILGHFGPDTDLRRWGLHLAERGGKNGKKRAVVAVARKLSVLLLRLWATGEIYEPLRNARLQGTLSTT

SEQ ID NO: 474380 - protein, 401 aa, unidentified
MVSDFKKGRYNLMKIFVGIDIAKLNHFAAAISSDGEILLEPFKFTNDADGFQLLVSKLESFDKNSIIIGLESTAHYGDNLVRYLVAEFYQVCVLNPIKTCQMRKNNVRKTKTDKVDTFVIAKTLMMQDDLRFITFFDLDMMDLKALGRFRQKTIKQRTRLKIQLTTYVDQVFPEIQYFFKSGLHQHAIYALLKEAPSPKEIASMHMTHLANLLKVNSHGHFTKELAKELRVLAQKSVGANDNSISIQITQTIQQIELLDSQLEKIEAEMTDIMRFNDSVIMTIPGIGYINVGMILGEIGDIHRFSNPNKLLAFAGLDPSVYQSGNFQAKTTRMSKRGSRVLRYALVNAAWNVVRNNATFKAYYDAKRAEGRSHYNALGHCAGKLVRVIWKMLTDKVEFNLE

SEQ ID NO: 474381 - protein, 405 aa, unidentified
MFDTGNVGVFLGMDVGKSAHHGHGLTPVGKKVFDKAMPNSESKLRAVFDKLIAKFGTVLVIVDQPASIGALPLTVARDAGCKVAYLPGLAMRRIADLYPGEAKTDAKDAAVIADAARTMPHTLRSLELTDEITAELTVLVGFDQDLAAEATRTSNRIRGLLTQFHPSLERVLGPRLDHQAVTWLLERHGSPAALRKAGRRRLVEVIRPKAPRMAARLIDDVFDALDEQTVVVPGTGTLDIVIPSLARSLAAVHEQRRALEAQINALLEAHPLSPVLTSMPGVGVRTAAVLLVTVGDGTSFPSAAHLASYAGLAPATKSSGTSIHGEHAPRGGNRQLKRAMFLSAFACMNADPASRNYYDRQRARGKTHTQALLRLARQRISVLFAMLRDGTFYEPREPRTAALAA

SEQ ID NO: 474382 - protein, 428 aa, unidentified
MKNRNVQKLEAITPGTLVVGVDIAKETQWARFVDYRGLELRKALKFKNHKNGFDSILASIEAICKNRRLDNIIVGMEPTGHYWKPLANYLLKNKVNVVMVNPYHTKRAKELDDNSQTKSDKKDALTIARLVRDGRYYEVYMPQDIFAELRVLSNSRISLMKRSNALKNTITAVIDEYFPEIVTVFKNPLKGKAAMQILKSCPFPSLILELGIDGVLFEIKKAVKKTVGRKKAQQLVETAKSSIGVGYGLVSAKLKLGLMIEELELLIKQLGQLETAMEKALADTGYGEIILGIPGIGVVTAASLLGEIGDPMRFDHPRQICKMAGYNLIEDSSGKNKSKTKISKRGRKNLRSVLYQMARTMVAVNAEMKELYQYLKTRPNNPLKKKQALVVISKKIVTVIYNLIKKQTGYQAELVFNKFRKNQMKQVA

SEQ ID NO: 474383 - protein, 319 aa, unidentified
MAQADIVVAGIDVAKNKVDSCMRTLAVRPSFPSTVEGRRQLVAWLRKHKVTKVVMEASGGYEREWAKELRRAGFEVWIVDPKRVRNFALSAGRLAKNDKIDAEMIAWFGETFKEGPSQTYDADREELQALVKGRLGLIDLRTCLQLQSEHAAPGLVQKSRAFILKGLDKEIAKLDAAISAKLKSTPDLAERAEIIASVPGLGEISATSLVAGMPELGQVSDKVAAALIGVAPYDDDSGKRRGERHVKAGRRWVRNAIYMPCVGAATLNNPVLKAYYRNLIARGKAPKVAIIACMRKLIVILNTMLARRQKWHPGCHVLS

SEQ ID NO: 474384 - protein, 438 aa, unidentified
MSNKVIFNLDELFISVGIDVGADFSWMSIALPNQQFVGKPYKILHNSIDSLTTAVSKIKEAEELYSLESRIFLESTGIYHYPLFCYLRDKGFNCSVINPIITKNSTNINIRKVHNDRFDSKKAALVGLKPDLKVSLIPSNLALNCRNLCREYYDLMDNRSAYVNKLQGELRMAFPQYLGIFSKVTINTSLTLLETYTSPSAFLEADKQEIIDIIKSTARFGLTYAQNKYNAIIQAATDANQFGYIIDSNIKRIRLYISFIRKYDEEINSILKSLHELVDANEDADFVKQIHLIETFKGAGFLSAVSIMGEIGNFSAFSKPKQLFAYFGLDPAVKQSGKFEGTKVQMSKRGSAIARRVIHTLTLQSISISRNGEAKNPVLREYYLKKCDSKPKLVAMGAVSHKVCNMIFAILRDNKPFKIIAPQEHIKQYNAAKCDIAA

SEQ ID NO: 474385 - protein, 368 aa, unidentified
MPLYGGIDLHANNRVVVLLNEQAQVLDQRRLANHLPTILEPLARYQADIKGVVVESTYNWYWLVDGLIEAGYRVHLANPAAMQQYSGLQYTDDHSDARWLAHLLRLGVLPEGYIYPKAERAVRDVLRKRSHLVRQQTATVLSLPNSIVRNTGVRLSAQRIHATPLEESERLLPEPEQVLAVTSSLAVLHCLEQQIKTLEKLVHTRLQHTPAYAQLQTVAGIGTMLAQTIVLETGDIRRFPTVGHYAASCRCVQRTKISNGKRKGHGNVKNGNPYLAWADMEAAQFASRCNPRVQRFYQRKQAKSHLMVARKAVAHKLSRACYYVMRDLLPFDIHRAFGGGRASRWGGVRGGEEKWFVTICLIRPDLTP

SEQ ID NO: 474386 - protein, 335 aa, unidentified
MNSVGIDISKGRSTIAVMRPFGEVVISPFEVRHTDSELSELARQLKSLDGETRVVMEATGNYHASVAKLLHNAGLYVSVINAKLVHGYGNNELRRVKTDRKDAVKLANYGLDRWLTLPRYIPEEDTRLLLKNCYRQYRQYSKVQTVLKNNLISLLDTVFPNANRLFSSPIRGDGSEKWVDFVAEFWHCRCASEKSERAFTSKYLRWCRKHGYNFREAKAHTIYAEASGHIGVMPKSETTKLLVKQAVSQLRATSTALAALKQEMQSLASVLPEYPVVMDLFDVGPTLGPQLIAEIGDVRRFYSKKALVAYAGLDAPPNDSGDVTGRHKSMSKIGA

SEQ ID NO: 474387 - protein, 315 aa, unidentified
MTTSSGKFVGIDVAKEKLDIAVLGEKKESQVTNDEKGIASLIKKMKVLNPELIVVEATGGYQRAVVLGLYEAGLPVAVVNPARVRQYARACGLLAKTDKLDAFNLAEFGKQVRPRQFEAKSEAGRYVSALLVRRRQVEEMLKAEKSRLRTVHTDMRGSLERMAEVLKQEIKRLEKDLDCFMKEHEDWQEQEQILCSAKGVGRVTAATLLAELPELGKLDRKKIAALVGLAPMNSDSGKKRGYRKTKGGRIEVRSVLYMSTLVATRYNPLIEAQYQELLRRGKVKKVALTACMRKFLTILNAMMRDKVPFRQRVTA

SEQ ID NO: 474388 - protein, 344 aa, unidentified
MQKLTTIAVDTAKLVFEVVIDSKPKRRTMRLSREQFHAFVVNHPHARFVLEACGGAHHWARVMEQCGHEVRMLPVQYIKPYRRRNKTDRADCLAMLEADRNPEILSVPVKPDDAQALQGLHRIRSGWQATRTARINALRGHLREFGIVLPEGINRARGMFAEAIEDDAIPGILRGALIRLLEDINVLEAQLLAIDRELAQVAKQHEAARRLTEIPGIGNVIATAFVASAGKAEYFRSGRHLASWIGLTPREHSSGSRRNLGGISKRGDPYLRMQLIHGARSVLRAAKQKQDSGRALDKLQRWALQLRERTTHNKAACAVANKMARIAWACWATDTGYAREPAAA

SEQ ID NO: 474389 - protein, 316 aa, unidentified
MALQRTFIGIDVSKEWLDLWLGPLKRFERASNDAAGWVAAIGLLRSLGLEAGLVVAFEATGGYEHGLRQALLEAGFDVRRLNPLRVRLYAKSLGRHAKNDRIDARIIARYAEAADTTPEILDPARERLAELVSHRRRLVDERVAVGNQTAMLHAAPLQAQNRRRLALIERQIEETDSFILAAIGQVPSLVAKLELLKTLKGVKDITAVALVALLPELGRITRRAIAALVGLAPFDHDSGKFSGTRSIAGGRAAVRTALYMAARAAARGKSPLGAFYKRLIAAGKPPKVATVALMRKMLVTLNAMIRDNQPWKHATI

SEQ ID NO: 474390 - protein, 345 aa, unidentified
MEHVVIGMDPHKRSVTIEVMTGTEQVLAKHRFDTTADGFASLMRCAKQWPERLWAVEGCNGIGRHVASRLVIAGETVVDVPPKLSARLRMFDTRQGRKTDPDDAHAIAMVAVRMNGLRLVVNDERQALLRILADRRRALGEDHTRMISQAHQLLLELIPGGAKKDLSAAQARVLLAGVRPRDLVGKTRKRVALELVADLEKIYQRSKALDNQIKQLVTDTGSTLMDLHGIGPSSAARLMIEVGDISRFPDRNHFASWNGTAPLDASSGDQTRHRLSRAGNRQINRALHVMAIVQLRNQTEGRAYFDRRKAAGKTSMEAMRSLKRRLSDIVYRTTMPNTPATEQAA

SEQ ID NO: 474391 - protein, 401 aa, unidentified
MSKKNTRNALDTSLSYAVIGLDLAKADCAVAAVPRSDDELGLIDRMDYESLFKQAEKLEPTLFAMEPCCGYSQISLRLQNMGHEVKVISGHAVKNWIATHKSNQKTDLNDATALAKLALYDHDLQPIRVKNVEECRIASVQAIRIQLRTQATKSLVCFKSLCQCWGIVIRRGSLNTKKMAEAVAAVEKLLGAEVASSLMILRDAYKFTMKQINALDKLLDALVEANEQARTMKTVLGIGTQTAARLAVTTGDIKRFPMPRSYVAYFGLAPRNIITGHSGTPSPSKRGALKPVSSRGQGKVSRRGDRVARSFIIQGAATIYMLYCKDMLPECQLRRWLHGQIKRGKPYGKIIVSLAAKLLRIVWALLTYGEKFDSHKAGVPRSVLAAMEKPLKHDAAAESAA

SEQ ID NO: 474392 - protein, 315 aa, unidentified
MEQPAASPSFVGIDVSKDRLDVHVRPSGQTSAVARDGKGLEQLTSELRDLAPALIVLEATGGFEITVAAALASAGLPLAVVNPRQIRDFARATGRLAKTDSLDAQIIALFAERIRPEPRPIADADSQALAELIARRRQVVEMIGMETNRFRQARNPRVQRTIKATLKTLEAQLAELDREIDDSVRGSSIWRAADDLLTSVPGVGDVTSRTLIADLPELGQLDRRRIAALVGVAPVNRDSGQMRGRRTIAGGRTDVRNALYMATLSATRWNPVIRQHYKSLVERGRPKKVALVACMRRLLGILNAIIRTKTPWQNA

SEQ ID NO: 474393 - protein, 337 aa, unidentified
MIVIGVDVHKHSLTAIAVDELGRAVAERSGPVGADVMAWAQTLEAERLWAVEDCRHVTRGLERTLLEAGERLVRVPPRLTAPQRRRGRVRGKSDRIDALAVARAALQEPELDSPRAGEETLRELKLLVDHRDDLVAERRRCQQRLRWHLHEHDPSLRVPLGALDRAIWIERLGRQLARREQTTQVRIARDLVGRCRTLTRSIGELDHELHTRTATLAPRLLQLPGCGPLSAAKLLCEIGPIDRFPSDAQLARHAGVAPLDASSGKHQRHRLDRGGNRQLNCALHRIAVTQGRVHAPARAYLERKQSEGKSRREAIRCLKRQLARTVYTTLKAESALT

SEQ ID NO: 474394 - protein, 341 aa, unidentified
MDKELYFGVDVSKKTLDLAYYDGETIDWKNAHIKVSNDDAGFKKIGSWIAKVGKDFGTFLFCMEYTGLYNQNFRLWLESKKYIYGMVEPRKMHHFEPDLDDDQRSLDRIKTDELDAFRIAIYCEQNHKKILRNPSKLPSPVYFKLKRLLAERKQNTKQSTLYKQQLHDICAYDTDLSVERKKLQLKNMQENQKAIDREIDSYMNEDASISKNYDLLTSIPGIGRIIALETIVLTENFTAISNPRKYACYIGIAPFKKESGTSVRKRTSVSKKGFSEAKADLSIAVLSAIKNNPSIRDYWIRKRKEKCGGIVLNAVKFKLVLRMFAVIKRGTPYVETDAYKN

SEQ ID NO: 474395 - protein, 426 aa, unidentified
MAVVMIGVDPHKASHTAVAISPAEEPLGQLRVRASAVQAERLLGWAQAWPERAWAVEGAGGLGHLLAQQLLSAGERVLDVPPKLAARVRLLATGNVNKNDPNDARSVAVAALRSAQVREALRDDHTAVLKVWSKRYRDLGRARTQVACRLHQVLCELVPGGVSGEITAGQAGQVLASITPAGAVQAARWELAAELTEDLRGLDIRIRETRKKLTEAVRAAGTCLTGLFGVGPVIAAAVIGDVRAVSRFASRDHFASYNGTAPIEVSSAGRKVYRLSRRGNRRLNHAIHMAAVTQIRYRHTKGRAYYDKKLAEGKTGKEALRALKRQISDAIFACLQADARRAAAAAGKSPGGQPGNHSASRAAGSHPDHRLFGQATPGPATHPTTTAPFPAPLPSRASEGPGPGPGAARPRSGARRASSRRPPASR

SEQ ID NO: 474396 - protein, 355 aa, unidentified
MDSKKYIGMDVHKESISIAVMNGAGKIVMESVIETKASMILQFIDGLRGDLHATFEEGTSAAWLYDLLKPHVTKLVVCDPRKNASMREGNQSDKIDARRLAELLRLNHLNPVYHGEHGLRSLKELVRSYLTITKDLGRVMSRVKAIYRSWAIPCSGKQVYAARHRAEWLGKIGEAGVRRRAEFYYQQLDALRTVRQEVRRELLAEGKKHQAWKRLCQIPSIGPIRSSVLLGILQTPHRFRTKRQLWTYSGFGIETQSSADHRSVDGQLQRAKKQSSIRGLNRNCNHDLKNLFKGAAIVASSKPGPFQEFYTALLTKGIRPEMARLTLARKIATIVLIVWKRGACFDAQHLKPQTA

SEQ ID NO: 474397 - protein, 406 aa, unidentified
MRRQARRGPGPSSTLITPDRAGNVVGIDPHKRTLTATVVDPRGGIVASEHFRVSGDGHRALEAWARQFGPIVRVGIEGASAWGRHTAIFLIDRDYDVRDVCPNRTAHHDRARQRGKSDTLDSERIARETLAHPLLPKAFKRAGQDAGPDQHTELLAVWWTARCSLLKRRQHLLTESEALLRELPLELIERLPAAKRVRPRLAALPRVTRRRCFDPPTAARLHILAGYREEIANLDAQDRQITRQLAELVAQSGSTLDQLCGLSTVSVAELLVEVGDPRRFTEGGFGRFNGTAPLAASTAEGPGEPVRHRYNPGGNRRINAILYRMAITQLRCEPRAKRIYANARAEGHTKKEARRIVKRHLSDVVYRRMVRDLAAHPPSQPLLVAQPRAGAAQSRVARQGRAQRAA

SEQ ID NO: 474398 - protein, 311 aa, unidentified
MNDTIGIDISKDTLDTFWLSKRKHKQFANNKAGLRELIRWVRKAEVSLVVFEATGVYHRLLEVSLAAHNFPFARVNPRQARRFAEGAGTLAKTDRVDAVMLARMGSLLELQADKPKSEMLHNLKGMTTARQALIKDRTAARARLATATHPLLRKQATLRLRQVERDIAQIDAAIEATISADKTLCEKAAILISIPGIAKVTAFAMLIEMPELGSLSGKQAASLAGLAPISRQSGKWQGKERIQGGRACLRKAIYLPAVVATRFNPDMKAKYHELIAKGKCKKLAITAVMRKLVVMANALLRDGRKWTETRA

SEQ ID NO: 474399 - protein, 332 aa, unidentified
MSVYVGIDVHRKRSQVAVIDQDGEVLANRNVPNGVKPILGVIGGLPAGTPAAFEAAFGWGWLEALLEDYGFEPHLVHPLQCKAIASARLKNDKVDAAILAQLLRADLLPEAWIAPPAVRELRALVRHRIQLVRLRTLLRNRIHAVLADHGQDRPAGCWSGPGREWLAALELPAASRAVIEDDLALIDALQVPVDRLDWELHQRAKADPRVKVLTRLPGVGPFTALVILAETGDVSRFGSARKLAAWAGLTPTVRGSDRTVRHGHISKQGSAWLRWILCEAAQTAKRHPDFAASYQAIAHRRGKKIATTAIARKLLTRAYHMLTDASSGGAPR

SEQ ID NO: 474400 - protein, 342 aa, unidentified
MNYIGTDIHLGTLDFKVINEAGKLVKSERVATSATNFLKFIRSVTRPRVVIIEEGTLAAWLLEICTIHGEKLVITDPKRNLWIGSSGKKDDSIDAEKLAQLARGGYIKEIYHPVGQNRRFRELMTAYHDNCRNITRLKNKIKARFIQNGVTCSGETVYLKEHRERWRQKLPQDPLLMVIVEALWSQLDQAQQAEETILAAAREQAKQHPEIKLLDSIPGVGFINAATIAAILETPHRFADKRKVWSYAGLAVDKKASGGKLYSEKLNQEYNRLLKYTAKQAAQVAIKSDNSFRRAYLQMTTMKGIAQHRALLTVARDILAAAWAMWRNGEFYNPEIDRKVKA

SEQ ID NO: 474401 - protein, 331 aa, unidentified
MKFKEVIGIDVGKIANEARIHTSQLGHEFENSPSGFKGMLKWTLKNIPCAKEEVLFAFEHTGLYSFPLSVFLTKKNLSFVLLPGLEIKRSMGIQRGKNDKIDAKRIALYAFRRKDEIKPYQLPSKRLIEIRRLLSLRERLVVQRASYIKNLKENARFLKKSDNKILFDVEERMLKELSAQVKKIENEFDKIVDEDLSIKRQFDLITSIKGVGKQTALSMIAYTNGFTLFDNWRKFASYAGTAPFPYQSGISINGKSKVNHLANKKLKALLNLCATSAVAYNTEMKIYFERRKEEGKNGMSTINIVRNKILARIFAVVNRGTPYVDTCGFAS

SEQ ID NO: 474402 - protein, 410 aa, unidentified
MNLNVGIDVAKAKLDYCGMDSAKHIIFQDEVVNAPAGTEKIIKLILDWADSRDDAEKVVIGMEATSVYNIHPTLYFEQSSALQALDTEIVTLNPKMTHRYSQLFDDDKTDTLDAFHIADFLRMGRYQVPVTRDEKHIALQRLTRERYFVVSQITDCKNHFLNNLYFRLNTLEAELPTSVFGNTMMTVLSGEKYTLDEIAQMPLETLTQDLNQLSHGRFGKPEEIAKALKKAIRSSYRLSKTVADSVDQILAMYVREIRMFQKQLKELDKSIAALCAVIDGANSLNSMPGLGPVYSAGLPAEIGQIERFPDEASLASYAGLSWRRSQSGGNERQLTPRTHSGDQYLRYYLVEAANSIRMHDPVFAKYYDKKYGEVPKYQHRRACIMTARKLVRVIYKLLSDHELYVPVKVV

SEQ ID NO: 474403 - protein, 344 aa, unidentified
MVACGLDRQTGEVFEQRLTPSHEEIAAWIRSLPGPAAAVYEAGPTGFGLARSLRAVGIDCEVAAPSKLMRPSGDRVKTDTRDARHLARLLMLGDVTAVAIPSREQEAARDLVRAREDCRGDLMSTRHRLSKLLLRQGIVYSGGKAWTGKHELWLRCQRFDDPALQLAYDTSFEAMLATIARRDRLDRAIEQMAADSEFTPVVSRLCCVRGVATLTAFGLAVEIGHWHRLTGRSIGAYLGLVPTEYSSGASRVQGGVTRTGNGHARRLLIEAAWHHRARYRPGATLRRRWDAASAPARARGQLANQRLHARWQTFDARKKRAVVANTAIARELAGWCWSLAVLDG

SEQ ID NO: 474404 - protein, 335 aa, unidentified
MKHYAGLDLSMETTQVCIVDENGRKLVSEKVESSPEAIAMMLERYGPIERAVIETGRMSPAICLGLRELGVAVVCIDARQAHQSLKAMKANKTDPHDAAGLAQLARTGFYKEVHVKSPAAHGVRSVITARSHLVEARVRLDNMIRGLCATFGYRPGAGQGKAFLERIMQAVHIPGLGDAIASLLSVRAELMEQIKEMDRRLRVIASQSQACEILMTIPGVGVQTSAAFAAAIDEAGRFRQSRNAGAYFGLVPRRHQSGELDWTGRITKQGDGTVRKLLYEAANSILTRSRETFALKTWAMKIAKRRGLKKARVALARRLAVIMHAMLRDGTLFQA

SEQ ID NO: 474405 - protein, 341 aa, unidentified
MKYVGVDLHKQSITVCVMVKEGDQRKVEQRRTLKCAETASIRNFFEQLGGFRVVVEATSHYEWFLLLVEDLADRCVLAHPKKLRVIAESKHKSDKIDARILAEFLLLDMLPEAHRPTPRVRQHRVLVRHRQAVQSQITSVKCKLRHKAAFYNSDMAKLFTARGLEYLAKIAMSDADRFECEALREQLLFLQKQLRAAEKQLTSFAQTAPVAERESRAVLATMPTVGTVTVDVVLSETADVRRFRNAKKIVAYAGFDPGFRESAGRGKELHIAKDGSGLLRWALIETAWRLVRKSARWRRLFMKLQGSTGHKKKAIVGVARRVLCVMYAMLRDGQASRPEAV

SEQ ID NO: 474406 - protein, 336 aa, unidentified
MSDITMVGLDLAKNVFQLHGVDRHGHQRLARQVKRTQLMSTVAQLPPCTIAMEACAGAHHWARGMTKLGHTVKIISPQFVKPYVKGNKTDRNDAAAICEAAGRPDMRFVPVKSIDQQQILVFHRVRRMLVGQRTQVSNQVRGLLAEFGVAIPVGLGSLRRRLPEILEDAENDIPVLVRPVLAEEYEALRGLDERIKELNKQIERIAQQSEPCQRLMRHLGVGALGATCFVASVGAAQGFKNGRQVAAWLGLVPRQHSSGGKPTLLGISKRGDTYLRTLLIHGARSALKVAARHDDGVSRWVLGVQVRRGTHKATVALANKMARRMWAELAYGQLAA

SEQ ID NO: 474407 - protein, 354 aa, unidentified
MKYFAGMDVSLEETAICVVDETGRVIKEARAASEPEALHALLCSFSFPFERVGLEACSLTAWLHSELTSAGWPAICIESRHAKAAMGAMPNKTDRNDARAIAQIMRTGWFRAVYVKTPICRSWRSLLIARRTILNEMRTIENVVRAILRETGLKLGTPARKDFIFRVRELATGEEALARMIEPLLEVLATMLREFTKLTKQVLIVVRAEPVCRRLMSAPGVGPLTALAFRATIDQPERFSKSRDVGAHLGLTPRRYQSGETDIQGRVSRCGDELARTALYEAAHSLLVRSKKWSALRAWGMKIAKRRGMARARVAVARKLATILHRMWVDKADFHFGREQSADLAMKAITIVAA

SEQ ID NO: 474408 - protein, 416 aa, unidentified
MDKEGEALLLLVGDDWAEEHHDVEVQDETGRRLSKARLPEGIAGIARLHAMIGQHVGDDDEPVEVVVGIETERGPWVQALIAAGYQVYAINPLKVARYRERHSVSGAKSDPGDAHTLADMVRTDRHQLRPVAGDSDLAEAIKVITRAHKTLIWERTRHTLRLRRALLDFFPAALAAFDDLDAPDTLELLAVAPDPVTAAGLDDEQITAALRRARRRGIPDKVTRIQEALRAPQLTQPPVVAGAYAVTVRAQAAILTTFNAQITLMQEQVGAHFGRHPDAEVYLSQPGLGGILGARVLAEFGDDKARYADAKARKNYAGTSPITRASGKKKIVLARYVHNDRLLDALGLQAFAALKASPGARAYYDQQRARGIGHRGALRQLGNRLVGILHGCLKTGTPYNEHTAWAHHQQDQQIAA

SEQ ID NO: 474409 - protein, 403 aa, unidentified
MPLAVGIDVAKQLHWACVIDTGTGTQLTSRKVENTPEAIDTLIAEISELSAEHGPATIGIDILGGIAGLLTAMLLDNDLHVVHVPGLLVNRSRRATRGGERKSDPADAKVIADQIRLRAGTDELRTIQALCEPDAVLRLLVSRRRELVTDQTRRLSRMRDLLTATHPGLERQLDVTTKTGLWLLTRYVTPAEIRHAGIDALTTHLHTAGGLRRTTIDTLAHRVAAAADAQRVAVPGEATAAQLIRELAQEALAVRDRLTHLDADITEALDNHPDGTLIRSLPGMGVVLTAEFLAEAGGLHRFPTPDALASAAGLAPVRQQSGKLDYLRRATTGNRALKRVFYQSAFCAIQHDPLSKAFYRRKRTEGKRHHQALIALARRRVNVLHAMLRTRTTFRQDQQRAVA

SEQ ID NO: 474410 - protein, 445 aa, unidentified
MVRKAKKQRLKIVHPRCAGIDIGSREHWVAVDPERCDDSVRCFTTFTDDLHRLADWLKSQEVEVVAMEATGVYWIPLYEVLDARGFDVQLVNSRATRQVSGRKSDVLDCQWIWQLMSHGLLKGAFRPGDAVCALRSFVRQRAGKAQEQSRCIAHMQKALTQMNLQLDNVVSDLMGKTGTAILRAIVVGERDPQKLAQLRDRRLRADEATVARSLHGNWRDEHLFALTQALAHYDFLNEQIGACDQQISQALATLPRLSEAEAPKPVKPLRSRHRTATQQKELHQALHAVMGVDLCAIPTLGVDTVLVLAGEIGADLSRFPSEGHFCSWLAVAPPTNISGGKTLPGQKPKVFNRTGQALRQAAVNARRSESYIGACHRARLARMDSAKAIKATAHQLARLIYAMLTKGQAYVEKGIEAYEALSKDRQLRALQRKASKFGLILSEAA

SEQ ID NO: 474411 - protein, 412 aa, unidentified
MARVIGMDVHRDFAQVVVLDGDQLRHFGRVRLDKDSLTTFADRLMADDEVVLEATGNTFAIVRVLRHKVRRVAVANPLQVRLIAHAKIKTDKIDAAALAQLHASGFLPEIWVPDPETEALRRQFTRRSQLVRHRTRLKNEVHAILNANLIGRCPVTDLFAATGRKWLAEQALPIADRDAIDRGFREIDRVGNDLAALDRGLAAQSIDDKRLHHLMTITGIDVVSGLGLPATIGDHTRFASSEKLVSYLGLNPSVRQSGSGPARHGRITKRGANQARALLVEAAWAAARVPGPLRSFFMRVMSRRGSQVAAVATARKLAAIIWHVLNRQEDYVFARPSLVARKRRSAELRAGKPRQRGRRGIAAGYYCAETRAEERERLENAERAYERVVSGWRQAGPGSRPTNPSPESNTST

SEQ ID NO: 474412 - protein, 457 aa, unidentified
MSQRKRKARKSKFNVNNLPEHLRHINLSAAGIDIGSDRHLVAVPQGSDDVSVRQFGAFTSDLHAIADWLKKCGVTTVAMESTGVYWIPLFELLELCGFEVKLVDARHVKNVSGRKSDVLDCQCLQQLHTYGLLQGAFRPSDEVCVLRSYVRQKEMLTQASSMHIQHMQKALQQMNLLLHNVVSDITGVTGMTIIKAIIAGERDPNVLALNRQKECRNSKEIIAKSLVGNFRDDHMFALKQAVELYEIYQAKIAECEAAIANHLGEQPDITNDQPPESGKHVRARERIRADLDVREKLFKMTGVDLFAIPGLAADTLLTLASEVGFDMRPWKTDKHFTSWLSVCPGTKSSGGKALNGRTKRNANRAAQAFRIAASSLARSQTSLGAFYRRIRSRTDGRRAVTATAHKIARIYYAMLTKGTTYVEAGQQAYEQMYKERRINALNKQAHSLGYQLQPRAS

SEQ ID NO: 474413 - protein, 342 aa, unidentified
MITVPVFVGLDYHASVIQVCVMAADGRQLGNRAWPDDAAEVDRYVRQFGPTIRAAIEACTGAAHLADELATHFGWDIRQAHPGFVARMRAHPDKTDWADARVLADLTRVGYLPVVWLAPEPIRELRRVTRYRQQLVDQRRATKLRVRAVLRECRVKLRATGWTKAWLAELAQATLPDEARWVVAQHLAELQHLAGRIATAEQRIAKLVAGDPVVAKLLSQVGVGLVTAAVMRAEIGSFERFHTGKQLSRYCGLTPRNASSGQRQADAGLVKAGNVHLRSVVIEAAHRLGRFDKRWRRLRDDLRAKGKCGRGGAAALANRWVRGLVHQMTGPTSTSEVESGAN

SEQ ID NO: 474414 - protein, 385 aa, unidentified
MQAPTVSTPITDRISTIFVAIELSQKTWLVTVHSPDKDKISRHKVEGGNHADLLALIGRVRDRAARTLGAVPAVASCYEAGYDGFWPHRLLTVAGITNYVIDPSSIAVDQRARRVKTDRIDGEKMLRTLMAYLRGEPRVVRMVRVPTPEQEDARRATRERDRLIKEQTAHTNRIKALLRLHGFAVGNPRRRDWLTGLAAQRDWQGQAVPPRILTEIEREHARLMLVRKQLDALDRAPAAADPTPAAVEMTRRSELLQRLKSLGPAFATTLTQEVFYKEFRNRREVASYFGLAPSPWQSGGIDRDQGISKAGNPRARCASVELSWLWLRHQPDSDLTQWYRERTLKASKRIKRIAIVALARKLMVALWRYLTTGLVPAGAVLKSAA

SEQ ID NO: 474415 - protein, 338 aa, unidentified
MNYYVGLDLHSRNTYLGIIDEKGDRVYKSKMSNFLELVLNALNPFSENIEGIAVESTFNWYWLVDGLMEAGYNLHLANPSAIKQYEGLKYTDDWYDTFHSANLLRLGILPEGYIYPKQERTIRDLLRKRLMLVRQRTTHILSFQSLYNRHTGCWLSGNEVKKLKEEDIDELFEGEYVVLSAKANISTICFIQIRVEEIEKVVLNTMKLVPEFQKLKTVTGIGDILGLTISLETGDIRRFPKVGNYASYCRCVESQRRSNERNKGENNRKNWNKYLAWAFIEAANYTKRYCPYARRFYQRKTAKTKKVVAIKALSHKLARAAYYVIRDRVDYDPIKAFG

SEQ ID NO: 474416 - protein, 416 aa, unidentified
MSKIRFVGLDVHAETIAVAVAEPNGEVRSLGMIANRPESIRRLVRKLEPVEQLRFCYEAGPTGYVLYWQLTALGAKCEVVAPSLVPRKPGDRVKTDRRDALKLAHCYRAGDLTSVWVPDAAHEALRDLVRAREAAKGDLLRARHRLSKFLLRHGRRRPESMKSPWTNAHLEWIKTKVHFEQPAQEIALTDYVHQVEHLVARIERLDQAVLEAAHTAPPQMRAVIEALQALRGIAQVTAVTIVAELGEISRFAKARQLMGYSGLVPSEDSSGERKRRGAITKTGNAHLRRVIVEAAWAYQFRPWLGGYLLKRQVGLSEDVKEIAWKAQHRFACALPKTAGTREEQTADRSCRGARVARICLGDRGACGNQDARTETSGSVSQRTTGGRQCGWRSSRARKGESSYVLCGRPSGPNPRS

SEQ ID NO: 474417 - protein, 474 aa, unidentified
MNSSGTLKIARNGYIVMAVVFCALGIFLMAVPEKAVKIICVLAGILFLADGAIKIIGYFSRDFYCLAFQFDLGFGILMIAVGIDISKAKSTVAVIDSDGTVLASPFTMAHTQPEMEAFVSYLKGLGEPTTILMEYTGHYHYPVLKKLQDEGFPVCIVNPYQMKKYGDVEIHKAKTDKKDALRIAAYALEKSYKLVPYSSMEQKYEDLKFLSRQYNQRISYVAKLKVQLIALLDQTMPGITRILPLNSRNPEKCALLLFIKRFKSFDEIQRIGKARFLASYDVLAKKASERSASSKGLSIYELAVDSITTRGEDPYIWLSQNQCVDLLSATQNAADEIISQMRNIAETIPEYKVLRAMHGVGDRLGPIILAEIGDVHRFHSGKALNSYAGNDAPPYQSGQFESRNRHISKRGSSALRKACYEVMQALKLIKPQDDPVYLFMLKKEQEGKPFNVAKMAGVNKFLRIYYARAMELYK

SEQ ID NO: 474418 - protein, 369 aa, unidentified
MNDITYVGLDVHKATVCVAIAESGRGGEVREVGVFENRPVVLRKMVARLGKHRRRLNFCYEAGPCGYGLHRLLTGLGHDCVVVAPSLIPMKAGDRVKTDRRDALMLAKLHRAGELTPIWIPDAAHEAMRDLVRARATAVRALSKARQHLQGFLLRHDRIYHGARAWTLAYRRWLTTVRFDHSAQQIVLQDYIHAVEDAESRRNRLTRQIEELMPSWSMAPVAAALQAMRGVALVVAVTVVAEVGDFRRFTNARQLMAYLGLVPSEHSSGSTVRRAGITKAGNALARRVLIEGAWTYRMSARVSRKLHDRLEPLSAAIRDIAWKAQVRLCARYRRLAAIGKPKVVVTTAIAREMVGFIWAIARVAQPELI

SEQ ID NO: 474419 - protein, 350 aa, unidentified
MIIIGADYHPGFQQIAFVDTETGELQERRLEHREEAEKFYRDLGTQGATVRAGMEASGHARWFERLLGELQFELWIGDAAEIRTKRVRKQKTDRQDAQLILQLLLEDRFPRVWVPSWENRDLRQLLWHRHRMVQARVRVMNQLQAVALNEGLRCKKRLWRDAGREQLESFRLAPWASRRRRDLLELLDRLTPTITELTEAIEQEVEKCPEAQRLQTHPGVGALTALAFVLIIGRAERFQCGKQIASYLGLVPLEESSGQRRRLGHITKQGNSLLRFLLVEAAQVTVRSDPEWRRKYFHLAMRRGRKIAKVAMARRLAVRMYWMLRKGWDYEQLKKFGSHAGQLGTGDGVR

SEQ ID NO: 474420 - protein, 403 aa, unidentified
MSTFFAGLDWASQTHAVCVLDERGAVCERIEVEHNAAGLATLVRQLRRYGNPPVAIERPSGLIVDTLVAAGVPVVPIHPNVVKATRPRYRSHGAKSDASDALLLADLLRTDGHRFRALAPQSDEILALRALVRGRDDLVATRVQLANQLRSLLESFWPGAAVVFADVDSPIALAFIERYPTPESAARLGPKRMAAFCAQHAYCGRRSAEQLLERLHAAPISPCGELEMEARGELARSMARTLVPLVEQIRCLTSRIEHHIASLDDGRILMSFPRAGRVCAAQILAELGSVRERFDSDEHLAAEAGVAPLTYQSGKSRAVAFRWACNHRLRAALTCLADNSRHAHAWAASVYARARARGCDHPHAVRILARAWVRVIWRAWIDRQPYDPARHRGAQLLVATAEG

SEQ ID NO: 474421 - protein, 351 aa, unidentified
MKTEPTAQPKLYIGIDIHKRSWKIHCATDLFSGKSFTMPPKPEVLKTYVSTHFRDHEVSTAYEAGCCGYYAHRSFEGYGWRSLVVNPADIHRKGKERFTKTDKIDAQLIARELKDGRLECIHIPEVEREQLRSLFRRRNDLVKDFRRVKSYIKMQLLYFGITVPEAFDNDHWSHSFRQWVDDLIFNHPTARETLDSRMRSFRFIDKELRDVSSKLRAYCRKHYKKDYYLLRSIPGIGGIVACGIICELGDLRRFNSIKHLAGYVGLSPGVHQSGDNQRATGITMRAHRLMRSYFIEASWQAIRTDPVMQAYYRKHLGKNVKNIIVKVARKLLSRTLAVIKTETPYTIGVIE

SEQ ID NO: 474422 - protein, 421 aa, unidentified
MPNIEIGVDFMVKENFIYVGIDLHKETHTAVMIDCYNQKLGEITFPNRPADFPKLVAKVKKCNTDGKTIVFGLENAYGYGRALAVWLIDKGYLVKDVNTAISHRQAKHRGAMYRKSDSDDAEAIALATLNMLDKLPDAYPNDAYWSLGQLVHRRDNIMKQRTRLVNQLHEQLCIAYPSYKQFFNDISRPTALYFWEHYPSRKYLKGKSVEDLRAELVPVSHNKCSTKTCEKILDAVASDKVKNNAYQDARDMVTLSIVSDLQHYDKQLAEVDKMLEQMYKMLGCTLTTIPGVNVITAVKILAEIGDIKRFSNANKLAQFAGIAPLHLSSSGKGKDVATKQGNRRLQATIYFLAIQMVQVSSKGTPRNSVVRAYYEKRKAEGKTSQQALICISRRLISIIYGMLKHGTEYRMPVVESAGENR

SEQ ID NO: 474423 - protein, 411 aa, unidentified
MEVLYRVCCGLDVHKKTVAACLRVPGPNGTRAEEIRTFGTTTRDLLRLADWLAAAGCTHVAMESTGVYWRPVYQILEGPLEILLVNAQHIKAVPGRKTDIKDCQWIARLLEHGLLRASFVPPAPVRELRELTRYRRQLVQERARETNRVQKVLETANIKLGDVATDVLGASGRAILKALIAGERDAENLAALAQGLLRKKEAQLREALVGRVTAHHSFLLQGLLSHIEFLDQQITHFDAHIEARTRPFALALERLDTIPGVARRSAEQILAELGDDMGRFPTAAHAASWTGICPGNHESAGKRQSGRTRKGNRWLRATLIECARGAVRTRGSYLAAQYHRIARRRGDKKAIVAVAHSIVVAAWHVLRYGVPYHDLGHDHFDRLDRDRLVRYHTRRLADLGVVLPASAPVPA

SEQ ID NO: 474424 - protein, 351 aa, unidentified
MDTTTVGVDLAKNRFELAVADGEYRIRRRARLTRTQFAGFFGNHPQSRVVMEACGSAHHWARMLAAQGHQVQLLPAQYVRAYVMRNKTDAADASALIEAARCAEIRPVPVKSIEQQAIQQLHRLRAQCLGTRTARINWLRGALREFGISIPVGARRGISAVRQALAAAEPAVPTLLRPGIEDTLAELAALEQRSTRIERELARLSHEDPVVQALLGIPGIGLLGATALAAAIVDIQRFGSGRHLASWLGLTAREHSSGERRRLGRISKRGDVYLRTLLIHGARAVLNAATRAARCGRPLDRLRAWALATAKRCGYNKATVALANKLARIVWATWKYQRPFDGNWAVRSGNA

SEQ ID NO: 474425 - protein, 322 aa, unidentified
MTTPPAIYVGIDVSKSQLDIAQAPAAQPWAVSNDAEGIQSLVLRLRELQPTLVVLEATGGYESAVVAALMAAALPVVVVNPRQARDFARAKGRLAKTDKIDAQVLADFGEAVRPQIRPVRDAALQELSGLLRRRQQLVEMLSAERNRVRQATGAVRKDINTHIHWLERRLQDLDRDLNQAIRSTPSWREKDELLQGVKGVGPVLSMTLQADLPELGQLNRKQVAALVGVAPLNRDSGQFRGRRKVWGGRSQVRAVLYMGTLVASRHNPVIREFYQRLISAGKPKKLALTACMRKLLTILNAIARDQNADSLFLSRLANQDSC

SEQ ID NO: 474426 - protein, 323 aa, unidentified
MNHKVGKDNTVARFIGIDVSKQWLDVASLPERETRRFTNDSAGQEQLSTWLMSLAPELIVMEATGGFETRVATTLAAQGLALAVVNPRQVRDFARAFGVLAKTDRIDASVLAAFAEKVHPPVRPLPDEDRRELIDLVDRRRQLVTMRAEEKTRLSQATASARQDIKEHIDWLDERLRRLDIDLTAKLRTSSLWKAKEEILISVPGVGRVTVFTLLARLPELGALNSRAIAALTGVAPFARDSGQHRGHRMIWGGRADVRSVLYMAAVSAARINPVIRSFYLRLKQAGKPSKVALTACMRKLLTILNTMLRNNQPWQAPSIHTI

SEQ ID NO: 474427 - protein, 350 aa, unidentified
MYFAGLDAHLKYVTVAVLDRLGALVLETTVPTREPERLLAVLAPFRPLEVVVETCPFWPWLYDLLVPAGIRFHLAHAKRLRAIATAPQKNDRVDARLLARMLLSGLIPEAYPRPGDQRELLRLLRHRTTLVRARTRLAGRIHSQLHQQRLMLPREQLLRQATRGWLRETAWPRLTAEQQAIVTTHLELIDHLTPLIQALERRIAAAADANPTATLLATIPGIGPYRSLLLAAELSPLSRFPRVEHLASYAGLAPVTRSSGGHTRHGSIPQGANRWVRGALVSAIPSHVRAAPHSPVSHAYAQLTARLGWRVARVAAARKLLRIVYIMLRRGEAWRSEQVAGADVRDEVHV

SEQ ID NO: 474428 - protein, 414 aa, unidentified
MKVVYPICCGVDVHKTFLVGTIISTTDGVQPHYQKKRFSTYNSYLHRFADWLHLNNCLDVCMESTGKYWVPVFNILEERSIRVTIANPKWVKAVKGNKDDTKDSKWIGDLFRLGLVPGSFIPSKKIRILREFTRYRYKLVSMKSSEKNRFQNAFTVCNIALDSVVSDMFGKSATVITNYLISEDSFNPEYCVSLLQRSLKKKSDSVLESIESYSITDEQKLRMRIVRSHIDYITDAIAQVDSAIDTMVAEFENTISLLRTIPGVDRNSAITVISEIGNDMSRFGSAKRLCCWAGLTPGNNESAGKKKSVRITRAGVYLKPALVQVAHAAVKATDNSYYRLKYEHISKRRGKKRAIIAIARMILSAIFQMMTTGEVWNPTDLFKVDMPDSLKERQLSKAVKQATKFLEKQGLTVS

SEQ ID NO: 474429 - protein, 355 aa, unidentified
MIVVGVDAHSQTHTAAALDALTARFLAEQTVPAREPGFEQLLAWARGLDAERVWAIEDCRNLSAGLERFLLGRGEQVLRVPPKTMAGQRKSAREFGKSDRIDAIAVARVALREERLQPARLPGPQQKIKLLAEHREHLLCEATRHQRRLRWLLHEIDPDLQPNGRGLKVASVLDRLARQLARREQTLQIRICRELVRDIRALMRRSEALEAELAPMVKAHAARLLAIPGVAVLTAAKLIAEIGPVDRFQNDAQLASYGGVAPLDASSGRQRRHRLNRTGNRQLNCALHRIAVTQARIYAPAREYLARRSSEGKTTKEAMRALKRFIARRIFRILMAPQSPTLRPLPGEAPLHCLT

SEQ ID NO: 474430 - protein, 336 aa, unidentified
MSYIGVDLHTTQITVCYLKAEADFEIRKYQLIEMDKFVNTLEAGDQIAVEATGNTRWFSEQVREKVRRVVVVNPRQFEVVKNSCKKTDKNDALNLARFLRADLLPEVRTKREAAMRVQSLVQTRTKLVRLKTSLINKIHALYVANGWKLKKTSLASEKGLETVLLSEWSAMERIELEIIIEQIRALKVSIKKLDTAIEAESGKLNGFASLVSMSGIGSLSAGILLSVIGEIKDFATADKLASYFGIVPRVSNSNETLHHGRITKRGNKTGRTTLVQCSLAALRKSEYLKKYYEQVKARRGHGKAKIALARKYLGIIYNTLTNNWVFADFNNFELAE

SEQ ID NO: 474431 - protein, 428 aa, unidentified
MDQRARKLDIVRAEHTLVVGVDIAKHKHWARVMDGLNGIQVGNAFSFENTREGFERLLGIVVRAQKATGAARVVVAMEPTGHYWKPLAWYLKKAGITVVLVNPYHVKRYKEFDDNSPSKNDRKDAWVIARLANEASFFEVYLPEGVYAELRGLTQARQQQRNKCNMALNQIRCLLDEYFPEYEDVFTDILGRASLYVLEHRPFPGDILAVSAEELAEELKLASNRRVGLKRALRLQEAARDSVGVTEGLEAARLRLKQLLEEARFWRARLAETESAMADALQRTGLAKYLLSVPGIGVVLAASFLGEIGDPGRYQDSRQIRKLAGLNVVEDSSGQKKGRTEISKRGRPGLRSVLYQMAMTMASKNIQFRALYRYFISRRENPLKPKQALIALGCKLVRVLWTLMKEKRLWDPDRVLGAWRAEQLALAA

SEQ ID NO: 474432 - protein, 397 aa, unidentified
MDSLESIRLEQFRQFQKEIRGSERYLIVGLDIAKDQHHAFFGTATGRTLWKRWLFDNSQEGFQRLLLQTEALQVRHGLPQVVFGLEPTANYHKPLGEHLIRHGHQVVLVSGVAVKRNRELLDGRWDKHDTKDAANVADLISQGKCLYYEHPEQRIRDLRLLLSLKKRLKRQEQGLRVRIRNGLVAQYCPELDPSFSRLIASGKESNLLSAIREPISPIGCEVHPAVAFVAQLMVKQLQQIREVLGAVQGKIQALCSQFPEYPYLLSIPGFGPEISSQVLGAIGDPCRFQNGKQVLKMAGLDLSADRSGKTSERARPVISKKGKADLRYALYQAAFIASIRNAAFTAYYTQRLKARGQEPGIQAKRRVKLAAKLLLIAWTLMKRKEAFDPERLIPSVL

SEQ ID NO: 474433 - protein, 408 aa, unidentified
MTNKIVGVGIDVSAYKLDIAILNTDAELLSTDQVESNAEGFKKLFRILSKQLNAVQIVFEATGIYSNKLVRFLNELHFSFECINPLVARQLSTGLRQNKTDRVDAIKLARIAISDSFQPSYVRDEAYEKLYQLDRWYENENRNIVIFKNRFDKIQQQTFPVKGFPVSKDQSLFYELFIIFPHADWVLRSSLKQVTEKLKVHLSKQHPRTNWGKYAKLLHSYAVKAVPSVISDAPNSKYLIQLGHQILTVMDTKAQLIKNMIEIGSTFPAFKYLCSIPGIAETSAIRIIAEIGDISRFDNTNQINAFIGIDLRHFESGLFTGSDTISKRGNKIARKLLYQCVFQIVQTCTLTHKKCHIADYYYYQTKKQSSSPKKTAIACIHRLLRTIYGMCKYGESYQYKFHKNQLIQ

SEQ ID NO: 474434 - protein, 332 aa, unidentified
MDNFYFIGVDVSKKKLDFCVLFEGKVLREEQVSNHQQAVARLIGELKNDLEMDNEQFLICAEHTGQYTFPLVCACKSVECKLWLENPSQIKYSSGMQRGKNDKVDAKRIAIYASRFGDKVKYYDRPTEEIERLKQLERERALYVTDLAKYKGQMYDQKDFMPAALYRKKTKRMKGLIQELQAAIDAITAEMEKIIGSTEVLARQMELLMSIDGVGKVVALNVIIETEAFSRFDNPRKFCCHAGVAPFSYTSGSSQHSKNKVSHRANKNIKKLLHMPAVSVTHRKEGELKAYYMRKVEEGKNKMSVINALRAKIVARMFAVIKRNEVYTPIYS

SEQ ID NO: 474435 - protein, 345 aa, unidentified
MQVTTMGIDLAKNVFQVHGVDASGKVVVRKALRRSQLLPFFEDLAPCLIGMEACSSAHHWARELNALGHTVKLMPPSYVKPYVKRGKNDVADAEAICEAVTRPTMRFVPVKSTDQQAVLMLHRTRALLMRQRTMAVNALRGHLAEFGLVAAQGGKSLAELIESVFEGSGTDDDAVPPLARRALAPLVAQLRQLQAQIKAIEVELLAWHRATDASRRLETIPGVGFITATAIAATVTDPSHFTSGRQFAAWLGLVPRQNSSGGKERLGSISKMGDRYLRTLLVVGATSVMRYARSKNAAGAQWVNALLARRPARLVSVALANKTARIIWAVLVRGETYRAPASAAV

SEQ ID NO: 474436 - protein, 317 aa, unidentified
MNTISPTRHIGVDVGKDQLDFFCHESAEHFTVPNTATGIRQALKRLPLAEIACLVVEATGRYEQALVQAAQGKGVPVVIAQPIAVRRFAGALGILAKTDRLDSRVIAQYAASIRPQARPLPDRNTRKLKDLTVRRKQVIGMLTMEKNRLQVMPAFLGADIRRSIRGLKRQLSKLDDTIQTLSREVSAWRERRLILESVPGVGTTLSTTLLSDLQELGSLNPKQIAALVGVAPMNRDSGKMRGKRSIRGGRAHVRTVLFMATLSAIQHNPVIRRFYRMLVAKGKVKTVAVVACMRKMIVMLNAMVRDGTSWEETKTMA

SEQ ID NO: 474437 - protein, 319 aa, unidentified
MAQNDLVVVGIDVAKDKVDACIRALALRQACPSTSHGHRKLVAWLRKHQVNKAVMEASGGYERAWARVVREAGIEVRIVDPKRVRNFALSAGRLAKNDAIDAEMIAWFAETFSDAPGQKHDAAREELQTLVKARLSLIDFRMRLVSQSEHAAPGLVQKAHAHILKSLISEIARLEAAICAKIKSMPDFAERAEIIESVPGFAETSSANLVAGVPELGQVSDGIAAALIGVAPYDDDSGKRRGERHIKGGRRWVRNAIYMPCVGAATLNNPVLKAYYQRLIAKGKEPKVAIIACMRKLIVILNTMIARRQKWDPGRYALS

SEQ ID NO: 474438 - protein, 449 aa, unidentified
MSGPQVIDDEEHERVHERVAAIDVAKDSGMVCARLPHPARPGARRSTVWTVKARMGAIRTLGRQLSRDGIEVVTLESTSDYWRIWFFVLEACGLAVQLVNAAQAKSLPGRPKTDRLDAMWLARLTEMGLLRASFVPPKAIRDLRDYTRMRTRLIQERTRCFQRLEKLLESALVKVSSVASKLTTISAQDMVKAMVAGQRDPLVLASLARTSMKAKREELAEALDGMFDDHHGELAGMLLDQIAFLDQRIAALSARAAGLATAMPAAWGVDGDGTTGLEAGAGPDAAALPVVARLTEIPGVSPDLARAIIAEIGLDMSRFPTAAHLVSWAGLCPSARQSGPRTRAGKKGQGDTWLRSALGQAANGAARTATFLGERYHRIARRRGKVKAQVAVARSILVIIWHLLSDRAARFTELGHGYYQARLDTDRKLRNHIRQIQALGFDITITKAA

SEQ ID NO: 474439 - protein, 372 aa, unidentified
MELMALYKRVIGLDIHQAQITACALIEEPDGNSRIEQRQFGGFKRDRRELAEWVASLRPDEVVMESTGIYWKSPYAALEAVGIRAKVVNARHVKNVPGRKTDVGDAHWLATLARAGLLRGSFVPPAKLRELRLIARQRQKLVGQLASEKNRLHKVLTDAGVRLGVVVSDLHGQSARAMVKAIIAGQPPHAVLKLASARLKASRAEIFDALQGDLSASHRFVLDELMRHIEEIEARIARFDARLLAELESERNTLALLQTIPGVDLIGAAMLLIEIGTDMDAFGSADRLASWVGICPGNNESAGKRKSGQLRKGNLYVRRLLCEFAHAASRTTSVFKSKFQSLVVRRGYKRAIIAIGHKILRTIFFMLKRREH

SEQ ID NO: 474440 - protein, 413 aa, unidentified
MRIRGAKVEVALPSGARAPDTPTRSEAQITGGAEGRTTMRSVALDLGRKISFCEVANGEVQSRATARSIDELERQLGRGTPPARVAFEACREGWFIDRRLREWGHEPLMVDTTRCRQLGIGQHRRKTDRIDAEVLARAVERGMIPLAHVLSPARQQLRMQLGVRRALVKTRAGYVASIRSVARAHGKSLPSCMAYNFAARTRGIELVPALAALIEPLLILIEQVNVQLAVVEQELDRQSSTEPVVQLLQTAPGVGAVVSAAFVSVVDDAHRFDSAHQVQAYLGLVPSENTSVQRRLGAITREGNRYLRALLIEAAWSIFKHKNADDPMRAWALSLAARRGKRVAVVGLARRLVGVMWALWRDGTVYEPARVGLASARGHQEHAQSLELQAAALATAASKVRRARRSPTVTVAR

SEQ ID NO: 474441 - protein, 417 aa, unidentified
MFAVGVDVSNGWSTVAVLGAKRMVVMKPFEVPHTADGFVALAKKLKKLDGETRIVMEHTGRYYESFAMSMYRAGFFVSAVNPLAIKDYQEGISVRKVKTDKADALKIAQFAIDKWEILPQYTPMDTIRYDLKTLHRQFQLSSKTKTALNNNLIALLEQSYPGANRYFDSPVRQDGSQKWVDFVDTFWHVDCVAKVSQNAFVECYRKWCKRHGYNFSEQKAIELHTDARQKFPLVPKSDTCKLLVKEAVSQLNAVSRTVETYRAEMDRLASQLPEYQTVMAMTGVGKSMGPQLMAEIGDLRRFAHQKSLVGFAGTDPIKDDSGDKVSDSKPSSKRGSPYLRKTLFVIMTILLQLQPQDDPVYQFLDKKRSEGKKYFVYMTAGMTKFLRIYYGKVRDCLREKGLWDSLPSNESATDPKE

SEQ ID NO: 474442 - protein, 340 aa, unidentified
MGEITTVGLDLAKNVFQVHGVDAEGATVLRKQLRRAQVPGFFGKLPRCLVGLEACATAHYWARELCALGHEVRLMPAQYVKAYVKRNKNDAADAEAICEAVMRPTMRFVPIKTADQQAAVLLHRGRERLVRQRTMLVNALRAHLAEFGIVAPQGLRNVGKLIAIIRDEDDARLPDLARQVLAVLAVQIEQLETAIAALEKQLMAWHKSNPVSQRLATIPGIGPIIATAIAAMVAEPSGFRSGREFAAWLGLVPRQNSTGGKTRLGGISKRGNQYLRRLLINGASANLLRSKATNADPWVIGLRRRRPSMVVAVALANKTARIAWAVMHRQENYQRTVLAA

SEQ ID NO: 474443 - protein, 354 aa, unidentified
MPQSSTLYVGMDVHKESIAVAYVAQEHGAEVVSLGPIGTRQCDIDKLIRQLQSKSKQLVFVYEAGPCGYWLYRYLTKKGYVCWVVAPSLIPKRAGDRVKTDRRDAIQLARLMRSGDLTPVYVPAVDDEAIRALSRAREDTLRDLKAAKLRLKAFLLRHDIRYTGRAHWSPAHLRWLSEVVCPTPAQQIVFQEYVQTVTEQTERLGRLELELHEQIKTWRFAPVVEALQALRGVQFTVAVTTVAELGDLTRFANPRQLMNYLGLTPSEYSSGARRQQGSITKTGNSHARRALVEGAWAYRYPAKVSRHLQLRLEKLPTAIQAISWKAQVRLCTRYRQLMAKGKNANQVVVAIARE

SEQ ID NO: 474444 - protein, 408 aa, unidentified
MKTLHKRCAGVDVHKTEVVVCLRLVTHGKVEREVRRFPTTTHGLLELAEWLESARCTHVAMEATGVYWKPVWHILDGRFALILANAAHVKTVPGRKSDVNDASWLADLLAHGLIRPSFVPPAAIQELRDLTRTRKQLTREIAQHSQRIQAVLEEANVKLCSVITDILGASGRRMLKAMIAGEIHAHKLAALGSERLGCAPETLIDALTGHMREHHRFLLAQHLQTIEQLEKTIAAFDTRIEEKLMPFRDTVERLKEVPGLGSTATEVILAEIGLDMSLFPSAGHLLSWAGFVPRLDESAGKSRSTRIRKGAPWLKPVLVQAAWGATRKKNSYFQAQFLRLKARHGAKKAAIAVAASILTTVYHMLRDGTCYQDLGPEYFTRRNPAKAAARLANRIRNLGYHVEIRPAA

SEQ ID NO: 474445 - protein, 394 aa, unidentified
MKLIGIDIGKNKHFFCIMDQQTGEIISQPVSFSNDKEGFDFLVQKIKSYPKDSILIGMEDTGHYHFALLKYLLNLQYTVALINPKTTDFNRKMQGGITKNDKLDTINICDVLDTPERKKQYRITKVNSFDLYEQKQLTRHHHNLKEKENVYKNRLQKCIDIVFPEFNKLFNSKYGTVYMNILKTFGSAENIANTDIRTIRKCFEIEGRGNRISLTPERLKECARSSIGISSSAEVIQIKHLTAQIELIEEQLTEIDKKIEEFSIQNNSPILSIPGISHFSGTSILAELGDISNYSKPSQIIKFAGVAPLHYESSQFNAQHTSITKKGSKYLRKTLYQIILPVIKHNPVFNKYYQLKISQGKGHRCAQGHCVRKLLRIIYHLLKTNQQFDHQLLR

SEQ ID NO: 474446 - protein, 360 aa, unidentified
MFCERTSVGLDVHARSVVAAAIDGRSGEVFRARLTPSHEEVIEWVGKLPGPCAVVYEAGPTGFGLARALSAAGLRCEVAASSKLLRPAGDRVKTDARDALNLARLLRLDEVVPVRIPSAAEEAARDLVRTRDAARADLMRARHRLSKLLLRHGIVYYDGKAWTERHDRWLHHQRFDAAPTQSAFEDAYEAVVLATARRARLDEKITALAADSEFSPMTRRLACLRGISTLTGFALAVEIGDWDRFTGASIGAYLGLVPSEYSSGTSRAQGAITKTGNTHVRRLLVEAAWHHRSTYRPGAVLRHRWDQAPAAARARAHAGNQRLHARWVGLNLRRKRAVIANVAVARELAGWCWSLAVLPD

SEQ ID NO: 474447 - protein, 245 aa, unidentified
MLGIDVSKDTLACTLLDPQTQKPIWHRTVPNTTAGIKRLLRQTPDQSHWALEPTGRYGLLAATTARQAGRQVLLAQPKKARDFLRSIQSRAKTDALDSYGIGLFALCRPLPPYPLKSKVVEQLDQLLSVRKSISASLASFGLQARELTHAAPALEPVVAALQTQKKELDRQIAHLTASQQEFSIAAELEKVPGFGKVTAATLASRLAGHTFGHSDQFVAYCGLDVGVRQSGKKNGQTGLTRQGDG

SEQ ID NO: 474448 - protein, 346 aa, unidentified
MTTVDATRQVTGGVDTHLDVNVAAALDPIGGLLGVAEFPTTPAGHRRLAEFLASFGTLTRVGVEGTGSYGAGLSRYLRGSGVEVVEVDRPNRQSRRHTGKSDPVDAIEAARAALSGRAQGAGKSRDGNVEAIRALVVAKRSSRSTKIQTLNQIRHLGFTAPEELRSRLQGISRQHLGAEAAALRPRAGGDPVVFATKTALSLLGHRVLVLDAERERLNLLLGELVKDTAPQLLEIHGVGVDTAATLLVTAGDNPGRIRSEAAWAHLCGVAPIQASSGKVTRVRLDRGGDRQANSALWGVVITRLRSDPRTQTYMERRLKEGRSKPEIIRVLKRYVAREVYHRLPRA

SEQ ID NO: 474449 - protein, 405 aa, unidentified
MNAVGIDVSKGKSTVTIRKPGDVILMSPCDIPHTQSAINDLIKQIKSLEGETKVCMEHTGRYYEPVATWLSDAGIFVSAVNPILIRDFGDDSLRTPKTDKADSKKIARYTLDRWAKLKQYGIMDKTRNQLKTMNRQFGFYMAQKTAMKNNLIALIDQTYPGANDFFDSPARNDGSQKWVDFIHTYWHVDCVRSKSLNAFTEHYQNWCKRKNYNFSAEKAAKIYQISSDLIAVFPKNDITKMLIWQAVALLNTASKTVESLRSKMNELASTLPEYPVVMDMNGVGATLGPQLIAEIGDVSRFTHREALTAFAGVDPGKNDSGKHIQNSVRTSKKGSPYLRKTLFQIMDSLIKRSPVDDPVYAFMDKKRSEGKPYYVYMTAGANKFLRIYYGRVREYLSNLSNNETI

SEQ ID NO: 474450 - protein, 407 aa, unidentified
MLFLGNDWAEAHHDIELQDEQGRVLARRRLPEGVAGLAQLHAVIADHLGEDDGPASVLIGIETDRGPWVQALIATGYTVYAINPMQVSRYRERHATSGAKSDPGDAHVLAEIVRTDRSHHRPAAGDSEQAEVVKTLARTHQSMIWSRQRQTNQLRSMLREFYPAALVAFGEDLAGRDALAVLGIASTPAGGRALSRSKIAAALRKAGRQRNIDATAVRIIEALRSDQLGLSAALSEAYGASVRSIVAVITTMVTQIGVLEAEVNRCFGQHPDAEIITSQPGLGVVLGARVLAEFGDAKNRFTDAKARRNYAGTSPVTKASGTRRVVLARFARNRRLADALHQQAFAALTASPGARAFYDHHRARGATHNQALRTLSNRLVGILDGCLRHRTPYAEATAWAHRATAAA

SEQ ID NO: 474451 - protein, 433 aa, unidentified
MGLIVPTTIHPEQEDQPLPYEWFVGIDWGSQQHQVSVLDRDRRRVGERVVDHDGASLARLADWLWTLSAGQPQRVAVAIEVPRGAIVEGLLERGFHLFALHPKQLDRFRDRHSVAGAKDDRRDAFVLADSLRTDQPSFRRLQLEAPQFLLLRELSRAEETLLAEFRRSANRFREQLHRFYPQMLQLCAAADAPWLWDLITLAPTPAHAMLLSEEQVQRVLKAHRIRRLKATEVLACLQAPALPVAPGTADAAQAHCGFLLPCLRVLAEQLLACSQQVSTLLRTLADEPGKGEGPSDVAMVQSLPGVGRKITAWLCAEATQPRAERDYQMLRTHGGVAPVTKQSGKRRQVVMRHGCNPRLRHALYHMARIAMQRDAHFGSVYAALRAKGQRHGQALRNIGDRLLRILMAMLRDRTGYDASRIRCKPVVEMGQKM

SEQ ID NO: 474452 - protein, 336 aa, unidentified
MIVGCDFHPSFQQVAVLDTESGELQEHKLMHATGEAEQFYRRLVAPSLVGMESVGNSQWFVLLIERLGHEIWIGDAAQIRASYMRKQKTDKRDAAHILKLLAEGRFPRIRVPDAEMRDQRQLLIHRHKLVQIRTRVKNELQHLMMNRGVQKKYKLWSVRGRAELEQLPLQQWAGRRREDLLSLLKMLDQQIEHMDQAVAVAAQQNDRARLLMTQPGVGPVTALAFVLTIGDVKRFARSKQVASYLGLIPSESSSGGKQRMGAISKQGNRLLRVLLVEAANSAVRFDPEFRKEYAHRCHQKHRAIAKVAAARKLAVRLYWMLRTQTPYPKVVTSRAA

SEQ ID NO: 474453 - protein, 378 aa, unidentified
MSKIRFVGLDVHAETIAVAVAEPTGEVRSWGLIPNRPESIRRLVRKLGPVEQLRFCYEAGPTGYVLYWQLTALGAKCAVVAPSLVPRKPGERVKTDRRDALKLARSYRAGDLTPVWVPDAAHEALRDLVRAREAAKGDLLRARHRLSKFLLRHGWQRPESIKSPWTNVHLQWIKTKVHFEQPAQKIALSDYVHQVEHLVARIERLDQAVLEAARSAPPPMRAVIEALQALRGIAQVTAVTIVAELGQISRFAKAGQLMGYSGLVPSEHSSGERTRRGAITKTGNAHLRRVIVEAAWAYQFRPRLGGYLLKRQVGLSEEVKEIAWKAQHRLHARYRKLLAQGKNKPQIVTAVGRELLGFVWAIGVNVETRMREPKQVAA

SEQ ID NO: 474454 - protein, 330 aa, unidentified
MQGKVMSEHSASDEVGVGIDVCKEWLDVHILPAGTVLRFSNAKKGHKQLLCALKPLGVRIAVVEATGKYHRGVHRFLHDAGLAVAVVNPLRARLFAESLGALAKTDSVDARMLAAFGLMAQLAATPPQPEAIENLSEIVRNREAAIAAGTALENQPATAAVAGVKHQIERQIKSAKAAAGVLEALAVQTIEADPGLARRFAILLSIPGVGDVTACGLIANMPELGSLNAKQAGLLAGLAPIACDSGKRNGPRRIRGGRQAVRNGIYMAALSAARFNPHLKRFYERLIAAGKAKKLALTAVMRKLIVLANDLIKEDRLWSPECPTAQPLHA

SEQ ID NO: 474455 - protein, 292 aa, unidentified
MTTIDYIGFDVHKKSISFCIKAADGQVLEEGQLAARRKELTAWAQARRTPWVGAMEATLFTGWIYDHLRPYAQALKVGHPLMMKAIAAAKKKNDRLDAGKIADLLRCDLLPECYMAPRWIRELRRMLRYRNLVVRQAIRLKNRIAGLLMETGSEYNKRRLHGKAYFDELLGKLEQTPPSVLRMLKLSRGALEMFQSVERILIRTLLENQPLRERVERLMSIDGVGEVVALTWALEVGEPERFPSIRQAVSYCGLTSAQRNSADKEQRGPISKQRNKHLQTMLIEAAKLTACL

SEQ ID NO: 474456 - protein, 347 aa, unidentified
MRIVPHSCAVYGVDLGKTTFHIAGADQVGRLTLRIKLRRDALLQFFATASPARVGMEACPGAHWLARKLIAFGHDVKLIPAQFVKPYLKSNKNDTLDAEAIAEAVTRPTMRFVPVKRHEQLDMQALHRVRAQFVHQRTAIVSQFRCFLLEYGIAIHAGIGMFRRDATRILADDSNDLTPTMRQLLTDLWSDFLRIDERVTTLSGQIEASAKHDDVVQRLTTIPGIGPLGASALCAAIGTGKQFRSGRDLAAWIGLVPRQHTTGGKPTLLGISKRGNSYLRRLLVLGAQSCLMHLDRSRDRLGQWLDTLGSRMHHNKVVIALANKLARVAWVVLTRPGALYEKMDRRF

SEQ ID NO: 474457 - protein, 316 aa, unidentified
MSEPVYVGIDVAKSSFEVAVSGQAQTLNLNNDESGHTQLCQLLVPLAPRLVLLEATGGYEQDLALALAAAGLRVSVINPRQARDFARCMGKLAKTDRIDAQALRGFAALLNTQGHEPRALADEQQRELSALVVRRRQLVAMLVAERQRLALAHPKARPSILSIMDAIAAQLHDVDGQLKELVLAHHADLAALLTSVKGVGPTTASTLLAQLPELGQLNRKQITSLVGLAPINRDSGTLRGQRHIFGGRADVRRVLYVAALVGTRFNPVLKAFYARLLAAGKPKKVALVACMHKLLVILNAIARTKSPWRNDFAEAL

SEQ ID NO: 474458 - protein, 314 aa, unidentified
MKAQPVFAGIDISKDRLDAFVRPEGASFSQAYTDKGIALLVERLREVHPEVVLVEATGGYETRIVAALAHARLPVVLINPRQVRDFAKATGRLAKTDRIDAQVLAHFAEAVHPEVRLLGDRDQRELAALMSRHGQLVEMIVAEKNRTHTTTEIVRGRIEAHLGWLRTELESVDRELDDFIRQSPALQRKVEIVTSVPGVGPVLSKALISYLPELGAINRKEIAALVGVAPFNSDSGPHIGKRVVWGGRKQIRSILYMGALVGTRHNSAIRAFYQRLLAAGKEQKVALTACMRKLLTILNAMVRSDAVWCENYRG

SEQ ID NO: 474459 - protein, 352 aa, unidentified
MIQTQTKTDRKLWIGIDFHKKTWRVHFRSDLFSGNPFSMEPNPDNLLKKVEKDFPEHEVHVVYESGCFGFWAHRAFESFGWQSVVVNPSDIPRRAKHNFQKTDTIDARNLSEQLKAGSLKSVSIPNIQREQFRGHFRRRNDLVKSSRMIKSRIKSILLYYGIKIPESMDNANWSKDFKNWLADLKWDFKTGENMMYSRLRELEFNHKEILQVSNEIRKYARLNHKEDYELLQSVPGVGPLTSICFLVEVGDINRFKNFKQLASMVGLVPTVYQSADTLQTTGLTPRCLRLMRSYIVEASWQAVRIDPVMQEYYRKHVGKKPNDIIIKVARKLLSRMHGVLRTRQPYEIGLVQ

SEQ ID NO: 474460 - protein, 338 aa, unidentified
MTIVMGLDQHRAQITADWLNTGTGEVSRRRVAPADRAGVRVFAARFRGQDLEVGLEATTGWRFVVEEFEAIGARVHLAEPAETAARRGTKKRAKSDRADARHLRELVMVGRLPESWIPPEHLLELRARVRLRHTLVDQRREWQQRIQATLYHHGVPPRSWLLGAESRAWLTSLELPPAAREQITIALALIDAHDAQIGPLDQELREYAKRQPGCRALMRHSGIGPLTSVTILAELGDARRFSSSREAVRYSGLDITVHQSDARRAPGRLSRQGPPALRWALFEAAQCARRPGSPDHDYYLQTAARLGGNRACLAVARKLLKRSYHTLRELGEEALQPA

SEQ ID NO: 474461 - protein, 345 aa, unidentified
MAVYIGVDLHVRTETVCWMNTADGEIHQHTLDHSRDDLRAFYAQFTAPAVVGIESSGYALWFHQLMEQAGHRLLVGDAYAIRQFARRRQKNDRRDAELLLDLLRREEFPVVHRPAPPSQDTLALLRYRHRLVRMRTMVKNGLQAVALNHQLRLGFRLFTVRGQQRFAALPLSGAYATQRQQSQVLLTTLEAQIAAVNQELATRAAADARVVRLRTHPGVGLQTALAVVHTLEPVTRFDRARRIAAYCGLDPSEHSSGDTTRYGHISKQGNRLLRFLLVEAAWSAVQHEEDLGRFFRRLRARKKPHAVAVVAVARKLVLRLYRMLQEGIDYEEFRRRGRDARRARK

SEQ ID NO: 474462 - protein, 343 aa, unidentified
MKITTIGIDLAKQVFQVHGVDERGKTVLRKQLKRAQMLPFFVNLPTALIGMEACGGAHYWARQLQTYGHTVKLMAPQYVKPYVKTNKNDAADAEAICEAVGRPNMRFVAIKTAEQQAILSVHRVRQGFVKARTAQVNQIRGLLAEFGLVLPQGISHLAKGLPDILEDGANALPGSFRQLLRRLHEHLQQVDRQVAELEREIQLWHQDSAASQRLAAIPGIGPLSASAFVATVGDGHNFVRGRQLAACLGLVPRQASSGGKTTLLGISKRGDSYLRTLLIHGARSVVRQVERHPERADPWLRQLLSRRPKNVVAVALANKNARVAWALLTQGQDYQPRAMPMSE

SEQ ID NO: 474463 - protein, 558 aa, unidentified
MTPHKDSCLDPRPSAPTPLLPLSPVLSDALQVCHPHAAGIDIGDAEHWGAVPPGRDPQPVRRFGTFTADLDALAAWLMDGGVTTVAMASTGVYWMPLFALLEARGLEVLLIAPRQATRAPGRPTTDRLDCKGLQRLHAYGLLAAAFRPAEQVWVRRSSLRHRQMLLPSGAHHMQHRHKALQQMHLTLSQVVSDLTSVTGLAMLHAIIAGERAPLTLAKLRHPHCQHREEEIAKALQGTWRAEHLCALQPAVDLYHFYHQQLPVCEHHIQAHLGTCAEKSDGQPLPPKPRRHKKVNEPRFDARTPLDRLAGVDLTTIEGIAAGTALVILSEIGTDMSRWPRVKHLCSWLGLSPRHKISGGKVLARRVRPGAQRVTVALRLAARTVHQAHPVLGAFYRRMHSRSGAPKAITATAHKLARLVYSLFKHGSAYVQQGIEAYERQDRERKLKALARQARAFGSTLMALGTPAVPSLAAVAAPTPCAGTTRYRRPLPYGGKGGVSAHASTVSTGRPATTRHGSRSPLYSSHFHRVSSLGGFIAVVSCFHRHGVQTALVESGACE

SEQ ID NO: 474464 - protein, 374 aa, unidentified
MQEQAATARTEVISVAIEMSNTQWRLAFTAGDKIRQVTLTAGDGEGFLQHVKTAKEKLHVAADAAVYSCYEAGRDGFWFHRFLTAHGVTNLVVDAGSMRVQRKHRSAKTDRLDAELLLRNLLRWQAGERNVWSVVRVPSVEAEDQRRVERERQRLQKEWTAHWARLWSLLKLHGIRSCAKTRFLAHVDAARTWDGQPLPEQVQAELRREYVRVEQLAEQRAVLEAEQSRQVKRPTTEAEKVAAKLHRVKSLGPVGACSLAHEFFGWRHFRNRREVGALAGLTDTPWSSGDLARSQGISKAGNRRVRHLLIEVAWKWLRYQPESALSQWYERRFAQGGARLRRIGIVALARKILIALWRWVAFDEVAAGVCLRPA

SEQ ID NO: 474465 - protein, 355 aa, unidentified
MIYVGIDVHKKHCQSALMDESGKVLEQIPFRNTGDGLTYLIDRIKPYGEAKAVLESTGNFWLKSYEALEKADIRVSLSNPLKTRAIAQARIKTDKIDAKLLAHLLRANLVAESYVPDKETRAKRALLRHRSSLVKTRTELKNRIHNLPDKYDLQPEFTDLFGKQGMNWLKTLQLPSIEKTILNSNLKLLEALNDQIEKINLEIASNAVNKEDVKLLMTLPGIDYYAAMVIANEIGDVTRFSEANKLVSWTGLAPSTRQSGNRVKHGTITKQGNKTLRWILIQATHNACRNDERLRNFYQRIAGRRGGNKATVAVAREMLVIIYHMLTRKEPYRGVDQELYRSKLKRLERLGSNGL

SEQ ID NO: 474466 - protein, 350 aa, unidentified
MDLGDKHSHLCLIDTESGEVIEESRLRTTPEAFERRFGSEEPLKIAVEVGTHSPWVSRLLKHLGHEVLVANARKVRLIYAEGRKTDRIDAEKLARLLRLDPSLLYPIEHRDEDCQAHLALIHSREALVRARTQLVNHVRGTVKSFGHRLPKCSAGSFHYKVADALPAELMEALGPVMEIIASLTEKIKDHNRKIETLAEERYPETRLLKQVPGVGVLTALTFVLTLEEPDRFAKSRRVGPYLGLVPSNAQSGQYNPQRRISGKGDELLRRLLVGSAHYILGPFAPDTDLRRHGEKIAGRGGKGAKKRAVVAVARKLSVVLHRLWATGEIYDPLRNSDDRSSEAQAAEEVA

SEQ ID NO: 474467 - protein, 384 aa, unidentified
MTKHNILFIGLDTHKTSTEVAYIEDQRGAKSIHLGKILSNKAAFKKLARQLQSKYPQATLHFVYEAGPCGYWIYRLITSLNHCCYVIAPSLIPKKPGERIKTDKRDALKLAKLLKSEDLTPIYVPEPEDEAVRDLSRARETTMKDLKDAKYQLKALLLRNNINSKVKDNWSLQHLRWLAELVLPHPCQQIVLQEAVSTITERLKRLKRLDNELTHQVKKWRYYPVVKAIQAMRGVRLLVATGVIAELGDLTRFDHPRKLMSYLGLVPSEHSSGGKRRLGAITKCGNSRARRLLVEGAHSYKYNANISKEMQLRQEGLSKEIIDMAWQAQLRLCRRYSRLMHKGKHRNVVVTAIAREMIAYIWAISREVVLPHVNVRLRLARVPA

SEQ ID NO: 474468 - protein, 326 aa, unidentified
MEHELHYIGIDTAKEKLDVDVLRPDGRHRTKKFANTTKGHDELVSWLKGHKIDHAHICIEATGTYMEPVAECLYDAGYIVSVINPALGKAFAQSEELRNKTDTVDARMLAEFCRQKRPAAWEAPPPLERALRALVVRHQALTDMHTQELNRTETAREVQRPSIDAHLLWLEAELKRLEKQIKDLTDDDPDMKHRRKLLESIPGIGEKTSAVLLAYIGLKDRFAHARQFAAFAGLTPRRYESGSSVRGASRMSKAGHVSLRRALYMPAMVATSKTEWGRAFRDRLAANGKKGKVILGAMMRKLAQVAYGVLKSGVPFDASRHNPVAA

SEQ ID NO: 474469 - protein, 344 aa, unidentified
MNSMHYIGFDIHKKVISFCEKRIDGTTVDQGMIRATRDSLTDWVAKRETSWVGAMEATLFTGWIYDYLLPYAQELKVAHPEMLKAITAAKKKNDAADAEKIADLLRCNLLPECYMAPEEHRNLRRILRYRNLLVREAAKMKTKTATLLMEVGAEYNKRRLHGSKYFQELLSTLEYVPESVLNLLQMSRSSMEFFDRMQKSLISALGNNPQISQRVELLRSIRGIGEVTALTWVLEIGDVYRFGRINQAVSYCGLCSAQKESAGKEIRGPLSKKRNKHLQTVLIEAAKLAPHWNPQLAEVHERELKKGNRNRATLAVARKLVAYMLAVDKSQKKFTPKEVLDKAA

SEQ ID NO: 474470 - protein, 387 aa, unidentified
MKIMAGIDLHSNNAMCGLVDSEGKRLLHKKVPCDLRCVLSVLEPYKQRLESVAVESTFNWYWLVDGLQEHGYKVALANPAAMQQYNGLKHTDDKSDAFFLGELQRLKILPTAHIYDRKTRPVRDLLRRRLLLVHQRTSLLLSLKSLHARTTGCSLSLGLAKALLPEQAAKLFRHPADQLIAREQAQHIRQLSQSIEAIEKMVLGEVKQLFCYRQLQTLPGVGSILALTITLETGDITRFPSAGDYASYCRTVDSARLSNERKKGQNNEKCGNKYLAWAYVEAANFAQRSDGPCRRFFDRKLAKTNRFVATKALACKLSKAAWYVMSQGVDFDSARAFPGPRPEAQTQRSSKAQAGQATKQTELKKKTDLGRASVNPSKGSGSKTLRD

SEQ ID NO: 474471 - protein, 371 aa, unidentified
MPDVSSNAPADVRLWVSLDVHKLSIVAATLPPTGGQPQVCQIETTRVAVRRFIDRLSGPQGLAVCYEAGPGGFDLLRVLTDLGVACDVVAPSLIPVRAGDRVKTDRRDAKKLVRLYRAGQLSYVAPPTPETEGLRDLMRCREDLRRARTNARHRVSKQLLRHGRIYREGSSQWTRRHRAWIARQRLDDTLAQAALGQMLVHLDGLDRQLDALDRDLEQIARGERWAAAVETLTRFRGVSTRTALGLIAEIGDFARFSHPRELAAWLGIVPCEYSSGAQRHRGHITKTGNDHARRLLIEAAWAYRHGPRRPDHGPQPDARAWQAQIRLHRRYRHLTEHGKRSTVATVAVARELAGFLWAAATDQPLVEGAAA

SEQ ID NO: 474472 - protein, 411 aa, unidentified
MNPVIGLDISKGESQVQAFLDKGKPYRKSFKVSHTLEGLSLLEDFLEEVKRETGKKPPVVLEATGHYHSSVVQYLENRGYLMIIINPLISYKAKSSSLRKVKTDAVDAYLLCEMFYKEDLEPCKKRGIQLLNLRNLTRQHENITGVLIQTKLQFQAILDQIFPEYRGVFGDLYSVVSLLTLSEFPSSEDILEASEETIADRIAKLCKSRSYRWANEKAIQLKAAAKRNPFEKTLYQSHILSLGMYINIILQYKEHLSKLESEIDALAKEVEEYNIIKSIPGIGEKIAATIISEIGEIDRFTDPKKLVAFAGIDPSVFESGKFTATKNRITKRGSSRLRHALYMAVRCAIRDCRKSKTSDDIIPRNKKLREFYDKKREEGKPFKVAVIACVNKLLHWIFALLKNKTTFQDIV

SEQ ID NO: 474473 - protein, 423 aa, unidentified
MNSQSNLSFTAFVGIDWADRHHDFCLQAAGSDQREFGTLDHSPEAIAKWAYSLRDRFGGHIAICLELAKGPIVYALQRYDFIVLYPVHPSTLAKYRQAFVPSHAKDDPTDAEMALDIMLRHPDKLKPIKLQSVAMRTLATLVEERRCLVDDVTGITNRMTNTLKQYYPQVLDWFEKRDTVIFCDFVSRWPTLLQVKRARRSTLESFFHQHNGRRAHLVEARIQGIRTATALTEDESVIRPNKMVVLALVEQLRVLLQAIDRFDAEIDTVTKSLPDYELFAALPGAGHIQAPRLLVAFGEDRDRYANAAEIQRYSGVAPVVERSGNKCWVHWRLACPTFLRQTFVEWAGSTIPRSYWAEAYYQQQRQKGCSHRVAIRALAFKWIRIIYSCWKNKTPYDESVYLKALKRRGSPLLNGVMESAKMT

SEQ ID NO: 474474 - protein, 413 aa, unidentified
MVEASGAAVAYLGIDVGKLSHSACAIDAGGEVVFRADLENRPDDIDRLLERAGASALVVVDQRRNIGALVLARAFAHGNPCAYLPGYAEKQARGMFPGVAKTDAIDAEVIARTARGLPGALRPLAEKPEDTASLRILSSQREFAAAARTRAKNRLRATLLEADPALERAVDPSRPWQVALLAEFGSAAGCSAAGWSGFSAAAERAEAPADGARRLWESMAASARSGRRVPAGEDVAVRMLARDIAALDADVAELDGLIADALAGNELYECPLTVPGIGPKTVAALVTSVDISMFRGHDELASYCGVAPADSRSGTSVRSTSPQRGGNKQLKNLLIFSCNSLVSTQNRFGRYYDEGDEAQQGAEGRGEKEAQGHLRRHAGRGPVLGLNGRATTRRAAGRTAPRCIMPKIRGKSG

SEQ ID NO: 474475 - protein, 340 aa, unidentified
MGLYTGFDLHSSNTYVGIIDEDGKRIWKKKLRNDPSLISSALRPFKEDIVGIVVESTYNWYWLVDLMMEEGYRVHLANPSRIQQYSGLKHGDDEDDAFWLAEMLRLKILPVGYIYPKEQRPLRDLLRKRGHLVRLRTSLIQSLQNILARKIGTKMDPNHMKALRTDHVTPLLAGNDDLSLAGRVSKEAIDALTKQIKAIEVVVEKRIDIRRPYNLLLSLPGVGRVLALTIMMETGPIDRFPEAGKYVSYCRKVPAARFSNEQKKGTTNRKNGNKYLSWAYGEAAELARRCDSEARAYYDRKRRKTNAPIAHSALAHKLARAAYYMMRDGVPFMPERAFAA

SEQ ID NO: 474476 - protein, 386 aa, unidentified
MQASTVDTLTAGHIGTIFVAIELSQRSWLVTLHSPDKGKMSRHKLEGGDHAGLLALVDRERDRTTRTLGAVPAVASCYEAGYDGFWLHRLLLAAGITNYVFDPASIAVDQRARRVKTDRIDGERMLRTLMAYLRGEPRVVRIVRVPAAEQEDARRGSRERGRLIKEQTAHTSRIKALLRLLGMAVGNPHRRDWLNWLAAERDWQGQAVPPRVMTEIAHEHARLMLVREQLDALTETPASEDPTPAAAQMTERSELLRRLKCLGPAFATTLTSEVFYKDFRNRREVGSYFGLTPSPWRSGGIDRDQGISKAGNPRARCAAIELAWLWLRHQPDSKLTLEYRKRTLDAGKRIKRVAIVALARKLVVALWRYLTTGLVPEGAVLKAVKI

SEQ ID NO: 474477 - protein, 344 aa, unidentified
MGEVITIGLDIAKSVFQVHGVDDAGAVLIRKRVSRAKMLEFFGKLKPCLVGIEACPAAHHWGRELQARGHTVKLMPPSYVKAYLKRSKNDANDAAAICEAVTRPTMRFVPIKTKEQQAALMLHRARQLLVRQRTMLSNAIRGHLAELGIVSAKGRNGIGALLEIIADAEDSRVPPVARGILNVLARQYSALGAEIGSIDRGILAWHRSCEASRRLEEIPGIGPIVATALVAEIGDWKAFGSGRSLAAWIGLVPKQQSTGGKDKLGSITKQGNRYLRWLLVTGAMAVIRHAQKHGTLRRPWLGRLMARRPTKVAAVALANKIARMAWAIIVHGDRYKEPRPLLAA

SEQ ID NO: 474478 - protein, 408 aa, unidentified
MEVVHPRCCGIDVHQASLAVCVSIKEGSKTEKHQLRCGTTTAELLRLADWLHGHQVTHVPMEATGVYWKPIWHMLEGQFELLLANPTQVQALRGRKTDLKDGERIADYLQLGLLQGSFVPPQPIQQLRDLTRSRTTLKQEQVRIGNRIRKVLEDANVKLSSVMSDVMGVSGREMLRAMVRGETDPATVAQLARKRLRGKIPVLQQAATGTMNQHHRFLIEQWLALWDELGVRIAKFEEQIEKDLVPFAPAMKMWTSLPGVDRITAWTIIAEMGADMAQFPTAAHAASWAALCPGQEESAGKRQSGRTRKGNVWLRRALTQAAWGASMKKGSYYKAFYHRLAARKGKKRAIVAVAHALLVTGYMLLSTGKTYADLGDGYFDQLDRERLTKRLVKRLEKLGHQVSLQPAA

SEQ ID NO: 474479 - protein, 395 aa, unidentified
MGKTNRVVIGMDPHKRSATIEAMAEEESVLGKGRYGTDRAGFEAMLADAARWPDRVWAVEGCEGIGKHLVLRLLDAGEQVVDVPAKLSARMRVYATGQGRKTDDTDAHSIALVAVRMTGLREVVNDETLEVLRLLVDRRRRIGEDHTRMVCQLHQLLLALLPGGAKRDLSAAQARKLLATVRPTDVAGTTRKRVALELVVDLERVYARNKAANKELVQLVKQTGTGLLDLHGIGPSGAARLLVEVGDITRFPTKGHFASWTGTAPIDASSGDNVRHRLSRGGNRQINRALHMMAVVQLPNPTEGRAYFDRKVAAGKTPNEAMRCLKRRLSDIVYPTMLDDLVASRATSAGTGPGGHRGASHQSSATGSHPHAGSSDKSLPGPATSKPRTPLRKAG

SEQ ID NO: 474480 - protein, 400 aa, unidentified
MRVVFGIDVSKASSEVAILVNGEKVHNYTMSNDAIGFSRLLGDLKTVHKPEIIFEATGVYSRRLQVFLDEHGYAYTRLNPLEAKKQLDSLRVRKTNQIDAEKLAQSQFVLNRKPTYVQEEVYQNLRDLSRFYQNLTEDIVRAKNRLHKVLQVTFPELENILSTPSGEQYWNLVITFPCKDFVLELSKNELSKSIRLSTSKRISDKRVAYLAEKLIALANQSYCAVKKTSPILEEVRYYAKEMHRLYEQRQAVLDEMVELAQPLPEYDILLSIPGIAETTATSIIGELGDIRRFQSANQINAFIGIDLRHYESGNFLAKEHITKRGNPYARKILFKCIHNIASVSHTNPCHIADFYEKRKRQSQTTSTKPHTIASIHRLIRTMYYLIMHNKLYDYASTQNR

SEQ ID NO: 474481 - protein, 392 aa, unidentified
MYIIGIDIGKNHHEASIVSPEGKQIGRSLRFATTHKGADSLMRFIFKNIGNSPCVFGMEATGHYWYPIYSFLKAKGYTIYVINPIQSDSLRKMYIRQTKNDSIDSFLIAEVIRFGQFGTTSMADENILAMRQLCRYRDSVISSRTEIKLRIGTIMEQIFPEYEKQFSSLWVSTSMGILEKYLTPENIENTPIDELFEIIKDKSHNRLTKAKAISIKEAAADTFGIKIAQDAFSFQLKQLIDRMNFLDKQIEALDCQILEYYEKFDCYLHTIPGIGMIGAATILAEIGDISRFKNSSALVAFAGIDPTVRQSGEFNSTHNHMSKRGSPYLRHAIFLAATTCSFHNSPLNAYYKKKRDQGKHHLTATGAVARKLTTVIYAVLRDSKPYEPKKFC

SEQ ID NO: 474482 - protein, 349 aa, unidentified
MAVTIVEEARPITGGVDTHADTHVAAALDSVGGLLGVREFPATAAGYSGLLGWLGGFGSVCLAGIEGTGSYGAGLARHVTAAGIRVVEAARSDRQDRRRQGKSDPLDAVSAARAAQSGRARGAPKGRDGAVEAIRALMVARRSAAGERTRTITQARALILTGPDDLRARFTRHTPAALAAGIASLRPRPGDVPGYAVRVALRELGRRAQFPAGQPGRLDELIVPLVTARAPGLPALYGIGPRTAALLLIAAGDHPGRLRSEAAWAHLCGAAPIPASSGKVTRHRLNPGGDRQANHALWRIVFTRLGSDPATRAYAERRTAEGKSKAEIIRCLKRYVARQVYPHLRPAGG

SEQ ID NO: 474483 - protein, 355 aa, unidentified
MCAKKTGSIEDLAVVGVDIGKDTFHLVGFDRSGQVVLRKQIKRLALDATFEKLPRCVVGMEACLSAHFVSRRLRDMGFDPRIIPAIYVKPFNKGQKNDYNDAEAIAEAALRPNLRTVTEKSQDQLDLQALHRVRARLVSRRTATINQIRAFLIEQGIAVRSGFRALRNSFEAILEQRRDEISARMRSILIGLYGDWLWLDDRIAAVSTEIEEISRTEENCANIMSIPGIGPVISTAMVAAVGRGDAFDRGRDFAAWVGLVPRQFSTGGRTILGRITKRGSRYLRMLFVQAAKVIMMRPYRWQAFSFGAWLERAVSRMPRNKAAIALANKLARTAWSILRHGTRFDTPRDLTMEAI

SEQ ID NO: 474484 - protein, 351 aa, unidentified
MSGVVVGADVHKRTHTFVAVDEVGRQIGSKTVAATTAGHHQAVGWARERFGVELLWAIEDCRHLSARLERDLLTSGQSVVRVPAKMMAEQRRVARTRGKSDPIDALAVARAAQREPDLPVASHDEVSRELKLLVDRRDDLVKHRTATINRLLWRVHELDPAIAPPERSLDLAKHQQALAAALERFDGIVAELARDELADIVALTSRINELERRITVRVREVAPSLLAMPGCGPLSAAKIVGETAGITRFKSEAAFARHAGIAPIPVWSGNTRGRVRLTRSGNRQLNTAIHRIAITQARLDGLGKTYYAKKKAEGMSTPEALRCLKRRLARIVFNHLTTDHATSATGLAAAA

SEQ ID NO: 474485 - protein, 414 aa, unidentified
MDLTPMHKRVIALDVHQAKITACAVVEQDDGRVEVTKRDFGAFKRDRRALAQWALEIKPEVVVMESTGVYWKSPFAALEAVGIIAWVVNARHVKAVPGRKTDMADAQWLATLARAGLLRASFIPPIDFRQLRLVARQRQKLVGMCSAEKNRLHKVLVDAGIRINVVVSDIHGASARAMIKALIKGQAMHEVLDQKGRLRVSREDLFEALSTEQFSAVHRFVAEEIMLHIEQIEQRINRMDQYLLDGLRAWQPQLNLLQTIPGIDIQGAAMLLVEIGADMTVFGSAERLASWVGICPGNNESAGKRKSGRIRRGNAWVRRLLCEFAQAAARTRCALKAKFDSLAIRKGHKKSVVALAHKMLRTIYAMLASGTHYQDKSVDYEALSVARNAPRWIKMLRKHGFHRRARRRLRPLLH

SEQ ID NO: 474486 - protein, 371 aa, unidentified
MSVYVGIDVHRKRSQVAVIDAKGEVLANRNVPNGVEPILKVIGGLPPGTPAALEAAFGTGWLVELLEDYGFDPHLVHPLRCKAIASARLKNDKVDAAILGQLLRADLLPEAWIAPPPVRQLRALLRHRVQLVRLRTLLRNRIHAVLAGHGHDRPAGCWSGPGRAWMASLQLPAVSREVVDDDLALIDALETVTGRLDWEIHQRARSDPRVKVLTQLPGVGPFTALVILAEVGDVSRFGSARKLASWAGLTPTVRGSDRVAHYGHIWKAGLGVAAVGAVRGGADRQAVPAVRRRLPGHRHTAGEEDRHHRGRPQAAHPRLAPAHRRRACRSHTTRRSIRAPGGDAVTDQEEVARLRASSKNTLSGATARSKI

SEQ ID NO: 474487 - protein, 344 aa, unidentified
MVTTIGIDPHKATHTAVAIDDDETVLGEFTIRADKNQARKLVDWAASVDGDGRVWAVEAATGLGHLLSQQLIATGETVLDVPPVLASRIRVLSSGKSNKNDPNDARSVAVAALRRDGLAEVHREDDTAVLRMLAKRHRELTALRTQAVCRLHAMLAVLRPGGMGHRLSAKQASRMLQGLRGLDTVGEQRRLMAKTHLVDIRRLDRDLKAIKAQIRTAVAAVDTSVTDIYGVGPVVAAFLVGYTPPIERFDTADKYAAYNGTAPIEVSSGGKVRHRLSRRGNRTLNHAIHTAAVTQIRHDTPGRVYYDKKLGEGKTNKEALRALKRRISDAVYRQLVADAQRHSN

SEQ ID NO: 474488 - protein, 355 aa, unidentified
MAVYIGVDFHPYEQTLAFVDEADGEIRYKRFLHSDKAGIKAFYRKCGKDAVIGTEATGSLWWFEKLLFDNGMTLKIGDPRMIRRAALSRHKNDHRDAETILDLLMRGTFPAITPRNEQSREMLDLLNYRHSLVSKRTSVVNQLQAFARSKGLPRFRLPAVKARKKIEEVETTQVERLLVSSRFVLCDELTRQIKAVEARLEEEANKEERAQLLMTHPGIGLINAMALIHTLGDVRRFRRKEEVVAFVGLDPLEKSSGETRRIGSISKRGSRLARYLLGQAAQASRDKKIRKFYSEVSRRRGRPKAKVAAARKLLINCYVMLRDNISYEEFTRRGEVGLYEGSGEVTGKPAQSLKV

SEQ ID NO: 474489 - protein, 333 aa, unidentified
MKNYKHYIGIDVSTKTLDFQIVNSFAQLILHGQISNDIKGVKELFKQLKKHKIYEEYLFCFENTGIYSMNLCIILAEYDVDFAQCSALEIKQSKGICRGKSDKSDARDIAMYALRNIDKIELSKVPEIDILRLKLLYAEREKTIDAIKDFSATVENKDFLPKAVYTTAERINKKTLRFLKKILLEIEKNIREIINNNDGLKQQKKLLLSVPGIGEITSLYLLLATKGFKSFANWRKFACYCGIVPFEYSSGTSIKKRNRVSHFADKKMKSILHLAALSAIKHDAEIQSYYQRKKQESKPSLLVINNVKCKIISRAFAVVARNQPFINTCKFAS

SEQ ID NO: 474490 - protein, 385 aa, unidentified
MLTQGFQATAAANQDGTIYLAFELSKSRWLVARLLPGSSKISRFRLEGGDTAGLLQLLTEAREKAARLGFAKPRIVSCYEAGYDGFWLHRWLQAHGVDNRVLDPASIEVPRKARRAKTDKIDLAKLMRVQLAHERGEPQVCSIVHVPTVAQEDAKRVSRERASLLQERISHTNRIKGLLFAQGVRDTDPLARNFLARLDELVTPDGRRLSHHLLGELRREHARLSLVVSQIAKLEAEVRTAVQQAQPGTPEAKMALLVQLKSMGPTWATLLVNEVFYRDFHNRRQLGAYLGLTGTPYNSGQSVREQGISKAGNGRARNVALEFAWLWVRNQPNSALTRWFLNRVGEAKGAVRRIAITALARKLMIALWRYLETGLVPTGAVLRTK

SEQ ID NO: 474491 - protein, 338 aa, unidentified
MELYAGIDLHSNNSVVTVLDEQDRTVFAKRLANDLTAIIAALRSCAGTVRGVAVESTYNWYWLVDGLQDAGFTVHLVNTAAVKQYDGLKHGGDFSDARHLAHLLRLGILPTGYIYPREQRAVRDLLRKRSQLVRQRSTQILSIGNLVARNLGTHAGGNEIKRWQREHVDAMPLLDEQKQALMANLAVMRCLDSQIDALERSILAKAKLREDYQALKTVSGIGEVLALTIALETGEVGRFDSPGHFASYARTVDSRRESNGKKKGEGNAKCGNKHLAWAFIEAAHFAVRYDAAIKCWYQKKCANGLAVVAIKAVAHKLARACWHVMKDGKPFEVSRAFG

SEQ ID NO: 474492 - protein, 428 aa, unidentified
MNEEDRSRLEEFRQFRREVRGSAEYLLVGIDVAKDKHSAFFGTATGKTYLRRLVFENNLEGFQKLLVQAEAMKVQGGLKKVVFGMEPTANYHKPLGEHLIRCGHRVVLVSGVAAHENRKTLDGRWDSNDTRDAANVADLVSQGKCLFYEFPMGALQDLRNLLSLKRRFKRQEHGYRVRIRNHLLAMYFPELDQYYKQSESTSLAIVHWCLDPSVIAGLEYKRFVEMVAPGKGRISRESRLQAIWKRAVDSIGCEAGPTVEFEAQVMVEGLKQTREALRSIEEKIQEICCQFPEYEYILSIPGFGPDVSSKVLGAVGDPFRFQNGQQVLKLGGLDLNAERSGKSSNLARPVISKKGKADLRYALYQAALIASIRDRHFIVYFTNQLRGREKEPGIKTKMRVKLAAKLLVIAWTLMKKKEPFNPDYLKVG

SEQ ID NO: 474493 - protein, 342 aa, unidentified
MYYIGLDVHKKTISYCVKDASGLVHREGKVGATRWELDDWMKTLPQPWTVAMEATIFTGWIYDHLLPHAQQVKVAHPLMLRAIAAAKKKNDRIDAGKIADCLRCDFLPECHMACTAIRDRRRTLRYRHLLVRQMVQMKNRISGLLMETGVNHNKQRLHKVGYFRELLASNEEVNESIRPLLRVSRDSIVRLQKTEYALVSSLQRDPLLAERIKRLRTVPGVGPITALTWALEMGDVSRFASIRQAISYCGLCGDEKSSADKVMRTPLSKQRNKHIQRVLVEAAKLAPRQDHNLALVYEREKQKGNANRATLAVARKMVAYLLAVDRGQRDFVPFADSQSSAA

SEQ ID NO: 474494 - protein, 398 aa, unidentified
MTESSDYESVQVFIGVDVGKDIHHAVAVNRSGKRLFDKALPNNENKLRALISDLKQHGQILLVVDQPATIGALPVAVARSEGVLVGYLPGLAMRRIADLHAGEAKTDARDAAIIAEAARTLPHALRTLKLADEQIAELSMLCGFDDDLAAQTTQASNRIRGLLTQIHPALERVLGPRLDHPAVLDLLQQYPSPEKLALLGEKKLATQLSKLAPRLGKRLAADITGALTEQTVVVPGTNAAVVVLPRLALQLITLRKQRDEVALEVEQRVLAHPLYPVLTSMPGVGVRTAARLLTEVACRAFASAAHLAAYAGLAPVTRRSGSSIRGEHPSRRGNKTLKRALFLSAFAALRDPISRAYYTRKMSQGKRHNQALIALARRRCDVLFAMMRDGTFYTPTAS

SEQ ID NO: 474495 - protein, 383 aa, unidentified
MSDQRVIIGMDPHKSSNTIAVLARDETMLTRRRFVNSDDGFIEMLDAVNDYPDRVWAVEGANGVGRSVAQRLVAFGETVVDVPAKLATRVRVYSTGHGTKTDNADAVAIARAAVHSKHLRRVLADDATVAMKLLSDRRHELVGLRTQAMCRLHRLLRELIAGGAPRQLSAEKAFALLNDLKPDDPANVMRLEIAFDHIEDVMRLDRKIDDYNRRIVADVKSCGTTLIRLYGVGPINAALILGEVGDVSRFPNRNHFASYTGTSPISASSGDHQRHRLNRAGNRRLNHALHIAAITQIRQDTPGRVLYRRKMSEGKTHKEALRCVKRRISDAVWRQLQTDRSDDQTQDTKWPRRPAKDTFLVAYRSPDTPRANGRPKRFKPAVV

SEQ ID NO: 474496 - protein, 346 aa, unidentified
MEHHVGIDVSLELSSLCVLDATGKVIQEAKVASEPEALVAFLRGLNLSIVRVGLEAGPLSQWLYDGLHEAGLEPVLLETRHVKAALSAMAVKTDRRDARGIAQLLRMGWYRPMHRKSVPSQEVRALLGARKQLQIKVIDLEQTVRGLLRGFGLKVGDVSRGKLPARIRELAAGHVMLEKIIEPLLAAREAMWREFAKLHREVLIIVKEDQVCRRLMTVPGVGALVSLTYRAAVDDPGRFAKSKSVGAFFGLTPKRYQSGETDVTGGITRVGDASVRTALHDAANALLTRAHRFSTLKRWAVDVAKRRGMRRAKVALARKLATVLHRMWADGTEFVWGKDPAAVAAA

SEQ ID NO: 474497 - protein, 340 aa, unidentified
MSKKEEGVYDHYIAVDWSIQNMAIARMTPKSNKITVTDVDSDVAELIVYLKSLQGTKILTFEETTVSQWLYTELKDYVTRILVCDPLRNRLLSEGPKTDKIDASKLVQLLKANLLKEVFHSSDRFLNLRRLMSGYDDLVKAGVRWKNQRYSLLRACGFRGDEKRDIPFKTMEEQHVWGCLERQIENYEREKQGYENRFLELAKKYPEVRHQMGIPGIGLIGAVKVVAQVVSPHRFADAGHFLSYAGLVKLEKRSGMISYGRKKSRHCPELKNVYKTGSVTALKGNNPIDDCYRYLIQEKGYPDYQARHKVARRLAILSWGVLKSGKKYQRRHHVKVAQDV

SEQ ID NO: 474498 - protein, 349 aa, unidentified
MTVYVAVDFHAREQTVSYCNLADGEIHRRKLRHQHDDVRAFYQQFTGEVIVAFEASGYSAWFEQMLAELGHTVWLGNPAEIRRKAPRRQKNDRRDADLMLDLLLKGDFPKVHGFSEESRTVLRQLRYRHKLVKVRTIAKNSLHAIGINAGLPLKRRLLTEPGIAQLQALSLSPVLTQQRDEWLQLIALMNQRIAAVEAQLQQRAKDDAGIALLQTHPGIGLLTSLALRYTLLPTSRFSTTRQVTAYVGLDCMEDQSAERRRMRSISKAGSKLLRFLLNEAGHTAARHDPELKKFYRRLLHRRDKPKAKVAVARKLLVRSFIMLRDQIDYAEFVRRGVAARVAREAHSLP

SEQ ID NO: 474499 - protein, 419 aa, unidentified
MSFKILKNNCCGLDVHKTWIYACIGITDSFKRTEYKQARFSSFTKGLQELCLWLAKYNCIDVCMESTGKYWIPVFNVLEKNNIFVTLSHPKYTKPQKGNKTDRKDAKWICDLYMCGMVKPSFIPPADIRQLRDLVRYRFKLTCMITGEKNRAHNCLTVSNLKLDDVFSDIFGKSSRSITEQILQHPGEVFDVAPFVDSRCKTPIEEIQAAVDGAISHEQAVKLRQCLKHIDELEMHKAEIEREIFRLSQKYESVLDLIRTIPGFDKNPLTAIQVLSEIGADMSVFPTAKNLVSWAGCCPRNDQSSRKIKSTRISRAGSYFKPVLVQIANALIKSKKHLEFTNRYKRIKARRGHKKAIIAICRMILTAIWHILSDLKPYTPEGFLESRPVKEEKVLSISQALNLLKQRGYIIKDEPLSVS

SEQ ID NO: 474500 - protein, 410 aa, unidentified
MKMAGIDVHKKVLMVVVVDTSVPEEKPVRRRFVTLPSELQRFRIWLQEQGVEEAVMESTAQYWRSVWLELEPHMSLHLAQAFSNRAPRGRKHDFKDAERLVRRLMADELILSFVPKGEQRIWRSLTRMKLQLTRDRVRLQNQMECLLEEMRIKLSIVVSNLLGASGLRILHALAQGETDPKRLAELGDERLHCTEEQLVDALTGRVQPMHRGMLALQLQRLQLIDQQMAQLNSMIAQAMKSHQDAVIRLAEVPGLGVDSAQQIIAEVGVQASTFSSAAELTAWVGTCPGKEESAEQNHSSRSAKGNKYLRRVLNQAAHAAVAKKGCHFQVVFRRLMPRLGYKSAIWAIAHRLCRVVWKILHEGVRYIEQGRHVGPREKKQRAQMLARALRKLGYEVTITPINELAPKPAI

SEQ ID NO: 474501 - protein, 365 aa, unidentified
MQKAELSCEADSENHLGGSSETMYSIGLDVHKRTISYCVKDAAGRVHMEGKIGSTRRELDSWIKTLPQPRTIAMEATIFTGWIYDHLLPHAEQVKVAHPLMLRAIAAAKRKNDKIDASKIADCLRCDFLPECYMTSTEIRDRRRTLRYRGLLVKQMVQMKNRISGLLMEKGVTHTKRRLHKVGYFAELMGGNEEIDQSIRPLLKLSREHIVRAQKLDYALVSSLERDPLLVERLKRLRTVPGVGPITALTWALEIGDVARFRSIKQAISYCGLCGAEKSSADKMLRTPISKQRNKHIQHVLVEAAKLAPRQCHELALIYEKEMQRGNRNRATLAVARKIVAYLLAVERREKDFVPTEEFGGTAAA

SEQ ID NO: 474502 - protein, 369 aa, unidentified
MSASVIYVGMDVHKDSIAIAIAREGREAAETWKTIPNDGVRLRKALKTVAKHGEALKVCYEAGPTGFGLCRCLRKARIDCIVVAPSLVPSRAGDRVKTDRRDARKLAHFLRSGDLTEVYVPDEAVEAIRDLERARDDAKCAERAARHQLSKFLLRHDRQWQGTTWTLKHRDWIRTQEFAYPAQQRVLEDYLKTVEDLAERVQRLTGNLEELVQETALAPLVKALQAFRGVSVVSAVTIAAETGDLRRFATASQFMSYVGLVPSEDSTGKRRRQGAITRCGNSHLRRILVEAAWHYRHSPLMSKELRRRNQGVAKRVRRIAWETQKRLNKRLYHLLHAGKSIQKAITALARELAGFVWAVGQEESLLEAA

SEQ ID NO: 474503 - protein, 370 aa, unidentified
MQTNTRSQTLFVGVDVHKDTHTAVALSPFGEKVFEMVIGNEAEDFISLVEKTKVEAEKSGLVPSFGLEDVHSWGERLSSFLAEEGLPVRAVAPILVDHRRQKTTHPEKNDSLDAAGVAEVMIQKIDSLPVYTLSEEAQKAKQIRELSLEREWLVKERARLKNQLHILLHRIHNTGYRTKFKDPFSKKALRYWMRSILKGTDAILEQRMKRAVRRLLDLREEIQEIEDELGATMKDSGQTLSTASGCGTVIAAEIVGEIGDINRFHSPGALAKYAGCAPREHSSGKTIRWRKTRSGNRRLNRSFHRMALSQISRSGNDAARTYFKRKISEGKTKAQALVCLRRQLVNVVWMMLKHRTKYRYPQEKVVDFFS

SEQ ID NO: 474504 - protein, 409 aa, unidentified
MNASTPIPPRRPTAGIDWASDDHAVAVVDPAGVAVKRSTFEHTGAGLRALVKTLQFADVDAVGIERPDRPVVDALLAAGFTVFVIAPNQLKNLRSRCGSAGNKDDRFDAYVLADTVRTDRQRLTALTQDSPQTITLRMTVRARKDLIAARVAMANQLRAHLQSTLPGAIGLFRDIDSPITLAFLTRFPSQTKADWLSPARLQNWLRSARYNNPTNAAALYAHLTAAPRGTTGPEATARAAVTLALVAALSAIRAQIKALEDQITTQLAGHPDGHIFTSLPRAGTVRAARLLAEIGDARGRYPTPESLVCLAGAAPSTRQSGKTKVVSFRWAVDKQLRGAVTDFAGDSHAANAWAADLYRRARDRGHDHPHAVRILARAWLHVIWRCWQDRVPYNPANHRAPQRILAAAA

SEQ ID NO: 474505 - protein, 360 aa, unidentified
MRIIGCDLHARQQSVAMLDTATGEVVNRTLMHEGKEVREFYSQLPRPVLVGIEAIGPMQWFLQLLDELGIECRVGDATKIRAAEPRKQKHDRRDAELILKLLLENRFPAIWRPSQELLDLRALLLHRHQWVRLRTQIQNGLQAIALANGLRRGPGLWSYDGQAKIAFLPLPPHASYRRSMLQALYRQMEEEVEQLTAQVAEQAEQRSGARLLMTHPGVGPVTALATEVFLGDPQRFADGKALASYVGLIPREYSSGAHQRLGALTKQGSPFLRFLWNEAAAHAVRRDPDLQRFYRRKLVQKGLGKSRVAAARKLGIRLWIMLRDQIDYEEFCRRGQKHSSAACAGMPEVAFGANRHRPVG

SEQ ID NO: 474506 - protein, 377 aa, unidentified
MSSITLYVGLDVHKDSLTIAIAQPGPKGEIRLFGTITNDVDRLEKALRRIRKAHPGAHLEVAYEAGPCGFVIARRLKQLKVPCLVAAPSLIPKLPGSPFKTDKRDACAIARLLRAGELTAVYVPEATDEAIRDLCRARTDAVDDHRRCRHRLKAFLLRHGYRYQGKANWSQPHMRYLRELVLPHPAMKAILEEYLQGIDAAHQRVQRIEASMLNLLQTWRLKPAVEALMAFRGFQLVAAMITVSELGDIHRFKHPRQLMTYLGLVPTESSSGPRQRQGTISRCGNGHQRWLLTECAEHYASPPKVSKELSRRQQAQPDSVRALSWKAQNRLHLRFMKLLGRRLQRNKAKVAIARELCGFIWALLRAQDCYKQPLGAS

SEQ ID NO: 474507 - protein, 332 aa, unidentified
MRHHDHPAPAAWVGIDISKDTLDACLLPEHGRPRCRRFSNEDAGHAALLAWADAHAPGAGFCLESTGAYGAALATTLAEAGRHVSVVNPARIKYAGLARGRGNKTDKADARLIAEYAARERPAAWRPAPAETRELQALVRRRDDLRQLAAREKGRLAVPGLSDAARESVSRTVAFLEAEGDRLGGLADDLIAGSAQLREDRALLESIPGVGAATAQAILAELPAVGQVPSAEAAAAYAGLAPRQYQSGTTVRKRTRLSKAGSARLRKALYLPALTAIQFNPLLKALYERLTAAGKAKMAAVGACMRKLLMIAYGVLKNRAPFDPSWASKRTP

SEQ ID NO: 474508 - protein, 362 aa, unidentified
MSRDIKYIGMDVHQEAIVIAVLNGSGKLVMETILETKASSILQFIHGLRGELHVTWEEGTWAAWLYDLLQPQVQEVLVCNPRRNALLKEGSKSDKVDARKLAELLRTGMLRPVYHGENGLRTLRELARSYQTISKDLTRVMNRLKALYRGWGIPCAGTQVYAPRYREEWLSKITQAGVRRRAELLYQQLDGLQALRRNLRPEFLAESRKHKAAKLLRQIPCIGPIRAARLIALMQTPHRFRSKRQLWTYSGLGIETRDSAQYRYVAGQLQRSKKPQQLRGLNQNHNHEMKEIFKSTATRASCGTGPFHDFYAVLLAKGMKPEMARLTLARKIAAITLTLWKRGERFDAEPSAITQNRPMSIT

SEQ ID NO: 474509 - protein, 336 aa, unidentified
MRELTTIGIDLAKNVFAVHAVDRDGRVVLRRLVGRGKLAELIAQLPPSLIGMESCTGAHEWARRFQALGHSVRLMAPMFVAPYRKSGKNDGNDAEAICEAVSRPNMRFVPIKTLDQQALLTLHRVRQGFVVERTAVVNRIRGLLAEFGVVIPQRVESLRRELPAHCETLPGLAARAIRDLQQHLRVLDIRIGEYDLELKRLASANEDARRLQTIPGIGPISASAIVATVGSAAEFRNGRQFAAWLGLTPRQSSSGGKNRLGHISKRGDAYLRMLLVLGARSVLQTARRHTDRLSRWVQSIHARCGYHKAIVAVAAKNARILWAVMAKKERFTPQPA

SEQ ID NO: 474510 - protein, 344 aa, unidentified
MSEYAGQQFVGIDLHRRRSVIVRTTGSGEVLESVRILNDVESLDRVIERAGEDPEVVLEATYGWYWAVDALQEAGARVHLAHPLGVKAFEYRRVKNDFRDAADLADLLRMGRLPEAWIAPPATRELRELVRHRATLVALRSHCKAEIHAVLAKCGIQVSMSDLFGVAGTALLDRLQLAAPYAARIASLRRLMDDLDFEIEVFTNAAQGRLDADPGYLAVQQIPGIGAILGAVFVAEVGDVTRFDHAPQLACWAGLTPKHHESDTHVRRGRITKQGSRLVRWAAVESVKRVGPHTRIGALRDRVAERRGGNIGAVAAARQQIEYVFYALRDGHVRALQHPARDSA

SEQ ID NO: 474511 - protein, 476 aa, unidentified
MQRYKEKTIKNSTPENSKKSVGKDEMMIINPNAAGIDIGSRFHVVAVPSSSSDQPIREFSSTTTSVLEMAKWLKSCRVTTIAMESTGSYWIPVYEILEEKGFEVYLVNAQFVKNVPGRKSDYRDADWIQRLHTFGLLSKSFRPQDHCLKLRSLTRQHSKLISHRSPHILHMQKALQEMNIQLHTHIRDITGVTGMNIITAILNGERDINKFAQLVHPKCKNSAEKIAESLLGNYRGEHLFILGQAKDLYFYYSEKIEECEREIQKALDELAVQTKNEVSPIATGKLSSASEEIAQPLKGSSKKTKKKKGISFDAAPKLSAIVGVDLTCIPGIDQATALKIVAELGGCVDAWSSAKRFASWMGLCPGNKISGGKVLSSKTKTCPNRLAQLLRMAANGLWNSKSYLGAFLRRMRGRLGGMKAITCGAHKLARIVYVMIKEGINYEDLGEEFYEKRYQERRLKNIERQAKEYGMKLIPV

SEQ ID NO: 474512 - protein, 402 aa, unidentified
MRRCIGLDVHREFAQVAIWEDGVIWQAGRIQTTPEALRAFADSLCATDEVALEATGNTYAIARLLERHVGRVVVSNPQKTRAIAEAKVKTDKVDAAVLAGLLAADYLPTVWLPDDQTHALRRQVARRAHIVRQRTRLKNQVQSILHRNLIGRCPAADLFGTKGRAWLATQDLPPDEHQAVQALLRQLDFHGQELRIVDAELGRVALERAEVRRLLTIPGVDATVALAIVAAVGDFGRFSSPQRLVSYLGLNPRVRQSGGQPAQHGRITKQGRAHARGMLVEAAWAAAKTPGPLRAFYERVRARRGMQVAVVATARKLATLCWHLVVGEQDYAFARPSLTDKKLRALELRAGLPPRRGRKGTAAAYSLKEVRRRERALTEQAEVAYRQLVAGWQPKRPASKPR

SEQ ID NO: 474513 - protein, 344 aa, unidentified
MVTTIGIDPHKATHTAVAIDDDETVLAEITIRADKDQATKLIDWAQSVNGDGRVWAVEAATGLGHLLSQQLVSRGEPVVDVPPVLASRIRVLSSGKSNKNDENDARSVAIAALRRGGLAEVRREDEAAILRMLAKRHRELTALRTQAVCRLHAMLAVLRPGGMGHRLSAKQASRMLGGIRGLDAVGEQRRLMAKTHIVDIRRLDRDLEANKTQIRRAVAAADTTVTDIYGVGPVVAAFLVGYTPPIDRFESADRYAAYNGTAPIEVSSGGKVRHRLSRRGNRTLNHAIHTAAVTQISHHTEGRVYYDKKLDEGKTNKEALRALKRRISNTVYRQLRADARRHSV

SEQ ID NO: 474514 - protein, 361 aa, unidentified
MSESMALVGLDVHQAQTVAAVLDRVTGELDVKRLRGAPGDVVPVFLEQLGRPVRAVYEAGPTGFTLARAATARGLDLRVIAPGSIPRAPGDRVKTDRRDARRLVRLFAAGELSFAWVPSEADERFRDLVRCIDDARKDLMRARHRLSKFLLRCGLRFGARQWTQPHQRWLGSLTFDDALSRTVFIDYCCAVDAVAHRRRTLIAVLEDAVAASSHAETVARLRCFRGINTLTAAGLCAEVGSFERFAKPALLSGFLGIVPCEYTSDQKRVQGQITKAGPTHARRLLVEAAHHYRRRPRVSAELCARHNGQDPRVVGIAWRAQRRLHQRWAHLGQARGKPTGTVAIACARELAAFCWEAATLD

SEQ ID NO: 474515 - protein, 360 aa, unidentified
MTKQVMAGIDLHSNNLMIGIVDQTGKRLKHEKVGCELKQVTAVLEPYKGRLKSVAVESTYNWYWLVDGLRALSYPVVLANPAGIEQYSGIKCADDKNDAYFLAELQRLDILPTGYIYDPKLRPVRDLLRRRLSLVHQRSALLVSFKSLYTRTTGAAMNLGKLKSMEPGQAAALYEHPANQLIAKIQKEHIEGLDKSLARIEKAVLQSARELPYYEKLNTLPGVGKILGMTITMEVGEIARFKTPGDFASYCRAVDSKRTSNAKTKGRNNRKCGNKYLAWAFVEAANFAKRYDESCRRWFDRKAARTNTVIATKALACKLAKVAWYVMTENQDYERGRMLPQECGRAAVSQRKGLAKSPED

SEQ ID NO: 474516 - protein, 421 aa, unidentified
MDVEFAFYVGVDWATQIHRVCVMDAQGKILLEQALKHSGDAIRNFLQALELMTRGEVQRVAVGIEVPRGPLVEVFLERNYAVFSINPKQLDRFRDRHSVAGAKDDRRDAFVAADSLRTDRPCFRRLALDPPAIIRLRELSRTEEDLTGDLRRTVNQLYQLLLRYYPQLLQLASVPDEPWLWALLELAPTPQRGAKLTMARLKQLLAKHRIRRWSAEQVREILVSSPLPLAPGSEHAVSEHALLLLPQLRLLYNQCKQVVDRVQQLLDQMTASESDHPDRHTHRDVSLLLSIPGVGRMITATMMAEGSDLLAQRDYHALRAYAGIAPVTRQSGKSKQVIMRHSCNPRLRNAFYHWARTSVQNDEWSKQHYARLRRAGHGHARALRGVADRLLAVLIAMLKSGKCYDPNRRSATSTATPAAQS

SEQ ID NO: 474517 - protein, 440 aa, unidentified
MSKLIQFEQIHAHGAGIDVGAKEIFVSIDGEQVVSFKTFTEDYHCCCHYLKENGITKVAMESTGVYWMSLYSILEDSGIKVCLVHPRETQQVKGRKSDVKDSQWIQKLFSAGLLRESIVAEGALKELRMLVRERLDLIEMGSTYINKMQKYLELMNIKLKNVISQIHGVSGLKVIRAIIDGERDEEKLLVLCDIRIRRQKAEEVKKSLRGNYTPQYLMLLGENLHLWEVHECSIAKIEKEIEKLLDRMCVDKPDIPVNTPAKPSRHHNPNIKDLHGKMVRLYGGVDLTTIAGINDVTMLRLLGETGSDLSRFPTVKHFVSWLGLSAKNKQSGKMKKRVQSKSNKAGEIFRQSAQSLSISKHNAIGAFIRRLKGRKGAPIAIKAGARKIAQAYYNAITKGMDYVEHGVNKYMEQLKMRELYALTKIAKKYNYIITQNQTIT

SEQ ID NO: 474518 - protein, 323 aa, unidentified
MTVYLGIDIASKKFDVAELRDGNYRCKAFENTSAGFLALYKWLGQSTMPDIHACLEATGDYGTSLATFLYENKIKVSVVNPARIKGFGASELSRTKTDKADSKLIARFCKAAVPDGWKPTPAPVRKLQALVRRISALNGMLRMECNRRENADANIQASLDRIISLLKTEIEVVRQEIKDHVRSDDELKKQDALIQSVPGIGEVSSNLILSFMSGKGFRKAKEVTAYLGLNPRHHQSGSSVRGKTRMSKMGDTRLRSALYMPALAALRYNPDIKAFGQRLLLAGKPRMLVVGAVMRKLIHIVFGVLKSGTAFSSRIAVHSVVTS

SEQ ID NO: 474519 - protein, 384 aa, unidentified
MSRVVIGVDPHKASNTVVVIDAQERVLGQQRFSNDRAGYRSMKTFACVHRDRVWAVEGARGVGAGLAQRLVAEGEPVLDVPARLSARVRALGGGSGRKTDDADAFAVAVAGLRARDLQVVHQDDGVEILRLLSTRRQELVAQRIATVNRLHDVLCQLIPGGAKRHLGATRARQLLWAVRPRDAVGKARKQLALDYLGELERLDSRLKELKKGLAEVLAEHPTSLLEINGVGPINAAKILAEVGDVRRFPSRHHFASYTGTAPVDVSSGDNNRHRLNRGGNRRLNHALHIAAVVQYRMPGEAQDYYRRKRDQGKTHLEALRCLKRRLSDVIYRHLVDDLTAGSPGGQVGASLQSSAADLIPMASTSEQSLPGLENDLTPVSAVVS

SEQ ID NO: 474520 - protein, 331 aa, unidentified
MNTLMMPAAAARFNHVIAFDVAKATLSLHILPSGETLCLQNDGAAVRRLLKREQKRNRKHGLGSMLVICEATGGYEHAVLKAASELGLDCHLAHGSSVRAYAKFRGRHAKSDPIDAVLIAEYGRDKPDLKLYQPPRPEEAALRALMGRRAELKDMIQAETSRLEHAFLKAVRLSLESHLAALKGQLALVEKEIRALTRRDEAFNHKSRLMQTLAGTGAVASQTILALFPEIGHIPSPAAVALAGLAPYDRDSGKERGKRRIFAGRSQIRTCLYMAALAAIRSHPVFRDFAERLTRRGKPFKVAITAVMRKLVVILSAMLRNNQPWKHADAA

SEQ ID NO: 474521 - protein, 287 aa, unidentified
MSDVHILAIDLAKRSFQVCGTDRGGAILFNRTLSRAKLMQLLAVQQPCIVAMEACATSHYRGRVAQQSGHDVRLVPPIYVKPFVKRQKNDAADATAIAEAVLRPNMHCVAVKSAENQARAVTFRTHQCFVRQRTQLINALRGHLAEFGLVFPQGPAHLKQAAVLLQDETTEVPDTVREIAQLYLDQIDLLTVKIDDLTVRLRDATQENVEMRRLCTVPGVGPVTAGAVMAFAPDLRTFSSGRNFAAWLGLVPRQRSTGGKTRLGGVSKMGQTDIRKLLIVGAMSRIR

SEQ ID NO: 474522 - protein, 347 aa, unidentified
MDQYVGLDVSQDETHVCVVDRDGNKLWEGSCASTPEGIGETVKKYAPEAVKIGLESGHLSTWHWHGLNDMGLPAICIDAYHAHGVLRLQMNKTDKNDAHGIAQIMRCNWYKEVTIKSFENHESRALFRTRSNLVSMRTDVVNQIRGMLKTFGILIKGIAGVRFEERVQKIIDEGTAIAPPLQIQLEMLRMIKQKIDELDELVLDHAYACQKCRILMSIPGVGPMTAANFVLAVYDADRFEKSKSVGAYFGLTPRRRQSGEMDYNGRISKRGDRVIRHQLYEAANSILTRVKQPSSLQAWGLRIAKRSGMKKARIAVARKLAVIMHQMLQTGELFCFNPATGERAVYA

SEQ ID NO: 474523 - protein, 337 aa, unidentified
MQVAVLGIDLGKNSCSIVGLNGTGEVVLRRRMRRDTLVNLASSLPPCMIAMEACCGAHHLGRLLASQGHSIRLMSPEYVRPYVKAQKNDDRDAEAIAEAATRPTMRFVELKSEEQLDLQTLHRVRSRLVRARTTLINQLRAILLERGHVIPKGPRALEQALAEISVSGRVLRLVEEMREEWAALNQRIAGLNREFVERARADEAARRLVSIPGIGVLNATALVAAVGDAAVFRRGRDLAAWLGLVPRQHTTGGKPKLLGITKRGNTYLRVMFIHGARAALPWLAQAQTPLGAWLRGLLARAHRNVAVVALANKLARIAWATLRHGSRFEPGRLASAM

SEQ ID NO: 474524 - protein, 349 aa, unidentified
MSTKFNSEIAVIGIDIGKNSFHIVGQDRRGAIVLRQKWSRGQVETRLANLPPCLIGMEACVGAHHLSRKLTSLGHDARLMPAKYVRPYSRGQKNDFRDAEAIAEAVQRPTMKFVATKSAEQLDLQALHRVRERLVSQRTGIINQIRAFLLERGIAVRQGLRFLRAELPRILATRCDALSQRMVRMLEDLAGDWRRLDERIEGLSSEIEILARRDVGCERLMSVPGIGPIISSAMVAAIGSGDAFTKGRDFAAWLGLVPKQISTGDRTILGKISKRGNRYLRVLFVQAAWVVLIKPKSWDRHGLKPWLEAAKKRLHHNVLAIALANKLARIAWSVLAHGRAFEATKIQAA

SEQ ID NO: 474525 - protein, 316 aa, unidentified
MDGDKVFIGVDISKDSLDVVAYPTGQIWQYKNSKGGITKAIAKLRALELKLIVMEATGGLEKPLCEALFQAGLPAAIVNPRRIRDFGRSMGILAKTDKLDAKVMAYFAAKIEPAPRPVQDEASQKLENLLTRRSQISDMIVAEKHRLKQGTDRILQKHIQGHVKWLESELKDLEKELKDSIQQNPKFAEKVKLYKSMPGVGDNLSYNLVANLGELGYLNQREIAALVGVAPLNRDSGKQRGRRMIWGGRATVRKALYMPALSAIRCNPVIRDLYQRLIAKGKLKKVALVACMHKMLTILNSMVKNNTPWNYAEVRN

SEQ ID NO: 474526 - protein, 385 aa, unidentified
MDQSNILYVGLDVHKDSIDIATADPGRDGEVRHLGSIGGDLAALDKALRKLISKGRPLQVVYEAGPCGFVIWRHLSVQGIECEVVAPSSIPKRSGDRVKTDRRDAMMLARLSRSGDLTAVRVPGAGDEAVRDLVRAREDAVRECRNGRHRLKALLLRNGITYAGKTAWTAAHLRWLATLKLEHPAQQIGFQEYLHSVTEATARIARLEQALRDVLSEWGLKPLVQALQALRGVQLIAAMTLVAELQDFLRFDNPRQLMGYVGLVPSEHSSGPKRRQGSITKAGNSAARRMLVEIAWHYQHSPRVSPIIATRQDQVPKEVTDIAWKAQLRLHAKFKRLVARRVLKNKAVVAVARELVGFVWAIGREVQTSGWQGIKPEPAGSSSAG

SEQ ID NO: 474527 - protein, 398 aa, unidentified
MILVGVDVASEKHDVSIVRDTGEVIRDNFTVPNKESGYKKLLDEIEKAEKLYPSDKVRIGLESTGVYSMSLTEFLATHYEDSVILINPILTSMFELSCHVHYAKTDKTDARGICRFLSKNEDIRPYAIVSYHTRQLRALYRERTRLNKRLNQDINRLKGQLHIAFPELLDKKHATIGLFELEFLSKYPTADSIRNMKPEKLVSAFSKVKYMRIDIARAGRLIEAAKTSIGCSALAEGFVIKETVERIKLYRKQINELSEAMVPLVKENHGNLLTIPGLGAVTVAGIVGEIGDVSNYHGSDCLVAMAGLNPKVYESGNYAASHTRISKRGSSYLRNALYMAAQSMYMHGAEPIYSFVNKKRKEGKRKVCALDHAARKLCNIIFSMMKTGSEFIPSSANS

SEQ ID NO: 474528 - protein, 346 aa, unidentified
MEYVALDVHKNYTWARVENSQGARLYESRLAHGHGTIKNFVNRWSGGSPVAVETVGNWYWVVDEIEAGGGTPQLVNARLAKLMMGNVNKSDKLDCQGMNRLQRTGTLPTVWIASSSVRDGRERARTRMVLSRLRTQLKNRIHATLGKYGYTVKGASDAFGKKGREIIEELLLKLPPHTQQALRLILDELDHVTDNLKVIEGHMIEIFSPCPQTQWLKSLPGVADILAVVIWTEIGTIERFNRAEQLASYCGLVSRESSSGGKIRLGPVRRDVNVYLKWAFVEAANSALLNAGRCGYGHISRLYERIKPRRGHGKAKVAVARHLAEANFWMLKKGEPYREPMPSTQR

SEQ ID NO: 474529 - protein, 407 aa, unidentified
MPLFVGIDVSSKNLDACLMDGMGETLATQTVTNNLPGASELRDAILQHAEADDTIQIAMEATSVYSWHPAMFFHEDPELKQRRTKVFTLNPKLVRNFKKAYAEMDKTDPKDAWVIADRLRFGRLPKSVIQSEQYLALQRLTRMRYHLIQSLTREQQVFLNHLFFKFSAFNLEVDTPVFGHAITEFLLEAYSLDEIAQMPLEDLAMYLQTKGHGRFSDPEDLAASIQKAARSSYRLSKCVEDSIDLVLGSSIEIIRHLKRQIKDLDKAIARVLDGIPNTLQTIPEIGPVSCAGILAEIGDIERFDDQAAIAKFAGLFWPRHQSGDFEADDKMLARTGNRYLRYYLVEAANLVRRHEPEYRAFYQKKYREVHKHSHKRALVLTARKLVRLIDALLRNDQIYAPKKKVTR

SEQ ID NO: 474530 - protein, 352 aa, unidentified
MNSPFTIGIDLAKEVFAICVLDERGAVLERRVLRRAAFERWAVQAPAGTIAMESCSSAHHCGRWFSARGHAVCLIAPEFVTPFRKGGKNDAADAEAIAVAARQPTMRFVTIKTVEQQAILSWHRARQGWGDERTALINRLRGLLAEFGIVLGRSRSTLRTALPRLAEDSRLPVQVQALLLEAREQFTALDVRVARCDAEIAAHLVDNTPAQRLRALLGIGPLTASALVATVSNATSFKNGRQFGAWLGLTPLQHSSGGKSRLGKVTRHGDGYLRGLLVQGARSALQSALRCLPERLSRLGRWIVELFHRKGYHKTLVAIANKHARMLWAMLAHDETYDPLAWQHYRAPAATV

SEQ ID NO: 474531 - protein, 406 aa, unidentified
MLFVGDDWAEDHHDVEVQDETGRRLAKARLPEGISGIARLHGLVGRFLPEDSDPAEVKIGIETDRGPWVAALVASGYQVYAINPLQSARARQGGGVSGAKSDAGDAHVLADLVRTGSHQLRTVAGDSKQAGAVKVLTRMHQTLIWDRTRQVLRLRSSLREFFPAALQAYEDLDSPDVLELLTKAPEPASAARLTRAQISAVLKRARRRDRDTKTTAIMAALRTEHLTQPPVIAAAYGATVRALAALITTCNEQITALEGPVEACFGLHPDAEIYLSQPGLGPILGARVLAEFGDDPTRYEGARARKNYAGTSPITRASGKKKVVLARYVRNKRLADALHQQAFCALSGSPGARAYYDSLRDRDIGYNAALRQLGNRLVGILHGCLKTHTSYDEAVAWNQHTQPVAA

SEQ ID NO: 474532 - protein, 320 aa, unidentified
MDEEGELVLERKVASDPAAIAGLLFELPERPSCVGLEAGPLSEWLARGLAQAGLDAVLMETRHVRAALSAMVAKTNRNDARGMAQLLRMGWFRPVHRKTMNAREQRALLAARSTLGRRLRDVENSVRGILRGFGIRVPRLPRGRWSDGVRGALQGNTVLRGVVEPLLAATQALRDQLAVVDKRARDAARQDAVCRRLMTMPGVGAIVALTYRAGVDQPERFKSSRQLGPCFGLTPRRYQSGETDRSGAISRAGDASVRVALFEAAHVMLTRSTHWSKLKAWAVAVAKRRGAKRAKVALARKIAVILHRMWIDGTEFRFVA

SEQ ID NO: 474533 - protein, 360 aa, unidentified
MRTEITKDSFRGQLFYVGIDTHKKNWNVTIMGEQYEHKTMSQNPNPELLAVYLKRNFPGANYHAVYEAGFSGFSVCRKLNQLGVKCMVIHPADVPTSQKEKLQKTDKADSRKLARSLRSNELEAIHVPDPELEADRALVRQRFRLVKDVSRTKNRVKSLLFQFGISIPDRFTSAQTRHWSKVYTDWLKKLSMDHQVLRQVLDNYISIAESQRRELLLLNKQIKVLSITQKYKHNYSLLLSVPGIGLMTAMTFLVQIGDVRRFETIDDLCNYIGLVPRMYGSGDKMQVGKLIHRGRKELKIMLIEAAWEAIRIDPALMLKFNELSKKMHKNKAIIRIAKKLLSRIRFVLQSQQPYELSIVK

SEQ ID NO: 474534 - protein, 417 aa, unidentified
MTPSALQETSGTDSQVRFYVGVDTHTDTHTIAVLDATGRTVETSTHAATPAGYRGVVNALNGFAGPSQVSVGVEGTNSYGAGLTRALQAGGFTVFEVLRPTRQVRRMDGKSDPIDAVEAARSLMSGRGISVPKTSTGPAQRLRYLNAARDKYVSIMTALSCSILSLLVTAPEAIREKFSQDTTAKTLMLLAGCRPGKLDPTGTDFYVLTALKSMARTHQDIKKTAKVLEQQMKAIIEEHYPALSKVHGVGTITATSLAVTAGDNPQRIRSEAAFAKLCGACPIPASSGKTNRHRLNRGGDRRANKALHRIALVRMGTHQPTKDYVERQTKRGKTKKEILRQLKRALCREIYRALTRPVATKPTSGADLRAWRTTKGISQTQAAQALQTWPARISDIETDRRPLLTLRTQYQNWLQAA

SEQ ID NO: 474535 - protein, 315 aa, unidentified
MADTIARTLGIDISKDRLDVHLLPDGIDKQFLNDAKGLRALIRWLSPYAPTRIVFEATGAYHRRLERMLATANLPGVKVNPQRLRAFAKACGRLAKTDRIDAGVMARFGAVMAPDIRPIRSQALDLLAELLTARRALVKDRSALLHRQKNVTIPLLQRQAEQRLRQVEAQIEAVDAESRRLIAAEPQLQRRFDILSSIPGIGATCAMALIADMPELGTLANKQAASLAGLAPIVRQSGQWKGKSFIQGGRTQLRRALYMPALVAIRFNPPLKSKYQLLTATGKAAKAAITAIMRKLIVLANALIREDRFWTPQQA

SEQ ID NO: 474536 - protein, 347 aa, unidentified
MKQFEGQNIYIGVDTHKTSWTVSIIGEYNEFKKFTQPPSSSILRNYLFKTFPGANYFAAYEAGFCGFGIYNELNSFGITTIIVNAADVPTTDKDKKQKDDPRDSRKLALSLRAQQLIGIYVPKTETLEDRSVLRYRNKLVGDQTRCKNRIKSFLYFHNIKVPLEFDNANWSNSFIFWLEDIAKQYWALNLHIDQLKHIKQAIRKANRKLNEISKKEIYSKRVKLLKSIPGIGNLSAIHILLEIEDIKRFKANDQLASFVGLTPIRHNSGDKERVGAITPRGNKLIKKYLIEASWVAVRKDPELMAAYGRLCSRMLKTKAIIRISRKLLNRIKAVLETEQPYQINYNL

SEQ ID NO: 474537 - protein, 346 aa, unidentified
MEHYAGIDVSLELSSVCVVDAQGKIVKEAKVASDPEGLIAFFASLGFAVKRIGLEAGPLSQWLQSGLKCAGLEVVLLETRHVKAALSAMTVKTDRKDARGLAQLIRMGWFRPVHAKSVGSQEVRALLVARKQLLGRLIDVELSIRGILRGFGLKIGLVTRKGFEARVRELVTGQATLEHITRAMLSARAVLRVEYEKLHKSVLAMVREDAVCRRLMTVPGVGPLVAMTYKSAIDDPSRITKSKAAGALFGLTPKKYQSGEKDITGGITRTGDEMVRTALYEAANVLLGRITRFSKLKRWGLDVAKRRGSKRAKVALARKIAVILHRMWIDGTTYRWSEAQMMATQA

SEQ ID NO: 474538 - protein, 377 aa, unidentified
MRNVRFIGLDVHAETIAVAAAEPGGDVRSLGVIPNRIESIRKLVKKLGPVQQLRVCYEAGPTGYVVYWQLTALGVKCDVVAPTLVPVKAGDRVKTDRRDALKLARSYRAGDLTPVWVPDAAHEALRDLVRAREAAKKDQLRARHRLGKFLLRQGRRPPTAMKAWTQAHLTWVKCSVHFDHAAHEATLLDYVHEVDHVAARIARLESAIDAAVQTAPARLRAVIEALQALRGIASVTAVTIAVEVGALSRFAKPRQLMGYSGAVASEDSSGQRTRRGGITKAGNAHLRRVIVEAAWAYRYRPAVGPALRKRQATVSAEVKEIAWKAQHRLHARYRALTARGKCKQQVVTAVGRELLGFIWAIGVHVESHTTDRHPIAA

SEQ ID NO: 474539 - protein, 404 aa, unidentified
MPTHYVGIDVSKFKHTCCIINENGEVIKKSFDFSNSKEGFDSLIEIFKSIDQSSSLFQIVMEATGHYHECLFRYLVANNYLAQIKNPVVIARFKQSEYLDKAKTDNLDALLIAQYASKHPFSPSMLKSYNIERIRRISRAKYFLYQDKERTINHLHRYLDESFPELIPFLRKRGDIKRYQGRSFFDSKTTLWFLENFPSAKKFSNARSETAEKLRRMSKGAFSLIKFNELRNIAKNSIGVSFQETEEIIIQLVQELRNIQERNDKLDELLIPLIDETAPNLLTVPGIGYRLAGLLISEIGDASQFPSADKIIKFSGLDVRVYQSGTIEKHGAIRKRGSPLLRYALFQAAEKARIHCPEIAEFYSKKKSEGKHPICALTHTARKILRIVWALLKTGQNYSQFISD

SEQ ID NO: 474540 - protein, 361 aa, unidentified
MRYVGIDYHKHYSVLCATDERGQELKQRRIKGNTAAGFAQFFSELGEQNKVVMEACWNWGWLYDLLGQIDQVGEVVLAHPYKTRLIAEAQIKTDRIDAQTLAKLLRGDLIAQSHAPSAATRARKHLLRQRLFWVRLRTMLRNRMHAILDRQHGLERPQLKNFFSRRGQTWLEGVELPCAEDQPLLKQDLEVAALLDQKIKELDRAIGQSQSVAEKLLESIPGIGPLFSSVIATEIDGIERFHSAAKLAAYAGVVPTTHASGGRVFHGRLLWQCNKWLRWALIEASWTAIQFSGYFGAIYRNARARGKNKHVAITMVAHRMAKIIWLLLKEKRPYTETLPDRSEDQVTVAPRRKALSLASSC

SEQ ID NO: 474541 - protein, 343 aa, unidentified
MKLFVGLDVSLEMTAICVISEHGKILKEAQVASEPESLLRWINDQDGAIAAVGLEAGPLSQWLHRGLSEAGQPVVLMETRQVKGALKAMPIKTDRRDAEGIARLLHLGWFRPVHCKSVSAQEVRAVLSARKAVQQGFITLEMSLRGLLRNFGLKVGTISRGRFEQRIRELAAGNPMLEAATEPMLSARSALRRELAGLERRVRQLAQEDPVCRRLMSMPGIGAVVALTYRSAVDDPARFTSSKKVGPWVGLTPSRNQSGERDISGGITKAGDVNLRRALCQAATVMMHRGRATWLRTWAAKIARRRGAKRAMVALARRIAVILHRMWKDDTEFRFDIPVLHAG

SEQ ID NO: 474542 - protein, 384 aa, unidentified
MKGARWHPACYKESCGKNPDWLISSLFSLSFMSVIPSSTAPLKYVVGIDIAKDTFVACFGRIDVQQQLRFGKEATFDNTLAGFTDLLAWTSKQQTTTTPLWFVVEATGVYYEALAYFLADNQQALSVLLPNKVKHFAQSTEQKSKTDQLDARLLCRMGLERALPAWQPPTPALRQLRALARERQSLKRQGARLKTQRHAYTHSYQPDERTLERLAARQQLLKQQVKAVDQNLAALLEAEPELARKLAHLTSVPGIGLTTAIVVVAETNGFVLIENERQLASYAGLDVVQRQSGLSAQATRISRRGNVHLRQALYLPAVSSLRYNPQQMAFYARLRARQPSGKPGVIAVMRKLLLLCFSLWKNDRPYDPHYHPAHMAEKEVAPTT

SEQ ID NO: 474543 - protein, 346 aa, unidentified
MEHYVGLDVSLKLTAICIVDRTGKIQREGVVHSDPEAIAAFIKSNAPHVARIGLETGATSTWLWTELNKMGLPVICIDARHAKAVLKMQINKSDRNDAVGIARIMQCGWYKEVRVKDLDSHAVKALLVSRALLVKIKRDLENQVRGLLKNLGLVIGPAKMNAFALRAAELTEDRPELAAAVAPLLNARAAIELQIADLDRKVMKLARSNAQVRQFMTAPGIGPVTALCFLATIDDPGRFKRSRSVGAYVGLTTRRYASGEIDWTGRISKCGGKMLRSYLYEAANVLLTRVAKWSALKAWGIRLAKRSGLRKAKVAVARKLAVILHRMWTDGTEFKWSSKEAAQQPA

SEQ ID NO: 474544 - protein, 403 aa, unidentified
MNSVGIDISKGRSTVAVMRPFGEVVISPFEVHHTDSELSALARRLKSLNGETRVVMEATGNYHAPVAKLLHDAGLYVSVVNAKLVHGYGNNELRRVKTDKKDAVKLANYGLDRWLTLPRYVPEEGARLLLKNCYRQYRQYSKVQTVLKNNLISLLDTVFPNANRLFSSPIRGDGSEKWVDFVAEFWHCRCVSEKSEKAFANKYQRWCKKHGYNFSVAKAHTIHAEASGHIGVMPKSETTKLLVEQAVAQLRATSVALTALKREMLTLAAQLPEYPVVMGMFGVGPTLGPQLIAEIGDVRRFYSKKALVAYAGLDAPPNDSGDVTGKHKSMSKIGASSLRRTLFLVMSVYLRSAPLDESVYQFMDRKRAEGKPYHVYMMASANKFLRIYYATVKAYLESLEHTT

SEQ ID NO: 474545 - protein, 460 aa, unidentified
MTIPRDKKKDVPFPTSLPVVRPMVAGLDVGSTQHWVCGPARADGVPNVQVFGTMTAQLNELADWLTKEGVKSIAMESTYVYWIPIYELLESRGIEVVLVNARQFRNVPGRPKTDFKDCQWIQLLHSCGLLRGSFRPGEAIVRLRTLQRQVTNLVAERTRYVQWMQKALDQMNVQVHRAVTDLTGSTGMAIVRAIVAGERDPVLLAAHRDSRCRKSVDAIAQYLTGNWREEHLFNLASALRLFDALGEEIASYEVRLRKELEALHPLDRQQEPVPPHPNSTKEKAIKARGDQQMRTTLWRFAGVDLIRIDGIACGVAQTILTEVGPDISAFPSEDDFVSWLRLCPRTPISGGKPLRKRRNALGANRVAQALRMAATSVQRSKSALGAAFRRIARHKGAAVAVFAIARKLAQLVYRMLRHGQDYVDIGETAYEQRFQERRLASITEAARGLGYTLVPRVATA

SEQ ID NO: 474546 - protein, 360 aa, unidentified
MSKIRFVGLDVHADTIAVAVAEPGGEVRSLGVIPNREESVRRLVRKLGDATQLRACYEAGPTGYVLYWQLTALGVQCDVIAPTLIPVKSGDRVKTDRRDAEKLARCHRAGDLTPVWVPDAAHEALRDLVRTREAAKRDQHRARQRLSKFLLRHGWRRPEHMKTLWSKPHLEWIKMKVHFDLAALEVTVCDYVHEVEHVAGRLERLEKAIGQAARSAPPKMRAVIKALQALRGVAEIGAVTIVAEVGELSRFRSARQLMGYSGLVPSEHSSGSRRVQSTITKTGNAHLRRVMVEAAWAYQFRPWMGGYLLKRQENGDPEVKEIAWKAQHRLHNRYRELLTKGNGVNSRPINTPSAIARVAI

SEQ ID NO: 474547 - protein, 376 aa, unidentified
MNTNTIYVGMDVHKESFSLCCYSIEKDEASHQQKIGADYRLILKYLGSMRGVFGEDTDFVCGYEAGCLGFTLYRQLTDLNVKCIILAPTTMMAEQGRKRIKTDKRDAVLIARCLAYHTYHAVHIPTEQDEQIKEYIRMRDDHRLALKKDKQQILSFCLRHGFQYTETNSRWTQAHINWLRKLELEGLYQETMAEYLMTFDRLTEVIERLDKRIAGLAEQDTYRSNVKKLTCFMGVKTQTALAVLVEVGDFNRFARAENIAAYIGLVPGEDSSGGDKQRLSITKAGNTHVRRLLIEAAQSYSRGVVGYKSKALKERQEGNPPEVIAYADKANTRLRRRYYHMVLQNGRKANVAKTAIARELMCFMWGMVTGNIEARI

SEQ ID NO: 474548 - protein, 444 aa, unidentified
MIRKVMEAIYQIVGGLDVHEETVVACRRRLISDGQAELEVETFRTTSAGLRELSDWLKGWDVTHVAMESTGVYWIPVWNVLEGQFKLVLENAQHLKKVPGRKDDQIDAEWIAQCMQCGLLRGSFVPGAEVRQWRQLTRHRTKLVDQRTSVVNRIHSVLEQGNIKLSNVATDIMGVSGRAMITAMSKGESDPARLAALAKGRLKAKYEELTEALDGQLNENQRWMLKRLLEQVGALEKEIEVYSERVGEQMLPYRRQLERLDTISGVGQRSAENILAEIGPDMDQFPTDDDLVSWGALCPGKNESGGKQRSSRTPKGNKWLKRTLTEAGWAATLERDSYLAALYRRLAPRRGKKRAIIAVARTILQSAWHILKKDVDYKELGGDYFEHLNEEKSTKYFVKRLEKFGYEVVLKPKQAEKAGLEPKPKKIKKAAVERKPKKAPEATT

SEQ ID NO: 474549 - protein, 354 aa, unidentified
MAEALKKSIAFVGIDIGKNSFHVVGLDKCGAIVLRQKWSRGQVEARFANMPPCLIGMEACVGAHHLSRKLQRLGHDARLMPARYVRPYSKGQKNDFRDAEAIAEAVQRPTMKFVATKTADQLDLQAMHRVRERLVSQRTGIINQIRAFLLERGVAIRQGLRFLRAELPGILAGPTDALSPRMVRILEDLAGDWRRLDERIEGLSNEIEAIARQDAGCERLISVPGIGPIISSAMVAAIGAGDVFSKGRDFAAWLGLVPRQISTGDRTILGKISKRGNRYLRVLFVQAAWVVLIKPKSWERHGLKSWIEAAKKRLHRNVLAIALANKLARIAWSVLAHGRSFEASKLTAAVTQPA

SEQ ID NO: 474550 - protein, 328 aa, unidentified
MQKNKEYVGVDVSKESLDMAVYSTGEIRSFGNDDASIAKATTWLKQVNPAIIVMEATGGMEVSLYVALQEANLPLAVINPRQIRDFAKSMGILAKTDKVDAKVLARYAATIQPEARPLPDEEARQLNTLVRRRCQLVEMIIAESNRATITRDKAMKQRINAHIDWLKQELAGIDKDISQMMKENPVWHAKDKLLQSVPGVGPVLSATFIAELSELGILNRKKIAALVGVAPFNRDSGKHRGERSIWGGRCRVRQPLYMAALSAVRFNPTIRIFYERLLANGKEKKVALTACMHKLLIMLNVMLKHNSYWSCNYAIFNNTCIPDAKTVA

SEQ ID NO: 474551 - protein, 347 aa, unidentified
MKHYAGIDVSLNSCSVCVVDESGKIVREVKVASEPVALIHCIKSLGVRVERIGLEAGPLSQWLYGALRESRLPVELLETRHVKAALSAMPVKTDRNDARGLAQLMRLGWFRPVHCKSMAAQEVRALLTARKLVQSKLYDIEMSLRGILRGFGLKVGPTTSRSFAARINHLTAGHPSLEMVAEALLSTHAAALCAFKNLEKNVRQISRADARVRLLMSTPGVGPLVALTYVSAIDDPKRFTSSKRVGAHFGLTPKKYQSGETDISGRISKIGDSSVRAVLYEAAHIILTRPIHGGALKSWAMRLAKRAGMKKAKVALARKLAVVLHRMWVSASTFDFEKANGCMRAAA

SEQ ID NO: 474552 - protein, 403 aa, unidentified
MQITTIGFDIAKNVFQVHGIDAAERVVVRKQIRRGQLMKFFEALPPCLVGLEACATAHYWARELTKLGHEVRLMPAKDVKAYVKRNKNDAADAEAICEAVRRPSMRFVPVKSAEQQGQLMQHRTRDLLMRQRTQVINALRAHLAELGITAGQGREGIRDLLAIIADDGDARLPIDARASLIVLAAQLQAIQTLIGSMEKRIIARHRSSEASKRLQTIPGIGILGASTIATMVTDPKAFRSGRDFAAWVGLVPRQDSTGGKRKLGPISKQGDRYLRRILVVGAHAVLKRARLHPKNIPGLHSCWHGVRSRSSRSRWPIKWHASLGHCWRKVRPTGCRGSRRPDKASRWEAEGCVRALMNCRGDDDVDAKRSRPSIGKTREVPREERARANGWDLISESHQGQQP

SEQ ID NO: 474553 - protein, 360 aa, unidentified
MDGSKQQPKVTAGLDLGDKYSYLCLIDQESGQVIEEGRLRTTPEAFRRRFASEQPPMRIAIESGTHSPWASRVLEECGHEMLVANARKLRLIYANKRKTDEVDAENLARLARLDPKLLYPLNHRGEGSQTHLAIIRSREALVSTRTQLVNHVRGAVKSFGARLPKCPARSFHKRAPEHIPEALRPALGPILETIGSLTERIREYDRQLETVCQEHYPETELLRQVEGIGTLTALTFVLTLEDPYRFERSRSVGAYLGLVPATDQSGDRDPQKHISKEGDEMLRKLLVGSAHYILGPFGSDSDLRRHGEKIASSGGKNAKKRAAVAVARKLAVLLHSLWVSGEVYDPLRNTHRRERREEAA

SEQ ID NO: 474554 - protein, 372 aa, unidentified
MTSIIYIGMDVHTTNYTLCCYTVDSDDAFAVVNVKPDYHEILKYMERVRSTRGGNCDFICGYEAGCLGYSLYHQLAKHGVACIILAPSTMPQQKGKSIKTDKRDAKNIAKCLAFNLYSPVYVPTAEDYAIKEYIRMRDDVKADLKRTKQQIISFCTRHGFHYEGKSRWTQAYFKWLDSLVFENALYKETLQEYLALYYTLDEKIAVYDARIEELAHQKRYEENVRKLCCFKGVSTHTALPLLVEVGDFHRFRTAQHFSAYLGLVPGESSSGEKVIHTNITKAGNSHLRTLLVESANSYSRGVVGKKSKVMKDKQGGNSPEIIAYADKANERLHRKFYKIAIRSKKNVAKTAIARELSCFVWGMMTNHISRAV

SEQ ID NO: 474555 - protein, 386 aa, unidentified
MPKLNDLSRSLTAFEQESTLIVVIEMSQASWLVAGIVPGVDREPLKKLEPDGDALLRLLQRWRDEATKAGRMLKRVVVAYEAGRDGFWLARWLRARGVEAYVIHPTSVAVSREHRRAKTDRLDTALLKRVFLGWLRGEPNHCSMAAIPTLAEEDAKRPNREHESLVGERTRLVNRIKSGLVRLGIRTFKPMLRRAPEHLDALRTPEGAPLPVNTLAELRRDLARLHLIRAQIKAIEAARLEQLQQAPDQGPHAMVRLLARVIGIGVETADMLVQEVLSRNLRDRRAVARYAGLTGAPDESGARRREKGLARAGNGRVRRGMIQLAWRFLMFQGESALAQWFRSRTAQAPKMRKTMIVALARKLLIALWRLVRTGAVPEGLALRPAV

SEQ ID NO: 474556 - protein, 340 aa, unidentified
MKLYGAIDLHSTNNVTVVIDEQDRVVYQKRLPNDLALILMELSVYQTELQGIVVESTYNWYWLVDGLMEQGHKVHLANTAAIQQYEGLKYTDDHSDARWLAHVLRLGVLPEGYIYPRADRPVRDLLRKRSQLVRQRTTNLLSIQNLVTRNTGESLSTNQIKGLDVQQVDELLPNGDLALAVKANLSVMCCADEQTEILERTVRDRIKLRPEFSFLKTVPGIGQILALTIMLETGDIRRFCSVGNFASYCRCVGSQKVSNGKKKGKGNTKNGNKYLAWAFVEAANFAIRFNCKIKSFYQRKKAKTKGVVAIKAVAHKLCRACYYIMRDRVAFDLTKAFGQK

SEQ ID NO: 474557 - protein, 374 aa, unidentified
MANIIEAFVAFDTSKLRNAVAIAEAGRAGEVRFLGEIENTEAAITKVVRKLAGKYGRLTFCYEAGPTGYGLYRQIKSLGHECIVVAPSLILKKPGERVKTNRRDAVSLVKQLRAGDLTAVWVPDPRHEAMRDLTRAREVAVEDLRCKRQQVSAFLLRQGLHYPGERTWTKAHRNWLMSQKLEYAEHRIAFEEMLLAMRQAQERIERLEQAIRVAVPHWSLAEVVTALMAMRGIDFISATAFLAEIGDLSRFPTPRELMGYLGLVPSESSTGDTIKRGPITKAGNRRARRILVECSWSYQHPPRVGKEKQEKVAAAPQAVREIAWKAQCRLSARYRALTRKGKLKTVAVTAVARELSAFIWAINRQIINPRAAAK

SEQ ID NO: 474558 - protein, 372 aa, unidentified
MVWTAPYGISCARMRLLRSQTREPSVNQIIRIGMDTSKHFFQLHGVDAAERPVLRRKLRRKEMLAFFGKLPATVIGIEACGAAHYWARVLGELGHEVKLIAPQHVKPYIKRNKNDGRDAEGLCEAMSRPTMQFVRAKTAEQQAALMLAGMRERLVTQRTQLSNAIRGYAAEFGLIAAKGLDKIEPLLAGISADEALPVMARELFAMLGKEYVQLQAQLKKIDARLMAWHRANADSRRLAQIPGIGPIGAMALVMKAPDPRLFPSGRHFAAWIGLTPKDHSTAGKTRLGTITRAGDERLRSVLVAGATAVIQQARRGRGRASSWLLALLARKSSPKLAAIALANKIARIAWKLLVTGENYRAGDKPIALAHAA

SEQ ID NO: 474559 - protein, 342 aa, unidentified
MDHIGIDVHKNASQVCIRTETGQVLERRVRTDRESFAKWLGKRNGARILIESSTESEWVAQCLEELGHEVIVADPNFAPMYAQRSRKVKTDRRDARALCEACALGAYRPAHRSSEASRALRAQVAVREALVQTRTRHISLIRALLRQQGYRVRSGGAASFAERVGELELPEALQDQMAPLLAVMRSVNAELKAADKSLAEQAKTHEVAKRLCTAAGVGPVTAISFVAIVDRVERFAHAKQVRAYLGLVPRELSSGEKQRRGHITKAGNRRMRALLVEASWQLLRSRRADTEALRAWAHRIALRRGKRIAAVALARKLAGILFAMWRDGTDFGKTTTSAAHAA

SEQ ID NO: 474560 - protein, 373 aa, unidentified
MHAIEDLALLGWTAPRHRVPDLGVVNHPDPEPSMTQYKRIAIDTSKAVFTLHGIDHQDRVILQRNLRRAQFLPFFEKLPPTEIVLEACGGAHHWGRELTALGHSVRLLPPQYVKPFVKRGKNDRNDAGAICETGARPGIHPVPIKTVEQQAQGMMLKVRETLIGQRTALSNTLRGLAAEFGITTAKGLGRLAELLATIAADPALPVEAKDSFIILGEQLGRLDEQIKMLEKKVAAAHKANPLSTRLATIPGLAAIGSLMVATRVNADDFASGRHFSAWMGIVPKEHSTGGKQRMGGISRAGDERLRQLFVLGATSVIKAVTRPGGSKLASPWLLKLLERKPRKLVAVALANKMARTAWAMMKSGEVYRRPAAA

SEQ ID NO: 474561 - protein, 352 aa, unidentified
MSHKSASFAAVSTIGIDLGKNIFHLVGLDQRGAIVLQLKCSRAQLERRLANIASCLIGMEACSGAHYIARQLAALGHDVRLLPAQYVKPFLKGHKNDYRDAEAIAEAVQRPTMHFVAIKTLEQMDLLALHRVRSRLVGQRTGVINQIRGFLIERGITVRQGVVPLRKALPDILSSNTQALSPRMVNLITELVQDWRRLDERVAAVSAEIEALAEQDEACQRVMTVPGVGPIISSAVVAAIGNGAGFTQGRDFGAWLGLVPKQESTGDRTILGKISKRGNKYLRTLFVQAAHVVLARRPSAAMRSLWPWIERASRRLHRNMLAIALANKLARIAWAVLARGRSYQPRIIADVA

SEQ ID NO: 474562 - protein, 455 aa, unidentified
MYLPDWKWIPIRKELLLMSNKVIFNLDELFISVGIDVGADFSWMSIALPNQQFVGKPYKILHNSIDSLATAVSKIKEAEESYSLESRIFLESTGIYHYPLFCYLRDKGFNCSVINPIITKNSTNINIRKVHNDRFDSKKAALVGLKPNLKVSLMPSDLALNCRNLSREYYDLMDNRSAYVNKLQGELRMAFPQYLGIFSKVTINTSLTLLETYTSPSAFLEADKQEIIDIIKSTARFGLTYAQNKYNAIIQAATDANQFGYIIDSNIKRIRLYISFIRKYDEAINSILESLHELVDANEDTDFVKQIHLIETFKGAGFLSAVSIMGEIGDFSAFSKPKQLFAYFGLDPAVKQSGKFEGTKVQMSKRGSAIARRVIHTLTLQSISISRNGEAKNPVLREYYIKKCDSKPKLVAMGAVSHKVCNMIFAILRDNKPFKIIAPHEHIKQYNAAKCDIAA

SEQ ID NO: 474563 - protein, 346 aa, unidentified
MTIMRIGLDTSKHVFQVHGVDEKEQPVLRRQLRRSEVEKFFKKQQPTRVGLEACGAAHHWARVLRGLGHEAVLLPPQYIKPYVKRGKNDAIDAAAICEAMSRPEMRYVPIKSQEEQAALMLLKVRDLLTKQRTMLVNAIRGHAAEFGVIGAKGPATIAALLQRIAEEAQLPALARDMLASLAGQLAAAEMRLATIEAKLVARYKADPRSRLLATIPGVGPVGAVSFTLKVPDATVFRSGRHFAAWLGITPREHSTAGRQRLGRISRQGDEGLRRLLVLGATAVIQQVVRRAEAANPRRGLGASPWLLQLLARKPKKLATIALANKMARIVWAMLVSGEIYRRPQAA

SEQ ID NO: 474564 - protein, 394 aa, unidentified
MRFAGIDIASETHVVAIVNADAAVELKATPFTEDAAGYQKVLALLGAPGEVLIVMEATGHYWKNLFAVLAAAGHRIALLNPLRTHRFAGEELQRTKTDAIDAVGIARFAAQKRPAVAPLPDALTEELRELVRLRERLLQDFGDRLRQLHRLVDLGFPEFTRYVRTLESELASAILREYPTAAAFRGVSVRRLAALRYDGRHHVGLDLARALIEAARRSVGQHHSAAYRMQIRYACDDLDVLRRRLRELDRDIENALREHEVGRLLTTIDGIGSNTAAFVVAEVGDPASFRSARALSAYVGTIPGLKQSGKRSTRHAGLHPLGNARLRAALWMPTLTAVRFNPWLRAHYQRLRTRGKLPKVALVACMHKLLLAIYSVAKHRRPFVAALDADSAAI

SEQ ID NO: 474565 - protein, 331 aa, unidentified
MKNRLIIGIDVSKLVLDVFILSCNFHFTVENSPKGFAALLEISCTKLKTSKQQLYFCFENTGRYSRMLAVFFHQAEITFSRIPALDIKASKGISRGKTDKADARDIALYARRKGAEMEPTKISSAEISELRQLVSLRDKLIKHRTAYKNSLNDLTDCYYEGETDFIRQTQLRMVKQLDNEIKNVEKRMDTIICSMPDWEENYKLIRTVRGVGPVISRYLIIYTENFTRFTKYKKFACYAGIAPFEYASGTSVKGRTRVHPCANKQLKSLLNMAAMNAIKINGEYKQYYLRRQQEGKNNMSTLNIIRNKILARIFAVVRRQSPYVDLHKFAA

SEQ ID NO: 474566 - protein, 411 aa, unidentified
MDKVYDICCGIDVHKKLIVACLRNGNKNAIREFGATTRELLSLADWLKKSDCKMIAMESTASYWKPLYNILESSGLNAMVVNAHHMKAVPGRKTDVKDAEWIADLLQHGLLQASYIPDKDQRELRELVRYRKSLTGERSRELNRLQKMLEGANIKLSGTVRDINGKSARNLLEYLITGERFDEAKFDEMYSKKVIAHNLKASKEQIIDDLNGVMSPLQRRMMKELLVHLDELNAHIKNLDDEIDNFMKPEEKKASEAIQSIPGIGNTSAQAVVSVIGTNMNRFPTDSHIASWAGLCPGDHESAKKRKSGKTRKGNALLRSTLVTCAHSAVRNKQSYFYAQFMRISAHRGKKRAYVAVAHSMLIAIYHILKDGMVFKDLGADYYNQFNKERKINAYLKKLKALGWEAPVVAA

SEQ ID NO: 474567 - protein, 345 aa, unidentified
MNIASVGIDLGKTTFHLVALGERNKVLIRKKFSRAQLLAHTANLPASLIGLEACAGAHFLGAALQGQGHQVRLIPAQFVKPYRKSNKNDFIDAEAIAEAVTKQNMRFVQIKTQEQLDWQAMHRVRDRLVQRRTALINEIRGFLLERGLTFAAQPIHLRKSLPTVIEDAEQNLSPRLRWLLDRLWQEWKQTEIDIKAMTQEIERISNEDARCRRLRQIPGFGPLVSTATVAAIGNGAAFRRGRDFAAWVGVVPRQYSTGGKQKLYGISKRGNIYLRRMLIHGARSVLFRVKYDTGGFGQWVHRLAQRAPRNKVVVAIANKLARIAWAVLSSGQDYCHQPLLQPAAA

SEQ ID NO: 474568 - protein, 412 aa, unidentified
MEGETVIAGVDTHKDVHVLCLLDGLGRKIWSGSFGADPEGYDRLAEAIGDPGSCMVVGVEGTASYGAGLTRRLVELGYNVVEVLRPKRDKARPGEGKSDPLDAERAARKAASGKGCSVPKSQDGWVEAVRQLYVARRLAVATSTSCVACAKSMLTTAPSALRERFRGRERPKDLMPLLARGRKAGDALEESVLASLRSVAAVWKEARSQVESLDERIRALLEANAPALLGVEGCGTTTAAALVVAAGDNPGRLKGEAAFSMMCGASPIPASSGKTDRHRLNRGGNRQANWALYEIAIKRMAYDERTRRYVARRTSEGKSRREAVRCLKRYIAREVYRVLMDPNPDGAAPEGPELAKMRKAMRVTQKKAAAELGLSAATLGHLERGKRRSTKLERRYYELLCELERALPQTAS

SEQ ID NO: 474569 - protein, 427 aa, unidentified
MRPHAAAVDVGSEKFFASVAGEEPKVFLTVTEHMYALCDYFKEKEVTSVAMEATGVYWINLFTALEERGFEVVVVNGAQCRNLPGRKTDMQDCQWMAVLHAHGLLTSGFVPDADIRRLRDYMRVRADLIAMGSQHIQHMQKALDRLNVKVHVVLSDITGASGMRIIEAILGGERSPHALLRLCDPQILKTKKARMLEALRGLWKEEHLFALRLGYESYKHYQKQIEQCDQEIAKLVQEMSSGKPIPELGKAKELRNNAIRLKDLHTQMAQIFGKDLTKLPCINESTATLLLAEIGNDMTRWKTWRHFGSWLALAPSSAQSGRMRRRLKRHLTPAGAILCRAVQCMGGGKHTWLASFYKRLRAKRGPKVAVKATAYKVAKLIYLVLTQGWEYVEAGIKQYEQRVRETQVKALKRLAKRLNFQIVETVA

SEQ ID NO: 474570 - protein, 433 aa, unidentified
MDELNRNRLEQFRQLRNEIRHSEQYLIVGIDIAKERHHAFFGTAAGKTLLRRFVFSNDHEGFRKLLDQAEALEVRHGLKKVVYGMEPTANYHKPLGEYLISLGGMVVLVSGVVVKRNRESLDGRWDKHDVKDSANVADLISQGKCLYYEHPSAELRGLRGLLSLKRRLKRQEQSYRVRIRNHLIAQYFPEMDSHYGRSEREGMAIVRWCFPPSMITQLDIDPFIERVTSRRVRMEQRRRLETIWEKAGESIGCEGVPGVEHEAKVMVEGLRQLREMIKETEDKIEELCQQFPQYQYLLTIPGFGPDISAKVLGAIGDPDRFQNGKQVLKMGGLDLSADRSGKDSEKATPKISKRGKSDLRYALYQAAFIASTKNRDFMLYYTSKLQGRQKEKGIHTKRIVKLSAKMEIVKFLVEIFCGPLVRTSSNIPMPLSA

SEQ ID NO: 474571 - protein, 366 aa, unidentified
MGWTPPRRPWCARVVVFVTTEQEASVSEVSTIGLDLAKHVFQAHGADASGKVVFRKRLRREKVLEFFAGKPACLVAMEACSSAHHWARELARLGHIVRLIPPAYVKPFVKRQKNDAADAEAICEAAQRPTMRFVAVKSETAQANAVVFRARDLLVRQRTQAINALRGHLGEYGLVVAKGPGHVIKLVEHVEDPASDVPDAARLVLRTLVEALRFLGERIDLLDREIARRARENNEVRRLMSIPGVGPITATALAALAPPADAFRKGRDFAAWVGLTPSQHSTGGKQKLGTTSKMGERTLRRLLIIGASSVVRKALRQGTAAGSWLGRMLARKPRMLVIVALANKMARIAWAVQAKEEVYRAPAVGA

SEQ ID NO: 474572 - protein, 387 aa, unidentified
MRSVGLDLGTRKTSYCIVDADGSVHRGTVAGLDELVAVLGPGTGPARIGFEACREAWHVDATLRDWGQTPLLIDTTRVRRIGVGQHGRKTDRLDAEAIARAVERNQIPLAHVLSPERQRLRVELLTRRGLMETRSQSITTVRGIVRSQGLRIPACDADRFLDKVRACRLPDAVRALIDPLLAVVVVAHQQLCTLDERIEQLCAHEPAIRQLTTVPGVGLVVAAMFVSVLDEAKRFGSGRQVASYLGLVPLEKTSGLPGQRLGAITKHGNRYARSLLVQAAWCVLRRGETTDPLARWGRALAKRRSKKIAAVAVARRLACILWAVWKRGVAYDPEHVAELSAKGLERSADVIASQAKSLRRQTAKTHERAARLRLRRAAAARWSIPMT

SEQ ID NO: 474573 - protein, 388 aa, unidentified
MDKQHPSQYLYIGMDIHKDNHTAVATDCFNQTFFELEIANQIPDFKKLISKVETLTKAKGLIPVFALEDSYGNGEYLAHYLASQGFLVKEVNPVLVCRERGLMTHPEKSDLQDAKGVVRASIREGIDRLPSYSITNVREIAKDLSCLVSDRNFAVKEQTRLKNQLHYLLNRSYCSHYQEFFQNPFTKKALRFWTDFPSLSVFKSSKKRVNKPNWIKSISPQDLSIISEVEAKQIRRKAQRLLVLQAEIKELDQEIRHIYFKTGQQLHTLPGCGLNIASRILAEIKDINRFPSANQLAKYAGLTPRANESGKRKRKIKDPRGNRKLNHAFYKIVLSQLGRAGTPEAKTFIKRKLAEGKSKRQAIRSLKRHLCNIIYSMVKEQRAYYQTN

SEQ ID NO: 474574 - protein, 341 aa, unidentified
MGEISIIGLDIAKRVFHAHGADASGATVFSRRITRAKLIPFFASQRRCVIAMEACGGAHHWGRELTKLGHEVRLIAPAYVKPFVKRQKNDAADAEAICEAAQRPNMRFVPVKSEQQQASAAVFRARDLFVRQRTQFINALRGLVAEHGWVVPKGLFHARSLMARIEDPSCPLPQGARDAFLAMIASVHALDEQIVVLDREIAKRAREDADARRLMTIPGIGPITAVAILALAPPPESFRKGRDFAAWLGLTPKQCSTGGKQKLGAISKMGDRTLRRLLIIGSSAVVLHAARRGAPQGSWLEQMMARKPRMLVTVALANKTARIVWAVLARQEVYRAPVAAA

SEQ ID NO: 474575 - protein, 390 aa, unidentified
MIYVGIDVAKDKHDCCILGPDTEELFQVFTIRNNSDGYGELFHKIESVSKDKSQIKIGLEATGHYSYNILGSLLDHGYHTFVINPLHTNLYRKGQSLRKTKTDKVDARSIAEMLVTDKTLKPYTGTSYHSEELKSLTRYRFELVKERAKMKTSVSRLVNILFPELESLVSTLHMNSVYRLLQELPGAYFIASSNLTHLKALLADASKGRYGREKAIEIRETAKSSIGSLMPAKSMELRQTIRRIDTLTSDIKEVEQSIQKIMDECGSPITTIPGIKYRMGAMILAEIGDFTRFSNADQVLAYAGLSPSTYQSGQLISSYARMEKRGSKYLRYALFNAAIYASGWDERFRLYLSKKRAEGKHYYVAISHVIKKLVRTIFRMEITHTSYQPL

SEQ ID NO: 474576 - protein, 345 aa, unidentified
MKHSVIGMDIAKRVFQLHSVDPTTGEIERIKLRRDEVLPFFAQRSASLVAIEACGSAHWWARELRRLGHEVKLLAPKSVRPFVRSNKTDAADARAIWTAVQQPEARLVAVKSEQQQAILALHRLRAQLMKFRIMQTNALRGLLYEFGEVLPEGYSALAKALPAALASVAERLPAMLIDSLREQWARVQMINTEITTIERRLASALRASEPCRQIAAIPGVGLLTATAAVAALGEPNSFASGREFAAWLGLVPRQSGTGGLIRQLGLSKRGDSYLRTLLIHGARSVMVRGKHSPWVAALLKRRPYSVAVAALANKLARTIWAVLARGRPYDVTVFDVSVEPAMHIA

SEQ ID NO: 474577 - protein, 353 aa, unidentified
MAVYIGVDLHVRTETVCWMNTADGEIHQHTLDHSRDDLRAFYAQFTAPAVVGIESSGYALWFHQLMEQAGHRLLVGDAYAIRQFARRRQKNDRRDAELLLDLLRREEFPVVHRPAPPSQDTLALLRYRHRLVRMRTMVKNGLQAVALNHQLRLGFRLFTVRGQQQFAALPLSGAYATQRQQAQVLLTTLEAQIAAVNQELATRAAADARVVRLRTHPGVGLQTALAVVHTLEPVTRFDRARRIAAYCGLDPSEHSSGDTTRYGHISKQGNRLLRFLLVEAAWSAVQHEEDLGRFFRRLRARKKPHAVTVVAVARKLVLRLYRMLREGIDYEEFRRRGRDARRARQCASPAQRG

SEQ ID NO: 474578 - protein, 472 aa, unidentified
MVRPPKKCKPLAEEERKPLVVASETVLKEQQAQARLERLNWDAAGIDIGATSHFVAVPAGRDEQPVREFPAFTADLQRLADWLTQCGIRTVAMESTGVYWIPLFELLESRGFEVLLVNAHHVKNVPGRKSDVLDCQWLQELHTFGLLRGAFRPEESMCVLRAYLRQRANLVRYAGMHIQHMQKALNQMNLHLHHVVSDITGVTGMKVIRAILAGERDPQVLAQHRDRRCRHSCEMIAKALHGSWREEHLFALRQAVELFDTYQQQIARCDEEIARVLVRLDPATEEDTPPPVRKHKGDRNTPRIDDLRGQLFRLVGVDLTRIDGLNSHSVLKILAEIGTDMSRWPSVKQFCSWLGLSPGNKISGGKRIGKSKTTPSANRAAAALRIAAQALSNSQSALGGYLRRQKARLGAPKAITATAHKLATILYSMIANKTEYDPPEVNYYDVQYRKRVLANLRRRADQLGFDLIERPA

SEQ ID NO: 474579 - protein, 353 aa, unidentified
MRTYYVGMDVHRATIAIVVLNGAGKVVEQFVVETSATRVRRYLKQLAGRVYVTFEEGTQAQWLYDVVQPLVTAVIVCDPRHNKLLKAGNKSDRIDAQKLAELLRNGSLKAVDHRDHGVRALKELVRNYDCLVSDTTRVMNRLKAMFRRQAIACGGHEVYRQDRREVWLGKLTERGAKERASSLYRQLAALKALRHEAKLAMVREARRRAAYVWLMSVPRLGAVSVAQLLAVVGTPHRFRTKRQFWTYVGLAVVTSSTADMEVVDGVLRRSRRPVATRGLNRNHNHLLKRVFKNAATSACQSEPFKQHYELRLQQGMEPALARLTVARQLSAITLSLWKRGEKFQAERMKRPAA

SEQ ID NO: 474580 - protein, 308 aa, unidentified
MPQPVIGCDLSRAFLDLCDLPAGRTQRIPNTRDAIAEWAETLTPEKLVVFEATSGCDDILIATLTERAHPFSRVNPRQAREFARATGVLAKTDRVDARVLAQMGAALDLPVTRPVSPARATLADFLRRRRQLVDMRKAEKLRRHSAGHDDIAEQIDAMIALLSTQISVLDQRIKAIIAADRALAEQAALMSAVPGIGPTVMAVLLGELPELGTLCRRKIASLAGLAPHARESGTWKGARRIWGGRRKVREALYIAALSASRRVPALIAMRDRMRAKGKAPKTILIAIARQLLVILNAMIQKGQTLQIT

SEQ ID NO: 474581 - protein, 351 aa, unidentified
MMIIGVDYHPSFQTIAFFVEETGECGEQELNHSDGQAEKFYRDLKQRGICVRVGMEATGYSRWFERLLAELGFELWIGDPAEIKAKRVKKQKFDREDARLLLRLLRENNFPQIWIPDPENRDLRQLLWHRHRLVQMRTRIKNQLQALAMNEGYRWKKKLFSEPGRAQLEKLALAPWASRRRQELLELLDRMNPTIEELTAAVEQEARKRPEAMRLMTHPGVGPLTALAYVLIIGTPTRFQRGKQIGTYVGMIPCEDSSARKQRLGHISKQGNSLLRFLLVEAAQAAARIHPDWKRRYIHLAMRRSKSIAKVAMGRRLAVRLYWMWRNGCEYSASLEFGSYAGQLEIGNGVK

SEQ ID NO: 474582 - protein, 363 aa, unidentified
MPTIADAGQARLVTGGVDTHAEVHVAGMVDQAGRVLGTREFPVSAAGYQAALAWMRGHGELVKVGVEGTGSYGAGLARYLAAEGVEVAEVIRPSRQARRRRGKSDAADAVAAALAALNGEASGTPKSRDGAVESIRALQVARRGAVKARTQAGNQLRSLIVTAPEQLRDKLAALTTPQRVTLAARFRPGGLTSPAEAAKAAMAAVARRHQVLTAEITELDISLEALARHAAPAGFLARAGVGTQVASILLTTAGDNPGRLRTEASFAALCGSSPVDASSGKQRRHRLNRGGDRQASSALWRIVFTRMACDARTQAYVARRTAEGKTRKEIMRCLKRYVAREIYKALVTQARNPAAGIPLTPAA

SEQ ID NO: 474583 - protein, 360 aa, unidentified
MQDTRLEKEIKNYIGLDIGDKYTHFCVIDETGEISDDGKVRTNRRSITRAIQGLEAPRVALEVGTHSRWICALLADLNIEVLVANPRKIKLIHGDNKKDDRTDSEKLARLNRVDPSLLYPIEHRSDDHHRDLEFLKARDILVQARTAQINHVRGTLKGEGIKIGRVSAPAFASRVLAIVDSEHLVALKPMLEAIAMLTSKIKWYDNEIERLGSTKYAEDVEILRQVDGVGPITSLAFVLTLGDPFRFPKSRMVGSYLGLCPKRDNSGDSSPELRISKEGDGNLRRLLVQSAQYILGHFGKDSDLRRWGLKKAEGGKRAKNRAVTGVARRLAVLLHRLWVTGEVYEPLRNSNPPEQAAQAA

SEQ ID NO: 474584 - protein, 403 aa, unidentified
MNNVAGIDVSKGKSMVSVLRPFGEVVAKPFSVGHTGSELKELADYLKSLDGETRVVMEHTGRYYEPVARFLHEEGVFVSAVNPKLIKDYGNNTLRKVKTDKADARKIARYGLDNWAELRQHTPMDTIRMQLKTLNRQQSLYAKTKTMMKNNLIALLDQTYPGVNALFDSPVREDGSQKWVDFATAFWHVDCVRNMSLTAFAERYRKWCKRHGYNFSQSKAVEVHAGAQDLIAMLPKDALTKTMVRQAIDALNAVSASLERLKAEMQALAAQLPEYPVVMAMHGVGDSLGPQLMAELGDVTRFTHRNAITAFAGVDPGADQSGTHEAKSTRVSKSGPPELRRALFLVMDCLLKTQPQDDPVYRFMDKKRAEGKPYLVYMTAGANKFLRIYYGRVKEYLASLEGN

SEQ ID NO: 474585 - protein, 313 aa, unidentified
MSQNTMTTIYTGLDIAKLNLQLHITGRIHDLPNTAAGHRRLLKLLTAHAGAHVVCEATGGYERDVVTALHEAKLPVSVLNPARVRHFARATGQRAKTDDIDAAVLSAYGQALQPKPTAPRTEQEQQLAELVRRRVQVLEILVAQRLQAERLTVPALRRQAQSLIRRLERDLEQIEAQLKALRTQAVTLDARVQKLEAITGVGTITALGVLAELPELGTLNRRQAAALAGLAPHPRESGQWHGRRSIGGGRAPVRRALYMAALVAAHSNRQLKAFYQRLRAAGKPAKVALTAVMRKLIVLMNHILKNPNFALSN

SEQ ID NO: 474586 - protein, 402 aa, unidentified
MDVVHERCAGLDIHKQRSVACRLTPDAAGAPTKVVRTFGTMTADLDALAAWLADAAVTHVAMESTGVYWKPIYNRLESRFTLLLCNAHHLKAVPGRKTDVKDSEWIADLLRHGLLRGSFVPEREQRELRELTRYRTTLIQERTAALNRLQKTLEGANVKLTSVATDVLGKSGRAMVEAMIAGQTDAAVLADLAVGRLREKLPQLERALAGSLGAHQRFLLAQQVAHIDFLETQIAQVSAEVDTRLHPFETVLARLDTLPGVGQRTAETLIAEIGTDLSRFPSARHLASWAGLCPGNRESAGKRLSGKTRKGNAYLRAVLIEAAHAAARTKNTYLAAKYHRLAQRLGKKKAAVAIAHLLLRLLYALLTQNTLYHELGTDYLEQRDREACNAGSSAAWKRPACE

SEQ ID NO: 474587 - protein, 460 aa, unidentified
MNRKRSKSRVDRTLPMMHPNAAAIDVGATIHMAAVRADRVPEPVRCFGTFTTDLHRLVDWFTECGVETVVMESTSVYWIPIFELLDARGFSVFLVNARDAKHVPGRKTDVSDAQWLQRLHSYGLLRASFRPKGQIAELRAYVRQRERLLEYAASHIQHMQKALTEMNLQLHHVVADITGSTGLRIIRAILAGERDPEVLACLRHYSCHSSAETIAKALTGSYRTEHLFALEQALALYDAYHEKASACDVRIEAVLKELSIHRGRDIGSVPPASRRRHRTDQANALAFDVRAALFALLGKDITRIDGLGPYLSLKLIAECGDDLSSWPSAKHFTSWLGLAPSNKVSGGKMLSSRTRRSGGRAAALLRLAAVTVGRTDTALGAFYRRLSSRIGKAKAVTATARKVAVLFYNAVRHGMQYVDPGASSYETRYRMRVVNNLHRRAKAFGFVLQPLEPKADAVVS

SEQ ID NO: 474588 - protein, 287 aa, unidentified
MELHTIGIDLGKTVFHLVGLDLRDEVVVRKKFSRTQLLRFTANVHVGLIGMEACGGSHFLGRALREQRHEVRLIPAQYVKPYVKTNKSDYIDAEAIAEAVARPTMRFVPVKTDEQLDMQSLHRVRERWVMRRTAVINQIRGLLLERGITLRKGRHHVHAALPLILEDADANLSGAVRLLLTQLKLDLDQLSVRIDEADAVIQKTAHENEACRRLVAIPGIGPVTATALIAAIGNGGAFHKGREFAAWMGVVPREHSTGGQQKLLGISKRGNSYLRRLFVQGARAVLQ

SEQ ID NO: 474589 - protein, 385 aa, unidentified
MANQNDLSRSLVAFEQDSTIIAVIEMSLNSWLVAGIVPGIERHPLKKLSCDEQMLLQLLYRWRDETAKAGRVITRMVVAFEAGRDGFWLARWLRARGIEAYVIHPTSVAVSREHRRAKTDRLDTELLKRAFLGWLRGEPDHCSMAAIPSLQEEDAKRPTRERENLVGERTRIVNRMKACLVRFGIRNFNPTLRRATERLNALSTPEGVSLPPNTLAELRRDMARLRFVMDQINEIEAARLQRLEQAPAEGPHAMVRLLARVIGVGLETADMLVHEILSRKLRDRRAVARYAGLTGAPDESGSKRREKGLAKAGNARVRRGMIQLAWRFLLFQKDSALAQWYRTRTEGAGKKRKTMIVALARKLLIALWRLVTTGEVPAGVVLRAA

SEQ ID NO: 474590 - protein, 469 aa, unidentified
MKRKSRRAKCQKVSPFSGDLQLIEADAAAVDVGSRSHWVAVNPQRDPHPVREFGTFTTDLISLADWLAQCEAKSVVMEATGVYWVSLYELLERRGFKVYVVDAHTVRHLPGRSKSDVKDCQWLRRLHSYGLLRGSFRPPAQIRQLRNYLRSRTKIVEAAAQQQLRMQKALTLMNIHLHHVISDLSGLTGLAIVRTIVGGERNPNRLARLRDPRIRASKETIQKSLEGHWQEELLFDLKIALESYDHFQGQIAAYDEQIRQELKEVESKVNLANEPLPAARLKACRKRPGMSQQDQLDLREELYRISGVDLTRIDGISLQTAQKVFFEIGTDVSAWSDEKKFSSWLGLSPNHRISGGKVLKRGSRKVVNPLSVALRLAARTLRNSRSALGANFRRLIAKIGMPKAITAMARKLAVLLYRMLKYGTQYVDKGMQHYESKYQETKLQYLRAQAAKFGMILLPKQAAATHVAS

SEQ ID NO: 474591 - protein, 316 aa, unidentified
MANLTQSKSSVNVGVDVGKTFLDVCIHEKQLHFQEENTPKGIQAILKRLAHYKVERLVVEATGRYEFALAEAAYLKELPVCIMKPLSIRRYAGAVEQLAKTDKIDAAIIAEFAAVIKPKPTPQKSKNLIAIKDLLARRRQVMEMRTQELNRVKIMGKSLEASCKRIIKVLDKEVERLEKSLSEYVDEQSEWSEKRELLISTPGVGNTLVYTLLADLPEIGTLNNREISALVGVAPMNRDSGSLRGKRKIKGGRASVRTMLYMATLSATQCNPVIKHFYKKLVEQGKHKKVAIVACMRKFITILNAMVRDKKEWCHA

SEQ ID NO: 474592 - protein, 348 aa, unidentified
MQITIVGIDLAKNVFRLHGCDRQGRAVLRKQLTRGQLLAFVAQLPACTVAMEACASAHYWAGKIEQLGHRVRLISPRLVKPYVKANKNDANDAEAICEAAGRPSMRFVPVKTAAQLEVQALHRVRQQLVKSRTALINQVRGLLAEHGIVIPQGRAQLHRALPRILEDADHRLSGVMREILSEVGERLKYLEDRLHQYELRIERLFRQDQRCRRLAEVEGVGPLIATALVAAVGNAAEFRSGRQLAAYLGLVPRHRASGGRTIMQGISKRGDRYLRSLLIHGARAALWTSARRGDQRSAWATRLKVRRGSNVAAVALAHKNARVLWALLRSGEGYRAAPGCPRIAQAVG

SEQ ID NO: 474593 - protein, 307 aa, unidentified
MNIHPGFVGIDVSKHFLDVFDNGRVERIANTTEAIVALVARWHESFVLFEATGRYDARLRKALEAEGVSFTRVNPARARDFARATGRLAKTDAIDARMLAAMAQSLSFARERESDSEREALARAHKRRDQLVHMRKQERTRFSECDDLELRADIEAHMHWLDAQIVRWDAEIDRLLKCSTALAQRARQLRSIPGIGPVAAATLLALMPELGTLSAKTVAALAGLAPFNVDSGKYRGARKIQGGRKRVRDALYMAAVAASRCNARLKILYQRLRSAGKPAKLALIAVARKLAITANAILRDKSSFRPA

SEQ ID NO: 474594 - protein, 431 aa, unidentified
MSSKAYRATRVNDVNWEPIARGKEGLGVTLGADVGKFDVLVVCRWADGRFERPWRIKNPSEIATLVAFVRQVKAERELVVAMESSGTYGDALRQALGDGGIEVRRVSGKAAHDYAEVFDGVPSQHDGKDAAVVAELAALGKARPWAYQAADPWEEELTYWVEEMVAQRQMVTLWQGRLEGLLARRWPEASRVLKLSSGTLLRILKRYGGPQALAADAGAADQLARWGRSLLSPEKIEELLAGARSSVGVRMGQWQRRQVQEYAERALDARQRSDRAQRRLSQLAAGHPVLQAQGKVVGVPTACVLWVSTGDPREFDSAAAYRKAMGLNLVERSSGTYQGALRISKRGSARARQWLYFAAMRLVQRCGVRPWYEAKKARDEGDARRVLVAVMRKLAVALYHVGVRDEEFQPRRLFGRIGRSARRSGASKQRA

SEQ ID NO: 474595 - protein, 407 aa, unidentified
MDLLKTVFGIDVSSRKSNVCIMVNGQKVNDYAISNDMVGFNQLLGDLKQVTKPQIIFEATGVYSRRLQAFLDMHELRYVMMNPLEAKRKTKDDLHQNKTDKLDALYLAKLQSEHPQRLAYVQSKEYQELMANNRIYEQASHDLITNKNRLHKTIQLTFPEIEHLLANPRGKNYWSIALRFPHPDIVLETKEADIIDFLKGLSGIGKKRANDIAQSLIRLAKVACPAVKKNSAHIRGLKMAINNILSAEEECQTALQEMAKLAPKRDLEILTSIPGIGKNTALRIISELGDIRRFNNPSQLNAFVGVDPQVYESGNLTAHLSISKRGTAIGRKVLYLAINQIQSAKKAGNPCHIADYYEKRKRSSETASHKKAAIASIHKLLRTIFALIKNDQLYSYDVAKHNQRLLS

SEQ ID NO: 474596 - protein, 430 aa, unidentified
MKSNTQNAKIEAITEKTLVLGIDVGSEMHYARAFDYRGIEYSKKPFKFSNTEAGFATFKEWILDLKERHEKDKVVPGMEPTGHYWFNLGKFLQDNEMKPVLVNPHHVKKSKELDDNNPTKNDRKDPKVIAGLVREGRYMIPYLPEGVYADLRTASNIRFQLQAELTRIQNRISRWFNIYFPEYKTVYGKPDAKSGMLILKAAPLPEDILTLGIDGVNQIWRDAKLRAVGKARAKTLIEAAEHSVGSKEGAVSARMEIRMLLEDYESRNIRLQEVMTLIEGLVKQIPMAEKLLKIKGVGIKTVSGFLAEVGDISRFNTPKELQKLAGLALVESSSGKHKGETTISRRGRKRLRYLLFEVAMSLVAKNPEFRELHNYYTTRRLNPLKKMQSLMAIAAKLIRVFYAMLTKGVDYDPKKMVSDIKRPAVYIQAA

SEQ ID NO: 474597 - protein, 349 aa, unidentified
MADKLIVGIDISKDWLDLCASNAAGVERIANTPEVVAAWLERVGAGLIAFEPTGGYERTLIAAARERGIAFVRVHPNDVIAFRKSRGIKAKTDAIDARLILAFVCDKAARAELRTSLIGDDRLRALAARRRQLADALQAERCRLDAAALPAVRASLEAVIAVLRHSLGVLEAELADAVAAHPQTAELAKLLQTIFGIGPVVAITLIADLPELGLLSAKQIAALVGLAPHTKRSGKTRYRETTGHGRPGVRRVLFNAARTAVRHPSLFKDFYDRLVTDNRRPGKVALTAVMRKILITANAVARDHEPWHGRLAAGTPCRPHAEQTDHRAGRVKAAAAPRAVARSASLEAA

SEQ ID NO: 474598 - protein, 411 aa, unidentified
MARNTSCHPTGRRVGSLRVLPPRWSPSEAWLNTGTSATWWGPQVGMPAPDYTPPTSEERLFVPVFVIGIDPHKSTHTATAVDPDTNRDLGSIRIRSSFDDYAQLWTWATQWPDRIWAVENASGLGHHLTQWLIGRGEAVVDIPPTATARVRELSRGGRRKNDRIDAAAAACVAFSHGDFRPVAPEDHTDVLRILDERRIDLVKQNGRLINQLHAIMRELLPGGIECNLDTEHAATELKRFRPGTASDAMRKKVGLEIVGDLRRLRFQIDDLTDRIKTELTACGTRLQKIPGVGVVTAARILARTGNPTRFANEGAYANYTGTAPVEIASADKQRHRLSRGGDRTLNSAIHIVAVTQARTTTSAGHAYHRRKVAEGKTHREATLCLKRQIVKTLWRTMQDDFVRRVEEPITA

SEQ ID NO: 474599 - protein, 369 aa, unidentified
MVEYSEAFVGIDAAKSRNAIAIAEAGRAGEIRYLGEIDATPQSMRKVVARLAAKYQRLHFCYEAGPTGYGLYRQLTALGHDCIVVAPSLIPRKPGVRVKTNRRDAIALARLLRAGELTPVWVPDEAHEALRDLVRARDAAVEDLRRKRQSVTSLMLRHGRIFPGKTTWGARHARWLQEQRFEHPAHQIVLQELVLAIQHAQERLERIEAAIAEFVPGWSLAPAVEALQALRGVNLISAVTFLVEVGDLRRFETPRQLMGYLGLVPGERSTGDTVRKEGITKAGNSRARRTLVESAWTYRYPPRIGKVKLYHLQRVTPAIRDIAWKAQSRLCARFRALAARGKKSTVAVTAVARELAAFMWAIVRAVPAT

SEQ ID NO: 474600 - protein, 391 aa, unidentified
MIYVGIDAAKDKHDCCILGGNGQTVQEAFAFRNNHEGFEQLIAAIQRSSEAEGSGQIKAGLESTGHYSGNLEAFLRDSGVELVVFNPLQVNLYRKSQTLRKTKTDKVDAKCIAQLLMTAESNPVSVSYQILELKALTRHRSRLVSQRTKLKVSISRLVVILFPELSAACNSVTQAAIKALLLELPSARQIAACRIDRLTNLLRTASKGRYGRAKAEEIKSLAQQSIGANSPAAALELQLTLQHLDFLQKQVNELDKAIRAAVVQTQSPILSIPGIGPTLAGIILAEIGDIHRFSSPDKLQAFAGLDPSTYQSGKFKADKTPMVKHGSTYLRWALMQAARLAAVHCETFGRYLAAKQAQGKHYFVALGHTAKKLIRVIFRILSANEVFVPQT

SEQ ID NO: 474601 - protein, 347 aa, unidentified
MNFYTKQHKFYCGIDLHTQRMFVCIIDAGGTVRVHQNIHTDPEAFLRIIGPFREDIVVAVECMFTWYWIADFCIQENISFVLGHALYMKAIHGGKAKNDKIDSLKVATLLRGGMLPQAYVYPARMRATRDLLRRRNHFMRKRAELFAHIQNTRSQYNLPDPLGCIAKPQNREGIVDRFNDPSVQKSIAVDLEVIEAYDRLLTQLERDIIACAKEHDLRSYALLQTIPGVGRILALVILYEIESIERFPRVQDFVSYCRLVKCIKESNGKKYGSSSKKIGNAHLKWAFSEAAVLFLKGNEPAKKYLERLARKHGKVKALSILAHKLGRAAYFILKNKEAFNQKKFLGL

SEQ ID NO: 474602 - protein, 340 aa, unidentified
MPLYGGIDLHANNSVVALMNEQDEVIYQKRLPNDLPTILEQFAPYHADIEGLVVESTYNWYWLVDGLMEADYRVHLANPAAIQQYNGLKYSDDHSDARWLGHLLRLGVLPEGYIYPKADRAVRDLLRKRAHFVRQHTANVLSVQNIMVRNTGARFSVKRIRELTAKELKHLLPEAYQVLAITSSLAILDCLSQQIKTLEKAVSKRLKHTPSYEQLLTVDGIGTILAQTIALETGQIGRFPTVGDYASYCRCVNSTKLSNGKRKGQGNVKNGNLYLGWAYMEAAQFAIRFNPQAQRFYQRKLAKSTNNTVLARKSVAHKLSRACYYIMRDLVPFEATKAFG

SEQ ID NO: 474603 - protein, 347 aa, unidentified
MLIIGCDFHPGFQQVAIFDNRTGEVEEKRLQHRREAEEFYRSLAGQEVRVGMEACGHYPWFERLLEELGIELWMGDAAQVRASVVRKQKTDRRDGEHLLQLLLENRFPRIWVPSLEVRDVRQLLVHRHKQVQGRTRTKNQLQAMALSCGVQKKRKLWTKAGRTELEQLPLLPYAAERRKRLLEGLDKLEAEIVELDRRVFEEARQRPEAVRLMTHPGVGPVTSLAMVLTLGPAERFGSAKQVGSYFGLIPSEESSGGKQRLGKISKQGNSFLRFLLVEAGQTAARLDPQLKRFYKRLAARKNRSVAKVAVARKLATRLYLMLREDWTYAQLCQAVMQGSPSHSVAGE

SEQ ID NO: 474604 - protein, 442 aa, unidentified
MNKFAPLVEFNHLKATVRRNNNILLVGIDIAKRNHVCSFELTSGQIIRKTFRFSNDIEGFQMLIDKINTYRHQHQVEQVICGLEATATYWKPLALHLASEGLYVVLVSTLAVKQNRQTLDVSKDKNDAKDAHNICDLMAQGKFQYLNLRKGPVAELSRLFRIRFGLTKDKAKIRIKLRQILGDIFPELEAHFKNMLGATALALLKQYPFPNDILELGVEPLTQLIQAASHHRLGKNKALAIYALAQQSVGIDIEAEAVRFELQLLLKNLAGLLADLKATENKIVKIIQHDKNYSLLLSIKGIGPVIAAGLIGEIGDINWYSSAKELTKLAGLDLWSNNSGDSIRSGKHISKKGRKYLRTIAYEAAINCVRCNPQFKAKYQHLLDNQARRNKIKSIAYVAIADKVLRMVFRMLKDGTPYDPNYDDILKERYRCKKNNFQHKNQ

SEQ ID NO: 474605 - protein, 359 aa, unidentified
MQTRSQSLDFSGQNIYAGFDVHLKSWSVTIMTDEITHKTFSQPPEPEVLHQYLQRNFPGGTYLSAYEAGFCGYWIHHKLLRLGIHSIVVNPADIPTTNKEKVQKDDKRDSRKIAKALRSGDLIPIYVPSAKTIEDRCLVRTRSMLVRDSTRNKNRIKSFLHFHGIKILAAFENSRTHWTKRFINWLEAIEMKEDSSKLTLSLLVSECKKLRGTILTVTRSIRELSQTEAYIKHEKLIRTVPGIGPITAITFLTEIETITRFSNNNQLHSFVGIVPSTNSSGENEIIGDITPRGHSILRSAIIESAWIAIRHDPALMKAYHDYCKRMESNKAIVRIAKKLLNRISFVLKNMQPYSLSVVK

SEQ ID NO: 474606 - protein, 360 aa, unidentified
MDKVIREGAVRVGVDLAKRVIQVHAVDAAGRLLTGRALARERFIAWCSQLPAGCIVAMEASSSAHHWARKLCSLGLDARIIAAHLVKPYRKQGNGGKNDANDAAAICEAASRPSMHFVPIKSVEQQSILCVHRLREGVKEERTACINRIRGLLAEFGLVFAQSPKVLRLVLADVIEDASNEMGTLARLTLQRAHAQWRELDEHLAWCDERIAEHARTNGQVKTATTLLGVGPLTASAVVATVGDFRQFRNGAQFGAWIGLTPKQHSSGGKTRLGRITKRGDTYLRTLLIQAAKSAVLTAHRRSDRISRWLCTLRERSGWQIAAVALANKNARILWALMTKGEAFDTNHLSVKPGMSPQPT

SEQ ID NO: 474607 - protein, 345 aa, unidentified
MKPETSTTELYCGMDLHSNNVYCGIIDQAGARVKGKKLPLDLAAILDFLEPYRDKLVDIVVESTYNWYWLVDGLQERCYPVRLANPAETEKYSGLKYADDKSDAFWLAEMSRLRILPTGYIYPKEIRPIRDLFRRRLLLVRQHVQTLQSVQTMIARSTAETISCSKLSTWTARDVKACLKNVHLQQTALYLLEVADKQQRVIAKIEMHAGGEVKLFGRWRLLVDVPGIAEILGATIMLETGPIERFANVGRYASYIRGVKSEKWSNNKKKGKGNLKNGNKYLAWAFVEAAQHAQRHYPEIKSWFERKMRKTNRNVAIKALACKLAKAVYYILRDNVEFDMQKMFG

SEQ ID NO: 474608 - protein, 358 aa, unidentified
MVKKQSEIVLQDEQVFVGLEDSKKTWCLCVRSEGRVVNEISIPAHYENLQHYFQNKFPGCKITVMYEAGFSGFGLHDQLVSDGWECIVTPPHTVTEEKCQSKKNDRVDCRRLAKNLENNDYHVCFVPDKELREDRQISRTYGQVQADIKRVCNRIRRMLEYHGLDKDLPAGRWTPAMYIRVKFHLDELGISASLRVSFQIMLRELEQLRELKKELLKQLHRLARSDRYKGDVELLQSAPGIGILTAIRLALEWGNVSRFERKEDFASFLGLTPSDYSSGEQERQGHITKQGNRSVRSWLVECSWVAIRKDPALNEKYRRVLRNCGQKKKAIVAVARKLAMRLRRVLLNREPYALGVIE

SEQ ID NO: 474609 - protein, 274 aa, unidentified
MSIVMGLDQHRAQISAEWIDTITAEVSRARIVPADRAGGRKFLARFRGEGLEVALEATTGWRFVVEELERIDAEVHLAEPAEAAALKGKKKRAKTDRADARHLRELLLIGRLPESWIPPVHILDLRARVRTRHLLSHQRTEWQQRMHAVLYHHGFPQRRNLLSLDSRQWIAGLRLPAAAREQLDIALGIVDALDIRLVPFDSELHAIARKQPGCRALIEQIYGVGALTAVTILAELGDVRRFQNSRDVVRYAGLDTVASNCTSCSGDFGLSDVA

SEQ ID NO: 474610 - protein, 400 aa, unidentified
MNAVGIDVSKGKSMVAIMRPFGEVVATPFEIKHTEIELKKLVCILEKLPGETRIVMEHTGIYWQPIAKALHDAGLWVSVVNALLIHKYGNNSIRKGKTDKLDAVKIANYCLDHWLDLDRFTLIDPIRQELKTCHRQYDQYIKLKVNLKNNLITLLDGTFPGLNTLFKSASRDVDGHEKWIDFAIKFWHRECVCGCTEKSFTNQYRKWCTKAGYRFNEAKAASIYAHAAAQVNTLPMSDAIKRLVILAASQLNTIIETLSVIQNEMLTLASKLPEFPVVMKMFGVGPVLGPQLIAEIGDVRRFHHKQSLVAFAGVDAPPCQSGTFESKNRHISKRGSPRLRKTLFQIMSTIIQHAPADNPVFQFLDRKRQEGKHYYVYMTAAANKFLRIYYGTVRAYLEDT

SEQ ID NO: 474611 - protein, 309 aa, unidentified
MEHFVGIDVSKDRLDVHLRPGGESFAVARDGEALAALVERLRALAPALVVIEATGGYETVVASALGAAHLPLAVVNPRQIRAFARATGRLAKTDRLDAAAIAHFAEAVRPPARPIAEPEALALGELVARRRQVIEMIVAEGNRRRTATQRRVIRAIERHLAVLQTELSELDSDIDGAIRNSPAWQAEADLLKSVPGIGPATLRTLIAELPELGKLDRRKIAALVGVAPINRDSGTLRGRRTIAGGRAAVRTALFMPTIVASRTNPVIAAYYQKLRAAGKTAKQALIACMRKLIVILNAMLRDQKPWQPA

SEQ ID NO: 474612 - protein, 302 aa, unidentified
METYAGIDLHSSNNYIGIINEQNQRLYGKRIPNQLDRVLMALEPFKDTLKGVVVESTYNWYWLVDGLQEHGYKLHLANPAAIKQYEGLKHTDDKWDAFWLAHLKRLDILPEGYIYPKEERPVRDLLRRRLLFVQHSTSHILSLQSMITRNIGLKMSGNAIKKLKEEEVEGMFDSSNLVFMAQNNTATIQFLKKIVKDIEKQVKSQVKLRKEFKMLLTITGIGNILGLTIMLEVGDINRFAEVGNYSSYCRCVKSERLSNGKKKGENNKKNGNKYLSWAYVEAANFAIRHSVKAHSFYQRKKA

SEQ ID NO: 474613 - protein, 465 aa, unidentified
MKAPRRPHGKQPASRPSPLARMNPNAAGVDCGAEAHYVAVPTDRDPAPVRSFKTFTTDLHRLADWLTACGVTTVAMESTGVYWIPLYEILEARGVDVVLVNARHLKNVPGRKTDVVDCQWIQELHSVGLLRGSFRPTAAIAALRAYLRHRETLVQSAATHVQRMQKALAQMNLQLATVISDITGVTGLRILRDIIAGQTAPHALAQHRDARCQASEAEITAALTGHYRPEHVFVLQQNLELFDAYQRQLATCDAAIEAHLHTLVAQVPAPAGPLPPARTRKKPRDNEPRFDIRTPLHQLTGVDLTQIDAIGPYSALRLLAEIGTDMSRWPTEKHFTSWLTLAPHNAISGGRLLSSKTQPSANRAAAILRMAAMSLGRTETALGAFYRRLAYRVGKAKAITATARKLAILVYRTLNDGLVYHDPGAAAYDAYNRQRVIRRLRQRAANLGLSLIDRKTGELLEGAVS

SEQ ID NO: 474614 - protein, 352 aa, unidentified
MSNPTRWVGIDLHRRRSQIAIIDEDGELTLSRRIVNDRDTFKELLGDPDGTTHVALEATYGWEWLADLLLEVGYEVHLAHPLRTQAIAAARVKTDAVDAKTLAHLLRAGLLPEAYIAPPELRDLRELLRHRAVLTRMRTAVKNRVHALLARQGILPEHADLFGKAGREFLVGLELPEGTRRRLDSLMSLIGDFDREITATTREIDARAKTDERVPVLCQIPGIGRYTAMLIIAEVGDVTRFPTARHLCAWAGLAPTVRSSDGKARLGHISHQGSPVLRWALTEAAQKIPTGGGPLRAMFERIAKRRGRNIAKVAVARQILTLCYYGLRDGEIRCLKHQPIDDHDNQELAQAA

SEQ ID NO: 474615 - protein, 382 aa, unidentified
MLADQLDYVVGVDPHRDSHALAVVRVLSGAVVFEATIAASSEGYAEALRLVDAHAAGRRAFAVEGSGSFGAGLTRVLTARGERVLEVGRLRRERRSGGKSDALDAVRAARSVLGQERPATPRAGGERQALRALVAAREGAVNAKCAGLAQLRDLLVTTPEPLRSELRPLTQAPLLRRLASTRPDTRRDPELRGSLLALRSIARRVLQLQAEERELAREIEALIRKLAPQLLDQPGVGPHAAAQLVLSWSHHDRIRSEAAFARLAGTAPIPASSGQTIRYRLDRSGDRKLNRALHLILVTRKRTHPPTRAYIERRIQEGKPDAKQTAASSATSPATSTAYSNTGRLSRLDRHRSIARPADRSHARGSGRFRESRFCPAASIGQ

SEQ ID NO: 474616 - protein, 408 aa, unidentified
MRVIGLDIHRVFAEAVALEDGRLTRLGRIEMRRDRLAAFARSLTHDDHVVIEATGNAAAVAEVLRPHVGRVVIANPQQVRLIAHAQIKTDRIDASVLARLYASGFLPEVWAPDEQTQALRRQVTRRNQLVRQRTRLKNTVQSILHSHLVPPCPTADLFGPKGRAWLAAQVLPADERYAIERHTREYDRLGEDLGVVERDLARNTLADEHAKRLMTIPGIHMVVAVGIMAAIGHIERFASPQQLVSYFGLNPSVHQSGNGPVHRGRITKRGRGHARGMLVEAAWVAARVPGPLRAFFLRIRARRGQHVAAVATARKLAVLTWHMLRRSEDYAWVRPALHARKLRGLELSAGHPAQRGQRGAAYAYNLNTVRQRERRRVEQAEKAYERLVKGWTQYGPKVRTGAAKEERR

SEQ ID NO: 474617 - protein, 471 aa, unidentified
MVAVMIGVDPHKASHTAVAISLSEERLGELRVRACAAQADQLLAWAHAWPERTWAVEGADGVGHLLAQQLLSAGERVVDVQPKLAARVRLLATGDINKNDPNDARSVAVAALRSADVREARRDDHAAVLKVWSKRHRDLGRTRTQVACRLHAVLCELVPGGVSRRITAGQAAHILASIRPSGAVDAARCELAAEFTEDLRGIDARIRETRKKLAIAVRATGTSLTGLFGAGPVTAAVVIGDVRTVSRFASRDHFAAYNGTAPIEVSSGPRKIYRLSRRGNRRLNHAIHMVAVTQIRYRHSEGRAYYDKKLAEGKTPKEALRALKRQVSDAVFACLKADARRAAAAAIKSPGGQPGNGSASSATGSHPAHRLFGQATPGPATHPTTPAGADTPAPLSRAAAISCERAGGSRTGRSPAAQQCRVVKAERRASTGTGHFWVTGRLRLGPAGRGGRTCLVRPWPAIRGASIRRAG

SEQ ID NO: 474618 - protein, 314 aa, unidentified
MEVLHPHCAGLDIHKDTVVACVRHMVDGAVKREVRTFKTTTKDLMALSEWLSAEGCTDVAMEATGIYWKPVWHILADGDFKLMLANAAYVKNVPGRKTDVNDAAWLADLMAHGLIRGSFVPDEPTQEMRNFLRTRKQFVRERTSHVQRIQKTLEDANIKLDSVITDIMGLSGRRMIEALIAGETDPFALAALAHRRIKASQAELEAALRGRVSDHHRFMLRLLLQHIDAIDAAIGQIDQEVDAHVEPFRTAIQILSSIPGISDLSAEVIVSEIGIDMNRFPTEGHLISWAGLCPRNDESAGKRRSTACARAPPG

SEQ ID NO: 474619 - protein, 343 aa, unidentified
MEYYVGLDVSLKQTSICVVDRTGSVVREGVIDSDPEAISVYVRSKAPGAVRIGLETGPTSTWLWTELKRFGLPVICIDARHAKAVLKMQINKNDRNDAIGIARIMQTGWFKEVHVKDIDSHSVRTLLASRALLVKIKRDLENHVRGLLKNLGLVIGRATFNVFAARAEGLIEDRPDLVAAVRPLLEARNAVEQQVSELDRKVMKLARRDAQVQRFMTVPGVGPITALAFKATIDDPARFARSRSVGAYVGLTSRRHASGEIDWSGRISKCGDAMLRSYLFEAAGVLLTRVPKWSPVKSWGTRLAKRNGLRKAKVAVARKLAVILHRMWIDGTKFNWSKKEIAA

SEQ ID NO: 474620 - protein, 345 aa, unidentified
MPIVGGLDIHRKQITFDYLNTVTGEVRRGQIAPADRGHVRAWLARFAGHGDVAFAVEGCAGWRYVAEELAAAGIAAHLGEPADTAALRGRKRHAKTDKTDARHLRALLAEGRLPECWIPPAQILEYRALLETYHDLRRAHTAWVQRIHAVFFHQGAPPLSEGALRTEPGLAALRAAAATHLSAAGQQQVATALDMLAATEAQLGPLRHQLRQAAAHLTGAKVLTARLYGVGPVTALALTCWLAGKDRFSSSRKAVRFTGLDITVHSSDRKGPPGRLSRQGPPMLRWALYEAGKTHARTSAPDHGYYATVTDRKNSKRAALSEARKIVRQACHILTELGDDALTAA

SEQ ID NO: 474621 - protein, 424 aa, unidentified
MPEGRDEQIVREFRSFTTDLNRLADWLEECGIDTVAMESTSVYWIPLYEILEERGFEVILVNARDFKSVPGRKTDVLDCQWLQELHMYGLLRGSFRPDAEIAAVRAYVRHRDMLIKNASRHVQHMQKALSQMNIQLHNVISDVTGATGMRIIRSIIHGNHNPEVLAEARDFRCRASRETIVESLVGNYRPEHVFALRQAVELYDFYQQQMYAVDQEVEKLLQELEETSPEREEIGPARTTRRKGNEPNFDIRTRLHALSGTDLTQIPAIGPYSALKIISEIGTDMTRWPTADNFTSWATLAPRNKITGGRLISSRTRSSANRLAEVLRMAAMSIGKTDTYLGAFYRRKAARIGKAKAITATARKLAVIIYHMIARGVPFQDPGLQTHDEQHRKRVLKNLKRRAKSLGFQVIPDPPLNDMGEAVT

SEQ ID NO: 474622 - protein, 334 aa, unidentified
MDTVNTLGIDLAKSVFSLHGVDEKGQVVLRRTVRRDQLVKVVAGIAPCLIGMEACSGAHEWGRRFQELGHTVRLMAPKFVVPYRKSGKNDGNDAEAICEAVSRPSMRFVPVKSAEQQALLAMHRVRQGFVVERTATINRLRGLMSEFGVVLPLRSIMVRRQGAAAAENLPELARRAIGDLLDQLRVLDERIHGYDREIEAQAKLCEPAQRLMKIRGIGPTTALAIVATVGNAREFKNGRQFAAWIGLVPGQYSTGGKTRLGHISKRGDAYLRNLLVQGARSVLHTAATHRDPVSRWALELQPRRGYYRTLVAIANKNARIVWALLAKNESLRTV

SEQ ID NO: 474623 - protein, 351 aa, unidentified
MPRRSTVRAVATIGIDMGKNTLHMVGLDSCGAIVLREKVSRGRIASRLANLPPCLIGIEAGMATHYVARELAALGHDVKQVPPAYAKPFRQGHKNDFRDALAVAEAVQRPTTRFVPPKSNEQLDLQALHRVRSRLVSQRTAVINQIRGFLLERGIIVRQGLRFLRQLLPDILAKRTDVLSPRMVRIVSDLAGDWRQLDDRIEIVTDEIETLAKSDDSCRRLMTVPGIGPIISSAMVAAIGNGSAFSRGRDYSAWLGLVPKQMSTGDRTILGRISKRGNSYLRMLFIQAARVILLRPANWPKHGFGAWLVRAIQRLHPNVLAAALANKLARIAWTVLAQERSYEARVTKAEA

SEQ ID NO: 474624 - protein, 416 aa, unidentified
MKGTGKAREIQDRYIGLDIHKEYVLAGGQNAAQEWVMQPRRISMERFQEWASANLRKGDAVVLETTTNVWDLYDIIAPLVSRTVVAHAGGVRQIAEARVKTDKEDVKRLIRLLIADIVPEVWVPPVEVRELRGMISYRNRLVKTSTMIRNRLQSLLHRHNLILPKGGLTDKAWWEAQKISALEKIQIRQELSMLEEIDQHKAEVDAELGRQSLGETWGQQAMRLLQLPGFGVVISMTVMSAIGDITRFESAKKLVGYAGLGAGVHDSGKEHIEKRITKSGRKELRWALVEAAWRAIRISPYWKEQYEKYLHRMRKPNLAIVAIARKLLVAVWQVMTKEETDIHASEEDLAYKMLVLAWDLGETERMGLTYKQFAKYGLMKLGIETDITRFVRRNVPRRLAPREEVLARMTELGLTI

SEQ ID NO: 474625 - protein, 396 aa, unidentified
MLSHLSFTLNQDQPGGRLNVGIDMGKNKWVMDVLDTADGRHHQHLFTGPSCLADAVEEVRSLVACGREVDVIYEAGRNGFTPARLLQQLGARVTVVPVNKLEVVNTGKKAKSDRIDARGLSERDARAEGFPSVWVPPVEQECRRRDLRERDRLQEDIGRNNNRILAILERWPVPSEGRHLPARLWRQRLKQWGEGESGRPAVPETDLACIANLVAELQVLEKNLAGWEKRTAAQLKEERKAAKKAGQVHAVDQLMEYKGIGERIGLGLVWYVGDFERFANGKKFASYVGLVPVPWASGGTSKCQGISKSGNPELRRLLIELAWLWSRHQPDSPITRKWASALARKGRSRRTAIVAMARQLAVALFRLLKYGEALPGAVKNKPVQVPAATPDSPLVP

SEQ ID NO: 474626 - protein, 419 aa, unidentified
MRGPLWAGLDVGVETTAICVINAAGSTVHEATCPTRLKSVHRELACLRRRKSARVGLEAATGTMLARGLRNLGYQVDLYEQRQLSKFLRLRRNKTDAGDALGIAEAGRLGAATISKVHIKNLDCQCLSSRLTIRRHLIRQRVALVNLLGRQLEVFGGRLQRRNLGSLRRNVEREIGSIFGRAPNEFVAELRSLVAHCEILIDYQRKVDSELKRVASGNQICRRLMEIPGVGPLCALTFYAVVSEPERFARSADIGPYLGLTPRLNQSGLSSKTGRISKMGNRAARTLLVSSSNAFMRWATPDSDLRLWAAKVESRRGTMKARIALARKLSIVMLAIWKNGTSYRDRLMPVNDDADQRSVGLDLVQCEAEKHDLPSKTSPADRAGSGAACGFDGLSDRLGDRDESAGRRHVPELVREQLT

SEQ ID NO: 474627 - protein, 309 aa, unidentified
MNPDQKIYCGVDVSKNYLDAFTDGKTVRVANTVKGICELMKQAGDVHYVFESTGGYERPAAWYLLAAGRIVSVVNPGRVREYAKSIGQIAKTDRIDAQVITRFAELVHPREAELPSADQRKLAVLVERRQQLIDMLVAEGNRLDTAGEPYLHKMIQKHRQWLEKQIQQIEQAIEETINGNAEMKQKAVRIQSIKGLGRVSAATLLAVLPEIGNLSRKEVAALAGVAPYNRDSGTFRGRRHICGGRKRLRACLYMAAVCASRSNPHLKVFYDRLVEENHCPKKVALTAVMRKLLIAANSAVKNPEFLVVV

SEQ ID NO: 474628 - protein, 355 aa, unidentified
MNSEKYIGLDVHQATIVVAVTDSTGKLVMESILETEAATILQFFAGLRGNLSVTFEEGTWSAWLYDLLNPHVEKLVVCNPRKNALLKDGNKSDRIDARKLAELLRGNQLKPVYHGENGVRMLRELSRSYLAIVKDLSRVMNRLKAVYRSWAIPCAGRDVYYRRHRAQWLDKIREAGVRRRAERLYEQLDMLQHLRQQARRELLAESRKHAITARLRQIPYLGPIRSALAVALMQTPHRFRSKRQLWAYSGLALETRISAEYRLVEGQVRRSKKLLSIRGLNKDHNHDLKALFKGAATMASVRPGPFQDFYQAALAKGIKPTMARLTLARKIAAITLTLWKKGESFDAEKLKSQAA

SEQ ID NO: 474629 - protein, 387 aa, unidentified
MSQVDDLSRSLTAFDQDSTLIAVIEMSFKSWLVAGIVPGVGRAPLKKLEADEAGVLRLLHRWRDEATKAGRHVTRLVVAFEAGRDGFWLARWLRTRGVEAHVIHAASVAVSREHRRAKTDRLDTEMLKRAFLGWLRGEAEHCQMVAVPTLAEEDARRPNRERDCLVRERTRIVNRMKGALVRLGIRGFNPKLRKAAERLDDLVTPQGEVLPPNTLAELRRDLARLALLRAQIEAIEAARLERLEQQASSEGPHAMVRLIAQVIGVGIETADMLVHEVLSRNLRDQKALARYAGLTGSPDESGSRRRERGLARAGNGRVRRGMIQLAWRFLRFQGDSTLARWYAARTDAAPNTRKTMIVALARKLLIALWRFATTGMIPDGVALRTAA

SEQ ID NO: 474630 - protein, 592 aa, unidentified
MTSVQSTTVAAIGVGIDASRYGHHVTFLRDDLQPATDPIAITETREGYNQLLSTLQDLKRRHPHAIFQIRLDEASLYAVNLRTFLYTLPFEKTVSIGDCVRNKNYRMVHFPKRKSDSVDSLSLARFAVLEQPTSAERVPAELCALRDIASRLEAQAREVTRHLNQLHNVLSRVFPEFDTVVRKLNAKSILELLKKYPTPAQIARARLASIKAIPHLRVKTACRLHETAKQTIASLKGPIAETMVRTLVDQVRYARKLKCQYEQLLVETYRSLPTTNYLDSIPGIGEVTAAVLTAKIISIERFDRAEQLVGYFGIFPQEKSSGIGPDGSPYPRRNARMSKKGNDLVRHYLFTASLSAAQYNPAARALYRRLRARGTTGKTAMGHLMRKLLHLVFAVWKSDKPFDPQHYPWDQTPENKVAAGHKQEPSPDQRVVTATPTETLSRPTSDVNMSPSGIDFQAVRSQTSMQQVLELLDFDPVETRGDQLRGACPIHGSTSPRSRSFSANLAKNTYRCFKCQSQGNHLDLWAAATHQKLYDAATDLCMRVHIEPPSISVVQHRPLTGEEEPVSEPVTATRTSDREPASSPLTPIDKSS

SEQ ID NO: 474631 - protein, 429 aa, unidentified
MSAEKPLELRVSVDVGYRRHSVAMGLSSGEVLEEFEIDHRIEGFQEFFSRIEKHRKEKNCAVAIAMEGYNGHARPLDSLVRERGYRLYNLNNLKFARFKEIFPGAAKSDRIDARKGLELFQLSDHLPLAKEVLQEVRGTPPENEVLKRLTRRRRRLVNERVRVVNNLQADLQAVCPGLLEITGEASNQWFLNFLLSADTLPQLARLKRSTLLKIPSVGVKSAAIIEGWQKRAHFSQEVEWVGEMIQEDAKRCLELDEKIKRLETQIAEIAKDSKIAKTLRSIPGFGAVCTSELAGEIGTIERFGSEGSLSLYLGMSTLENSSGKYQGTKAPKHVNTRAKAAMMIGVDRHRKYVPQSQKYYEKKRSEGKKHNQAIRALGRHLSRIIYKMLKEERDYEIRPEKGNTKTQVSPRSLVKTQIRRPKISIKENK

SEQ ID NO: 474632 - protein, 312 aa, unidentified
MDVLHTAPRRCFGIDVAKDNLVVSDGGLSFAVTNDRRSIRMFLKQKQPDFVICEATGGYELLLLEECLKAGLACHRADIMKLKAYIRSMGTLGKSDAIDARHMAAYGQERWQSLPLWQAPDPDEAQLQALVRRRADLVALRVTEHNRSKAVGAKAVALSYKAMLSAIQRQIDGIERQISALIAKSARLRRRIQICTTVSGVGLLSAASLLALIPELGTLDRRQAAALAGTAPHPSESGSTRGRRRQRGGRPQVKKTLFMPAMCAAQGKGQFASFYRRLIENRKPPIVAIAATMRKIVITVNARLRDDQIQQS

SEQ ID NO: 474633 - protein, 376 aa, unidentified
MGTPSAQTLDDVGVRENFQGLEVVPLMTMVGGLDVHRAQITFDYVDDDGLVHWGQIRPATRKTLRGWLAEHCPDGDAEFALEGCTGWRYVSEELAGAGVGVHLGDPAEIAVLRGPKKRAKTDRADARLLRTLLLQGRFPESWIAPAHVLEIRTLGRRYCTLMDERRAWQQRIHAQLFHQGCPPVRALLSVTGRAALAGAELSAVGGQYVDTALGRIDELSTEIEPLRAQLVNFARHQTGCQALQRHYGIGWLCAAIIWAEIGDARRFSSSDQLVRFAGLDVTVYSSDGKRSPGHLSRQGSPELRWAAFEAAKCAARRGSPDYGYYRKLAAKRDGHNGKNPTLAVERKILRRCHHTLRELGDAAVALPVAEPQEVAA

SEQ ID NO: 474634 - protein, 338 aa, unidentified
MKVQILGIDLAKNVFQLHGVDRQGRATLTRRLRRDQLMAVLGELEPCLIGIEASTGAFYWQRQFEKLGHTVRIMAPQYVKPFVRRQKNDTNDAEAICTAVQQPNMRFVPKKTLEQQDIQALHRARQRLVNHRTALISQMRGLLLDRGIAIAVSATRARRLIPKILAAPSDELTELMREIVSSLYAFMLQIDDRIRAFDRKIDAIFKASDVCQKIAKIRGIGPKTATAMIAAIGDGSDFKNGRHLAAWLGLVPRQHSSGDRRVMMGITKRGSQHLRTLLVHGARAVVRTAVRKTDSRSMWVNELRERRGYNRATVAVANKNARVIWAVLTSGEPYRAAA

SEQ ID NO: 474635 - protein, 538 aa, unidentified
MKRSKGLALWALPPLVLAALALPGSLRAQGNFVYTNNDVNGPNTVSGFSVASNGTLTLIPGSPFATGGTGGGFRFIASNDVTVSTAGNFLFASNGGSNDVSVFSINASTGTLSLVAGSPFPTGGSAVLGISLSTTPEQFVGYAVNRVETQRRATSERSRFMKRVRFVGLDVHAETIAVAVAETDGEVRSLGVIPNRVESIRKLVKKLGPAEQLRVCYEAGPTGYVLYWQLTALGAPCEVVAPTLVPVKSGERVKTDRRDAVKLARSYRSGDLTPVWVPDAAHEALRDLVRAREAAKKDQLRARNRLSKFLLRHGKRPPAGVKSSWTGNYLLWIKQEVHFEQLAQEFTLLDYWHEVEHAAGRVERLDRALEEAVKSAPPPMRAVIEGLQALRGVAQVSAVTIVAELGQISRFARPRQLMGYSGAVSSEDSSGERVRRGAITKTGNAHLRRIVMEAAWSYRHRPAVSRALRQRQEVVCEEVKEIAWKAQHRLHARYRKLTARGKNKGQVITAIGRELLGFIWAIGVQVEGAQKEPLQRAA

SEQ ID NO: 474636 - protein, 351 aa, unidentified
MGKIITDFSSVTTVGLDLAKHVFQVHCVDASGRVVVAKSVRRNKLLEFFASLPSCLVGLEACGSAHHWARELVKLGHDARLMPPAYVKAYVRRQKNDAADAAAICEAVTRPSMRFVPLRSLENQAALMHHRVREMLVAQRTQVLNAVRGHLAEIGVIAAQGPKNARDLAKLITVDEATLPWLVRAALAPLVRQLDRLDEEIGLADDAIKAMAKADERARSLMSIPGIGPVTASAIAASVQDVSIFSGSREFSAYLGLTPRQNSSGGKERLGRVSKMGNRYLRKLLVVGAHAVLYNRKGHDDALRTWACKLMETKPFKLVAVALANKLARIAFAVMRDQTPYSAKPFSPAQA

SEQ ID NO: 474637 - protein, 334 aa, unidentified
MSDDVLIAVDPHKASNTAAVLDPVSKTVIESARFASTIDGYARLRAFTARWSQRRWAVEGCHGAGRSLAQRLAAAGEAVLDVPAKLAARVRACSRGHGRKTGKNDAVSAGLAALDGTGVVPVATDGATVSLRLLCDRREELTALRTQAVCRLHRLLAELTPGGMRRELTANKAQALLARIRPAGDVAAIRVQIARDHLAGICALDARITYLGGQIAALVTASGTGLTGLFGVGPVIAGRLLAETGDVARFATKDAFASYNGTAPTGASSGEQVRHRLSRAGNRRTSHALHMMAVTQIRYPNTPGRQYYERKRREGKTPKEALRCLKRRLSDLAC

SEQ ID NO: 474638 - protein, 343 aa, unidentified
MGVYAALDVSQELTAICLIDDGGALLAEGKVATCPDAIATWLGRWTGALEKVGMETGPLAVWLWNTLTAKGLPVVCLDARHASAALKMMPNKTDRHDARGLAQIVRTGWFKTVRIKSHEAYVVRALLTARDALVAIRVRLENEVRGLLKTFGVLFGKRVGGFMRRAEEIIAGELAVAPELRPIFEALVAARCAILQRIRALDAQVRASARRSRTVQLFMSAPGVGPITALAVAAAFDDAGRFRSSASAGAYLGLTPRRYESGEVSRNGRISKRGDRMARTHLYEAANAIMIRKLGASRLRDWARAIAERTGPRKAKVALARKLAVILHAMWRTDTPFRDAATA

SEQ ID NO: 474639 - protein, 366 aa, unidentified
MKKNSTVATNRNEIFKEPKLTIGLDLGDRSSHYCILDEAGKVILEHNLPTTAKGIHQVFSKIPRSRIALETGTHSPWVSRQLSQMGHEVIVAHARNVRLIGESSRKDDRLDARTLARLARIDPGLLGPVRHRSAKAQIHLTVIRARAALVGTRTALVNAARGLTKSYGERLRKCGTEQMNREIAKGLSQELRDALDPLLKEIESLNERIAEYDRRIEQIAKEVHPEVARLKQVKGVGTLIALTYVLTLDDPHRFRRSRDAGCFLGLRPGRRNSGQSEPQLHISKEGDRYLRTLMVQGAHYILGPFGQDSDLRRWGLKLAERGGKNAKKRAVVAVARKLAVLLHKLWVSGEVYEPLRNNHQVVSAVA

SEQ ID NO: 474640 - protein, 340 aa, unidentified
MTHATIIGIDLAKNVFHAHGAAHDGTPIFRKKLSRNQVLPFLSEQPHCLVAMEASATAHDWAREIGKLGHATRLVPPQYVKPYVKRQKNDSADAEAITEAVSRRNMRFVEVKTEEQQVSAMAYRTRQMFIGQRTQTINALRSHLSEHGVIAPKRKTGIKKLIAMIEDETAVISEKVRDIARVYVDHIEQLTAKISDATEAMRAAAKVSEVAKRLQTMPGIGLQTAMAIEAFAPDMACFKRGRDFSAWLGLVPKQHSTGGKSRLGKVSKMGQADIRSQLIRGAMSVITAATRFGIKKGAWLERLLGRKPKLVAAVTLANRMARAVWAMLTRNEGYQNPEAA

SEQ ID NO: 474641 - protein, 388 aa, unidentified
MQVVADRAEAPTAIQTDLRAIFVSLELSRSTWLITSLSPGGGEKMSKHSVQAGDIAGLLRRFAQLKEKARARTGRDFPVITIQEAGLDGFWIHRVLQSEGIESHVVDAASILTSRRRRRAKTDKIDGETLVRTLLAYKRGEPRVCSMVKSPTPEEEDRRRICRERRALVAERVQHTNRIKGLLFAQGAFDYEPLKRNRRAHLEDLKTGDGRPLPVNLKAQISRELDRLEVVLQQLQTVDAERDALLEPASEASPAPAAMLSQLKGIGPEFATILYTEGLFRGFDNRRQVAAYAGLAPTPWQSGSVDHEQGVSKAGNPRLRTTMIQLAWLWLRHQPDSALSRWFQDRVQRNGGRMRKTTIVALARKLLVALWKYATSGVVIEGAVLKAA

SEQ ID NO: 474642 - protein, 451 aa, unidentified
MAKTKKRKHRKLDRSLPAMRPNAGGIDIGATEIFVAVPADRDTGSVRSFPTFTEDLHALADWLQQCRVDTVAMESTGVYWIPLFQILEARNIEVHLVNAQHVHHVPGRKSDVLDCQWLQYLHSVGLLRASFRPEQAVCEIRSLMRHRENLVQMACVHVQHMHKSLDQMNLQIHHVISDITGVTGLAIVDAIVAGITDPKELAKLRDHRIKASIATVKKSLVGDYRPEHIFTLKQSVTAYRQSQQLIADCDREIQQRVQTFETKDDHPSPANDSSSATTPPPSSFDLRNHLKRIFGVDLTLIPGFDSLRVETIFSETGADLSSKFPNDDRFCSWVNLCPKDGTSAGRRIRGPKMKTKNRVNQEFRMAAQCLHNNKSYLGDYYRSQRARYGALKAIKNTAHKLARIFYHVVTTRQPYDETVFAKLEARNQKRRLHNLQTRARQMGYTLVEAHA

SEQ ID NO: 474643 - protein, 391 aa, unidentified
MHASNICTQMHASNICTPIADYIGTIFVAIELSQKTWLAVVRSPDRDRISGHKLEGGNDAGLLALIESVRARAARALGSAPAVVSCYEAGYDGFWLHRRLVAAGITNFVFDPSSIAVEQRRRRAKTDRLDGELLLRTLMAHCRGEPRVVRIVRVPSREQEDVRRGSRERERLIKEQTGHSNRIKALLRTLGLAAGNPRRGDWLRWLAEQRDWEGRAVPPHYLAELAREHARLMLVVAQLGDLSQAPEATDGPAAARMAKQKTQLRQLKSLGLASAGTLVDEALYKDFDNRRQVGSYIGLAPSPWRSGATSREQGISKAGNRRARRQAIELAWLWLRHQPDSALSRWFQQRTAGASARMKRIAIVALARKLMVALWRYLTTGLVPEGAVVKA

SEQ ID NO: 474644 - protein, 390 aa, unidentified
MHVVAHQPEAPGAIRSDLGAIFVSLELSRSTWLITSLSPCAGEKMSKHGVAAGDIGALLARFSEFKQKTFARTGKSFPIIVIQEAGLDGFWIHRVLQSEGIESHVVDPASIATSRRRRRAKTDRIDGEALLRALLAYKRGEPRVCAMVKAPTPEEEDRRRLSRERKTLIGERVEHVNRIKGLLFCQGVSDYEPLRRNRRQRLDELKTGDGRALPDHLKAQISRELDRLELLLEQIKAVEAGQNTLFAAAKAEAPTPAPVTMLLDIKGIGPEFAAILWMEAFFRSFANRKQIAAYAGLAPTPWQSGAVNREQGVSKSGNPRLRTTLIQLAWLWLRHQPQSALALWFKERVTRNGGRFKKTTIVALARKLLVALWKYVTAGIVIEGAVMKAA

SEQ ID NO: 474645 - protein, 471 aa, unidentified
MAKTTALEAIKVPSCGLDVHKDIIEACVIDEEGEKHHMATDTMRKSLYALRDWILSFGCLHVLMESTSVYWIPIYEILEDVAGMDVGVGNAHKMRQVPGRPKNDKDDADWIARLCMLGLILKSFLVGRKFRELREYTRYHRKLVQERARQINRIEKLLQINGFKLSSVLSEITGASGMRLLRKLHEKGSVTLLDVQAALHKRVKKTPEEIERAINGQMKLTSRLLLGKMLSKLESCDKETAEIYQMIVDNTGEYRPQIKQLDGIPGLGELSVTYVIAEISTDVSSFKTAGHITAWAGLAPKDNRSAGKLRSSKTQKANIYVKSILIECAWAAVKARNTRLSNWYWSNVSRLGRKKAITAVARKLLVYIYAMLKSGELYDDSLDVADTEKRKAEKLDSARKIVEHRSKITNTQKHCEKTKQDAATLATMSTSQPSPNTVHSSGSDEQLIPPKKRGRPHKVPGINRQAEGQKA

SEQ ID NO: 474646 - protein, 381 aa, unidentified
MSIVALDIASKSATFCVLGTQGVQSQGSLAFDHDGFSSFIASSQVSDASLFVMESTGGYHLPLYHFLLNHGRKVRIINPLLIKQFHDGQTLRRTKTDALDAVTIARYAQSHMSALEEERMQLDSESKMLARRRARNAEDLAKAKTILKSDLSVAFPELLRFNVFIKTLLEFLSIYGCAKDVLAATEEQLQQALDVQKGRKSDVVTVQKIQELARISIGVSYRAAMVRDSAKAVLACQQRDEELTKALVELENALHKRQMEILTSIPGIGEVTASHFLSEIPDITQFATYQKLIAFAGTDPGIYESGNTSKALKISKRGNPLLRKYLYLMADSCMRHNVVFNAYYHKKREEGFPHRKAMVATMNKLIRTLHALLTKDETYSI

SEQ ID NO: 474647 - protein, 327 aa, unidentified
MTIERTAALGIDISKKDFDVALLRSNKFKNKKFVNNAKGFSALVQWLESLKVATTDVHACMEATGVYGEPLATFLHDHGFFVSVVNGARVKGFAQSELSRTKTDKKDACVIARFCLALTPDQWVPAAREVRELKALYRRLEALQEMLHQEENRVAVADEILLPEIQGHITDLRLRIDRTKKAIDDHIDNYPDLKKQRSLLESIPGIGSTTSAMLLCAFSNIEDFSSAKKMAAFCGLTPRQRQSGSSISGRSKLSKIGSSRLRKSLFFPAIVAMQYNPIIISMKKRLLKAGKCKMLIVGAAMRKLVHIIYGVLKTRTPFNENLSGATA

SEQ ID NO: 474648 - protein, 483 aa, unidentified
MKPKPQKKNKQATEHPTQHHWHEMNRKQRRETMRKIQSEDLSLEVVHPDAAGIDIGNGSHYVAVPPSRDSQPVRRFGCTTAELKAIADWLKQCGIRTVAMQSTSVYWVAVYDILEQAGLEVYLVNARDTKNLPGRKSDVQESQWLMKLHTYGLLRNSFRPSQEIRTMRTYWRQRNDLVQSAGRHIQRMQKALTQMNIQLANVLSDVSGVTGQVIIKAILAGERNPHRLAEFRDPRVEASEEQIAQSLEGNWQPDLLFVLKQEQDGYEFCHKQMAECDRQLDQYLEQREDRSHGASLPEEKRKDRLKKKKGNKPQFDLRLGLFRLTGTDLTRIDSIDVMTATTVISEAGWDMSKWETENHFVSWLRLCPDNHISGDKVIGKGRLPTNNPISIALKMAASTLRLSKTYLGAQFRRLRTRLGAPIAIKAMAAKLARLVYRMLRYGIKYIDQGAPFYEAQHRHLQINQLKSKAASLGYRVTPIPAAA

SEQ ID NO: 474649 - protein, 326 aa, unidentified
MDDAGKIVREVKVASEPEALLAVLKNPAYRFKRIGLEAGPLSQWLFSALAEAGLAVVCVETRHMQAMLKAQINKTDRNDARGIAQMMRVGIYRPVHVKTLRSQKLRMLLTHRKLLQSKAIAIENDLRGTLRNFGLKVGIVGRVRFEARIKELVENLPDLAVLVEPLLIVRRTLREQTIVLHRRLLAIVREDEVCRRLMTIPGVGPVVALTYRATVDVPARFRKSKAVGAVFGLTCSKYQSGEIDRTGRISRCGDEMMRVMLYEAAQSMLRSKKWSWLKAWAMQIARRRGMKKAIVALARRLAVIMHRIWVDGAEFRWTREQATAAA

SEQ ID NO: 474650 - protein, 351 aa, unidentified
MTRKTDAVVASTIGIDTGKNTLHLIGLDDKGAIVLREKLARGRIAARLANVPKCLIGIEAGMATHCVARELIALGHEVKQVPPVYARPFRQGHKNDFRDAHAVAEAVQRPSTRCVPVKTDDQLDLQALHRVRSRLISERTAVTNQISGFLLEHGVPVRQGLRFLRQQLPDILAKRIDVLSSRIIRIIEDLSGDWRRLDERIENVTEEIEELAHGTEGCRQLMTVPGIGPIIASAMVAAIGSGTAFARGRDFAAWLGLVPKQMSTGDRTILGRISKRGNRYLRTLFMQGARVILLRPANWAKHSFGPWLAAAAKRLHHNVLATAVANKLARIAWTVLVQARSYETRVTSEMA

SEQ ID NO: 474651 - protein, 331 aa, unidentified
MHWIGIDVSKSKLDMALTNQHGIVLENKEVKNTSTGITKQLERWRKKHGLVHDQCLVCLEPTGHYSDLAVTTLVDLKVPTWLAMPLDIKRSMGLARGKNDRIDAERIAHYARRHHERSRLATTATVDALELKQLLAFRDRLAEDQRRQGVYISEVHKYAPATSGKLFDDYSKQRIEEIKLAKKQVDRSIQEFINNRPALRKLNILLRSVIGIGPVVAAHLLATTEGFTKFITPRQLACHCGVAPHSYTSGTSINGRSRVSPFANKKLKSLLHLAVLGMLNYPNELHDYYDRKKEDGKHALLVLNNMKRKLIDRICAVIDRGTPFVAVPSPR

SEQ ID NO: 474652 - protein, 391 aa, unidentified
MSSEDRVVIGMDPHKRSVTIEVMAGDETVHGGGRFATDRVGYQALLRYARRWPDRVWAIEGCGGIGHHVAMRLLADDEEVVDVPPKLSARTRVFAAGQGRKTDATDAHSVALVGTRMAGLRPVVNDEQLAVLRILVDRRRSLGEDHTRMVAQLHQLLLELIPGGAKKDLSAAQAKALLAKVRPRDVVGKTRRRVAAELVSDLERIYARKKAANKELTTLLAETGTSLTDLAGIGPSGAARLLVEIGDITRFPNRDHFASWNGTAPIDASSGDQVRHRLSRAGNRQINRVLHIMATVQLRNPGPGRTYFDRRKAEGKTSMEAMRALKRRLSDIVYRHLVDDAIKHSRTSPGGQWGNDSDSSATGSHPHTGSSDQPLPGPVTTKPRTPLPTAS

SEQ ID NO: 474653 - protein, 411 aa, unidentified
MRRVIGIDVHRTFGEVVFWENGRLRHAGRIDMTRTALQGFGKTLLASDEVVVEATANSMAVSRVLAPFVARVIIANPLQVKAIAQAHVKTDKIDAGTLASLQAAGYLPQIWTPDAATERKRRLVARRYQVVRHRTRIKNEVHSILHAHLIPRCPHADLFNARGRAWLTTQQLPDDERAAIDRHVRELDRLAEDLALLDREIAQDAIDDPAINRLMTITGVNLAVAAGIVAAIGDIGRFNSPQKLVSYFGLNPRVRQSGLGVAHHGRISKIGRSHARAMLVEAAWAAAKAPGPLHAFFVRIRARRGHQIAAVALARKLTVLCWHLLTKGEDYLWARPALVANKTRAMQLQARHPQQKGSRRGPAYAYNIKALRDREMLIAAQAEQSYERFVSQWKARRPKPGARAPQSGRTK

SEQ ID NO: 474654 - protein, 346 aa, unidentified
MEYYVGIDVSLELSSVCVVDGRGKIVKEAKVASEPEALVYFLKELGFAVDRIGFEAGPLSQWLHAGLTQAGFETVLLETRHVKAALSAMTVKTDRKDACGLAQLLRMGWFQQVHAKSIGSQEIRALLVARKQLLGRLLDVELSIRGILRGFGLKVGQVTRKTFEARIRELVTGHTTLERIAEAMLPARATLKAQYEKLHKAVLAIVREDVVCRRLMTVPGVGPLVAVTFKSAVDDPSRIAKSKAVGALFGLTPRKYQSGEKDVTGGITRTGDEMVRTALYEAANVLLSRITRFSKLKRWGMDVAKRRGSKRAKVALARKIGVILHRMWIDGTTYRWAEAKPIAAQG

SEQ ID NO: 474655 - protein, 351 aa, unidentified
MLIIGCDYHPSIQQIAFVDLETGETGERQLLHKDGEAERFYRELKLRGISVRVGIEATGHARWFERLLAELGFELWIGDPAQIKAARVRKQKTDRQDAQLLLKLLVEERFPRIWIPSPENRDVRQLLWHRHRLVQMRTRVMNQLQAVAMNEGVRRKKALWSKSGRAQLESFVLSPWASRRRQDLLEVLDRLNPTIDELSTAVEQEAKKRPEVLRLMTHPGVGALTGLAFVLIIGSAERFACGKQIGSYLGLIPCEDSSANRQRLGHISKQGNTLLRFLLVEAAQAAVRGDAEWRRKFVHLAMRRDPRIAKVAMARKLAVSLFWMWRKEWNYEQVIKFGSHAGQSDYVHGVK

SEQ ID NO: 474656 - protein, 401 aa, unidentified
MTSGFGVFLGLDVGKGEHHAVGLDPAGKRLHDGPLPNSEPRLRALFDKLAAHGPLLVVVDQPATIGALPVAVARAAGHTVAYLPGLAMRRIADLYPGRAKTDARDAFVIADAARSLPHTLRSVDVGDDALAELDVLVGFDDDLAGEATRIANRIRGLLTGVHPALERAIGSRISHPAVLEILSRCGGPTGIRAAGRRKLSAIAAAHAPRMGEKLVAAILAALEEQTVTVPGTTAADTVLPRLADSLKTVLLQRKQVAAEVEGILDAHPLAGVLTSMPGIGVRTAARILLEIGDATGFKTSGHLAAYAGIAPVTRSSGSSIKGEHPARTGNRKLKRAFFLAAFAALADPTSRAYYQRKRDQGKKYNAALICLARRRCDVLFAMLRTKTHYRHPDRIPTETAA

SEQ ID NO: 474657 - protein, 443 aa, unidentified
MSRKQRKHIRGKRGEKFLQIVRGIDRARILCVSLDISKYFHLVMMHNAYGEIVTPSFEIDIFRSGFEHLCRVIDETSARIGAKVVLIGMEPTGHYFENIARHLHARYEHVYLINSLAVKENRAQKMMHYQKTDEEDAATIGDLLCRGEGTPYRPNKGIYLEMQHIDRVRVAKLKMRSALKNQIIGHLDRIFPGMIITNKEAQKRRRPLFTTDFWSCKMAQDLVHVHPDPRRLSQMSPQELIDAFRAPGYRMGPHWATRIIAFAQQTLHPDPEIIAVRSQLLQRDLALLQQVKGCIAELEDRLLASLAQTPGYIWSRLKGVSPIQAASLMAAMGDPSHYDYAAQVFRRSGLVSGRNDSGTRQKKGKGKRVTKVGDVYLRRALLNLVETLSLHQPSLRTYRQRLKATKPHPGVARVATARKAVGILFAIQRDQRIVGLLVKPQEE

SEQ ID NO: 474658 - protein, 345 aa, unidentified
MIIGCDFHPSWQQVSWVDTETGETGEAKLVHATGEAERFYRGMPVPSSIGMEATGNSQWFVELVEDLGHALWIGDAAQIRASYVRQQKTDKRDAGHIRKLVEEGRFPKLWMPERDQRDQRQLVIHRHKLVQIRSRVKNELQHLSLNKGMQKQNKLWSVAGQKALRALPLQPWAARRREDLLGLLGTLDQQIDRLDAAVKAAAEQNAQARLLMTQPGVGPVTSLAFVLTLGDVSRFQRGKQVASYLGLIPREHSSGGRQTLGSISKQGNRLLRSLLVEAAQTAVRYDPGMKKEYLHRCHQKAKGVAKVAAARKLAVQLYWMLRTKTSYPEIVRIESSPRVPLVGAS

SEQ ID NO: 474659 - protein, 352 aa, unidentified
MIIIGVDFHAEFQQIAFVDSNTGEYQDKRLGHREEAEQFYRGLAAAGQPVRVGMEASGQARWFERLLSELQFELWIGDAAEIQSKRVRKQKTDRQDAQLILKLMVKDDFPQIWVPSGENRDLRQLLWHRLVQARTRIMNQLQAMALNEGLRCKKRLWRERGRQQLEAYPLAAWASRRRRDLLALLDRLNPTIAELSQAVEQEAEKSPAAQRLMTHPGVGALTALAFVLIIGQAERFQCGKQIASYLGLVPLEKSSGNRRRLGHITKRGSSMVRFLLVEAAQVTVRSVPEWRRKYVHLTMRRGRKIAKVAMARRLAVALYWMWRKGENYEPCKSPVRTRVQLGTGDGVQSNTE

SEQ ID NO: 474660 - protein, 292 aa, unidentified
MLIIGCDFHPKFQQISMMDTTTEETKKLRLEHTAEAAAFYRSLRGQTVRVGLEATGSYAWFRRLLQECGHQLWLGDPAAIHAANPRKQRNDKRDADCMLTLLHENRFPQVWMRPAEAEDLRQLLVHRVRMVQIRTKLKHQLDSMAKNEGLITGHAWRPHTRTQLEALSLPPGYDRRRRDLLDALHYFDQKIQPLTQAVEEAAQGDAQAALLMTHPWVGPNLSLAFVVIVGPWQRFANGRHLGSYLGLIPCEDTSADKRRLGHITKQGNVLLRWLLTEAAQHVHTCEPAWHRL

SEQ ID NO: 474661 - protein, 340 aa, unidentified
MQHVAIDLGGKESQLCVRASDGQILLEQKVATRTLGIFFKRQPHSRIVLETCAEAFHIADLALSSAHEVRVVPATLVRSLGVGSRGIKTDRRDAQVLSEVSCRIDLPSVHVPSDVARQRRTLCGMRAALVDSRTALTNTVRGWSRTQLFKVAPTTTAHFPKRMRDAALALPEGLPEAVDRLLKALDSLNEQIARADQELLELAEGDPICKRLMSVPGVGPVTSMRFVAAIDDVSRFATAHAVESYLGLTPGENSSSDRKQRTGITKAGPAAVRGALVQAAWNVRRTRPKDPIVVWAAGIEQRRGKFVATVAVARKLAGILFAIWRDGSVYSPQRGGQADI

SEQ ID NO: 474662 - protein, 354 aa, unidentified
MDIKYIGMDVHKETISIAVMKDDGRLVMESIIETKASTILQFIHGVRGDLHMTFEEGTCAAWLYDLLKPHVTELVVCDPRKNAVMKQGNKSDKIDARKLADLLRGGYLRSVYHGENGLRILKELARSYLTISKDLTRVMNRVKALYRSWGIPCGGQQVYAPRHRAEWLNKIGEAGVRRRAEFFYQQLDALRALRQEVRRDLLAESRKHGATKLLRQIPYIGPIWAALLIALIQTPYRFRTKRQLWTYSGLAIETRDSAQHRYVAGQLQHSKKPQQVRGLNQNHNHDMKTIFKSAATMASSREGPFHDFYQGLLTKGMEPAMARLTLARKIAAITLILWKKGAHFDAEQLKPQAA

SEQ ID NO: 474663 - protein, 334 aa, unidentified
MLYAAIDIHKHAFQAAVLDPEGGEVVEARFSADRESLARWAEEWQGRVVAVAIEATTGWRWVWRELSARGFDVRLAEPVQARALLGRRRSAKTDRLDARWLARLLAKEMLPQSWIPPEEIQRLRDRTRLRKTLAEDQRRWGQRLHAFLLHEGWPCPKSRLLTPQGMRWAAALKLSEHGRLQVDSLLAIIAALEVQLETVDGELRRFARTDARCQALQSIYGVGPILACHLLAEIGEACRFRRAKQITRLAGLDPVVDESGETRRRGHLAKAGSPQLRWALVEAAVHANRANAPDLELYQAVRDRRDTTVARLSVARKIGKRAYHVLRELEQTAA

SEQ ID NO: 474664 - protein, 346 aa, unidentified
MSYYVGLDVSVKSVSICVVEADGAVVARGEVSSDPDQIAAFVFKHAPDAERVAHESGILSIWLTRELEKRGLPIICIDARLAHKALSGRLNKSDRGDAEGLAHLARTGWFNQVHIRSEASERIRVLIGTRERLIKMRKDLEGHVRGVLKVFGVCMSGVHRAKVRQGFRDQLIKAGAVDPAIGVMVDMFCPIHLALCSAAEAMDFELRAIARASSLAVRLMTVPGVGPIVALAYISTLDDAERFKKSKDVGAFLGLTPRRYQSGEMDWSGRISKCGDRDLRRLLYSAATTLITQVKKPSPLLTWATRLNERKGFKKAAVAAARKIAVIMHCIWRNDSVFDPNMEGVA

SEQ ID NO: 474665 - protein, 276 aa, unidentified
MKDIRILGVDLGKNSCSVVGMDAEGRVLLRRRMRRESIIALAAKLPGCIVAMEACCGAHHLGRMLVARGHEVRLMSPEYVRPYVKAQKNDDRDAEAIAEAATRPTMRFVALKSEAQLDVQVLHRVRDRLVGQRTSLMNQMRSILLERGISVAQGRRSLLDALEALSQEDSGIGARIRVLLDDMLCQWRALDERIMALDEEFTEMARNDPAARRLATIPGIGVMNATALVAAIGDGRTFSRGRDLSAWLGLVPRQATTGGKPKLLGITKRGSKVSIR

SEQ ID NO: 474666 - protein, 364 aa, unidentified
MTIMGCDLHSRYQVVAWVNQGTGEILTRRLGHEDGEAKRFYSGLPRGARVGIEATFPALWFERMLAELGHELWVGDAARIRASETRKQKYDGRDAEHILDLLLANRFPRIWTPSREERDLRQLLVHRMKRVRTRTAVKNQLHALAMSQGVCRKHKLWTTKGRAELEGLALGPWASQRRKELLSLLDQLDAAIKPLDEAVEKEAQTREEAVRLMTHPGVGPVVSLAYVLTLGPVERFANRRKLVSYLGLNPREHSSGGRQRLGAISKQGNSMLRWLLVEAANRAVVFDPELRRAYQHLKFRRGSGVAKVAMARRLAVRLYWMLRAQVNYAQLVRMSGSPSSAVVPHQAGSTVCLGAGPPSASEGV

SEQ ID NO: 474667 - protein, 338 aa, unidentified
MKTTTFGVDLAKRVFQVHWVDMDTGEINRRQLKREQLMTFFAKQAPALIAMEACGSAHYWARRFASFGHQVRLIAPSFVRPFVKRNKTDVADAQAIWEAVQRPEMRFVAVKSEAQQAVLTLHRVRQQLIKMRRMQINQTHGLLYEFGAAMHHGSHSMNDAARLLAELADTLPTMVVDTLREQLQRIEALTRDIRAVEHRLAAWLRHDEAATRLAAIPGVGLLTATAAIATIGDAGTFRCGREFAAFLGLVPRQSGTGGRVKLLGISKRGDVYLRTLLIHGARSVLAHSKQPSDTLQRLLARRPFNVVVVALANKMARTIWALLAHARTYQPGYVAHAA

SEQ ID NO: 474668 - protein, 521 aa, unidentified
MPCPRTSRPRKARRGFVLQKPTGQLTPRVQAVGAEHFGIVAVDCAKARSRYFLADFYGRTLLEPATVAHNRGDLQAAIDRVRLAMRQHQLADLVVAIERTGEYHRPVQHAFRQADFETRLVHPFTSKQYRQPADPGNKTDDTDLAAIWRATTHGFGLLEPTWPDNYLTIQLLRRHRRDLVDKNTILQCQIREVLHAAMPGYAELFCHFWDDSPAPLVFARHTTSADAVRQQGIAGLQQIANQAGLRCRTETLHKILAWAEQAAPASGNVLDRCRILIGLDDDRLAKTRQILELERDLAHRVVHTPYLLLMVIPGINVVTVADLAGELGPISLYVNANAITGRAGLMPSRYQSDQVDCANGPLRRRGNRRLRAVLMQTADNLVQCNHYFHARADQWTRAGKDARWVRVKVAKIFSRLAFAMVAGEQLFPHPCCQKRHYIIGKLLSFHSGHGTELQAMRHDLEVAAAQLPAKQRALEAEPLQKQLDDLANRRGPQPLAEIIPLVLARLAGRVVQSTPSESAGP

SEQ ID NO: 474669 - protein, 340 aa, unidentified
MWYVGLDVHQRMSCICILDENGKVIKEQRVSDCWAVVIEELKKIKERFTICYEASCGYGYLHDQFKRIAQRVVVAHPGKLRLIFCSKRKNDRVDAKKLATLLFLDQVPAVYVPTPDQRGWRSMIEFRRRLIDKRTQVKNGLRSLLRGQGVMLPRGKKLWTVKGLAWLAELPLDTVIAIQRDLLLMQFEGLQPQIRRVEVELNRQAKAHLGICLLTTIPGVGVRTAEAVLAYIDDPRRFSRNNQIGAYFGLVPCEDTSVKHRLGHITCDGPATARKLLVEAAWQTVRRCPRTRALFERLQKGNPQRKKIAIVAVAHHLARVMLAMLRTGEAWRTEPQVQAA

SEQ ID NO: 474670 - protein, 469 aa, unidentified
MKKKPISSSSKKGSVRKKGSSKKNSSTKASQSQLTKMNPNAAGIDLGAKEHWVCVPSEATPDNIRSFGCTTPELVAMADWLISCGVTTVAMESTGVEWIPLFQILSERQLKVYLVNAKSVKTVPGRKSDVKDCQWLQQLHSYGLLAPSFVPEGEIAVLRSYLRQRENLVKSACCHIQRMQKALTQMNLQLHKVISDVTGVSGLNIIRGIISGERNPKVLARLADKRIKSSPQDIERALTGNYREEMVFILNQELSLYEFYTQQISAVESQINSCITKFSSVTEEPPPPPKKKNRRPSSDPSFNLHSHLYRITGVDFTAIDGLDVLTVQIIISEVGLDPTKFHSAKHFASWLGLSPGCNITGGKVKSSGTRKVVNRATKAFRLAAQAVGKSHSALGAFYRRIRARLGAPKAITATAHKIARIFYTLWTTKQSYTDLGADYYEQKYRSRVINNLSKKAQSLGFALVEAEQT

SEQ ID NO: 474671 - protein, 285 aa, unidentified
MEQSILYVGLDVHKETIAVALAEAGLREDVREHGKIANTPAALKVLTGKLTGQRRELRFCYEAGPCGYGIQRQLSAMGYECAVVAPSLIPRKPGDRIKTDRRDALNLARLHRAGELTPVWVPDQAHEAIRDLVRARQAAVRTLRQARQQLSGFLLRHGQHYHRPAWMLLHRRWLASLKFDQAVHHIVLEDCIAAIEAATARRDRLEAHIEAALPEWSLAPVVEALQALRGVGLVAAVTLMAELGDITRFNNPRQLMAYLGLVPSEHSSGHTRRQGGLTKAGNGAC

SEQ ID NO: 474672 - protein, 338 aa, unidentified
MQDNSASLGIDVASKKFDVCLLDTDGKKQHAIFENSSQGIQDCFQLLQEKNFDGSVVMESTGRYHELLALSFYTRGYQTYVINPLRVKKYQQAGIQKVKTDKQDAKLLAEMGFRPQELDRYELSPEQLAVKKKVALVRTLETKLQELRAMIKNYQESQNVLGNTLSPVEEKLKQAIGEIEKSKTLLEKEVTTEIFPVGDTKAARTKEVLTSIPGVSPYYAAMIASAYRFAPGRTPDSWLAYSGLAVSVHQSGTYTGKGRLSKRGNRYLRKRNYTAAWGAYMHSPYFKDYYNYLKDVKGRHHVEALTILGKKILRIAYHCLKNNELFNPTIVKDSLPNS

SEQ ID NO: 474673 - protein, 353 aa, unidentified
MSKILAIDLGKNNSAICIFDRSSLKCKYKTVHTRKQVMHDLFVEYQDNIEIVLFETGSQMGWVADILWALNIPFEVANTNHSAWKWKNNPNKSDRKDAQRLAMMYHTGFFPTVHVPRRAVRQKRSLINYRDDIVKRITKIKNSIRAILGREDIPLPSGKKGWTIKALKPIREFAMSHKDITDLEDLWKGQLHNELNQLDNTTEELNAIESKLNVLGEADEKAKLLRTVPGVGPRLSEAVVAIIDDPHRFKNGRHVSSYLGMVPRRWQSGQVDITGRISKCGNKLLRTLLVEVSWLGLREPWMREIYNKVKHGDKKRAKVAIVALARKLLVICWAMLKNGTTFDAGYAKRFERC

SEQ ID NO: 474674 - protein, 384 aa, unidentified
MQHYAGIDVSLELLSVCIVDTKGKIVKEAKVGSDPDTLVAFLRGLDLAIERIGLEAGPLSQWLHAGLTSAGFEAVLLETRHVKAALSAMTVKTDRKDARGIAQLIRMGWFRAVHCKSAGSQEVRALLVARKLLLSKLLDVEFSIRGILRGFGLKMGMVTRKRFEARVRELYAGHAMLEQICSAMLTARSTLQTEYAKLHKALLVIVRKDEVCRRLMTTPGVGPLVAITFKTGVDDPSRIHKSKAVGALFGLTPKKYQSGETDVTGGITRAGDEMVRTALYEAASVLLSRVTRFSALKRWGMDVAKTARDETRQGGFGAQDWRDPTSDVGRHDKLPMDKGSANYDAPRPSLTEGRTQLRSGPHKIRFVRSPVAGTMELVKPEDGQ

SEQ ID NO: 474675 - protein, 333 aa, unidentified
MEKKWFIGIDISKKTLDVVIYVPTKKHADETNYERFLNKEEGYKSLLCWLKKKNMAKKRLVISMENTGIYSFDLCLFLEAASIDYCSFNPLHLKRSLGLVRGKNDRVDAERIAYFAYLHRDELSYSKLSGSSIIRLRDFAAERKRFVKQQAEYKGFLTDRKDCEMTSTIERAAHMVKILDEEIASVEEEMLQIINSDPSILRNYELLNSIKGIGTINAMNTIIHTNNFQAFETARQYACYLGIAPFEHSSGTSIKGKTRVYPTGAKLLKADLSQAASSAIVWDKEMKEYYERKRKEGKAYGVVLNAVKFKLVGRMFAVVKRGTPFVELMTYKK

SEQ ID NO: 474676 - protein, 344 aa, unidentified
MVEFKQVRTFVGIDAHGEHCNLKALSRQGRGILELEVPTNSAELCAAVKPLPGPVWAMVESSSIAPFVVWSLEAVLDRVIVCETRENRWIAKSEDKSDPADADRLARLLRMGEFKEVYVPSRERQELRELVLLYDKMVGDTARAKSRLKAKFRQHGLAVSGSAGYSEAGRKSWLDQVRRRTVRFMLEALYAKLDAAEEVQESLARRLSAMLGSRREYRRLKTMPGIGEVVAAIFVGVIDNPHRFPDKRKLWKYAGLSVRGPWTGDPKQAKTGGSCTGNRLLKYAAMVAAERATVGSNHFGRRYQEMLARGLDRSMALKTTARNILATALAMWKSGTDYREPESA

SEQ ID NO: 474677 - protein, 388 aa, unidentified
MQVAADRTDASTAIQTDLPAIFASLELSRSTWLITSLSPGAGEKMSKHSIRAGDVAGLLVRLAQLKEKARGRTGRDFPIIAIQEAGLDGFWIHRVLQSEGIESHVVDAASILTSRRRRRAKTDGIDGETLVRTLLAYKRGEPRVCAMVKAPTPEEEDRRRICRERKTLVGERVEHVNRIKGLLFAQGVSDYEPLKRNRRARLEELKTGDGRPLPAHLKAQISRELDRLELVLPQLKAVEAERDALLKPVSGGCPTPAAMLAQLKGMGPEFTAILWSEGLFRSFSNRRQLAAYAGLAPTPWQSGSVAHEQGVSKAGNRRLRTTMIQLAWLWLRHQPTSALSVWFQERVQSNGGKMRKTTIVALARKLLVALWKYSISGVVIEGAAMKTI

SEQ ID NO: 474678 - protein, 342 aa, unidentified
MLYVGIDVAKNKHDVTALNVQGKTVLKPLTFSNNKAGFELLDLSLRQLNQDCLIALEDTGHYAFNLLNFLHEQGYKVYTYNPLLIKEFAKSLSLRKTKTDKKDAHGIALKLLSDPNREQFQHDNRQVELKILARHIHRLKKKQSDWKVQYTRCLDIIFPELDKIVGKHSEYTYQLLTRYPNPQKRLEARFDKLIEIKRLTASKIQDILSIAPRSIGTTSPAREFEIIEIIKHYKRLIDKAETCVNDLMAEFNSVITTVTGIENRLGAVILAEIRNIHAFDNPAQLQAFAGLDSSIYQSGQIDLAGRMIKRGSPHLRWALIQAAKACARFSPAFKAYLKTKLE

SEQ ID NO: 474679 - protein, 341 aa, unidentified
MNHYAGIDVSLKDSSVCVADANGKIVREGTVASEPEALIAWFGELGFAVTRIGLEAGPLSQWLYAAMQKAGLAVELLETRHVRDAFKAMPVKTDRKDAQGIAQLMRLGWFRPVHCKSIAAQETRAILSARKLVQSKLHDVEMSLRGTLRGFGLKVGKTTPNRFAARIKELVERHPTLQIIATSLLAVHAALLREFKVFEKQIRIMARDDERARLLMSTPGVGVLVALTYVSAIDDPGRFTSSKRAGAHFGLTPKKYQSGETDITGRISKIGDKGVRTALYEAAHIILTKPVKGSALKSWAARLAKRAGMNKAKVALARKLAVIMHRMLVDRTPFNPAAAAA

SEQ ID NO: 474680 - protein, 344 aa, unidentified
MDHYAGIDVSLECSSVCVVGASGKVVREAKVVSEPEALIGWFGSLGFELARIGLEAGPLSQWLYAAMKQAGLAVELLETRHVSDAFKAMPVKSDRNDARKIAQLMRLGWFRPVHCKSITAQEIRAMLTARKLVQSKLLDLENSLRGILRGFGLKVGKTTRTKFAGRIEELVKGHPNLQTIGQALLRARAVLLAEFNGFEKRVRAMSRLHDKARLLMSTPAVGPIVSLTFACAIDDPSRFTSSKQAGPHFGLTPKKYQSGETDYTGRISKHGDASVREALYEAAHLMLTKPIKGCSELKSWAMRIARRAGTNKAKVALARKLAVIMLRMLKDNVPFNPAAKAATA

SEQ ID NO: 474681 - protein, 373 aa, unidentified
MPKYSTAFGMDVHLRSTTVCALDADTGEAVTRRFPGNPWGEIAGWMDGFPGPSLAAYESGYLGFAPQRELAGLGVECVVAAVSKIPRSAADSASKNDRNDAARMAKAILAHDISPVWVPSPEVEGIRDLAGAYDGATARLATAKQRLLAFLAKRGFVYGGTTPAGNPRKYWTYDFLRWLDKVRPEDDGGVRTLTALRNEVEAAAEARANLLSEYRAAVDASPIAAEAAALQSIKGCAFALAAAFSAEVGDFTRFRSGRQVTAYFGLAPNQRSSGDSVRLGGISGAGNALVRKLAIEGSWCYAAARHQPKLMPRDTGVPLEIRMHGRKGSERLLRRREEMLARGMPAAKANAATAAELVRWLWALGTMCREGAE

SEQ ID NO: 474682 - protein, 365 aa, unidentified
MSKRIVSMGKSVSCPARSTETSTDSQRARVFCGIDVSRETLAVAVLAPDQPIEHRAFANTAGGHKGLIAWLGKKRAVVRVSLEATGIYSLDLALALDGAEDVELAVLNPKLVNRFAQTLRRSKTDKADAEVLAEYSLRMPFQAWRRPGQTALALRAIGRHIEALGLEHTRALNRLRAAEGTLTAARCVVADLRRCLAGLERRMVKLRREARKVIDGNEQMREQFRLLVGMPGIGEISGLQILGELVLLAPEMKARQWVARSGLDPVHRESGSSVHKPARISRAGSRHLRRALYMPALSAVRCDPHLKAFYEALLCRHKTKLQALIAVARKLLHAIYGIFKSRTPYDGQKLFPALRIGCAIESTSR

SEQ ID NO: 474683 - protein, 356 aa, unidentified
MNKRSKLDFSGQPIYIGLDVHKKSWSVSIFTQHGEYKTFSQPPEAETLSLYLQHHFPGAQYCSVYEAGYCGFWIHDQLRNKGIQNIVANPADIPTRDKERKNKRDRIDCRKLARALRGDEIEGIYTPPRWKLEDRSLIRTRLSMGRKQTRCKNQIKSMLLFYGVGIPERSEMGHWSRRFIRWIEEIRMERASGDMALQSHLEELCHLRQLIAKLNRAIVALARTEQYRSWISLLKTVPGISTLTAMILLTELHEITRFGSIDPLCSYVGLIPDTQGSGEKEHVGGVTQRRHSQLRWLLIEASWIAVRKDPVMMEAFQEYCKRMRKTKAIIKIARKLLNRIRYVLKNQVEYVTGVIE

SEQ ID NO: 474684 - protein, 343 aa, unidentified
MAIVNRIALDLAKDFIQVLALDENEQEVFNKKLRSNKVLAKLATLSRTDDCEVAVESCGMSHYWRRECEKLGYQTVALPPRFVKAYLQGEKNDANDARAIAEAASRPNRQTVRLKSIEQQDLALMVNQREGFVQTRTQFSNRLRGQLAEYGILLPKRVGTILQRVPEVLEDDSNALTLQSRDLINRLYQMLRAVDEEVKALDKHLATQAERNEDSQRLMTLPGIGPITATSLLALIGDVSEFKRGRNLSEYLGLVPRQNSSGGKDRLGGITKKGNTKLRTLLVHGARSALRVAQKRQDRLSLWSQDVAKRRGNNVAAVALANKHARIIWAMLKNKEDYRMTAA

SEQ ID NO: 474685 - protein, 363 aa, unidentified
MLHVGLDVHERSSAVCILDENGKKVKEHSVRGHPRRVITWLRRHIDTPFQICFEASTSYGYLYDELRRIAHRVVVAHPGRLRLIFRSCRKNDRVDAAKLAKLLYLDALPAVYVPSAEIRSWRGMIEHRHRCVRSRTRCKLTIRALLRTHGVETLGRRRLWSKRGRAWLESVELPDEISWLRLEGLLADLDHFDARIGRLESILERIAEKHPAVALLRTIAGVGIRTAEAFVAYVDNPDRFRRSKSIGCYLGLIPRQDASSDTNRLGHITKEGPGTVRQMLAEASWQAIRRSPTVRAFFERIAQGRKDRRKIALVATAHYLAGLAGGSDDHGLTEPVLTDGAPRRTSLMPTVAEALCLLRTPSE

SEQ ID NO: 474686 - protein, 416 aa, unidentified
MNQFTAYVGLDWADKKHDVCVQAAGSEEREFDRFDHQVERIEAWARSLHERFGGRIAVALELSEGPIVYALQKYDFLVLFPINPTSLAKYRETFKPSGAKDDPTDAELALDLLTCHRERFKPLKPQSVGIRKLRYLVEHRRRVVGDKKRTTNRLCNALKQYYPQVLDWFEQRDTVVFCDFLDRWPTLKHVKRARRETLERFFRDHNVRMSLVIERRVLAIRAAQPLTEDEAVVDAHRVQVGVLVLQLRAALESIARYEAVIAATAESLPDYERLFRSLPGAGPTNAPRLLAAMGEDRERFSDAAQLQRCFGIAPVTVRSGTKTWVHWRWKCPKFLRQTFVEWAGQTINKSAWAGAYYRQQRAKGSSHQAAVRALAFKWVRILYRCWQDRVPYDESKYLEALRRRGSPLLKYLAEPA

SEQ ID NO: 474687 - protein, 346 aa, unidentified
MTHGAIDLGKRMSQVCILKEDGEIVERRMRTERERFAAVFQAYPGIRILLEAGTESEWVARCLEDLGHAVIVADPNYAPMYAQRQRKVKTDRRDARALAEACRLGAYRPAHRTSEAQRQVRWHIALREALVRMRARTVVLIGSLVRQAGLQLPGGKAESFADRLSTLALPKPLGDALAPMLRVLQTLNQQVAAADQALEDLVRSDPRVLRLDTAPGVGPIIAATFVATVDRVERFSGPHQLEAYLGLVPREYSSGERQARGRITKAGNTRLRSLLIEGAWSILNHPKPETVALRAWAMRIAARRGKSRAVVALARRLAGILFAMMRDNAVFDPQRFASPTRAARVA

SEQ ID NO: 474688 - protein, 411 aa, unidentified
MNPVVGLDVSKGESQVQAFLDKGKPYRKSFKVSHTVEGLRSLVVFLEEVKKESGKKPSIILEATGHYQAPVVHYLEERGYLLIIINPLISYKARGSSLRKVKTDAIDAYLLCELFYKEELEPYKKRGVQLLNLRNLTRQHENITGVMIQTKLQFQAVLEQVFPEYKGVFGDLYSVVSLLTLSEFPSSEDIFNASEEVITDKINSLCKSRSSRWAKEKAIQLKAAASRNPFEKTVYRSHILSLEMYIRMILQYKEHLAKLELEIDALAKDIEEYNIIKSIPGIGEKIAATIISEIGEIDRFNAPKKLVAFAGVDPSVFESGKFSATKNRITKRGSSRLRHALFMAVRCAIRDSRKKKSTDEIIPRNKRMREFYDKKREEGKPFKVAVIACVNKLLHWIYALLKNKTTFQDIV

SEQ ID NO: 474689 - protein, 346 aa, unidentified
MKQITTIGLDLAKQVFQVHGADAEGSPIFNRKLRRAEVLRFFEKLPPCLVGMEACGGSHYWAREIAAFGHEERLIPPIYVKPFVKRGKTDAADAEAISEALTRKTMRFVPVKSADQQAAAMVLKTRALLVRQHTQAINALRAHLSEFGVIAAIGTATVVALIEIVRDEADMRLPKAAHFALAEIANQIEALTRQIEKLEREIVAEAKRDEDMRRLVTIPGVGAITAASIKALVPDPDGFKSGRHFAAWLGLTPKPHSSSGKERLGGISKMGNPMLRSLLVLGATSVLRRARGNANAPQWLIALLARRPFKVVAVALANKMARIIWALLTKGGTYRNTGPARGAASA

SEQ ID NO: 474690 - protein, 341 aa, unidentified
MSLIKAVGIDLAKLVFSIHGVDVNDKCKLRKTVKRNNLLAEVANLPPCIIAMEACSGAHYWAREFTKLGHDVRIMASKFVIPYRQNEKNDANDAEAICEAATRPKTRFVSIKSEEQQAVLCLHRIRQGAIKDRTARINRLRGLLSEFGIIIPKGRYPLQNAMSGVLEDAENGLPFLARELLNDLWQTIKGLNEEILKYDRKLYALANQMKDAKRLMSIPGIGEITATAVVATVNDAKHFETSRSFAAWVGLVPRQHSTGGVVRLGRISKRGEKHICTSLIHGARAVIANCKNKTDRTSLWVKDLVERRGFKRATVALSAKNARLIWALLHSEKEYQVDYVK

SEQ ID NO: 474691 - protein, 343 aa, unidentified
MTSNKHQHFIGIDVSKQTLDVCLWTVVKDDKPLKTTFATTNDPTGHKQLDDWLSLAATPQQAVICLENTGLYDEKLVDWLTVSGWCVAVENTTVLSKVRNNVYRKSDALDADLLAEYAYRFTDQLSIHHPQQPVIKEIQLLYRERRRLVSQRASVKQLVGESDYRITSTAFAKQLWEQQIQFYTNAINEIEKRIHMLIKSDSEMSRYYKILVSIAGIGPIASWLWLTTFYGQHRLIARRIASRFGFAPHEKRSGTSVRSPRRSSGHGNSEMRKVMTMCARSAATHHPRFALYRQRKLQEGKPPQLVTNNIINKLIRIMTAIWNSGEIYDENHSPCLPQIASSS

SEQ ID NO: 474692 - protein, 417 aa, unidentified
MDTSLSVVLPICCGIDVHKNTLTACLLTTGASGEVVQDVRTFRTVTAQLQELARWLRGAECPTVALESTGVYWRPVFNVLEPAGLEVVLANAQHVRNVPGRKTDVKDAEWLATLFRVGLLRGSFVPPKEIRELRDLTRYRTQVIRQRAQECNRIQKLLEDCNIKLAGVATDILGKSGRDMLESLGQGIDDPKRLADLARGKLRAKIPALEEALRGVLSGTQRWLLREQLHKVAELDEAIERLDVKVAESCLPFAEALAILDQIPGVNARIAQIIVAEIGLDMTRFKTASNLASWAGMCPGNRRSAGKSQGGKTRKGNGWLRQALVEAGWAASRSKGTSLSATYHRLAGRRGGKRACLAVGHRILRMVHNLLSSHRPYQEGGIDYYRPTDTDRLKDKLVQRLRTLGYAVTIAAAETAA

SEQ ID NO: 474693 - protein, 338 aa, unidentified
MIVIGLDVHKQSVTAVAVDEAGRPLEEKVIAVGSDELLDWAAALDDARLWAVEDCRQLTRWLERQLLSVGEDLVRVPPKLTVPERRAGRTRGKSGPIDALAIARAAIREPNLSRPRADERVYREIKLLIDQREDLVDQRRRTQQRLRWRLHQLDPTYAVPLRMLSRASHLERVSRWLARREQELQVRLARELVSMIRSLNRAVGELDQELEQRTVEVAPALLELPGCAAVTAAKLLAEIGPVDRFKSDAQLARHSGVAPLEASSGKSQRHRLDRGGNRQLNAALYRIAITQARYHAPARDYLERKRSERKSRREALRCHKRLLVRVVFNTLKASPALT

SEQ ID NO: 474694 - protein, 338 aa, unidentified
MNVTILGIDLAKSIFQLHGVDERGKIALQKRVPRSKLRETIAQLSPCLIGMEACGSAQYWAREFQQLGHTVKLISPQFVKPYVTGNKNDSRDAEAICEAVSRPHMRFVPLKTIESQDIQAIHRMRSRLIKDRTALGNQIRGLLAERGIVMPQGITRVRQQLPTIIDNLGNQLTPLSREVMRELYEELVALDERVTRADNLVQRVFTQSPACQKLARVEGIGPVVATALVAAVGNAREFANGRHLAAWLGLVPRQSSSGGKERLLGISKRGDRYLRTLLIHGARATVHRARYKTDARSRWIVNVEQRRGKNIATVAIANKNARIAWALLTTEAEYRKAA

SEQ ID NO: 474695 - protein, 355 aa, unidentified
MSQEKYIGMDVHQATISVAVMDSSGKLIMECILETKAATILEFIAGLRGTLSVTFEEGTSAAWLHDLLKPHVSHLVVCDPRRNALLKDGSKSDRIDARKLAELLHGNQLHAVYHGEHGVRTLKELGRSYLTITKDLTRVMSRIKALYRSWAIPCSGATVYAPRHRAEWLAKILEPGVRLRAERLYQQLDLLQPVRQEARRDLLVESPKHHAVTLLRQIPPIGPIRAALLVALLQTPHRFRTKRQLWAYSGFAVETHDSGEYRLVRGKLVRNRERITVRSLNHNHNHDLKNLFKGAAISASTRPGPLCDFYVALVEKGMRPTMARLTLARKIAAITLTIWKKGVEFDAKQLNRQAA

SEQ ID NO: 474696 - protein, 337 aa, unidentified
MKKNYRIIVGIDVSKTKLDYCIAAAPGYNSYKFGIVTNTEKGIKQLIDLFQKNDTDRHTVLVCLENTGVYSMPVCYWLQANHLDYWVVPALEVKKAKGISRGKTDKADAKDITMYALNHLHHVKLSVLPEKSFIELRLLLAEREKLVKAIGIFKMTTENKSFMPKDILKSVLANNKKTTALLQQQLNNLEILIQKIVDNNSVLKQQSNLLQTVPGIGKQTSVNLIAYTHAFSCFKNWRKFACFCGLAPFPYQSGSSIKGKTKVHHLANKKLKALLNLAALSAKRYDPEIKYYFERKVNEGKNKMLVLNAIRCKVISRAFAVIHRNSAFANLNKFAAA

SEQ ID NO: 474697 - protein, 407 aa, unidentified
MRSIGLDIHRDFAEVAIAEAGEVRSAGRIEMTPEALELFGRSLGRDDQVALEVSGNAWEVARIIHPHVAKLVAVSPADTGIRAARAKTDRLDARALAKLLAAGQLDGVWVPDEKTRAMRRRLGRRAQLVRVRTKAKNEIHAALMRRLVPKPKVSDLFGLKGRRWLEEVELPAYERETVDGCLRQLDFCEREIAETERVVAKEALASPEIRRLMTIPGMNVITASAFMAAIGDVGRFPDRKKLVGYLGLDPKVRESGTTAASRARISKQGSASGRYALVEASWSVILAPGPMHAFFERIRARRGHQAAIVAVARKLACLCWCMLTRGEDYAYAQPSLTAKKIRRAEIRAGAPKRKGVKPGTWAANAAIRQAERELALQAEVAYKRTVADWRRTQARRKGAGATPGRAS

SEQ ID NO: 474698 - protein, 324 aa, unidentified
MQGKDTPEAKAEVQVYVGLDVSKAAIDVYLHPLGHVFRIANTNQGLRQLKSRLAGLKVVLVTIEATGKFHRQAHRTLHAAGYPVAVVNPLRSRLFAEAIGKLAKTDPIDARTLAIMGESLKLAANPPPAALIAELQELVLARRAAVTEKTALENRLGAAQSRFLIAGIKKLLKAVERHVAHLDTEIDRLIAGDPALARRQEILTSIPGIGRVVASTLVACLAELGMLSSKAIAMLAGLAPVACDSGESKGRRRIRGGREHVRSPLYLAAVSAVRCNPDLKAFYRRLRDEKAKPAKQALTAVARKLVTLANTLVHDDRLWVEKPA

SEQ ID NO: 474699 - protein, 523 aa, unidentified
MSSSRTRRRPRARPPDAVHKPRGAFHPRVQQVGPEHFGIVSVDCAKARSKWMLADFYGNLLVPPTVVEHHREGLDAAVGRLRQAVRDHDLRDLLVAVERTGRYHHAVRRAFAAAGFETRVVHPFATSRLRQPSDPGNKTDDTDLAAIHRAAVTGFALVEQALDEAWTTFRLLVRHRRDLVRKAAALRAQIREHLDAALPGFAACFDNLWDRDCAWHLVRHFATAADLQAAGLDGLCRSLDAAGVRYQRRTLRPVLDWAGRAAPPDLGAAFHRRVALALDDDRAQKVREIRAVERDLAAALARTPYVLLLSFPGVNVVSAADFGAEAGPMEHYASARAITGRAGLRPSRYQSDQVDKANGPLVRCCNRALRAAILRAADNLIKCNHHFNVLAHTWQKEKKDPRHTRVKVGLRFCRIAYQIVAGRQVFRHPGLQGRHYVLDKLVAFHREHDTSAAEQLRDLQAALAQVPEAEHRAEAVPLAEELAKVQQGRRRGPQLLGDILPIVLARLGVGGVQSTASGEKDPS

SEQ ID NO: 474700 - protein, 371 aa, unidentified
MEKTLEKLSLPGFNNYLYLGADNHKDQHTISGMNCFCQVLYQKEIGNSEQDFKELVGEVKELAGNLGLMPVFGLENTSSYGLRLAQYLFQQGFDIKTVSPVLVERERKYQTHPEKSDSQDASGVARALIQRIGKLPTFSISKTEELANEIKEVVVDRESLVKEQTRVKNQLHRLLHTVHNSEYGARFKNPFSKKALDCWLRSCPKIDSPILKKRLRRKVERLRHIKREISETEEELRFLLDKTDQKMGTLNGCGLVLTACLLAEIKNIERFKSAGSLAKYGGFCPREKSSGKKIKHIKTKSGNRRLNKTVHRIALSQIGRNGNIYSKAYFKKKISEGKSKAQALCCLKRRLVDVIFMMLKYQQEYKIPAKS

SEQ ID NO: 474701 - protein, 321 aa, unidentified
MPFEYTVQIAIELSLSSWVVAVRSPGVEKSRLHHIEGGDTTALLALIAAERLRPSARLGQTVDVACCFEAGRDGFWLHRLLTANGIHSFVLEPTSVLVNRRARRGKTDRLDAEGMLRVLAAWLAGDRQVCSMVRVPTPEEEDAKRPHRERELLVQERQRIENRIEALLFTQGIRKRPSLRLWARDMDELRTGDGRAIPPLMRAELDRLRRRLVMVLELIREVEAEQASALAAAADNETAQKIIALQRIRGIGENFSAVLVREVLYRSFANRRQLASYVGIAPMPYQSGGRRPRSKHQPGWQPTSPHDAHPTGLALASLPAR

SEQ ID NO: 474702 - protein, 316 aa, unidentified
MESHVFVGIDVCKDSLDGYALPDGLRWQSAQEPGAIDGLVTELCRVQPALVVLEATGGLEMPAAAALTAAGVPVAIVNPRQVRDFAKATGTLAKTDRIDAEILARFAQAIRPAVRPLPDAQTQELQALTARRRQMVEMITAETCRLSVSRSSAVQADIKAHLKWLRRQMRSIDEDMDQAVKASPIWRVKDDLLQSVPGVGRVLARTLLTELPELGRLNRKQIAALVGVAPLNRDSGTLRGQRKVWGGRAQVRAVLYMNALVATRHNPVIQRYYQRLLAHGKPKKVALTACMRKLLVILNVIVRTGSPWRQTAPAAA

SEQ ID NO: 474703 - protein, 343 aa, unidentified
MQSITTIGLDIAKSVFQVHGVDVAGQVVVRRQLKRRHVLTFFEKLAPCLVGIEACASSHHWSRQLQALGHSVRLMPPAYVKPYVKRQKNDVADAEAICEAVTRANMRFVPTKTPEQQSVLMLHRTRHLFIRQQTSVINAIRAHLAEFGIVAPVGRRGVEELLTVIADPNDKRVSDVARACLVALGSQLLSLKKQILHFDRMIMVWHRSNATSKRLNYIPGVGPLLATALVSSVADPGAFRSGRNFSAWIGLVPKQHSSGGKDRLGSISKQGDRYLRSLFVVGALSVIRYAKLHGTKHRPWLTALLARRPTKVAAIALANKLARMAWAMMAKGERYRQPAALAA

SEQ ID NO: 474704 - protein, 342 aa, unidentified
MQITTIGLDIAKNVFQVHGIDAKEKVVARKQLRRSQVITFFKALPPCLIGMEACATAHYWARELTKLGHEVRLMPAKDVKAYVKRNKNDAADAEAICEAVRRPTMRFVRIKSAEQQGQLMQHRTRDVLIRQRTQIINALRAHLAELGIVAAQGNAGVNELRAIVTDEQDTRLPIDARASVIVLAAQLEALESVIGAIEKRIKMQHRSSEASQRVEAIPGIGVIGATAIVATVADPTIFRSGRDFAAWIGLVPRQDSTGGKQKLGPISKQGDRYLRRILVVGAIAVLRRAQENPGKYPWLTQLLARRPFKVVAVALANKMARTAWALLAHGGTYRAPELAETA

SEQ ID NO: 474705 - protein, 423 aa, unidentified
MLEPTQDQQEVIERIAALDIGKATLVCCARVPGSGPGGRRSQEVTTYSTMTRSLQVMADRLLELGVTRVVMEATSDYWKPAFYLLEAHGFQVWLCNAKDVKHLPGRPKTDVLDAVWLCKIAERQMIRPSFVPPPPIRRLRDLTRYRVALVSDRTGEKNRVEKLLEDAQIKLSVVASDIFGVSGRAMLAALIAGERDPKVLAQLARSRMRVKIGDLEEAFVGHFTDHHAFLLTQMLTRIDALGADITGLDTRIEAEIAPFAEAVARLDEIPGVGATAAHVIIAEIGLDMSRFPTAAHLTSWARFAPGVKESAGRKKGNGATGHGDRYLARVLGEAAVAASKTNTFLGERYRRIARRRGKKKAIVAVGRSILVIVWHLLSDDQARFHDLGPDFHDNRLGPERTRRNHVRQLEALGYKVTLEPVAA

SEQ ID NO: 474706 - protein, 391 aa, unidentified
MIYVGIDVAKDKHDCFITNSYGEVLFKSFTIPNNRDGFETLFQKVQSVSDDLTKVKVGLEATGHYSYNLLGFLLDKGLTTFVINPLHTNLYRKSLSLRQTKTDKVDARTIASMLMSDVNLKSYSDTSYHNEELKSLTRYRFDKVKERAKLKTSVSRLVCILFPELEKLVPTLHMASVYALLSEFPSAKHVATAHLTRLTNLLSKSSKGRYGKDTAITFRDSARASIGSNMPAKSLELKHTIKLIQELDSEIDEIENEIKIIMDEINSPILSIPGINYRMGAMIIAEIGDFNRFDSPDKILAYAGFSPSTYQSGQLDGAYAHMEKRGSRYLRYALYNATKYVCHWNPTFAAYLAKKRAEGKHYNVAISHAVKKLVRVIYHLEKTKQQYIKAA

SEQ ID NO: 474707 - protein, 317 aa, unidentified
MAMQVGKLIVGADVAKAELVIHHDDRDEIIKVKNTKPEIKKWLKQQPLNTAIAVEATNVYHLDLVELAHSLGFEVYVIDGFQLSNYRKSVGVRVKTDPTDARLLSRFLRNEGEDLRPWTPPPAVYGKLQSLLRRRAALVTARTAMTQSWANEALLKAAFTTFVKSIDRLDLLIQKKIKEVLREAGLHEQVARCQAVEGIGFLTATALVMAFMRGEFKSSDSYIAFLGMDLRVIDSGQKNGRRRLTKRGCSEIRRLLHNAAMSASRTATWKGLYEQHRNAGKATTQALVILARKLARVAFALMKNQDEYVTKGGKAPC

SEQ ID NO: 474708 - protein, 343 aa, unidentified
MQLTTIGLDLAKQVFQIHGVDATGSVVVRRRLRRAEVLRIFSATEPCLVGMEACATAHYWARELVALGHRVKLVPPAYVKPYVKRGKTDAADAEAICEAVTRPTMRYVPIKSAEQQAALMLYRSRDLLVRQRTMLAHAIRGHFAEFGIVAPQGIGRIGELAALLLDDSTANLPVVMRQTLTTLIGQLQGLGDRVAALEAQIVAAHRQNEKSRRLASTPGVGPITASALVASVSDARQFKSARHFAAWLGLTPRSHSSGGKDRPGGISKEGDPYLRRLLVTGATCVIRHARTKAPGEAGWLKALLARRPARLVSVALANNMARIVWVLLTRDEVHAPPSIRAAV

SEQ ID NO: 474709 - protein, 404 aa, unidentified
MKGQIVSIDVSKGKSDYQAFKEMNVKYTGSRSIKHTKEGFDEIVSLVREMEKKLETEVCVVYEATGVYHRVLKKVLEDNNIKQFIINPLLSAKTRKNDSLRSPKTDKLDPKSIAKTYYSHSLHNSHKPETIYHELRELSRYYEDILVHLRKDKVAFRAQLDVVFPGYDTLYDDLYGPVALAVIEKYPHPEMLQKKKINTVSKVIQSKTCHRQAMSDTMADKAIEYSKTIYSGCDKDDIEVLILQRFIKKLKEDMAEAERTIGEMIKLAQELPDFSIIKSIPGIGDNLAARIIAELGDMTRFKKKNELVAFAGLDPRISESGQNDGDHMHITKKGNKRLRCLLYLAVTCSIRLKRDDNSIKDFYIKKKQQSNPMCSKAAKTACASKLVRIIYSMCKTGELYQYNK

SEQ ID NO: 474710 - protein, 414 aa, unidentified
MTNPLLVGVDVHRQTNTVCLMDRQGQEAGPRFTVDNNSPGTEAFIQRVAQQVLAGHFDAVKIAAEATGWYWFHFLQTLDQDPLLNQWPLELYPFNPRLTANFKKTYVDLDHSDPIDAFVAADRLRLGRDLPAPFHYEGRYFPLRLLTRYRYHLVHNLAREKAYCLACLYLKASEYTRKDKKPFSNLFGAASRAVLQEFASIEEIAAIPFDELVEFIDAKGKRRFPNPTDNARKLHLVAHDSYHLPEALQQPINLILGLTLRHITFLEGQEKRLNTALAQRMEAIPHSLDTIPGFGPVLSGGIISEIGGIERFDYNQAKVAKFAGFKWRKHQSADFQADETRLTRTGNRYLRYYFCEAANAVRRCDAEYAAYYQRKYEEVCKHQHKRAIVLTARKLVRLVVRLLTTNQPYQPRRC

SEQ ID NO: 474711 - protein, 343 aa, unidentified
MEHYIGIDVSLEQSSLCVVDATGKIVREVKVASEPEALVGFCRGLGLTIARIGLEAGPLSQWLHAGLSKAGFETVLLETRQVKAALSAMTVKTDRKDARGIAQLLRMGWYRPVHCKTVPAQEVRALLAGRRLLLGKLRDVELSVRGLLRGFGLKVGTISKGRFEARIRELIAGHAMLERVIEPLLRARDALKREFQALHRAMLAIVRGDEVCRRLMTVPGVGALVAVTFTSAVDDPARFGRSRAVGAHFGLTPKRYQSGETDVVGAITKVGDGAVRAVLYEAAHTMLTRSCRLSALKRWAVEVGKRRGLKRAKVALARKLSVVLLRIWTAGGVFRFGKEAAAA

SEQ ID NO: 474712 - protein, 437 aa, unidentified
MPHQGNLTYWGMVMNEQDTVVYSAYVGIDWADSKHDVCIQSATSKTREFDIIRHRAEAIDVWMKDLHQRHGGSIAVAVELSKGPIVSALQKYDFIDIFPVNPGSLAKYRETFQPSRAKNDPTDAELAVDMLLRHPEHFKVLKPQSARMRALTTMVEQRRCLVGERIRISNRLRSALKQYYPQVLEWFDHIDTPLFCAFVKRWPTLRQAKRARSNTLKRFFREHHMYREAVVESRRQAIHAASPLTLDDAVIIPYRMLVLVLVEQLELMFRAIDQFDDEISKLAFQHPDYALFQSLPGAGSSLAPRLMVAFGEQRERFSSAGDVQKLSGVAPVTERSGQKHWVHWRLQCPTFMRQTFVEWAAQTINKSYWAGAYYRQQRDKGATYQAAVRSLAFKWIRIVYRCWQTGVAYDESRYLKALERRGSPLVTRQKIHESALD

SEQ ID NO: 474713 - protein, 287 aa, unidentified
MGEVITIGVDIAKLVFQIHGVDADGTVVIRRRVGRARVLEFFADLPPCRVGMEACATAHQWARELAKLGHDTRLMPPSYVKAYVKRGKNDAADAAAICEAVTRPSMRFVPIKSVEQQSVLMLHRARDLLIRQRTQLTNALRAHLAELGLVAAKGREGLHQLATVVTECGNERLPSDARFACQAIVTQLHAIQIEISGLDKRITQTHRANADSKRLATIPGFGVILSTAVVATMTDPKAFRTGREFAAWIGLVPRQISTGRKERPQQVRLLIVPFCSSHRHQVGSHVL

SEQ ID NO: 474714 - protein, 430 aa, unidentified
MYYVGIDIAKAFHIACVLDESNKLIVKNLRIESEISDFSLLNSELINITEDKTEFLIGMEATGLLFENLYLFLQNQGYNVVLLNPYQTNRFREMDTMKYVKNDNIDSQMIAALLKSGRYSQGYVSEDLYQAIKSLYRHKATLMQEVKSAKRQVSTTLAVVFPEFEQIIKDPFSVSGMALLEKYPTAKHYKGASAQRILKVFRNIKGNNFNLQKANDLLDLARLTIYQGNAQEERAYVILSNLRRIRFLKEEIEACESQMFTLLNESEQAVSSSISEDEEIYIADLVDNLRSIDGVADKTIFALLSECGDIARFKSGQAFIGFLGLYPTLYQSGNSTKYGKLAKRGARLAKLALYQAAIACVRHNDELKKVYLDKKSSGRAPKECVIIVARKLAMIIYSIYKNNTPYNPARVFNAVSGNGTVTRTQASLSH

SEQ ID NO: 474715 - protein, 449 aa, unidentified
MSRPQVIDDEEHERIHDKVAAIDVAKDAGVVCTRTPHPSRPGARRSRIWTVKARMNTIRALGRQLHKDGIEIVTLESTSDYWRIWFFVLEAAGLAVQLDGAAQAKNLPGRPKTDKLDAQWLARLTEMGLLRASFVPPKAIRDLRDYTRARTRLVQERTRCWQRLEKLLEGAQVKLSSVASKLTTVSAQDMIRAMIAGQRDPRVLAALARTGMKAKHDELVQALDGMFDDHHGELARLLLDQIAGLDGKITQLGTRIEQAVTALPDAWGINAGGTTGPQAGTGPDAAVIPAVTRLAEIPGISENLARAVIAETGLDMRRFPTAGHLVSWAGLCPTARQSGPRTRAGKKGQGNTWLRGHLGQAAAGAARTATFLGERYHRIARRRGKAKAQVAVARSILVIIWHLLADPSARYTDLGYGYYQDRTDKDRKLRNHMRQIEALGFTVTLNKTA

SEQ ID NO: 474716 - protein, 389 aa, unidentified
MILVGIDVAKDKHDCCIINSDGKFPEEVFSILNNREGYETLYKRICSLTVDFTKVKVGLESTGHYSSNLLAFLLDKHLTAYVINPLRVNLFRKGQSLRRTKTDKIDSRNIAHLLMADSSLKPYSLSSYHMEELKSLTRYRGTKVRERTKLKTSIATLVTMFPELGQMVSSIHIHSIYAMLEKFPGSAYIAATHLTRLTALLLKASRGRFGRETAIRIRDTARRSIGAVSPAKSMELQHTIAHLRVYDQEIGEIESEIEKIMDDVNSPITSVPGIGMQMGAVILAEIGSFRRFDSPDKILAYAGMSPSMYQSGKLTGSYSRMEKRGSRYLRYALFNVTRYVCHYDPGFTAYLSKKRKEGKHYYVAISHAVKRLVRVLYAMEISGNRYQTA

SEQ ID NO: 474717 - protein, 406 aa, unidentified
MKRLFAGIDWASRNHAVCIIDAAGTICERFEVTHDAAGLRELLARMRHHAATPRQLPVAIERPSGLIVDALIEAGHPVVPIHPNVVKATRPRYRSHGAKSDASDAYLLADLLRTDGARFRALQPQSDAIRALRALVRGRDDLVSTRVALANQLRSLLDSFWPGAAGLFADIDSPIALAFVQRYPTPASAARCGEKRLAGFLRKQHYSGRRRPAELLERLRAAPAGHADQREVDAKAHLVQALAVTLSKLVEQIALLTARIEHTISELPDGQIIMSLPHAGWLCAAQVLAELGEVRERFPSDAQLAAEAGVAPVTYQSGKSRSVTFRWACNHRLRRAVTCFADNSRQASQWAAALYARARSRGCDHPHAIRILARAWTRVLWRIWVDRCTYDPARHRAVLAFNTPGG

SEQ ID NO: 474718 - protein, 357 aa, unidentified
MPLRFLGLFQVPFLLFDISKIKVMKKIFIGVDVSKLKLDFCNYQDGVFDKEEIIANHSLAIKRHLIDILSDIAKDSLLICAEYTGKYIYPLTCVCDELGIDLWIENPVQIKYRSGMQRGKNDKLDARKIATYACRFEDQAHLFSMPEKSIQSLKQLVRERDMLVCDRAKYKGQLTDQRDFMDQLLFKRKQKRLLQLIANLNKVILQLEEEIQSIVDNDPTLSKQHHLLCSIDGVGKRTSLKMIIETNAFQDFKDPRKFCCHAGVAPFSYTSGSSVRSKRKVSHRADKSIKSLLHMAALSASKTSGELGQYYCRKVAEGKNKMTVLNAIRAKLVLRMFAVIKKEKEYLQNYINPLSVS

SEQ ID NO: 474719 - protein, 344 aa, unidentified
MSEDYDGGQFVGIDLHRRRSVIVRQTAAGERLSVVRIDNDPVALGLEIAKAGPDPEVVLEATYGWYWAADVLVAAGAHVHLAHPLGVKGFAYRRVKNDVRDAADLADLLRMGRLPQAYLAPPAVRELRELVRHRAKLVALRSGIKAQVHAVLAKQGLRIAVSDLFGVGGRELLARAPLDAPFRARADACCRLIDAFSFEIDAVASQLRGRLAGHPGYHAIQRVPGVGPTLAAVFVAEIGEPDRFPTATHLTSWAGLTPRHRESDTKVHRGSITKQGSTLVRWAAVEAAQKIPANTGWLVSNRARIVERRGRNIATVAVARKLLTLVYYGLRDGHIRALARPEAA

SEQ ID NO: 474720 - protein, 367 aa, unidentified
MKKVSTAATKQSRNILQQQLTIGLDLGDRNSWYCVLDETGRIQLEQRVRTTAKALQEVFGVMPRSRIALEIGTHSPWISRLLSELGHEVIVANARKVRLIGESRKKDDRLDAQTLARLARIDPELLYPVKHRSAQAQADLMTIRARASLVRARTGLVNAARGLAKSYGERLRGCNVRNMDPEKAEGLSPELQRALEPLLATIEELSERIVEYNDRIEAQAQASYPQVELLKQIKGVGTLIALTFLLTLEDPHRFRKSRDVGGYLGLQPGRRNSGQSEPQLHISKEGDPYLRTLLVQGAQHILGPFGIDCDLRRWGLKLAERGGRNGKKRAIVATARKLAVLLHHLWVSGEVYEPLHNSSRPRVTAAA

SEQ ID NO: 474721 - protein, 415 aa, unidentified
MYYVGIDIAKSFHVVSVMDDKETKVVSKPFRVSNDTKGFEKFLTILKSVSLDTKEFVIGLEATGIYGENLLEFLKSKGYIVKLLNPFQTSRYRERITMKKVKNDDIDSLVIALLLKDGKFSSGYVTDDEYQSLRTLYRNRATIQSDMKEVKRRILTQITVTFPEFEGFINPFTVSGLALLDKYPTAHHYKHSSVDRIMKLFRHIQGNNFTKDKALKLLELSKESIYSGKAKDARAIAIKSSIRLLKMYLSELEIIEAEILSLLDDTATPTTVNAAGEEIKRADTLIANLKTIPGVAEKTIAAIISECGDLNRFPSIAKFIGYLGLFPTENSSGNSKSIGHLSKRGSPLAKHSLYMSAVSCLIHNRELKQLYDNKRSEGKSKKEALIAVSRKIATIIYSIFKYNIPYDPNRVFAKS

SEQ ID NO: 474722 - protein, 406 aa, unidentified
MLLDHPADQTAIRTQFGAIFVSLELSCSKWLVTSLSPGNGEKMSKRSLEAGDMPGVMCLFADLKRKAAIRTGKTYPIIVIQEAGLDGFWIDRVLQGQGIESHVVDAASIAVPRRKRRAKTDKVDGEKLVRVLLAYKRGEPRVCAMVVAPSPEEEDSRRIYRERQVLIAERIAHVNRIKGLLFSQGIYDYEPVGRKRRARLAQLRTGDGRELPVHMKAQISRELDRLELLLEQIKALEAERDTMLEAARQTRREDKPHPVAMMFELKGIGADFATGIWSEGLCRHFDNRRQVGAYAGLAGTPWQSGSIEREQGISKAGNPRLRTLMIQLAWLWLRHQPQSALARWFHAQGLRDRKKWRKSAIVALARKLLVALWKYVTHGVVIEGAVMKSTANKPRARKSAVVAMAA

SEQ ID NO: 474723 - protein, 346 aa, unidentified
MENRTVVAVDLAKTVFQIAVSDTPGEVARSRRLTRPGFLAFFEKLPPVIVVMEACGSAHHWGRQLQALGHAVELLPAHLVRPYVPRNKTDRADALGILEAWRNKDIHPVPVKTIDQQALGCIHRFRSGWIATRTAQVNTIRGLLREFGILIPLGVEKVVPQVRLLVEDADSHVPCAIRSSLAAACDEVELLDGRIKQAEKELESLCEQDPVASRLRSTPGIGLITGTALVARVGDVNRFRSGRHFASYLGITPREHSSGLKQRFGRISKRGDGYLRMLLIHGARSVICHARRRKTHDRLRDWALKLQSRTRHNKAAVALANKMARIVWAVWKHGRAYESTQAIAVA

SEQ ID NO: 474724 - protein, 350 aa, unidentified
MMEAYDGRQVVGMDLHRRRSVLVRMTEDGRKLETVRIDNSPAALRAVLARAGTNPRVVVEATYGWYWAADTLAAAGADVHLAHPLGVKAFSYRRVKNDEKDAADLADLLRLGRLPEAWIAPPQVRELRELTRYRIKLVRLRSSAKDQVHAVLAKLGIPVPCSDLFGAFGSAWLDGLQLPQPYAGKVASLRQLTGWLTSEISLLDVVIADLLGACPPYRAVRQLPGIGPVLAAVAIAEIGDISRFPAPGQLCSWAGLTPRHRESDLKVARGHITKQGSPLLRWAMTEAVQHQPAGSPPRELKDRITARRGNQAKNIAKTAAARKLLTCVFYAMRDGQVRSLAASARALQAG

SEQ ID NO: 474725 - protein, 366 aa, unidentified
MVTEDVEWFAGIDWASQTHQVCLVDAGGKIVGEHGFAHGGAGLAELCSWLLTMTRAAPTAIAVAIEVPHGPIVEVLLERGFQVYAINPKQLDRFRDRFTVAGAKDDRRDAHVLGDSLRTDRHCFRRLSAENANVIELREWSRMSEDLQQERNRLANRVREQLWRYYPQALAISDDLAADWFLQLWAAAPTPATARRLRESTVGGILKRHRIRRITAAEVLASLRQKPLTVAPGTAEAASAHIRTVAQRLTLVNRQIKQAHHRLDALSDRITENEGDSDAMGQKSEQRDVTILRSLPGVGRIVLATLLAEASEPLRRRDYRTLRTLSGVAPVTRRSGKYCIVVRRQACHMRLRSAVYHWARVATQHD

SEQ ID NO: 474726 - protein, 421 aa, unidentified
MRGLRVKRVRTVREGTLIATVDIGITNNTGYCTTLDARSTKPFSFDNTKEGFEKFWYMTVASKNRFGCDEVLIGYESTGPYAEPFIHYLANRHVKIVQVNPMHTKKMKEVNDNSPLKTDNKDPRVIADIIRLGHALTIVVPEGDAAYLRRLNNARERHVGEQTALLNQLQQLVFLIFPEFKTVLRNMKGKTAQYILKRYGTPERIGTLSKEALGEEIRKRSMGKFGVKDAESLIGLARETVGIKEGIAGIFMDIRHILMQLEAEVRFISEIEAEMGATLERIPCSARLLSIKGLGIVSVAGLIGEVGDFSKFSTQSEIMKLAGLDLYEISSGKRKGQRRISKRGRSLLRKILFYAAIQTIRKNGIMSEYYARLTGRGMDRMRALIAVSRKLLRIIHAIVRDNRDYVGQYQTSERRVIKMAA

SEQ ID NO: 474727 - protein, 337 aa, unidentified
MTTETVSKSATPVFAGIDVGAAELLLVIRKNATSMKAQKFANTPAERLRLLKRLSRFPGITVCLEATGVYHLDLALALADAEVRLMVLNPRAAHNFAKVLLRNSKTDAVDADTLAQYAERMPYQPWLRPATEALMLRTLARRINTLTRNKAAAKNQHHALTFSPETPKAVLRDLKLSIAQLEKRIDHLAMEAKTLIRTHPALARPFDLLLTVKGIGETSAIALLGELMLLPADLSHRQWVKAAGLDPRHFKSGSSVEKRARISKAGNRYIRQALYLPALSAKAHDPHVKGFFEHLITHGKTPLQGVCAVMRKLLHAIHGMFAHNQPFNNSRFYALPA

SEQ ID NO: 474728 - protein, 342 aa, unidentified
MNITTIGLDLAKNVFQVHGVNEQGKTVLKKQLKRSQVLPFFANLAPCLIGMEACAAAHHWARKLVTLGHDAKLMAPQFVKPYVKSNKNDARDAEAICEAVSRPHMRFVPVKTPAQQAVLSLHRARQGFIKARTAQANQLRGLLGEFGIAIPQGIRQLSTHVPDIVEDADNGLPGLMRGLVQRLWEHFQELDRQVGELDRDIRRLQREDEASRRLAEIPGIGFLSASALAATVGDAKAFANGRQLAAWLGLVPRQHSSGGKEILMGISKRGDCYVRTLLIHGARAVIQQAERRNEADSWLKRLLARRSKNVATVAVAAKNARIAWAILAHGRDYDSEYQPVAP

SEQ ID NO: 474729 - protein, 311 aa, unidentified
MTLYIGVDFHPHQQTVSYCNTEHGEVEQISLAHNVELVRRFYGQFPKAVVGIEASCTAAWFEHLMNELGHDLQVGNPTLIRARARSRHKSDKRDADLILELLLKGEFPSLWRRSTKSQSVLEQLRFRHQLVKHRTQVCNRLQALAHSAGLPKRGIQTKRARLALMAANFTETQSFERSQLFELLDDLSGRIKVIEKWLEEKAAGDAQVGLLLSHKGIGTLSALVVVHTLGDITRFPSSKEVVAYTGLDPLERSSAGKVRTGSISKAGSAVLRHLLGQAMHVAMTASSKHFIKDWRTGAQSRSPRSPRLENC

SEQ ID NO: 474730 - protein, 354 aa, unidentified
MSQTVNAAIAVVGIDIGKNSFHIVGHDERGAIVLRQKWSRGQVGGRFANMPPCLIGMEACVGAHHLSRKLRALGHDARLMPAKYVRPYSKGQKNDFRDAEAIAEAVQRPTMKFVATKTADQLDLQALHRVRERLVSQRTGIINQIRAFLLERGIAVRQGQRFVRAELPRILATPPDVLSPRMVRMIEDLAGDWRRLDERIEDLSNEIVAIARQDAGCERLMSVPGIGPIISSAMVAAIGAGDVFTKGRDFAAWLGLVPKQISTGDRTILGKISRRGNRYLRVLFVQAAWVVLIKPKVWERHGLKPWIEAARKRLHHNVLAIALANKLARIAWSVLAHGRAFEARKIDQAANQSA

SEQ ID NO: 474731 - protein, 350 aa, unidentified
MIIIGVDFHPEFQEIASVDMDTGEYQEKRLTHPGEAEQFYRGLASLGQAVRVGMEASGHGRWFERLLEQLRIELWRGDATVIRAKRGRMQKTDREDARHILKLLLKDDFPRIWVPSWENRDLRQLLWHRHRMVQARTRVMNQLQAVALNEGLRCKKRLWRQGGRQQLEAFQLAPWASRRRRELLELLDRLNPTIAELSQAIEQEAEKCPEAKRLMTHPGVGALTALAFVQIIGNAERFHCGKQVASYLGLVPLEESSGNRRRLGHITKQGSSIVRFLLVEAAQVTVRSLPVWRSKYVHLMMRRGRKTAKVAMARKLAVHLYWMWRKGWDYEQWKKFGSNVGRPGYRDGVQ

SEQ ID NO: 474732 - protein, 401 aa, unidentified
MNAVGIDVSKGKSMVCVMRPFGEVVLEPFEVLHTAQSLNDLAGKLKALDGETRVVMEATGNYHKPVAFVLHDAGLFVSVVNPVLIHDYDNNSLRRVKTDRKDAVKIANYTLDKWTRLRQYLPEDDTRLALKNCYRQYQQAVAVRTMLKNNLISSLDLTFPDANKLFSSPAKSNGCEKWVDFIGDFWHSECVSSLSSDAFAKKYLKWCQKHGYNFTRSKSDTIYACAVNAASLPKSPTSKLLIQQQVAQLKAVSQSVAAFQQEMLRLSQQLPEFDTVMEMYGVGPSLGPQLMAEIGDVRRFSSKKSLIAFAGIEPQPNDSGKIVGNDSGISKVGSAVLRRTLFLIMTVILKTQPQDEPVFQFMNKKRSEGKTYKVYMMASANKFLRIYYARVKAVMDSKHSK

SEQ ID NO: 474733 - protein, 391 aa, unidentified
MSMYFIGIDISKYKHDCCIISAADQKVVSKVTIKNNKAGFNELLTIIHSLANPADIRIGFESTAHYALNLELFLENSLLTFMEVNPVLISEYKKSKTLRRTKTDSVDCESIARWLMTVEYKPHSKGFYHAYSLKSLTRLRDKLIRQRSFYLVKITNVLDHTFPEFKPFFNERLSKTALYLLENYGSAEKMARMNSASYEKLRSVSRGKFSPQQFLRLKELAVNTVGVNNSIFDVELNSLLSLYKSLVKEIDIIKKEINQLIEEVHPHYMSVPGIGPLSAAVIYSEYGDISNFTNPGQMLAFAGIEPGINESGTESHGGKMVKRGSSQLRYTLINCCLPLIRFDMTFATYYAKKRGEGKPHRVAITHVAKKLIRVIYALESQDIDFNAQELR

SEQ ID NO: 474734 - protein, 341 aa, unidentified
MVTTIGVDPHKATHTAVAIDEFEMVVGEITVPADRSQIKKLMDWAETVNGDRSRVWAVESAGGLGYLLSQQLVAHGEQVLDVPAVLASRVRVLSSGKSDKNDPNDARSVAIAALRQPGLAMVRREDHAQVLRMLAKRHLELTSLRTQAVCRLHSVLVLLRPGGMTRRLSATKASRMLQGMRTLDAVGEQRRLIAKTHLADIRRLDRDIKATKVLIRRAVAVSGTTVTDVYGVGPIVAAFLIGYTGDPRRFATADHYAAYNGTAPIEVSSGGKTRHRLSLRGNRKLNHAIHMAAVTQIRFQTPGRAYYDKKLAEGKTKKEALRALKRRVSDAVYQRLVADHG

SEQ ID NO: 474735 - protein, 347 aa, unidentified
MSTVTIGMDLGDKKIQICVLDARGRKVRQGSVTNTPAALRKYFQRYAGAIVAMETGTHSPWISRLLAFLGCQVLIGNSRKLRMIWNNPRKSDLRDAEMLARIARFDAELLCPVHHRSEQAHADLELVKARDVLVRTRSTLVNHVRGAVKAFGARIPRCSAESLPLRALPCLPETIRPALTPVLETIQRLTEQIRDYDRRVAIVSREQYPETQGLQQITGVGPLTALAFVLTLEEPQRFEKSRSVGAYLGLTPKRDQSGETDKQLRITKAGNKYLRQLLVTCGHYILGPFGPDCDLRRYGLRIAARGGKNAKKRAAVAVARKLSVLLHRLWQTGAVYEPLRSGGPQVA

SEQ ID NO: 474736 - protein, 367 aa, unidentified
MIVNEVAKNVEKIISIDTAKNSFQVLVVNHKTGKKKNTKVQRSKFVEYIFKQGPCLIFMESCSASQHWARLFESFGFTVKLIAAQHVKAFLRNRRVKNDERDAEAIYKCGIQPDTKFVRIKTVEEQTVALLHTLRKAAVSQRVELSNRIRGLLAEFGIVVARGKGSFNSEIEAMFNECEKIHDVYLRAAITSLFEDYHRLEQREKELSEKIEALNKDNELVKIALTCPGVGSLTASAIVAEVGDASQFRNGREMAAWNGVVPSQHSTGGRSTLGGITKTGNRYLRTLLAQCACAVIQNASRHLEQGKDTHLDRFALRLKLNGKPVKKIMIAIANKIIRILWAMLTQRKTFENKANEISDTSAELQLA

SEQ ID NO: 474737 - protein, 372 aa, unidentified
MDGPYFTASMCQDRGRWLNATDEGAAHMQVTTIGLDIAKRVFQAHGVDETGKAVLRRKLQRPEVLEFFKGLSPCLVGIEACGTAHHWAREIQALGHEVRLMPASYVKPYVKRGKTDAADAEAICEAVTRPTMRFVPIKTAEQQAVLMLHRSRDLLVRQRTMLVNALRGHMAELGIIAPQGISRVSDLVAVLLGEDDAVMPPLARQALRGLAEELESLGRQVEALEVAILAWHKGSEASRRLATIPGIGPITASAIVASITNPKEFRSGRHLAAWIGLVPRQNSSGGKERQVGISKQGDRTLRRLLVLGATAVIRHARTKSASEANWLRRLLERRPAKLAAVAQANKTARIVWALLTRGGTYRHPVAAQAVAP

SEQ ID NO: 474738 - protein, 347 aa, unidentified
MYIGVDTHKKRHVLAALDERGQLCGTYSVANTPEGWVAALRWARERDTACIWGIENSGSLGKGFAQFLLGSGGTAVHEIVPHRTAQYRKRGRTQDKTDHTDALAMARLLQAESEHLPRVERDDLSTELRLLSDHRDNLVAERTRLVNQLHAQMLQIDPCYAEQSGTLTSRTGIRYCHALALPHADGVVQTRLLIVRQLSEQLIRLWEEIEEIETALASRVRAMETPLLGLCGVGVVAAARLIGELGCTPRIHSAAALAALAGVAPVAVSSGGRNGHRLNRGGNRRGRMGSLSVTIDDWQRHCARVWHLVVIARMLTTASRSQATRSLAPMRLARSARPPKPSPAPPP

SEQ ID NO: 474739 - protein, 430 aa, unidentified
MLLFLFLKGGFNLRLVYPVCCGVDVHKKTIVATIVTTDKNNVSTYLQKTFSTINSDLERFHDWLKENNCYHVCMESTGKYWIPIFNVLESDIHVILTHPKYVKAIKGKKTDKKDSKWIADLFKFDMVRNSFIPPKDIRALREITRYRFKLVCMRSSEKNRIQNSMTVSNIAIANVLSDPFGKTATQIMEYVLNSNTFDEKECSTLIKGKAKKKSAEIIESIKGFNLGSDQRFKMSKARDHLEYLEQLICDTEIELYARIQPHLQSVKHLATLPGITELSASLILAEIGTDMKNFESSKHLTSWAGLAPTNNESAGKKKSVRISHAGQYLKPLLVQCALAAVRSKKEPYFAIKYNRIKNRRGHKKAIIAIARMMLTAIYHMLLTGAKFNPIDYKELINPNPQPKKVELTVETALQYLASQGFNVSNVTPNP

SEQ ID NO: 474740 - protein, 342 aa, unidentified
MKEYVGFDVSKEETSFCVMDETGKILVQGKALSDPESLFEALREHTLCPERIVLETGTLSNWLTRGLHEYGLPVDVIDARQAHGVMKLQHNKTDANDAVLLAEIARTGFCRPVSVNSEAAQKHRMLIKARRLLVCQRRDIQNAIRGFLCALGIRFPKGSGKLGERVQTALMERPDLAPMIEPLLASVKAHEMQIKHLDREVFKQAKASKPAQLLMSIPGVGPITALGFSATIDDAARFRKSRAVGAYLGLTSRRHQSGEMDYSGRISKFGDSMLRSLLYEAANSLLTIVRKSHPLKDWARRIRKRTSHKKACVALARKLAVIMHRMLITGEAFRWPEKEITT

SEQ ID NO: 474741 - protein, 464 aa, unidentified
MANKQRTEQIEGLPVVRRNVCGVDLGSETHWVCAPTVDGSAREVTDFGATTAELIRMAEWLKERKVASVAMESTGVYWIAPFEILEGQGLEVLLVDTRQLGRVPGRDKKTDPTDCEWIQRLHSCGLLRGCFRPAEAICMLRTLLRDKSNLVAERGDWVRRMQKSLDQMNVRVHRAVSDVDGVTGMAILRAIAAGEREARKLAQLRDQRCHKTEEEIAEQLSGHWREDHLFSLKQGLKMYDAIEKQIAEYDREILQRLEAMQRDDLRGQSPPPLQSKEKAKAIRKRGEEKTRDALYRISGVDMVAIDGIGVETVQIVLSEYGFDLSRFPTEKEFIQHLRLAPYSPKTGGKPIRKKRRQNTASTRVGNALRMAAVAVGHSNTALGAQYRNTARRKGAGIAAFATARRMAVLIYRLLRWGQQYLDEGVEAFERRYQQNRLLSLIARAKQLGYQMIPNTTIAAEGVTG

SEQ ID NO: 474742 - protein, 323 aa, unidentified
MMGLPNSLCVGIDVSKNSLDIASNQTISPFSVSNDVDGFDAIIAELKQHSIALVLMEATGGLEAAVACSLQAQGFDVAVINPRQARDFARSMGYLAKTDRIDAAMLAQMAEVINRHPERVRFIRNLPDAERELLTAMVVRRRQLITMLTAERNRLHPSHPQSRKSISTIIDALKDELKRINKSMEAHISTHFKTLAEILGGVKGIGAATIATLLAEVPELGHLSRREISALIGLAPFNRDSGNMRGRRTIFGGRANVRSALYMATVVATGHNPVIKRFYNRLVESGKVKKVALVACMRKLLTILNAMIKKNEPWDSSHHYLSQ

SEQ ID NO: 474743 - protein, 341 aa, unidentified
MKNKSFIGIDISKNVIDVSIFCEGTPIKDFPHDVFNNSRKGFGEMCTWLKKNHVVLSNCLFGMEFTGSYSMELEKFLNARKYQFCMLSTHVIKHYLMGPKDKSDKIDSAKIADFLYRYNGTECVKPYKMPDKTMQRLKALMNERKFLVEQRTCFMNRRQLCTTKEDAQLYDSYIKKLSHDIENIESEEQKLLVTDERLFTTYWNLLTIPGIGFVNAINVIVITRNFTAFETARQYASYVGVAPHFRTSGTSVRWRPRPSARSDGQAKADLSMAATVAVQYDAELQSFYNRKLGGKQDSDTKRKALNAVKFKLVLRMFAIGKQNRKWEPLDSKSSNEKLAIS

SEQ ID NO: 474744 - protein, 413 aa, unidentified
MNLFVGIDVSSKMLDICFLDTNGVIYHEVSLNNDIFGAKAIKDQVIVLHDKHTFNKIVIGMESTSIYSHHPATTLAEDDDIKALGDVSVVVLNPKPVSQYANIFDEDKTDKLDAMNIADFLRNGRYKAPIIRQEKYVALQRLTRSRFQLVSQLTECKMHFLENLYFKCNTLVKELKEDGNTSVFGATLMDIFTDSLSLDEIALMELEDLVALLQEKGRGRFANPEKLAKTIKKAIRGAYRLGDMMQESVDIVLAMYADMIKTIKKQIQVLDKSITRLSEAIPEIQCLLSVPGIGPVYAAGIVAELGQIERFSDETKIAKYAGFHWKRKQSGDYDSARTPLSRSANRYLRYYFVEAANSVKMREPVYNDYYYKKYAEVPKHQHKRALVLTARKLVRLVDVLLRNHQLYTPERSG

SEQ ID NO: 474745 - protein, 343 aa, unidentified
MSEVTTIGLDIAKTVFHAHGADERGRGVFSKRLTRAKLLAFFAAQPRCTVALEACAGAHHWARELTALGHEVRLIPPAYVKPFVKRHKNDAVDAEAICEAAQRPTMRFVAVKSEEQQASALVFRTRDLLVRQRTQLINAIRGHLTEYGWVAPKGPAYVSMLGDLLEDEMGASLPPAALSMFRVMLDLLADLDERIAALDKEIAQRAREEETARRLMTIPGIGPITATALIALAPAAETFAKGRDFAAWVGLTPTQHSTGGKQKLGATSKMGERTLRRLLIIGASAVILQATRRGTVKGSWLEQMLARKPRMLVMVALANKMARIVWALLAKGGTYRAPTAVTA

SEQ ID NO: 474746 - protein, 370 aa, unidentified
MGDYSEAFVAFDTAKVKHSVAIADGGRSGEVRFLGEVSSSPATVARLIDKLAGRYKKLHVCYEAGPTGYGLYRQMRDLGHDCTVVAPSLIPKRPGERVKTNRRDAVTLARLLRAGELMPVWVPDATHEAVRDLARAREAAGDDLRRKRQQLLSFLLRHGRIFDGRSHWTMAHRRWLAGQKFEHPAQQIVFQDAIDAIEDAAARLRRLEEQLAAVVPNWSMAPVIAAYQAMRGTSFLVAVTFGAEIGDVRRFANPRQLMGFLGLVPRERSTGATVRRAGLTLAGNRRARRVLVEAAWSYRHPARVSQTLQDRLAGLPKTIRDIAWKAQLRLCGRYRRLSAAGKKLPVVIAAVAREMAAFLWAIGRQVAPAG

SEQ ID NO: 474747 - protein, 432 aa, unidentified
MISVSPPVAPENSVFAAFVGLDWADQKHDLVLYDQRGGRPEHRELIQTPEAIDEWACGLRQRFGGRPVAVCFEQSRGGIAYALLKYDFLVLFPLPPARLASYRESFSNSGAKDDPTDAALLVDYLLRHRDQLRVWQPDTPATRELQLLAEARRDAVDQRTRLSNQLTAVLKRYFPQAMVLVGHDVDRPLACDFLSKWPTLAAVQAAAPATLRKFYYAHHSRNEERIAERLELVKSAIPLTTDQALMQAGVLQVKCLIGQLRALAKAIENYEARLSELMDQHPDAVLFRTLPGAGPALAPRLLVAFGSDRGRFQSAAELQSFSGVAPVTKRSGKQCHVHRRWACPKFLLQTFHEFARCSCKRSTWANAFYLQQRSAGKGHHAALRSLAFKWIRILFRCWKTKILYSEERYLESLRLRNAPLLAFLPVSESPSA

SEQ ID NO: 474748 - protein, 340 aa, unidentified
MSSHFFCGVDLAKHHFSLHAVDDRGKVILHKSVSRAKLLTTLANMPPMRIGIEACSGAHYWAREFIKFGHDARIMAAKYVGPYRTKGKNDLNDAIAICEAVQRPNTRFVPVKSPERQAILSIHRMREHWVQERTALINRIRALLAEFGIVIPTGRHAIQRDVPLILEAADNGLPDIARAVLGDCFEHLQVLNQRIDDTELCFDMVTKASPNAQRILKVRGIGPQTATAIIATIGKGEQFDSGRDFAAWLGLVPKQYSTGGKPRLGRISKRGDKYLRTLLVHGARAAITNLGEKQDRLSVWGRNILERRGMNRAIVALAGKNARIIWALLHNQTDYQDYAA

SEQ ID NO: 474749 - protein, 404 aa, unidentified
MDVLHPRCCGLDVHKSSISACILLREAGRVQKHQRRFGAMTQELQELAEWLRQFGVSQVAMESSGVYWKPVWNILEGQFTVVLANAQHIKNVPGRKTDQKDAEWIAQLLQYGLLRPSYVPCEIIRDLRDLTRMRASLSQEASRISSRIQKVLEDANVKLASVATNVLGKSGRAMLEDIISGEDDPEHLASLALGHLRVKIPQLRLALEGKVRSHHRFLLRRLVDQIQFVEHEIGLLDERLEEIAQQRPELSQAVARWDTIPGIDRVAAWALLAEIGDNMAQFPTAGHLASWAALCPGNHESAGKRLRGTTRQGSPWLCRMACQCAWAAARTKNTYLTSQFRRLAARRGKKRAIIAVAHTIIVIGYHLQKNQSFDRIHSDGLKRYLVKRLQQLGHKVTLEPMEAA

SEQ ID NO: 474750 - protein, 351 aa, unidentified
MTMVGGLDVHRQQITFDYVDDDGLVRWGQIRPATRKTLRGWLAEHCPDGDAEFALEGCTGWRYIAEELATAGVGVHLGDPAEIAVARGPKKRAKTDRADARLLRTLLLQGRFPESWIPPAHVLEIRTLGRLYCTLMDQRRTWQQRIHAQLFHQGCPPIKALLSAAGRQALASAELSPIGRQYVDTALRRMNELTAEIKPLRTQLINFARHQVGCQTLQSRHYGIGWLCAAILWAEIGDARRFCSSDKLVRFAGLDVTVYSSDGKCSPGHLSRQGSPELRWAAFEAAKSAARRSSPDYGYYHKLAAKRDGHNGKNPTLAVERKILRRCYHTLRELGDAALALPVPQRKEAAA

SEQ ID NO: 474751 - protein, 414 aa, unidentified
MLKIVYPICCGMDVHKSFVVASIASTNEQGVTTYKIKRFSTFTGDLRRCATWLAKNNCKDVCMESTGKYWIPIYNILEPTCNIVLAHPKYVKSIRGKKTDKRDARWIADIFKHDLVAGSFIPPADIRQLRDLVRYRWKLTSFTTGEKNRAQNCLTVSNFKLDDVFSDVFGKAASAITARILENPTEKITDISGFRTKGMKATNEQVLAAVDGEMCEEQAEKLRIIRSHIDSLELCKLNLESLILSTAEKYLPQLNLVMTVPGIQSVAAIGIISEIGVDMSVFPTSKHLCSWAGLTPQNNESAGKKKTTRISRAGAYIKPLLVQCALCAIRAKRFPEVRNRYLALKKRRGHKKAIIAIARMLLTAIYNMLKKNEPYNPELYRSADRPPAHREVSVEEAVFILQRQGYLVTAPPTA

SEQ ID NO: 474752 - protein, 355 aa, unidentified
MDQKKYIGLDVHQASISVAVRDAAGKLVTESIIETKATTILEFVRGIRGSLWITVEEGTSAAWLYDLLKPHVTRVIVCNPRKNGLLNAGSKSDRVDARKLSDLLRAGMLAPVYHGENGVRTLRELGRSYITVTKDLTRVMNRVKAVYRSWAIPCAGAKVYSPRRRHAWLEKLSEPGVRRRAEQLYQQLDALRKIRREVRAELLAESQKHPANQLLRQIPRLGPVRVALLIGLIQTPHRFRTKRQLWAYCGLALQTRASGEYRFSDGELQAAKKSPALRGLNVNHNHDLKNLFKGAAMHVSISTDPLGDFYRNLLAKGMKPSMARLTLARKMSAIVLTIWKKGARFDPQELKQQAA

SEQ ID NO: 474753 - protein, 478 aa, unidentified
MTPPKDYCLAAPCPPTPLLPPLPVLSDALQVCNPHAAGIDIGEAEHWVAVPPGCDPQPVRRFGTFTVDLDALADWLIDCGVITVAMESTGVYWIPLFELLEARGLQVCLIDPRQAKRAPGRPKTDRLDCQWLQRLHAYGLLAAAFRPADQICVLRSYLRHRQMLLTYGAHHMQHMHKALQQMNLKLSQVVSDLTGATGMAILKAIIAGERDPLTLAKLRNPHCQHSEDDIAKALQGTWRAEHLFALQQAVELYQFYHQQLTVCDQHIQTHLGTFADKSHGQPLPPKARRHKKANEPRFDARTPLYRLAGVDLTTIEGIEEGTALVILSEIGTDMSRWPSVKHFCSWLGLSPQHKISGGKVLSRRVRPGAQRVAVALRLAARTVHKAHTALGAFFRRLRSRLGAPKAITATAHKLARLVYSLLKHGSAYVQQGLDAYESQYRERKVKAMARQAQALGYTLVALGTPEGASLDAVTAPIP

SEQ ID NO: 474754 - protein, 340 aa, unidentified
MEYGAIDLHLKASLIRIVDATGTVILDRTIATGRDGFARIFRDRAPMRVLVESGTESEWVAQTLEGCGHEVIVADPNYRLMYGQRARRIKTDKRDVAALVEACRLGIYRAAHRVSATQRATRRVVRIREQLVRTRTQTINQLRAQLRQEGLRLPRGTAETVGARFAALGMPDPVRVSLAPLIAVLTSLAPLIAAATTDVGARASADPVVRRLQTVPGIGPVTAVTFRATLDTWERFRDARAVTAFLGLVPREDSSGTRHRKGAITKAGPGPLRALLVQAAWGVWRQRAGRAALHAWVEGVAARRGRRIAVVALARRLARILYAIWRDESEYQAVPRAVAA

SEQ ID NO: 474755 - protein, 389 aa, unidentified
MKIFVGIDIAKLNHFAAAISSDGEILIEPFKFTNDADGFQLLVSKLESFDKNSIIIGLESTAHYGDNLVRYLVAEFYQVCVLNPIKTCQMRKNNVRKTKTDKVDTFVIAKTLMMQDDLRFITFFDLDMMDLKALGRFRQKTIKQRTRLKIQLTTYVDQVFPEIQYFFKSGLHQNAVYALLKEAPSPKEIASMHMTHLANLLKVNSHGHFTKEQAKELRVLAQKSVGANDSAISIQITQTIQQIELLDSQLEKIEAEMTDIMKFNDSVIMTIPGIGYINGGMILGEIGDIHRFSNPNKLLAFAGLDPSVYQSGNFQAKTTRMSKRGSRVLRYALVNAAWNVVRNNATFKAYYDAKRAEGRSHYNALGHCAGKLVRVIWKMLTGEVEFNLE

SEQ ID NO: 474756 - protein, 310 aa, unidentified
MKSILRFVGLDVHKDTIVIAVADQGRDGEVRSYGTISSDWHAVERALTKLRADGATLQVAYEAGPTGFGLYRQLRKLKIDCIVVAPSKVPVPGGRRQKTDRRDAELLVRLLRAGELTAIHVPDEVDESIRDLTRARADAVDDLRRAKQRLKSFLLRTGYHYQGKANWGEKHQRYLRQLTLPLSAHKAVLEEYLVALDQGCERVKRLDELLEAQVPQWCHYPAVQTLMAMRGFQLVAATVLVAEIDDIRRFAHPRDLMAFLGLVPHEHTTGSTRRIGAITKAGNGHARWMLIETVQSALFPPKVTAALTVR

SEQ ID NO: 474757 - protein, 323 aa, unidentified
MMKDQYPFSHVVGVDVAKATLDFAFADSNQTLSIKNDTVQIVSQLIERIKNPQTTLVVMEATGGYEGLLVTLLHQHRIAVAVVNPRRVRDFASGIGKDAKTDPIDAQAIAFYGQVVQPHAQAAKTDEEKKLQALVERRRQLLDLINQENNRLQQTADREIQGYIQESLETLKKQVKSIDERLAKCVKEDTANARKIEILESVQGLGPVAVSTFLAELPELGELNRGEIAKLVGVAPMNKDSGQASGRRTTHGGRSYVRRVLYMATLVATRFNPRIKAFYQRLLKAGKPKKLALTAAMRKLLTILNTLIKNDEIWNAEPNKASV

SEQ ID NO: 474758 - protein, 398 aa, unidentified
MTESSDYESVQVFIAVDVGKDTHHAVAINRSGKRLFDKALPNDENKLRSLISDLKQHGQILLVVDQPATIGALPVAVARSEGVLVGYLPGLAMRRIADLHAGEAKTDARDAAIIAEAARTLPHALRTLKLADEQIAELSMLCGFDDDLAAQTTQASNRIRGLLTQIHPALERVLGPRLEHPAVLDLLQRYPSPEKLASLGEKKLAAQLCKLAPRLGKRLAADIAQALAEQTVVVPGTNAAAVVLPRLALQLITLRKQRDEVALEVEQRVLAHPLYPVLTSMPGVGVRTAARLLTEVACRAFASAAHLAAYAGLAPVTRRSDSSIRGEHPSRRGNKALKRALFLSAFATLRDPLSRAYYTRKMSQGKRHNQALIALARRRCDVLFAMMRDGTFYTPQGS

SEQ ID NO: 474759 - protein, 406 aa, unidentified
MMTADDRHVTGGVDTHGETHVAAVLDSATAQRLAVAEFRADTAGYVALREWMAGFGTLDAVGVESTGAWGAGLARSLRDNDVIVIEVDRPDRKARRFEGKSDPLDAEAAARAVISGRAVGVPKTADGPAEAVRAIEIVCHGATRDRTRAINQFKALVVTAPADLRERLVAVSFRRQLELARRFRNDYDDLVETQLRFALKTLAAKIGFLDDQIAELETRMSELVGRAAPALAGTFGVGPHVAAQLLTTVGDNPERLGSEAAFAKLCAACPIPASSGKTTRHRLNPGGDRRANNALYTIVLVRMRHDPRTRAYVARRTTEGKTPAEIMRCLKRFVAREIYNVITNSPEDLPTGHEIRQRRLEAGITLTALANTLDIAPIRLSRVERSLDFNNNLARRAHDWLTQDAA

SEQ ID NO: 474760 - protein, 308 aa, unidentified
MKEVTTIGLDLAKSVFQVHGVDASGKPVIRRQLKRSQVLAFFRKLPPCLVGMEACATSHYWAREIAKLGHEVRMMPARYVKAYVKRNKNDAADAEAICEAVTRPTMRFVPIKTPKQQSVLVLHRSRHLFVRQRTALVNALRAHLAEFGIVAGVGRNGLEKLLEVIADDQDERVPPAARDCLLALRAQLAMVKQQILDADRRILVWHRASELSRRLDDIPGVGPLIATALVASIPDPHAFRSGRDLSAWIGLVPKQHSTGGRRRPWLAALLERRSTKIAAIALANKIARIAWAMMVRGTRYQEPIQQAA

SEQ ID NO: 474761 - protein, 452 aa, unidentified
MAEQMDHSKSLSLECIELNAAGIDVGATEIFVAVPPDRDPQPVRRFPTFTADLRAMAAWLVQCRITTVAMESTGVYWIPPHEILEEAGLRVCLVNSRHVKHVPGRKSDVSDCQWLQYLHSVGLLHASFRPDEKICALRALSRHRAGLIESAAVHVQHMHKALTQMNLQIHHVLSDITGQSGMAIIEAIVAGERNPLQLASLCHKGVRSSQQTVIKSLQGNYRAEHLFTLKQSLLAYRYYQQLMADCDQEIERLMRLLDGKIDPPQKSPMPPLNPRTQKRRKNQFHFEMGPELNRIFGVDLTAIPGISALTAHTLLAEIGPDLSRFPTVAAFASWLALCPSNKKSGGKVLSSRTRQTNSRANCALRIAAQTLARSRTHLGNFYRSMRARLGGPQAITATAHKLARIVYHLLTTGQPYDESVFLEEDRKQAKRYEKRLRKQAQALGFQLVPVAE

SEQ ID NO: 474762 - protein, 370 aa, unidentified
MLDTTTFVGLDVHARSIKAVSLDVMTGEVRCATFGYDAGAVAGWVRSVDPKARCVYESGVTGFDLQKRLSGLGVDCVVGAVSKMIKPSADRRRKNDRNDAELLARMLSVGNVVEVWVPDDECEAARDLTRALEDARDDLSRSKQRLSKFLLRHGLAFDERTPTGRRKGNWTRAHWSWIESIRFAEGADNDVLAYYVDAVRRAAEEKARLEGLVEAEARKPRWRRRVDSLRCLKGVDTATAADLVFEAGEFSRFRNARSFAAWVGLMPSEHSSGESDRRGAITKAGNKHLRKALVEAAWHYLTCSGRPKDLAKGQAPDRVARRHAAKGVRRLVERREALLARGVHGNKANVATARELACWVWAVGLMAEEA

SEQ ID NO: 474763 - protein, 356 aa, unidentified
MSRDIKYIGMDVHKEATVIAVLNGSGKLVIESIVETQASSILQFIHGLRGELHLTWEEGAWASWLYDLLLPQAAQVLVCDPRRNALLKEGNKSDKIDARKLADLLRTGMLRPVYHGEHGLRTLRELGRSYQTLSQDLNRVMNRIKALYRGWSIPCAGTQVYAPRYREEWLQKIEHAGVRRRAELLYQQLDGLQALRRTLRPELLAESRKHKASKLLRQIPCIGPIRAARLLALMQTPHRFRSKRQLWTYCGLGIETRDSAQYRFVRGQLQRAKKPQQIRGLNRNHNHEMKEIFKGAATRASCGVGPLRDFYVALLAKGMRPEMARLTLARKIAAIALTLWKKEERFDAEQLKLQAA

SEQ ID NO: 474764 - protein, 328 aa, unidentified
MNIPALGIDIAKLKFNACLINRDGKLRHKVFANTDAGFHQLAQWIAKQQVERVHACLEATGTYGERLALHLHAAGHLVSVINPAAVKAYAGAQLSRTKTDRVDAELIARFCLTQQPVVWTPPAPEIRQLQALVRRLEALIEMRTAESNRLEAAIGAGEVVRRSLEDHLAYLDSEIKRTEKLIRTHINNHSGLKEQSALLDSIPGIAQTTAATLLAEITDITQYRSARQVAAYAGLVPRERQSGSSVRGRTRLSKIGNARLRRALYFPAVTALRCSPFFRAWAKGLEERGKCKMQIIGAVMRKLVHLAYGVLKTGKPFDPLWTKEVQIA

SEQ ID NO: 474765 - protein, 330 aa, unidentified
MSNHSEAFVAFDTSKLRNAVAIADFGRTGEIRFLGEIENTATATAKLVRKLAGKYERLTFCYEAGPTGYELYRQIKSLGQECLVVAPSLIPKKPGDRVKTNRRDAISLAKLLRAGELTAVWVPDRHHEAMRDLTRARDTAVDDLRSKRQQISAFLLRQGLHYCAGKKTWSQTHLNWLASQKFEYPEHRLVFEEMMMAMRQAQERLERLEQAIRAAVPDWSLANLVTALMAMRGIDLIAAATFLAEIGDLSRFQSPCELMAYLGLVPSEDSTGDCVKRGPITKAAIAELDACWWNAPGATNIRRGWAKTSRRRLRPPRERFVRSPGRRNHA

SEQ ID NO: 474766 - protein, 348 aa, unidentified
MKYIGLDCHKQYDHATMIDTETGEIKAKRLSHIKEEFKEFIGDRTGTRMVIESCRDWSRTYELSEDLVEEVILAHPLKVKAIASAKIKTDAVDSRTLAQLLMADLIPQAHLRKGDNRVKQRVIRHRAFMVVMRTRVKSRIHGLVDSQLLSPQILQAKPINLFSKKGMKWLTSLEWAKEEDRKLVESHLRIMEAINQEISITNDMVNGIYEKDRDAQLLATIPGIGVTLAMLISTEIDGVERFRSPSKLCSYAGLVPSTHSSGGKTYHGKITSEGNRWLRWALVEAAVPASYADAEIKERLDTLRKTKGANVAKTAIARWLLKVVYHVLKERRPYIAAYNGMVKAGAAF

SEQ ID NO: 474767 - protein, 400 aa, unidentified
MNAVGIDVSKGKSTVAVLRPFGEVVASPFDVIHNDNDLKRLVKLIRSLPGESKVVMEYTGTYFEPIAQFLHNNGIFVSVVNALLVHDYGGNSLRKVKTDKKDALKLASYALDRWTKLDEYVPADEQRKILKLLNRQYNQSIKIQTMMKNNLISLTDSVFPGINRLFTSLERQSDGHEKWVDFLHAFPHKDCVAKLYLSAFKAKYKSWCSRNKYRYSESKAEKIHSYAKSVIAVLPLNESVKLIVTQVVSQLNTILETAFSIRTEMNRIASSLPEYDTVMSMFGVGKVYGPQLIAEIGDTRRFRNRRAITAFAGLDAPPYQSGQLDVSSRHISKRGSAALRKVLFQITEIFILSKPENEPVYQFIIKKRSEGKHYYSYRIAAANKFLRIYYAKVNQILNAT

SEQ ID NO: 474768 - protein, 327 aa, unidentified
MEKLTTVGIDLAKDVIAVCVLDVHGAAMERRVLRRDVFERWAEQLPASNVAMEACGSAHHWGRWFAARGHTARLIAAEFVMPFRKGGKNDTADAEAIAIAARQPTMRFVPIKTVDQQTILAWHSAREGWKEERTALLNRMRGLLAEYGVVIARSADRFLAVLPKLSEDSRLPDPVRALLLEAREQFAALHARLARCDTQIAAHARNSPAARRAGELLGVGPVTSSALVATVPDARVFKSGRQFGAWLGVTPRQHSSGGKTRLGRISLRGNVYPRTLLIQGARSTLQAAINTEPSRASRLQRWIIELYARKGYHKTLIAIANKHARIL

SEQ ID NO: 474769 - protein, 401 aa, unidentified
MDNTKMFYVGIDVSKDKSDICIKDEKGNDLIHRFEITNKKADLEMLYETVESIKRNIPGNSDVVFGMEATGIYSLPLYSALKRDGYKVKLYNPIQTNGYRKINIRKTKTDPIDSAIIAEMLRHSEAPQVSEIQDMHLFQLRELVRVRHRLIEKQALCKVQMVRNIDTIWPGYRGVIKRVFGAASLAILKKYSVPSKLRSESFEHFYELVKKKSRSKISRSKAEEIYANAGNVLTIPELDSVIAIEIKTLITQLELYDEQIQSVEGKIDQMMKLTDTKIMSIPGIADILGPTILGEIGNVERFSNVKKLVAFAGLDPVVNQSGRFENKSGKISKRGSPLLRHALFLAANSAIQNDENLKRFYTKKRSEGKHHFSALNAVAAKLLRIVYWVLKNNKEYQIQLN

SEQ ID NO: 474770 - protein, 412 aa, unidentified
MDIVHYRCAGLDVSKRDAKVCVRVQAPDRARATSTVTTWGSVTNQILALRDHLITEHVTLVVMEATSDYWRPFYYVLEDGPFEVLLVNARHVKNLPGRKTDVSDAAWLAQLGAHGLVRGSFVPPEPIRQLRDLTRTRTAIVRERGREIQRLEKFLEDSGIKLSSVASDLTGVSGRAMLDALVAGERDPVVLADMAKRRLRSKLPELTEALTGRFNDYHAFLVKVHLNLIDEHSKAIEEITARIEEAMAPFASARDLLVTIPGVSTKVADVIIAETGADMTRFPTAGHLASWAGVCPGSNESAGRVKSTRTRPGNPYLKGALGIAAMVAARSKDTYFSAKYRRIASRRGPIKAVVALEHATLVAVWNMLATGETYHDPGGDYFTRRDPERAKRRALEQLQHLGYTVTLEPSAA

SEQ ID NO: 474771 - protein, 329 aa, unidentified
MSEATQLKRFSQSPDPDALYAHLVRNYPEAEYHSVYEAGFCGFWIHYRLVGLGIHNIVVNPADVPTTTSEKLRKTDAVDSAKLARSLRAGELKGIYVPGSESLETRSLIRLRDSITKDQTRLKNRIKSHLRYLGIEIPEEFSGPGRCWNRRFVVWLKGAETGTAYGRQTLDFLVRQYESLRGQRLEMLRAVMALSRTERFEKPLENLMTVPGIGQLTGMSLLSEIDDIRRFKSADQLAAFIGMIPMCHSSGEREGVGDITVRRSARLRSVLVEASWVAVRQDPALSMAYGNYCKRMAPGKAIIKIARKLVNRIYFVMKRNQPYVKCVVA

SEQ ID NO: 474772 - protein, 377 aa, unidentified
MRNVRFVGLDVHAETIAVAVAEPRGEVRCLGVIPNRAESVGRLIRKLGKPEQLRVCYEAGPTGYVLYWQLSELGVKCEVVAPTLVPVKAGDRVKTDRRDAEKLARCYRAGDLTAVWVPDAAHEALRDLVRARLAAKRDQLRARHRLSKFLLRHGRRAPEGAGAWSAKYLQWVKGQVQFEHRAQQITLEDYLQEVEHAAARITRLECSIDTAIGTLPVKMRAVIEALQSLRGIAQISAVSIMAELGELSRFEHPRQLMGYSGAVSREYSSGERIRRGAISKAGNAYLRRIVVEAAWAYRHRPAMGKALMSRQRRCSAGVSALAWKAQQRLHQRYVRLMGRGKCKQQTITAVGRELLGFIWAIGVHVEREVNLPQRQAA

SEQ ID NO: 474773 - protein, 421 aa, unidentified
MHVVYERCAAIDVGKDEIAVAVRMPGDGPEGRVTVKRTFRTFYGVMGEAARWLVSLGVTHVAMEATGVYSMPVYYALVEHGDFAKVLICNAAHVKNVPGRKTDYADAEWLAHLLECGLLAGSFIPPAEIKAARDVVRYRAKVVRQRVSEIARLGNTLQDAGIKIDSVAWSIATKSGRAMIEALIDGERRGPVLAQLAKGTMRAKIADLSMALEGRFGDHHALMCRLHLDHIDHLEAAIARLDARIEQMMEPFQCWRDLLATIPGIGQHAAAAVISEIGVAVAEFFPDDAHLASWTGLCPGNHQSAGKRRSGKPRPGNTHLQTLLVECAWAAVRHDGYLKSLFHRHVMKNGGYRSSTAKKKAIVVVAHAMIVIIWHVMVTGKPYHELGAGYFASLQDPERETRRLIARLQALGHTVTLDPAA

SEQ ID NO: 474774 - protein, 311 aa, unidentified
MGENVGIDVAKERLDVALLPSGKAFSERNDAGAIKRLVKRLAALGCERVVLEASGGYETLLAGALGAAGLPVVVINPRQVRDFARSTGELAKTDRIDARMLALYAERIRPPLRELPDQQVRALRELCLRREEIVEMLVAEEQRLARASKALRRELAGHVDYLKKRLKRINHDLDRAVRDSPLWKERGELISSVPGVGRVLCASLLSRLPELGRLNRAEVAALVGVAPFNRDSGTLRGRRMIHGGRARLRTVLYCATVSAVRCNPAIRRFYLHKRSQGKPAKVALVAAMRKLLVILNAMVKTGTAWSPPCPA

SEQ ID NO: 474775 - protein, 405 aa, unidentified
MGQVFVGHDWAEDHHDVELIDGAGRRLAKARLPEGAKGVSQFHELVARHAEEPSEVVIATETDRALFVGALIAAGYRVYAVNPMSVARYRERHSTSGAKSDPGDAHVLADLARTDSHNHRQVAGDSELAEAIKVLARAHQGMVWSRQRQLNQLRSALREFYPAALAAFDDLGHPDALAVLAIAPTPELGRGLSRSKIAAALRRGGRQRRVDERAVEVQAALRSEQLAAPALISKAMGASAKACIAVIAELTTQVAALEVELSEHFELHPDAKVVLSLPGLGTVLGARVLAEFGDAPGRYADGKSRRNYAGTSPVTKASGKSKVVLARFARNRRLADACYRWAFCAITASPGAKAFYDQRRAAGDTHNRALRALSNRLVGILHGCLRYGELYDEKRAWGHRSQLVA

SEQ ID NO: 474776 - protein, 346 aa, unidentified
MTMLEARRVTGGVDTHLDVHVAAALDALGGLLGTESFEVNPAGYQSLLSWLESFGAVGKVGVEGTGSYGAGLARFLRQHGVSLIEVDRPNRALRRRSGKSDSLDAVEAARAALSGRAKSVPKSKDGAVEAIRVLLVAKRSARQARVKAVTQVCHLVITAPEELRRRMKGLSVSALVEEGAKLRPSRSTDPVVAATKAAISSLAHRIQALESELDELAEMINALLVATAPDLLALFGVGPDTAAALLVCAGDNPERLRSEASFAHLCGAAPIPASSGKSIGRYRLDSGGDRQANSALWRIVMVRIAHDPETTAYFERRVKEGRTKREVIRILKRYVAREVYHHLPRG

SEQ ID NO: 474777 - protein, 423 aa, unidentified
MKPLATGGFTAYVGIDWADTKHDVCLQVPGNESREFDCIAHRVVAIDQWAQSLRQRFGSPIAVALELAKGPIVYALQKYEFLVLFPINPSTLAKYREAFKPSRAKDDPTDAELALDLLMRHPERFAPLQAQSEGMRALLSLTEQRRELVADKTRFTNRLTNTLKQYYPQALDWFDQRDTVLFCDFLARWPTLTQVKRARPSALKAFFYAHNGRRAHLISARLNAIKAAIPLTQDLGVIAPCRLQVLVLVEQLRTTLQAIERFDREIAELAPRLPDYCLFRDLPGAGPHLAPRLLAAFGEDRRRFQHADELQKYAGIAPVTERSGKKSWVHWRWQCPTFVRQTFVEWAGQTINKSFWAGAYYRQQRDKGSSYQAAVRSLAFKWIRILYRCWQTNTPYNESRYLSALRKRRSPLLKNLDLDTQNA

SEQ ID NO: 474778 - protein, 315 aa, unidentified
MSDVPCFGGIDVAKAQLDIALRPSGERWAVTNDASGVATLVDWVQTLHPTLIVREATGGLERAVTSALAAAGLPVVVVNPRQARDFARATGQLAKTDALDARALAHFADVIRPTPRPLPDAQTQELRALLGRRQQLIVMRTAEQNRLAGTSERLTQDIVAHITWLNADIATLDNDLETTLRASPLWRENDDLLQSAKGIGPVCARTLLLELPELGTLTRQQIAALVGVAPLNCDSGTLRGRRTIWGGRAHVRTVLSMGTLVATRSNPQSKAFYERLLAAGKVKKVALTACMHKLLTILNAMLKHRTPWQPQEVQN

SEQ ID NO: 474779 - protein, 424 aa, unidentified
MNLTQNDRLNQVTAETLVIGVDIGSQEHYARAFDWRGIEFTKRAFRFSNTRVGFLTFLRWLQELQGKCRKEEVIVGCETTGCYWLTFQKFLQDHGMKLVTVNPYSVKRSKELDDNSPEKSDLKDPKTIAGLVRAGRFSTSYLPEGIYAEIREASVCRDMLMKDHVRLSNQIQGWLQKYFPEYLEVYKDWDSTSGLMVLQEAPLPEDIIKLGAGGINSIWRKAKVRAAGIKRATTLVEAAQESVGLQGGEAARLEIWILVNDYMAKAEQMKRLDEYLEQKVMEVPNVEKLLAIKGVGLSTVIGFVAEVGDIGRFTDARQVQKLAGLEITKASSGKKKGQPCISKRGRRKLRRTMYESARALINWNPAFLEVFLYYRNRQRRPLGSMQAKIAVACKAIRVFFVIMQTGCDFDEERFRKDILRPEAA

SEQ ID NO: 474780 - protein, 428 aa, unidentified
MIDQQHSTAASNLVAIDIAKDWNVALVQDTLGRRHRFKFANRGADHDHFVQFLHSLPGTVRIGLEPTGDYHRPIAHRLLREGFQVVSISSLALARFREARFGTWDKNDPKDAQVMLAMMEQGMVQIYWDPLFSGTHDWQELSNTYFHITLARTRLQHSLLLHHLPLYFPEFTRYWHSTRTTWFIHFLQRFPIPAAIRALDRDTFIAEAWTIAGRKVDKRAKLEEIYDLAGESIGIPVALDSAAVETFRLQRSRYDELNRQRAALDRRAQELLAGNQDFQRLQTLPGIGAITALTILAEAGDLRRFRHHRQFLKYCGLDLAKSQSGQSKGREVLSKRGNKRLRLAFWIAGLVAIHQRENAFRDKYKRYLSATPFDADRKRKALTAVAAKMARVAYAVVKHGSDYQCFFEQRIPSGSIPLARAVEASSTS

SEQ ID NO: 474781 - protein, 393 aa, unidentified
MVCVGIDVAKDKHDCFIISSEGEILADVFTIPNNAEGFDTLLQAIRRSTRPEDKIKVGLEATGHYSYNILGFLLDKGLPTYVINPLHTNLYRKSLSLRKTKTDRVDARTIAAMLMSDVDLKSYTDTVYHNEELKSLTRYRFDKVRERAKLKQSVSRLVTILFPELEKLVSSLHSASVYALLSESPGAKQISSTHMTHLKAVLKNASQGRYGQEMAETIRNAARSSVGSVMPAKSLELQHTIRLIRELDAEIEDIETAIQAIVDEMQSPITTIPGMGVRMGAVILAEIGDFSRFDSPDKILAYAGMSPSTYQSGQLSLSGAYSHMEKRGSRYLRYALYNATKHVCHWDPTFAAYLAKKRAEGKHYNVALSHAAKKLVRLIFAMEKSQRPYCAAA

SEQ ID NO: 474782 - protein, 357 aa, unidentified
MDDGSWVGLDVHARKVVAGLLDGASGELRVLRVPWRSAETVAWLGGLPHPVRAAYEAGPTGFDLARACQAAGIACTVAAPSKIPRAPGERVKTDRRDAERLARLLRLGELVAVRVPSPAEEAARDLVRAREDARSDLMRARHRLSKLLLRHGRLYEGRAWTGAHDAWLRRQRFEQRPLELAFEDCYEAVAQVKARRDALDAAIAELATEPAFAAVVGRLVCLRGVSTLTALALTVELGGWERFCPQSLGPFLGLVPSEDSSGERRRLGAITRTGNGHARRLLVEAAWQQRRPLRASAALEKRRCGQPAVVRARAAASARRLHGRWWALEDRGKRRTVVAVAVARELAAHCWALATMA

SEQ ID NO: 474783 - protein, 372 aa, unidentified
MRRQRAALERRDKLAAAMKTKIPLITIGLDLGDKKHAICVLNKNGETIDERAITNHRESLRRLSQKHPGARIAMEVGSHSPWIKRFLTELGHEVFVANPRKLRAIYTSDRKSDKNDARMLARIARMDPQLLHPVEHGTEEAQRDLLQVKLRDNLVRQRVDIISSVRFTLKSLGVALPSPNSACFAKRCRTLLAERDEALLGMIEPSLQVIDVMTQKIRELDRAVEALCETKYPVTMRLRQITGIGPVTALSFVLTIEDPELFENPRDVGAYLGLVPKRDQSGGLDKQLRISKAGDAYLRCLLVGCAQYILGPFGPDTDLKRHGLMLAARGGGRGKRKAVVAIARKLAVLMLTLWKHGRDYEPLRAAATARAA

SEQ ID NO: 474784 - protein, 430 aa, unidentified
MKSNTQNKKIEAITEKTLVIGIDVGSETHYARAFDYRGIEYSKKPFSFSNSEAGFEMFKAWISDIKGKHEKDKVVPGMEPTGHYWFNLGKYLQDNEMTPVLVNPHHVKKSKELDDNNPTKNDRKDPKVIAGLVKEGRYMIPYLPEGVYADLRTASNMRFQIQSELTRIQNRISRWFNIYFPEYKTVYGKPDAVSGMMILKQAPLPEDILTLGVEGVNQIWRDAKMRAVGKKRAQILIEAARHSVGAKEGSMAARMEIRMLLEDYESRNNRLQEVMTLIEEPVKQIPMAKKLMDIKGVGIKTVFGFLAEVGDVSRFSNPKELQKLAGLALVENSSGKHKGQTTISRRGRKRLRYLLFEVAMSLVAKNPEFRELHNYYTTRRLNPLKKMQSLMAISAKLIRVFYAMLTKGVEYDSKKMVSDIKRPAAYLQAA

SEQ ID NO: 474785 - protein, 324 aa, unidentified
MSSHEIVGIDVAARKLVVIGERLTLAEYENTAAGRSKLVNALCRNQRPVRVVLEATGMYFLDLACALAAAEIAVMVANPKATHHFAEAILQRRKNDPVDAAMLREFGRRMDFVSWQPPRHELFGFRALTREVQALSKTVAAARNRLHAITATQLAPTAVIGALERQIAHNQALIDELVAAAVAQTESDPELARLLARTDSVPGFAAKAAVLVIGELAVLPPMTARQWVAQAGLDVREECSGTSLARRPRLSKRGNKRLRVALFYPALTAARCCPAAQAFVERLVTHGKTRLQAIVALMRKLLHGLHAMWRNDEDFDAEKLFAPA

SEQ ID NO: 474786 - protein, 340 aa, unidentified
MNTIMIGLDLAKNVFQVHGIDADGAVTVQRKLRRAQVERFFAELAPCMVGMEACGGAHHWARTLQRLGHEVRMMPAHYVKPYVKRNKTDSRDAEAICEAMGRPTMRFVSVKSEPAQAVLAMHRTRALLVRQRTMAANALRSNLAEFGIVAAQGNKGLRLLMDQLAAQSCPIPTAAQVALSLLARQWESVDAAVRELDAGLARVAREQEAARRLMEIPGVGPIGATAILAKVPDVNVFGTARDFAAWLGLTPRQSGTGGQQRSGGISKQGDRTVRQLLVMGARARLNHARGRDADPWLRDLMARRPIKVAVVALAAKMARIIWALLKTGQHYRAKEVPAAV

SEQ ID NO: 474787 - protein, 376 aa, unidentified
MERGSLMLNTTTFVGLDVHARSIKAVALDAMTGEVRSATFGYDSAEVAGWVSSVDPSAKCVYESGVTGFDLQKRLSSMGIDCVVGAVSKMIKPSADRRRKNDRNDAEFLARMLSVGNVVEVWVPDDECEAARDLVRALDDARDDLKRCKQRLSKFLLRHGHAFSETTPSGRRKGNWTAAHWAWIKSISFAEKADDDVLAYYIDATRQAMEDKARLERLVEAEASKPRWKRRVDSVRCLKGFDVMSAADLVFEAGEFSRFKNARSFAAWIGLTPSEHSSGESVRQGGITKAGNKHLRRVLVESAWHYLGCSPHSKDLAKGQAPDPSARHHAAKGVRRLVGRRAAMLERGVHKNKANVATARELACWCWAIGCMVENG

SEQ ID NO: 474788 - protein, 359 aa, unidentified
MVMLAEEYDFVIGGDPDRDTIDLAVIDTATGALAAHIADTADGPGYARLLIWGQQHAPGRRLWALEGTGSFASGLVCLLTEAGEEVVEVTGTRRPRGAKSDRIDAVMAARTALARERQGVPRARGLREALRQILATRKGVLVSRTKAINELKSLIVVAPEHLRAGLRGLSLIKQLEHVAALTSPPQAPVDHRITVFTMQSIAARIRFLFEQTRQLDPELLALVRQHPAGPALLAEPGVGPVAAAQLLVSWSHRGRVRSEAAFASLAGVAPIEASSGQHVRHRLNRGGDRDLNRALHTVAITRMRCHPPTREYETARITQGKTHKEIRRSLKRILARKLYRCMQAATEPARTELRTLAAA

SEQ ID NO: 474789 - protein, 400 aa, unidentified
MLSIGIDVSKGKSTVCGMKPGGEIVYTPFEIQHTREGMSELVSLLHNSGEEVRAVLESTGSYHCPVVAALLENGIFVSVVNSLRMKRFCSQSIRKVKTDQIDAMQIALYGLAYWQELQPTRLPEDTYRELQLLARQYYQMTSLLIKAKVDFNALCDQVLPGMQELMSDHAGRHKLSDFVLRYRHTTHILEMGETRFRKDYCKWAEKKGYRNHERMAALIFATAQNGIPVLPDAPSTQIVITEAIRVLHTVEASRDAILTQMQALAKTLPEYSLVREMPCIGDTLAPRLIAEIGDVRRFHSKRALIAYAGIDAPPYQSGKFCANNRHISKRGNRYLRKTGYEVMQSYVMHKPANDPIFTFIEKKRGEGKSGKLAMVAGLNKFLRVYYGKVTELYRSLPAIE

SEQ ID NO: 474790 - protein, 385 aa, unidentified
MAPIRMPEAVIGLDVGKSSHWACVATRDGEVLLSTPVANREDDLDSLFGRFPDALVVVDQSRNIGALALARARAAGMSAAYLPGLAAHGAARLFAGDAKTDERDAMVIAKTALGIPDALLPVGDPGPTIAAARALAAQRNFLTCENTRNKNRLRSILLESCPAFEALVDLSDGCQLRLMASLGGAWSVADAGPRRAAALTRGAARGKIEALVRSTTSSTRPDASVVAAEDRAVKLLARRISENSTEIEAITAEISALLEGDDTYRCLLTVPGIGPKTASELAISIDIEDFPSHDRLASYCGLAPRNRQSGTSISSVTASRQGNKRLKNLLIFSCNCLTRTEGRWGDYYTRCRERGMSHGKALKALARKRLKVIYAVMRDRVPYAA

SEQ ID NO: 474791 - protein, 325 aa, unidentified
MTQISEKQKLDCIGIDVSKEKLDICYTNNSKGRFLNTKAGFKKLIKSLPSNKDILVVLEPTGGYERKIIYALQTAGYNVAYAHTFKMRNYAKAMGIYAKNDPLDSYVIKSFGQDMYPKDKLQILYKKTTEFKKLENWLTRSKQLVKTIASEKQRHEKSINNDISKSHIRIIKILEKELKKTDEKIQKLSEQAELLEKSETYKKVKGFGNACANALLIYLPELGQVSNKRIAAITGTAPFCRESGKFKGKSKISGGRAKLRSILYMGVLSATMHNKIISKFYNRLIKKGKPHNLAMIACMRKMLCILNAMVRNNTQWDNNYRGCSS

SEQ ID NO: 474792 - protein, 320 aa, unidentified
MLTHVAGVDVHKEMLVITTLVGALDREPVQEQWTCKTFTEDLASCAAKLLDMGITEVAMESTGVYWKPVFNVWARRGLTITVGNAAHLKNVPGRKTDANDSEWLAQLHRCGMIRGSFIPEAEFQTLRLLNRHRQSLVGQTARIKNQMEKVLEDGNIKLSSIISDLFGVFGLAILDCLANGKTDTATLWAKACEMQSFAKLKRKDEVKQALSNCMRPEHCFLIKQLLKQYRGLKQCIDEVDQQMDERLKPYQEYLKLLDEIPGINETIAKGILAEATTRMDAFKDEKSFAAWSGVAAGNHESARKKKECAAEGEIPTSERS

SEQ ID NO: 474793 - protein, 362 aa, unidentified
MNYVGVDIHKKYSVLCAVDERGRKLREARIEGNSGCGFAQFFASLEGPSKAVVEACWNWGLVHDELEEIEQVEEVVLAHPYKTRLIADAQIKTDRLDAHALGTLLRGNLVARAHVPRRQTRVRKNLLRQRLYWARLRTMFRNRIHALLDRQRGLELPQCSDIFGVRGLSFLRRLQLPETDAALLREQLALHDLIAQQMKAQEKRIGLEFGSEAMHRQLLSVPGIGPTLAAVIACEVDSIERFSSAEKLCAYAGVVPTTHSSGGKTRHGQLLPFCNKWLRWALIEASWVAIGCSPYFGALYKQHRARGKKANSAVLIVARRMCRIIWQLLHEKRDFEKRPLRPNFNFPGCSVVRLTAATAARP

SEQ ID NO: 474794 - protein, 382 aa, unidentified
MGAPVVFQRTSVGLDVHARSVAAAAIDGQTGEITRRKITPDHGEILAWILSLAGPARVVYEAGPTGFGLARFLLAAGIECLVAAPSKLQRPAGDQVKTDARDALQLARLLHLGEVTSVTIPSVEQEAARHLVRAREDVRGDLMSARHRVSKLLLRQGIVYSGGKAWTGVHDTWLRQQRFELLGLQMAYDTAYETMLATVARRDRLDKAIAAMAADSPFTPVVDRLGCLRGVSTLTAFGLAVEIGDWQRLSGRSIGAYLGMTPTESSSGQSRSQGGITKTGNGHARRLLIEAAWHHRQPYRAPGVDLRRRWEHAPAAAAARGHAGNRRLHTRWQAFIDRKKTRSSPTPRSPASWPAGAGPWPSSTPDPGPTDVRPATLMATAA

SEQ ID NO: 474795 - protein, 403 aa, unidentified
MNSVGIDVSKGKSMIAVMRPFGEVVASPFEVNHTDSELSKLAGMLKSLNGETKVIMECTGSYHLPIAYSLHEAGLFVSTVNAKLIHGFGNNTIRKVKTDKADAIKIANYGLSCWIELPEYIPEDDLRRILKVYSRQYTKYSKLKTILKNNFTSLSDQTFPCVNKLFSSPPRKSDGHEKWMDFAAKFWHCGCICELTPKAFSERYRKWCKSHGYYFSQSKADDIYVSAAGHIFVLPKNEMTKLLITQAIAQINSIAETLAVIAREMKRLAGMLPEYPVISEFYGVGDVLAPQLIAEIGDVYRFSRKESLVCFAGLEAPPYQSGKFESENRSISKKGSPHLRKALFQVMDCLLKRSPVNDPIYQFLDRKRSEGKHYYSYMTAGSAKFLRVYYAKVKEYLLGLEES

SEQ ID NO: 474796 - protein, 429 aa, unidentified
MSNFFNDFVVGIDVSSKSSVITILMPGGEAHGKKINITNDLKGFDKLLLILTDITENFSKRPKIFMESTGLYHMPLLNYFNKNNFECYVINPIHTKNFAKQSIRKVKNDKVDSLRIAQLAQSPTFFSESFFDEDIFLLKKLCREYDSLVSHRAHYKKKVLSSLNLVFPKFNDIFSDTFSAVPLAILSNYPTYKDFLSAHKSDVVTLMRSTVSHSSEWADKKYKLIYTTAKEAEMLKLPTTCLGTELTCFINIIKTFSKSIDDLKEQILIFHKQIPNFEDNAKLLCTHPEVGLLSAISFLAEIGDIKNFSSPKKLVAFLGVDTSVSQSGAFTSTHNKLTKRGSNLARKILYNLAIASIKTLRNGASANPVLLTYYNKLIKSKPKKIAICAMMHKLINHFFAILRDKKAFELRLPETHKQIYIDKNLLVVI

SEQ ID NO: 474797 - protein, 475 aa, unidentified
MNIKGTKKKNQVVTANIFEQQELLKKAEVIKENLTASTWRELETNGKFDKNKKLSFISDDMLILGCDVGSETHYVRAIDTRGRELSKSAYSFDNDYEGFQSAKEWAVKIAAEHDKSQIVLGLEPTGHYWFCLATWMIANGISVVQVNPYAVKQTKEVEDNSQLKDDRKDPKLIANLVKDGNFGMPYLPEKIYAELRRLSMFRDQLNEDRIRTINRMHREMKIYFPEYKEALGKVDGAFSLELLKEAPFPDELTALGEEGIRQIWHAAKLRGRGYSRAREILQYAKASVGIKDGSIASKAAVKWFVQKIMELDVELAVIENQINQKCQEIPHTGNVLEISGIGENTLSGILAEMGDISRFDDVKEIQKLSGLGLVACSSGKHKGETKISHRGRKRLRYWLFQAAKSAVAHAEEFKELHMYYTTRADNPLKKMQSLIVIACKLLRIIYTILNTGTKYAPKKMLMDIRRPENKEAIVA

SEQ ID NO: 474798 - protein, 323 aa, unidentified
MTVYLGIDIASKKFDVAELCDGNYRCKAFENSSAGFLALYKWLGQSTMPDIHACLEATGDYGTSLATFLYENKIKVSVVNPARIKGFGASELSRTKTDKADSKLIARFCKAAVPDGWKPTPASVRKLQALVRRISALNGMLRMECNRRENADTNIQASLDRIISLLKTEVEVVRQEIKDHVRSDDELKKQDALIQSVPGIGAVSSNLILSFMSGKGFRKAKEVTAYLGLNPRHHQSGSSVRGKARMSKMGDSRLRSALYMPALVALRYNPDIKAFGQRLLLAGKPRMLVVGAVMRKLIHIIFGVLKSGTAFSSRIAVHSVVSG

SEQ ID NO: 474799 - protein, 492 aa, unidentified
MNSIYTNRSQVVTQMLKEVEASKILLVPLDFAKEKHVVRICDATGDYLHKKPIDVTNDKAGLDYLCQRINSACGRRGIQKKHVLIATESPHSYCIHFMHELQHKGYVVLRVNAAEAKKYRKNSIASSDTIDLDGIANAVLNRRARPLNEEQQIYSSIKRSSRYYKRYKKDFARQKNRIGKLIDELFPGFLNIRKSGVEPYSRFSIELMSKGFSIYKIRNMKPAALVAKMRKYHLHNSVQKASKLQAHAAASIAPSKLIVESLSRSLEHAIQLYKALEAVCDSEWEQLAICLVQTPYSSMLSLPGVGVVRASTCAAEFGHPDTWSSLNQMCSYAGIAPRTMQSGGPDKPAIVLGLSKKCNRRLKDALLQAAHQTAMIPHTAGSLLPQLKEHKLMRHYKTVSARNGKSGLSTARMIIRKMRGMVRGETIYLPTKELSVYELKIYVMSTFEKMHNNLKGIDLDSIKPEDNCLSQMEEEWKNLLESLEQKDSDINL

SEQ ID NO: 474800 - protein, 341 aa, unidentified
MGTIMQTIAVVGLDLAKTVFQVHGVATDGTVVVRRQLRRGQVLAFFQSIGPCLIGIEACASAHHWARELMAIGHDVRLMPPAYVKAYVKRGKTDAADAEAIAEAVTRPTMRFVAVKSKAQQAVLMLHKTRDLLVRQRTMLINALRGHLGEFGIVAPQGPAGVRAALKSLREEGQALPDLAHAALGGLAEQLEHLGAEISRMERRILDWHRQDETSRRLATIPGIGPITASAMAASAPDPSLFRSGRQFAAWLGLTPRANSSGGKERQGGISKMGDSYLRRLLVVGATAVLRMARQRGREGWVGNLLERKKPKVAAVALANKTARIAWTLMARQEDYKPTAA

SEQ ID NO: 474801 - protein, 341 aa, unidentified
MQSTKATELYAGADLHGNNVFLSVCADGNAQFKRRVKTNLTAVNAALDPYWSRIKAMGVESTFNWYWLVDGLREQNRDVRLGNPAKMKQYKGLKHADDASDARWLAELVRLDIFPDSYIYPKDVRSVRDALRRRQLFVRRRTQVLLSLQSLLERYGLNAPGSRAIQQWTEAEIVATGLDPFVQLQLRTLLEAVHCSDRLAKQIETEVLKFVEPNESFDRVQIVPGIGKTLGMCIVLESGEFSRFPNAGCYASYCRAVKSERSSNSKKKGENNKRNGNPYLAWAFIEAASFAPRYYPEIQSWYDRKKKKRNTIVAKKALASKLSKAVWHVMNGEEFKMEMMF

SEQ ID NO: 474802 - protein, 403 aa, unidentified
MNNVAGIDVSKGKSMVSVLRPFGEVVAKPFSIGHTGSELKELADYLKSLDGETRVVMEHTGRYYEPVARFLHEEGIFVSAVNPKLIKDYGNNTLRKVKTDKADARKIARYGLDNWVELRQHTPMDTIRMQLKTLNRQQGLYSKTKTMMKNNLIALLDQTYPGVNALFDSPVREDGSQKWVDFATAFWHVDCVRNMSLTAFAERYRKWCKRHGYNFSQSKAVEVHTGAQDLIAMLPKDALTKTMVRQAIDALNAVSASLERLKAEMQALAAQLPEYPVVMAMHGVGDSLGPQLMAELGDVARFTHRNAITAFAGVDPGADQSGTHEAKSTRVSKSGPPELRRALFLVMDCLLKTQPQDDPVYRFMDKKRAEGKPYLVYMTAGANKFLRIYYGRVKEYLASLEEN

SEQ ID NO: 474803 - protein, 424 aa, unidentified
MNCTQNERINQVSEQTLVIGVDIASELNYARAFNWRGIEKGKVFKFFNNLEGFQAFNEWAHQVMSANKLTNLIVAAEPTGHYWFGLADYLKDEKLKLVLVNPFHVNRAKELDDNHPSKTDAKDPKTIAKLVIEGRYMEPYIPEGVYADLRIMYNCRQKVTKAMISLENQLKRWFRIYFPEYLSVFGNLSGQGSMAVLEKAVLPEDIISLGVDGINKLWRERKLRAVGMKRAESLYEAAVKSIGRREGSVGGRAEFRMLWEDYCHKMEQMEKLNIELESLLHKVPQAEEVLKMKGIGVVSVAGFFAEVGDLRRFESPKQIQKLAGLAIRENSSGKHKGQTTISKMGRARLRAVLFNAAIALVGRNGAFKSIHEYYIGRKANPLKKKQSIVAVSCKLIRIIYAICRHKEAYDEAKMLRDIRREQLA

SEQ ID NO: 474804 - protein, 398 aa, unidentified
MTESSDYESVQVFIGVDVGKDTHHAVAINRSGKRLFDKALPNDENKLRSLISDLKQHGQILLVVDQPATIGALPVAVARSEGVLVGYLPGLAMRRIADLHAGEAKTDARDAAIIAEAARTLPHALRTLKLADEQIAELSMLCGFDDDLAAQTTQASNRIRGLLTQIHPALERVLGPRLDHPAVLDLLQRYPSPEKLASLGEKKLAAQLCKLAPRLGKRLAADIAQALAEQTVVVPGTNAAAVVLPRLALQLITLRKQRDEVALAVEQRVLAHPLYPVLTSMPGVGVRTAARLLTEVACRAFDSVAHLAAYAGLAPVTRRSGSSIRGEHPSRRGNKALKRALFLSAFAALRDPLSRAYYTRKMSQGKRHNQALIALARRRCDVLFAMMRDGTFYTPQAS

SEQ ID NO: 474805 - protein, 336 aa, unidentified
MEHLAIDLGGKESQICVRRSDGQIVEERRCRTAALPAYLATRPQSRVVVETCSEAFGIADAALTIGHEVRVVPGTLVRSLGVGARRLKTDRRDAQVLSEVSCRIDLPSVHVPSRQARERKSMCGMREALVGARTKLVNTVRGWLRAERRCPRGGELSTFATRVRALYPETALPTYVERQLRALESLNEEIADADRELATTAKADPIAKRLMTVPGVGPSTSVRFVAALDEINRFSGAHTVESYLGLVPGEDSSAERRRRTSITKAGPTELRWCLVQAAWAARRTRRRDPMQRWADEVEKRRGKRVAVLALARKLAGILYAIWSDGTEYEPRRSGAV

SEQ ID NO: 474806 - protein, 447 aa, unidentified
MDLSDQRVDADVGEEEILERVAAIDVAKDSGMVCVRVPHQTQSGKRDTSVWSVPARTNSIIALANQLAEQGIQRVVLESTSDYWRPFYYLLDARGLTVWLVNARDVKHVPGRPKTDKLDAVWLAKLNERGMLRASFIPPLEIRQLRDYTRLRFDLTGDRSRQVQRLEKLLEDALIKISSVATEMMGVSGRAMIEALIAGERDPRVLADLAKGRLRVKHAALIDALTGRFDDHHAELAALLLEQIDALSAQIEHLDARIEQLIADMPAAQAPRPGSGQDSHAARVPLDAVDRLDEVTGIGRHAAQVIIAEVGLAMAVFPTDAHLVSWSKIAPRTVQSGAKSRPGKTGKGNRYLKSALGEAAASAARTNTFLGARYRRLARRIGKQKAQVAVARSILVIVWHLLADPTSRYCDLGPDFFDTRIRPERRKQNHIHQLEALGYKVTLEPAA

SEQ ID NO: 474807 - protein, 347 aa, unidentified
MITIGIDPHKSSHTAVALDETGAPLGELRVLADKSTLVRLRAWSADWPQRVWAIEGAGGLGRLLAQQLLGAGETVVDVPSALAARTRVLQSGHGRKTDGIDARSVALVAQHRNDLSRVAPDDHSAVLRLLSDRRDELTAERRRAVNRLHRLLRDLHPGGAPRQLSADRASRLLATIRPDGVVDIERKTMGRQLLADVRRVDRALNDNRRRCAEAVATSGSSLTEIFGISEILAAKILAHTGDITRFANADHYASYTGTAPIEVSSGEQRRHRLSRAGNRSLNHALHMAARVQTMHPGPGRTHYQRKQTEHKTPAEALRSLKRQLAKVVYRHLRDDHTLQTSPTPALT

SEQ ID NO: 474808 - protein, 311 aa, unidentified
MQEECVGVDVSKQHLDWVLGDKGSVSRVNNTPAGVRSLTAKLSRSGAALIVIESTGGYERPLVDALSRASLPVVLVNPWRVRRFREGMGVLAKTDPVDARILALFGERARPARRPLPGPTQRQLADLIRRRRQLIAMVTAEKNRLDTATAVIKRDINALVKILERRVTKIDERIDAAIAADPEKAENWERLQTTPSVGPGVARALIIDLPELGSLGRRQIASLVGLAPFAKDSGRKTGQRRLKAGRSAPRSALYLAAMNGARFNPVLKEMYERLIAAGKPPKVAFIALARKLLTILNAMVRDGTTWQKTTT

SEQ ID NO: 474809 - protein, 354 aa, unidentified
MSSIPETNDRRKVIVGVDTHKHIHVAVAIDHHGARLGDLSVPADTGGYTQLEQWAQALGRVDQFGIEGTGSYGAGVTSFLRRRGHRIVEVNRGDRRSRRQNGKSDTLDAEAAARSVLAGTSAVIPKTGDGTAEMIRQIKIARDTARKGRTSAIITLKTIVVNSPAELRESLAEMTDKQLLKRCSLYRPGDVIDTTASAKHTLRALAKRWFDLDGEIADHDRLLDRLTAEMSPTLRDGYGIGADTAAEMLIVFGDNPDRIHSEAAFAKLCGTCPVPASSGLTNKHRLYRGGHRQANAALYRTVIVRMRFHQPTIDYVARRTTEGLSKKDIIRCLKRFVAREVYQRVMFDHHARTS

SEQ ID NO: 474810 - protein, 411 aa, unidentified
MIKENYIYVGIDLHKETHTAVMIDCYNQKLGEITFPNRPADFPKLVAKVKKCNTDGKTIVLGLENAYGYGRALAVWLIDKGYLVKDVNTAISHRQAKHRGAMYRKSDSDDAEAIALATLNMLDKLPDAYPNDAYWSLGQLVHRRDNIMKQRTRLVNQLHEQLCIAYPSYKQFFNDISRPTALYFWEHYPSRKYLKGKSVEDLRAELVPVSHNKCSTKTCEKILDAVASDKVKNNAYQDARDMVTLSIVSDLQHYDKQLAEVDKMLEQMYKMPGCTLTTIPGVNVITAVKILAEIGDIKRFSNANKLAQFAGIAPLHLSSSGKGKDVATKQGNRRLQATIYFLAIQMVQVSSKGTPRNSVVRAYYEKRKAEGKTSQQALICISRRLISIIYGMLKHGTEYRMPVVESAGENR

SEQ ID NO: 474811 - protein, 421 aa, unidentified
MTRRIAGIDIHKNVLMVVVATVLEKEIDGGMEQQIEYEGRRFGSGARERKHLVAWLRERQAEEVVMESTAQYWKPVWMDLELHFPKLHLAQAHSNKAPKGRKNDFADARRLTRRMAAGELILSFVPDAEQRTWRTMTRGKQQLVRDRVRLQNQTEALLEEMRIKLSGVVSDLFGVSGRRILEALAGGETNPEKLADLGDDRLKCGREALVDALTGHSEPMHLQILKLSMERLKLLDRQIEALEQMAAGALKKHGAAVTRLAGVPGFGVDSAQQVIAEVGSDAKSFPGAGELASWVGTIPGSDVSAEQNHSSRSPKGNKFLRRIFTQAAQAAVKTKGCHFQNVFRRLVPKLGYKGAIWAIAHRLCRLAWKILHDGVSYIEQAAETTPQAKKRRAQRLTQALRRLGYQVAITPIAPKAEVAQG

SEQ ID NO: 474812 - protein, 366 aa, unidentified
MKKTSTVRVNGNMIFKGHKFTIGVDLGDHRSCYCVLDEAGKIILEQKVATTPEAMEQAFAKIPRSLIALETGTHSPWVSRLLTELGYKVIVAHAQKVQMITKSNRKDDRHDARTLARLARIDPELLGPVRHRSAQAQIHLTVIRARAELVRARTALVNAARGLVKSYGQRLPKCGTRRVSRELGAGLHAELREVLEPLLKEIESLNERIQEYEVRVEKIAKESYPHVELLKQVKGVGTQIALTYVLTLDDPHRFPKSREVGCFLGLRPGRRDSGESQPQMRISKEGDRYLRTMLVQGAHYILGPFGEDSDLRRWGLKLAARGGKNAKKRAVVAVARKLAVLLHRLWVSGEVYEPLRNNQKAIRAVA

SEQ ID NO: 474813 - protein, 422 aa, unidentified
MLGVGIDWAEEFHDIALGTPEKGVIEQFRIDHGPEGVARLVARCLSLEPDPAEVRVVLETRHGLLVEALVDAGFAVVPVNPDLVARRRGPAKKKDDAEDARICCLLALDRHTGLKALIPHGELGGELRAIARDDERATRDQRRLLNRLRADLQTTYPAALLLADGDLGAPTVLRLLERWPTQTELAAASRQELTAFARAGRHGWPDRFADKIAEALARPALPARDHLVRAKAAGIRLAAVQLLALHEARRGWERRMAELLLGGARTGRDHTVKDPDPGKAFPGGEIYLSMPGLGDRLAARVAGEIGDHIEQYTTPNSLQCYAGQAPVTRRSGKSDFVVSRRLAHNHHLGTAVHQWAFCSLEKSSWARAFYDQKISAGKAHHAALRALGNRWLEILWHCLTKGVRYDETVHQANRNRALGQAA

SEQ ID NO: 474814 - protein, 364 aa, unidentified
MKRSLKYVGLDVHQATTVTSVREESGRVIAQTVLPTDGRMLVEYFRGMRGSIHVAFEEGTQAQWLHDLLQPVVAQVVVCDRRGTTARGNKGDQLDADALSELLRRGALRPVYHGSGERATLKEVARTYRNLVEDTTRVMLRLKALFRARGIKTAGRGVYRPDERADWLAQLDTAAGPGASRGAHFRAATLYAELAVLQALRPTARRALIVEAKRDPAWAVLRRIPFLGPIRVALLLATLQTPWRFRTKRQLWGYAGLAVVTRTTAEWALVAGRAVRRRRPPMTRGLNRNHNRIVKEVFKSAATAAATRSGPWQDWYQEMLKRGMREELARVTLARKLAAITLHLWQTGARYDPSHLMPSTVPAR

SEQ ID NO: 474815 - protein, 329 aa, unidentified
MEREYIGVDLHKQFFQACAVGPSGTRLWEARFPRTPAGIAALARRGVGGQSAIAVEACGPTWAFVDAIGPTGATVCVVDPRKTKLKAGFAAKTDRLDARRLADALRRDSIVPIYVPAPAIRELRELCRGRHQVVRLRTRLAQMIRALLLRHDAGEPPGRQLYAPRAIAWLATVPLTGEAERSRRRLERLYHAVHADAQAADAAVRERAASDAIATSLSEVTGIGPVLALTIRAEIGDVARFRRGPELASYAGLVPRVDQSANHCYYGRITREGSPWLRWALVQAALHAVKRQDATGRWVRRLAMRRGVYKARVAAARVLCNEIVARWPR

SEQ ID NO: 474816 - protein, 392 aa, unidentified
MIYVGIDVAKDKHDCFITNSVGEVLFNSFTISNNRDGFETLFQKIQSVSDDLNKVKVGLEATGHYSYNLLGFLLDKGCHTFVINPLHTNLYRKSLSLRKTKTDKVDSRTIATMMMSDMNLKSYSNTSYHNEELKSLTRYRFDKVKERAKLKTSVSRLVCILFPELEKLVPTLHMPSVYALLSEFPGANAVASAHLTRLSNLLSESSKGRYGKDTAVIFREAARNSIGSVMPAKSLELKHTIKLIQELTSEIDEIETAIKRIMDEEIQSPILSIPGISYRMGAMIIAEIGDFNRFDSADKILAYAGMSPSTYQSGQMDNCYAHMEKRGSRYLRYALYNATKYVCHWDESFGAYLEKKRSEGKHYNVALSHAAKKLVRLIFAMEKSGQAYVPAA

SEQ ID NO: 474817 - protein, 419 aa, unidentified
MTDLSIAHSEPILAAIDISKARHEVLIAVPGKKRRRRLTVLNELDEFNRLTATLTGYDRPVRVAFEATGNYHRALAFHLGAAGFEIKLVSSVALARTREALHNSWDKNDPKDAQVILHMMQIGNEQFYHDPLMQGTNDIQELSKTHDIISKSKTELWHRVLTHYLPLYFPEADRFHRSSRSDWFLAFLERYPSPHFIASMGKEAFIADAWETVGRRVSKERLLADVYETASVSVGLPVEPDSDAIRMFRMILGEGRSLIAQRNKIEDRAVELLKDNPDYQLLTTIPGIGPINALTILAEAGNLRRFNHHRQFLKFCGMDLATIQSGTFRGQTKLSKYGNARLRRTLWLAGQVAILQRANSFRDKFERYISKDRQNTHLRRKAYTAIAAKMARTAHAVVKSGEPYRPFFEGASNGRRTFL

SEQ ID NO: 474818 - protein, 358 aa, unidentified
MKESYFIGLDIAKNVFQVFTADGNGREISNRKLSRNAMARYFVQLPQSVVGIEACGMAHHWARTLTAFGHTVKLINPQRAKAFLCSRNKTDAADAKAICEALMHPGTTFIRAKSLEAQDIDHLLARRELLVQNRTQLINQTRAFLCERGIVIPQGRHSFMKILPQLIAEKWDEFSGKFQGILTDNYADYLDLDEKIAKLDKIIKVEAMNTEPCKRLMQASGFGPQVALALFAHVGNATHFKNGRQMSAYLGLTPREHSSGGKQRLLGITKRGNVRLRTLLLLGARAAILGIGRRKRGEDGQPGRLSLLDKWILDMVQRIGLFKAAVALANKMCRIAWVLLARNEKFNPTKLCRLVKAA

SEQ ID NO: 474819 - protein, 364 aa, unidentified
MSEGICFAGLDVHARRTAAAAVRLGSGEVFKAQVVGSPLEAIGWLQTLPGPVRAVYEAGPTGFGLARAARQAGLEVMVCSPGAIPRQPGDHTKTDTRDALKLARLHAAGQLRAVQVPSLELEALRDLVRAREDLRGDLMSARHRIGKLLLRRDLVFGGPGAPWASKRHLAWLGAICLGDPLAQRVLGEYLACHEVLLARRDRLDGLIADQAAHVPWAATVGRLRCLRGVDTLTAVGLLAEIGDFAAFAHPRLLASYLGLVPGEQSSGDKRRQGAITKAGSTHARRLLIEAAWHYRRQPAVSLTLRRRQEGQSPAAIDAAWRAQMRLSGRWAHLDARRGKRRTTVAVAVARELSCFVWEIARQPD

SEQ ID NO: 474820 - protein, 337 aa, unidentified
MKRYLGVDLHRTQFVVCTRWENGEQEIRQWRIGELPKFVEQLRSEDQIAVEAMGTTARFYDAVAGRVARVVVVNPHQFKVISESVKKTDRKDAEALALYLEKGLLPEVRMKPKQNRELMHLAETRDLLVKQRSALKGKINNLLAMQGIELKREALSSKIALARVLALPVSGMVQLELRILVEQIRALSESIAELDERLEEEGQQLPGYENLTSIKGIGSLSATVLLTVIGKISDFADENKLASYLGLVPKIANSNESERSGRITKQGNKLARTALVQCGLVAKRYSPYLQGFYERIKQRRGGGKAKIALARKLVKIVYDTLKNQWVFEDFPSFTLAA

SEQ ID NO: 474821 - protein, 353 aa, unidentified
MKKIIIGIDISKEKIDASAIDVQNALQGVQKLGYETFENRPMGFRRMLVWARHLIKGVTLDDVLFCCETTGGYDRCLCDYIYAKDLDIWRESALQIKRSMGVRKGKDDKSDSLMIAEYAMRHMDKAVIYETPCDTVRELKAMLQYRHKLVQEKTEKKVRMSHLGDTAAKSKSVSFILRDARKSIRALEKSIKECERQILELIKGDEELARNYRHITSVSGMGIVNATALIAYSNNFKGITTANRMASYYGIAAFRDTSGTSVDKKAYVKCYSNSLLKAYLTQAAEWTLRENGIYHAYYLRLKDKGKPYGIIINNARNKLIHLVFSLIHNDMDYEQDHEYIRTMGRAMTEIQLN

SEQ ID NO: 474822 - protein, 341 aa, unidentified
MNNVTIIGIDLAKRVFHAHGARADGSVAFRKRLTRAQFLPFLSAQPSCIVAMEACASAHDWGRAIGGLGHDVRLIPPTYVKPYVKRQKNDTADAEAIAEAASRPTMRFVTVKTEEQQARSAVFRTRDLLVRQRTQLINALRGHLAEHGVVAPQGPAHLKTLAAAIADASQSLPMLVRDIGNLYLEQIEQLSRKITDLEKVLRSEAQRGVETRRLQTMPGVGPITAMAVEAFAPPMKTFKRGRDFAAWLGLVPVQHSTGGKQRLGRTSKMGQRDIRRLLIIGAMAVIQWASRRGAQTGSWLHRMIERKPIMLVAMALANKMARSIWAMLTKNEDYRNPVVAV

SEQ ID NO: 474823 - protein, 365 aa, unidentified
MFHSGIDLHKDNAYIATVDDQGRVVRQERIPCDRTAVLSYFNSMPGSHRATVECTAGWYWLDDLLTAHDIPLVLAHAKYLKAISYAKVKTDKVDACTLARLLWMDAVPTAHKISRDLRDLRDIMRARLRLVQRRTLCLMNIHSIGQKLNCWSELSIDHRRTPDELSSAHTLWLKALYRQIDLLEDQIRELEQFLHPILLPNDDIQRLLWVPGVGKITVFSIYLEVDGIDRFESDKRFVSYCRLVPGAKNSNRTVRHRSGCKDGNKYLKIAFSDAAVHAIQYYPEYRKLYSKIRRRSNEAIARTVVAKELARIVFHILKNKSDYRGLKGQPMSRIKSATWPRIDRGPVAAPGKPERLTDAVRASSI

SEQ ID NO: 474824 - protein, 505 aa, unidentified
MERLCKGRRPGRAELNSLWKIRMKSKQPHKNKKAVCRPMQNNWHQMNRKQRREMTRKIQSEDLSLEVVHPDAAGIDIGNESHYVAVPLRRDSQPVRRFGCTTSELKGMAVWLKQCGIQTIALQSTGVYWIAVYDILEEAGFEVYLVNAKETKNLPGRKSDVQESQWLMKLHTYGLLRNSFRPSQEIRTMRTYWRQRNDLVRAAGRHIQRMQKALTQMNIQLANVLSDVSGMTGQAIVKAILAGERDPYQLAALRNWRVKASEEEIARSLEGNWQEDLLFVLQQEQDGYEFCHKQMAECDQRLQQYLQQQQDRSQGAGLPEEKRKERLRKKKKGNAPQFDLRAELFRMTGTDLTQIDGIDVTTTMTILSEAGWDMSKWKTEHHFVSWLRLCPDNRISGDKIIGKGRLPTNNRVTNALRMAASTLPLSNTYLGAQFRRLRTKLGAPVAIKAMAAKLARLVYRMLRYGMTFVDRGAEFYDAQHRKLQINYLKRKAANLGFQIIEAPAA

SEQ ID NO: 474825 - protein, 339 aa, unidentified
MTSSKLAVRVIGIDVASDKIDVFDPAGKIQKKEVPNTTASIRKYVISKIQNREETFVVCEATGGYERTLVKALQAEGIAVCVANPFQVRQFGKGVGVLEKTDPIDAQLLSRFGEVVDLQPTLPKSPEHEHHEALVRRREQVMKMICQEQNRLRHADDKSVQSMHEKVLKLLKKQLETVDLELEAFLKEEAKTNNAVVIMQSVPGVGVVTTSTLLADLPELGTLNRGQIAKLAGVAPIANQSGKRQKPRSIFGGRSSVRRVLYMAALVGTRHNPVIQAFYKHLRSKGKLKKVALVACMRKLLTILNNMVHNNTVWRTGDAAKAMTELDAMPEMEEVVAGV

SEQ ID NO: 474826 - protein, 427 aa, unidentified
MRRTEKSGPGPSSVLITPDHAGNVVGIDPHKQTLTATVVDPRGAIAASEHFKVSGDGHRALEAWARQFGQIARWGVENAAGWGRHTAIFLIGRGHDVRDVCANRTPRQDRARQRGKSDTLDSERIARETLAHPLLPKAFKRAGQDQGPDELHQLLALWHNRRRSILTSRQHLVNEAENLLCELPLQLREQLPDSKSVRPRLAALQRRNRRRRYEAPTRLRLQLLDGYHEQIKALDREEKQVTAHLQELVRQSGSTLGALCGLSTRSVAELLVETGDVRRFTEGGLRRFNATAPLPASTAEGPGEPIRHRYNPGGNRRINAVLHRMAVTQLRHEPRAQAIYANARANHHTKKEARRVLKRHLSDVVYRRMIRDLAAAHTWPSPSSLPNPARAPRGQGWPDRAERQRAAPRHPLTAIGWPRATISKGGA

SEQ ID NO: 474827 - protein, 352 aa, unidentified
MTTATLDHHWSVGIDLHKDTLTVCVYCPCCGEIRFQRLACKCRTQIAEFFAALPRPHVVAIEAVGFYRWLWDLLEPIVKKLVLADATAARALAGRRLKTDREDAQNVAELLAAGRLPLAYAPPMEVQVLKDQTRHRNQLSRLHARVLHQVKSLMNANNRPGPARLQSEGLIRYLKAFETKLPERHVAILWKCVDQLTLIERQIAQAEIELRHLLDNERFRDTAALLQTFPGVGLIVSATVLAEVGDFRRFTYRKAIACYAGLHPRVFASGGKQREGQIAKTGPRDLRWVLQQAAWVAIRCEPGIKKMWLKMSRSAGKKAAAVGIARKLLSWMWAAVIKGQAYQPRLAQPTHP

SEQ ID NO: 474828 - protein, 409 aa, unidentified
MDRQLERCCGLDVHKDTIAACVRIGGPSGRAAQHVQTFRTTPADLLVLRDWLAAHGVTHVAMESTGVYWKPVYYALESDFTCLLVNAAHIKQVPGRKTDVHDCVWIAQLLEHGLLRGSFVPPVPIRELRDLTRYRKGLIHDRTRVANRLHKALEDAGVKLASVASDILGVSGRAMLEALAHGTTDPEILAQLARGRLRGKLPALRSALAGRFRSHHAFLVAQLLAHLDYLEEAIATLSTEIESRLAPFADQLTRLDSIPGINRRTAEVIIAEVGVDMSVFPSAAHLASWAALCPGNNESAGKHKSGKTRKGNRWLRNALIEAAAGASRAKDSALQARFRRVLRHRGPKKAVVALAHALLRIAYHVLADGTTYRELGADYSDRRHTQRLTRRAIRLLEGQGYRVTLEPAA

SEQ ID NO: 474829 - protein, 346 aa, unidentified
MMIIGCDFHPSWQQVAWLNTETGETGERKLVHVSGDAKVFYQHLAAPVLIGMEATGNSQWFLELVQELGHEIWIGDAAQIRARYVRKQKTDKRDAAHILKLLVEGRFPRLWTPDREQRDLRQLVLHRHKLVEIRSRVKNELQHLALNKGMQKKRSLWSRAGQQSLRELPLKPWAACRRADLLGLLAMLDEQIGQLDSAVQQAAEEHAQAKLLMTQPGVGPNTALAFVLTIGDVGRFRRGKQVASYLGLIPREESSGGRQKLGAITKQGNRMLRSLLVEAAQIAVRYDPELRKQYLHRCHQKPKGVAKVAAARKLAVRLYWMLRTQVGYPEIVRIESSPRVPLIGAS

SEQ ID NO: 474830 - protein, 444 aa, unidentified
MRIIHRIVAGLDVHKKTVVGTRMQVNEEERLVWETKTFGTMTQDLLALLDWLAEWECTHVAMESTGDYWKPVFNVLEGTFEVYLVNAQHVKHVPGRKTDVTDSEWLAELMLHGLLRPSFIPPKPQRALRDLTRYRTKLVQERSRTVNRVQKLLEGANIKLGSVVSDVQGVSAQAMLAELCTGKMSPQEMAQLARGRLRNKIPELEKALTGVVEAHHRFLLSKQLTHIDFLDEQVAEISAEIARQLEEMSSPPRTPGEGDSSRPPSTASELDSSVAPLTWTEAVELLDTIPGVNVKTAESILAEMGLDMSRFPSADHLSAWAGLAPGNHESAGKRYSGRRRKGNQPLATTMVQAAWSAVRTKGTYLKSRYHRLAARRGKKRAIVGVARSMLVSIWHMLTYRQPYQELGDDFLDQRRKEAKLNYLTRQLEKLTGGSVQIEFQPIAG

SEQ ID NO: 474831 - protein, 454 aa, unidentified
MDILMERGVTQQDKSKKRAPKLEVTNPNAAGIDIGSASHYVAVPADRDDEPVREFKSFTVDVHKLADWLEACGVDTVAMESTGVYWIPVYEILERRGFTVLLVNARHVKNVAGRKSDVLDCQWLQQLHSYGLLRGAFRPADQVCVLRSLSRQRAMLLRLQARHIQHMQKALVQMNIQLANVISDVVGETGQKILRAIVAGERDPYVLAGMKNVRIKASAEEIAKSLRGNWRNEHVFALKQALELFDFYAERVADCDALIEQQMIELHQSDRLPGKARKKSNRNNPKFDVRTRLYQMCGVDLTRIDGIDVCTAMTVLSEVGVDMSKFPTAKHFAAWLGLCPGTKISGGKVLGSKTQKCANKTAQALRQAASCLKNSQSALGAYYRRMCAKMDKPKAITAAAHKLARLIYTMITKGQEYVDQGQAYYEERYRQRVEYHLRKRAETLGLRLVPMEAA

SEQ ID NO: 474832 - protein, 342 aa, unidentified
MERKLGNIKYFVGIDIAKATFNYCVRYGGGQVINGKTANQLESIHEFLSMLKQIPGCQVSNVIFGMEVTGVYGNVLIEALSKLKAKFVVEPALRIKNSLGIIRGKNDKLDATRIARYLIKNLHELKLWVPKRKIIQEMNSLSTLRQRIIKIQGMMTVPLKEDKEFINEPILKVNNELCNPTLTELKKLITNIDTHLKQLWTQDEQCKRLMQIMLSVTGIGPVTALQILIHTNEFKSITNPRAFASYCGVAPFEYGSGTSVKKAPRVSHYANKKIKSLLHTGVIVLITHDPDTKAYYKRRVEVDKKNKMSTINAIKFKLICRIFACVRGDRLYDRNYISAQME

SEQ ID NO: 474833 - protein, 340 aa, unidentified
MGTTTYGLDVAKRVFQMYWIDARTGEAINRQFRRDEIIRFLARRPPGRVALEASGSGHWWARKINSLGHEAVLLHAKFIRPFVQTNKTDAADVRAIWTAVHQPQMRLVAPKTEEQQAVLAQHRMRALLIKFRTMQVNQLRGLLYEFGVTFGGGRQAGLKEIRARMPELESTVPAAMFVCLQDQLRRIDGVQQDIEQLEARIGVWHKQEAACRAIAAVPGIGTLTASALIATIGDARTFKSGRELSSFLGLVPRQNGTGGKVRLGSISKRGDPYLRTLLIHGARSVIYHTRAPTKWQRDIQSRRPPNVVAVALANKMARTAWAILAHDRPYRTDYGCARAA

SEQ ID NO: 474834 - protein, 346 aa, unidentified
MYDHKDIILAVDYHAENTEVRWLNCCTGEERRLNIPTTRIGILRLVEKAITEAAPFGGKVIWIMESTTGWARVKELIGSRVQFVMANVLQMPLPPKAYRRKSDKIDTGRILREFLNGSLPRSYQPVSRWRELRRLVDSRQDLVERQTAVKNWITHFLHHETWGDRDGLWTLKGLKRLGGLNLSASDRMVLNLKLQELEQLADRRKQMEAAMQAAYDQWPEAQHVDEVRGIGMVTAVSILAHIGSIRRFGSAEDLISYAGLAPGHRQSDGTSHNSRIGGGGTDSHLRYLLIESMQWVCQIPRYRDAFDRAVTKHGKNIARIIVARMLLRSIFKMLRDGVRFNQVSAA

SEQ ID NO: 474835 - protein, 344 aa, unidentified
MSEVSTIGLDIAKHVFHAHGADWRGRVLFSKRISRGKLLDFFASQPRCVVALEACGGAHHWARELAHLGHAVRLIPPSYVKPFVKRGKNDAIDAEAICEAAQRPSMRSVAVKSEEQQAAGMVFRTRDLLVRQRTQLINAIRGHLMEYGWVAPKGRSHMAMLADLLEEEEMASSLPEAALSMLRLMLDLLGDLDGKVADLDKEIARRAREDEISRRLMTIPGIGPIAATAITALAPPAETFAKGRDFAAWLGLTPLQKSTGGKRKLGKTSKMGERTLRRLLIIGSSAVVLHASKRGAPKGSWLEGMLARKPRMLVTVALANKTARIVWALLTRKEDYKAPVAAMA

SEQ ID NO: 474836 - protein, 420 aa, unidentified
MTTSNSTPADVVLVAIDIAKLRNEVLIEAPGHKRRRRLLVLNTRAEHDHLIEVLQAYGRPVVCAFEATGNYHRPIGWRLAEAGFEVRLVSSLALARTREALHNSWDKNDPKDAQVILHMLRIQATQLYHDPLRAGINDVQELSKTHEAIARAKTEIQHRILTHYLPLYFPEIDRFRGNSRSDWFFAFLHAFPTPASVTALTKEEFVAAAWDVVGRKVSKTQILMDIYETARSSIGLPLPLDAPAIRMFRMVIDEARSLIRQRNEIEAQADELLRHSQDYQLLRQIPGIGPINALTIIAEAGDLRRFGHHRQFLKFCGLDLSTQQSGQYRGQTRLSKFGNARLRRTLWIAGQVAIRQRENGFRHKFERYIARDRNNPDLRRKAMTAITAKMARVVHAVVKGGSDYRPFVEGRVPGGRTSVS

SEQ ID NO: 474837 - protein, 426 aa, unidentified
MRVLYDRVAAIDVHKDMVKVAIRVPGAKRGTRKTDVLEFRTFYGVLQAMARELRGRGVTHVVMEASGVYTDPVYYALRELDFTEVMVINPAHAKALKGHKTDAKDAIRLLDLYECGLLSGSYMPSEDLREVRDLARYRMKTVQARTSEIQRLQKTLETAGIKLSSVLSDVTGASAAAMIEALISGERRGSVMAGLAQTRLRTAGKMADLSMALAGRFTDHHALMCRLHRDRITIFDDAVKDLDAKIAPLVARYAREAELLKTLPGFGDVIVAGWLGAIGPAPYQHFATASRLASWATICPGNYMSARKSKGGRTGDGGAYIKPLLIQAAWAAVRVPGRLQARFGRLVRKFGGPRNKGARKRAITAIAHTLLKIAYSVLKTGKPYADLGADFYTRRESPDARQDYLMRQLQKLNPGCVITITHAETA

SEQ ID NO: 474838 - protein, 456 aa, unidentified
MKIPQSTIRLLTGRLVKILLYREVSTMKSNTQNAKIEAITEKTLVLGIDVGSETHYARAFDYRGIEYSKKPFKFSNTEVGFATFKEWILDLKERHEKDKVVPGMEPTGHYWFNLGKFLQDNEMKPVLVNPHHVKKSKELDDNNPTKNDRKDPKVIAGLVREGRYMIPYLPDGVYADLRTASNIRFQLQAELTRIQNRISRWFNIYFPEYKTVYGKPDAKSGMLILKAAPLPEDILTLGIDGVNQIWRDAKLRAVGKARAKTLIEAAEHSIGSKEGTMSARMEIRMLLEDYESKNMRLQEVMVLIEELVKEIPMAEKLLEIKGVGIRTVSGFLAEVGDISRFNNPKELQKLAGLALVENSSGKHKGETTISRRGRKRLRYLLFEVAMSLVAKNPEFRELHNYYTTRRLNPLKKMQSLMAIAAKLIRVFYAMLTKGVDYDPKKMISDIKRPTVYLQAA

SEQ ID NO: 474839 - protein, 356 aa, unidentified
MTAPYDYHIGVDYHKSYSHLVVQDSVGKTLRSGRVKNDRRSLGSFLERYRENSHAVVEATRNWTVMYDWLDDICDDVVLAHPLKVKAIADAKIKTDKIDATVLAHLLRADLVPEAWAPSDKARELRVALRERMFYVRLRTMTKNRIVTVFDRYPEQTAQLKKLGDLFGKAGRVQLAQVKVSEIDRIQIDRGLDFIGDIDGRIKQSETTIRAMTKANGNVKLLKTIPGIGEFFARLIDAEIDDISRFRNPKKLAAYAGLVPSTYSSGGKTFHGKIIKQGNKWLRWAFVEAVTSAIASDAQLRAQYEHLKIRGVNKARVAIARKLLTIAFQILRDQRAYEPRGANSEEGMSSTISRLS

SEQ ID NO: 474840 - protein, 377 aa, unidentified
MKKELYLGLDVHKDCIITAVAEEGRKGEVRESGAISNDLHAVEKWIGRLRKAHGKETLLRACYEAGPCGFGLARRLRQLGVECQVVAPSLTPTRSGERVKTDKRDARKLARLLRAGELTPVYIPDARDEAIRDLCRARSDAVDDRRRSRHRLKGFLLRHGYRYQGKSSWSAAHERYLRELVLAHPAMKVILEEYLQAIAAAGERIERSEEAMRVLLEQWRLVPAVHALMAMKGFRTVAAMILVSELGEVHRFAHPRQVMAYLGLVPTENTSSERRRQGHITKCGNAHARWLLVECAQHYAAPPKVSKELSRRQQGQPNAVRAISWRAQNRLHRRYTRLLARRLQRNKAMVAIARELCGFIWELLGTQSCYQAPSPPV

SEQ ID NO: 474841 - protein, 338 aa, unidentified
MDIIKQVIGIDVSKDTLAVCYGTVDANQNQQISKSVTFDNNLKGFRELMSFVRKNRGQLQAPLHFVMEATGVYYENLAYFLNEKQQKVIVVLPNKTKNFSKTLDIKSKTDKLDAQMITQFGLERQMQLWSVPSPLIKAIKALTREYHSKKDMAAQVKNQLHAKEYSHIPLKESLKRSQSILSVFEKQLREIEKEIKELVKQDDDLNDRINKIDKIEGVGFMTIVSIIAETNGFALIENAKQLSSYAGLDVVYNESGLKKHKTTISKKGNKHLRKAVYMPALSAVKYNPQLKQFYIRLVIKKGIKKVALIAVARKLLILIYTIFKKNEDYVPNYNLAKG

SEQ ID NO: 474842 - protein, 325 aa, unidentified
MSKVTKKVIGVDVGAKFLTVSFNDFENRDQVFNIENTQRSILSFLKKMRIEDYCFVIEATGNYSSRILHLSLVQGFDSSLINCMSVKHFARMKNIISKTDAEDAKLIRLYGEMFRPDIYISKSVEIEYLDQELKLLNDLEQEKRRYSVKLKSLRYHPQINPNTEKHYERRLKHLEKEIKEVEGRLPGLQDGEFKETKDLLQSVSGIGEKASLQLMTATSGFKNFSSAKSLSKYFGLAPRIYQSGKKSYSPGTCRTSKTHIRGLLYVCSWTAIKHNKQCREFYERLLSQGKPKKLALIAVCNKLLRICFGVVKNKINYQPDYQKKL

SEQ ID NO: 474843 - protein, 338 aa, unidentified
MEYGAIDLHKQRSVIRIVDGDGTVVLDRTVPTSRAGFASVFRGRARLRVLIETGTESEWAAQTIEADGHAVVVVDPNYALMYGVRQRVVKTDRRDVAALAEANRLGIFRAAHRVSAAQRERRRQLRVREQLVRVRTQAINLLRAQLRQEGYRLGSGSAETVVARYGRLQLPTTLQTSLQPVIALLTHLRPALAALDTTTAAQALADPITRQLMTAPGVGPVTALTYRAVLDDVGRFADAGRVTAFLGLVPQEDSSGARRRKGGITKAGPARVRALLVQAAWTIWRQRHAGDPLQRWVHAVADRRGRGIAIVGLARRLARVLFAMWRDGLPYRVMPLTA

SEQ ID NO: 474844 - protein, 336 aa, unidentified
MEKQYVGIDLHRRRSVIVRRDDTGTTHSMVRLDNSDFAGIVAEVRAAGPEPEVIVEATNGWYWLVDLLRAEGAHVHLAHPLGNNWGTRRVKNDERDATDLVDLYRLGRLVESYVAPPELREQRELVRYRQKLVGFRTSCREQVHAVLAKEGVAVPMTDLFGVAGLKLLDHVALGRGFAIRVESLRDLVEILDREVTMLDREIHRRLRNDPRFGVLQLLPGIGPVFAAVLVTEIGDISRFSSPERLCSWAGLTPRHRESDTTVHRGSITKQGSRLVRWAVIEAVQRQGHSELLGEAMARVAERRGRRIAKVAAARRLLSFVFYALRDGELRCLASAG

SEQ ID NO: 474845 - protein, 337 aa, unidentified
MAPENKIVVGVDVAKESLAVSVFDGLKHEYMMIDYTQKAIKKELLERFKRLKTSVVFVMEATGVYHSNLAHWLYGAGFDVAIINPLIIKRYTQMKMTRVKTDKSDCVLIAEYGFREKLNLFKPKSKESLEIGIILKTIEDFLHQKSITQSQRHALMHQANYPKEIVKVYENLIKFITQEIRMLKEKMQLLLKEHFINEYTLLSSIKGIGLMSSAMIVSIFDSFKNFDTAKQAASFVGIAPAPYESGTSVKKRGSISKQGSPLARKLLYMATLSGMQFNELLKVYYTRLLENGKSKKQAMIAVSHKLLRIAFGVLKHNKPFTLNHVQERKMINSAKKT

SEQ ID NO: 474846 - protein, 403 aa, unidentified
MIFVGIDWAEGHHDVCVLDEGGAVLAKGRVGDGVEGLARLHVMVAEHAEEPGEVLVGIETDRGLLVGALVAAGYRVYAVNPFAASRYRERHATSGAKSDSGDAKVLADLIRTDRHNHREVAGDSELVEAVKVLARAHQSLIWTRQRQVSALRSALREFYPAALRAFPELGTVEACSVLGMAPTPERGRRLTLAKVRRSLVASGRTRYLDRRAAEILEALRAPQLEASPVLSEAYGSVVGSLVVVIDGLVHQVARLETQLADRFESHPDAEILRSLPGLGLVLGARVLAEFGDDPTRYADARARRSYAGSAPITRASGKRLVVLARVARNRRLADACHLWAFSALSSSPGARRYYDARRAAGKSHHQALRSLANRLVGILHGCLQHRQLYREGVAWPPSFEAVA

SEQ ID NO: 474847 - protein, 374 aa, unidentified
MDNEGNVNEQYDMGNSASSWDGFRARYAVADTEIALEVSTTGKYVARKLRDMGFHTHMADPSTLALIFRTAKKNDREDSYKLAKLLRLGELPEVHLPSRYSDDLRSLVRYRRSLGEAITMIKNRVHAILASAGISIDATDIFGKKGMKCILGSVDSISTVQRFVLADLLDQIAYLMGKETMVEDEISRSVMNDRNVNLLMTIPGMGIYSSAAIMSEIDDISRFDSKEKLASYAGLVPRQDQSGNRDIKGHISKHGPSMLRFIMVNAAHIVIKYSERMRKKYLSPVRRLGKNRAIVAIARILLETIYTMLKKEEHFVDQIDTLTERKMASMRSRAVKPSQTITLEDRMNELRNVQKERLKRNGNEGKINKANAMT

SEQ ID NO: 474848 - protein, 370 aa, unidentified
MRKSIMYVGMDQHRDSIEIATADEGRNGEVRGYGRIDGELSSVDQVVRKLVRSGKDLRFVYEAGPCGYHLYRYLTAQGLKCKVVAPSMIPKKSSDRVKTDRRDAMNLARLERAGELTAVYVPQVEDEAMRDLSRAREDAKRAETRARQQLLALLLRHGLKYSGKTAWSQPHLRWLSRIKLPQPAQQIAFQEYVNAITEAAARVERLTTQIRMLLPQWRMAPVVEALQALRGVSLVTAVITVAEIGDLTRFTNPRQLMAYLGLVPSEHSSGPRRRLGAITKAGNSHLRRVLVESAWAYRLPARVTLIIRRRQEQLPKPVCEIAWRAQLRLCARYRRLTLKGKTKQLVVTAIARELVAFMWAIAVEVKATTT

SEQ ID NO: 474849 - protein, 453 aa, unidentified
MSRKRKNNKTKIGAPVLHCLNPNAAGVDVGATEIYLAVPADRDPQPVRHFSTFTEDLHAAADWLKACNIATVAMESTGVYWIPLFQILEARGFTVFLVNARHVKNVPGRKSDVSDCQWLQYLHSVGLLRGSFRPEQAVCTVRSILRHRDSLVQMASSHVQHMQKALDQMNLQLHHVISDITGVTGLTIIEAILAGERNPHTLAALRDGRVKATVDTIAKSLVGDYRREHLFTLRQSLAAFRHYQELIRACDREIAQYLEAFESKLDPPEGSLPESQDRQKSDDGEPRFDLGSHLHRIFGVDLTLIPGINVLTTQTLLGEIGPDLSRFANAPAFTSWLGLCPDNRVSGGKVLSVKTRKVKNRAATALRMAAQALHRSQSYLGHFYRRMRAKLGAPKAITATAHKLARIIYQMVTTRQDYDETICVQNEVRNRECLEARLRKQARQLGFQLVAAS

SEQ ID NO: 474850 - protein, 364 aa, unidentified
MLIIGCDYHPGFQQIAFVDTDTGELSERRLEHREQAEQFYRELKQQNPAVRVGMESSGHSRWFERLLHELEFELWIGDPAEIRTKRVRKQKTDRQDAQLILQLLLENRFPRIWVPDAENRDLRQLLWHRHRMVQMRTRVMNQLHVVPLNEGLRRKKALWRPAGRKELESIALAPWASRRRQDLLDLLDQLTPKIQELTRALEEEVEKRPVTRLLMTHPGVGPLTALAYELVIGTPERFHCGKQLASYIGLVPTEESSGDRRRLGHISKQGNVLLRFLLVEAAQVTVRSQQEWRSKFFHLAMRRGRKIAKVAMARKLAVHLYWMWRQGSDYGQTQKLGSHAGEPGHPDGVQSITDVMIGHPAPSK

SEQ ID NO: 474851 - protein, 303 aa, unidentified
MGEVSTIGLDIAKAVFQVHGVDGAGAVVIRKRISGVKMLEFFADLPPCLVGIEACPSAHHWGRELALLGHTVKLMPPSYVKAYLKRSKNDANDAAAICEAVTRPSMRFVPIKTKEQQTALMLHRTRQLLVRQRTMLSNALRGHLAELGVVSAKGRNGTVELLKIIADAEDRRIPPAARGILDVLARQYNAIGAEIGSIDKNILAWHRSCEASRRLAEIPGIGPIVATALVAEISDWRTFSSGRNLAAWIGLVPKQHTTGGKDSLAASPSRAIDTCDGCWSSARRPSSAMPRSTGPRTGRGSHD

SEQ ID NO: 474852 - protein, 317 aa, unidentified
MKAPLMFVGIDVCKAELEVAIRPTAQSLSVTNDQVGITALIKRFKKLRPELIVLESTGGLERQLITALIGAKIPVVMVNPRQVRDFAKSSGQLAKTDRIDAAILAHYAEVFRPQPRPFPDELTLELRALTARRRQVIDMIVAEKNRLATACRAIQKRITAHIAYLERELGEADRDLDRFIENNPLWKENQQILCSTPSIGPVSSRTLIAELPELGTLGRKQISALVGLAPFPRDSGTLRGRRTIWGGRASVRTALFMATLSATRFNPVIAAFYKRLKAKGKLPKVCLVACMHKLLIILNAMLKNKVPWSENFSLQTS

SEQ ID NO: 474853 - protein, 316 aa, unidentified
MDGSITSFVGIDIAKRSLDVCILPEGKQLSLPYDTAGLKQLFSWLPDAGSCLIVVEATGGYQRRVVAQLADAGHLVAVVNPRQVRDFAKGLGILAKTDRIDAQVIARFGQHVRPRTLAKTHEKQDELAQLVTRRRQLIELRTAENNRMETLVSKPVRKSVQQVVDLLNKQIKRIEKEIVALLESDDEWKDRGEIIQSTPGIGPVTVATLLAELPELGLLNRQEISALVGLAPYNRDSGRFHGKRSIWGGRASVRSVLYMAALTARRCNPVIRNFAQRLEAQGKPYKVIMTACMRKLLVILNTLVKTNSPWNPDYAK

SEQ ID NO: 474854 - protein, 419 aa, unidentified
MSFKILKNNCCGLDVHKTWIYACIGITDSLKRTEYKEARFSSFTKGLNELCDWLSKYNCTDVCMESTGKYWIPVFNVLEKNNIWVTLSHPKYTKPQKGNKTDRKDAKWICDLYMCGMVKPSFIPPADIRELRDLVRYRFKLTCMITGEKNRAHNCLTVSNLKLDDVFSDIFGKSSRSITEQILQHPGETFDVAPFVDGRCKTPIEEIQAAVDGAISKEQAVKLRQCLNHIDELEMHKAEIELEIFRLSDKYESVLSLIRTVPGFDKTPMTAIQVLSEIGGDMSVFPTAKNLVSWAGCCPRNDQSNHKIKSTRISRAGSYFKPVLVQVANALIKSKKHPEFTTRYRRIKARRGHKKAIIAICRMIMTAIWHILTDLKPYTPEGFLESRPVNESKILTTSQALNLMKQRGYIIKDDVVPVT

SEQ ID NO: 474855 - protein, 342 aa, unidentified
MNHYAGIDVSLECSSVCVVDASGKILREARVASAPEALIAWLRSSGFEFERIGLEAGPLSQWLFAGMREAGLAVELLETRHVRKAFEAMPVKSDRNDARGIAQLMRLGWFRPVHCKSVSAQETRSLLTARKLVQSKLRDVENSLRGILRGFGLKVGKTTGQKFAGRIEELVAGHPHLQVITKALLAVRTVLRTEFAAFEKQTRRMVRSDMQARLLTSIPAVGPIVALTYASAIDDPTRFKSSKQAGAHFGLTPKKHQSGETDYTGRISKIGDASVRTALYEAANVMLTKPVKGCSQLKSWAMRIAKRAGMSKAKVALARRLAVIMHRMLADGTPFNAAAAAV

SEQ ID NO: 474856 - protein, 344 aa, unidentified
MKITTLGIDLAKNVFQLHGVDELGKVIVKKQLKRDQLAAYLVNLPPCLIGMEACGGAHHWARKLMSFGHTVRLMAPQFVKPYVKSNKNDAADAEAICEAVARPNMRFVPIKDVGQQSVLSLHRVRQGFVSARTAQANQIRGLLAEFGVIVPQGIAHLYTRVPELIEDASNEMTGAFRLLIQRLLDHLKELNKQVDEMEAQIVQWHKHSQASLKLAAVPGIGPITASALVASLGDAKNFENGRQVSAWLGLVPKQHSSGGKEKLLKISKRGDTYLRTLLIHGARSVLYREQSKADTSSWVKGVATRRNHNIAAVALANKNARIAWALLTREKGFDAKHACLKVAA

SEQ ID NO: 474857 - protein, 373 aa, unidentified
MTFKVWMEELAEKYGKDVVIPGMEPTGHYWFNLGAYLQDNGMKPVHVNPHHVKKSKELDDNNPNKNDRKDPKTIAALVNEGRFSYPYIPTGVYAEIRSLSNLRLQAQEEITRIKNRIARWFSIYFPEIKDVYKNPGAVSGLMILKVAPLPKDIVKLGVDGVNQIWRDAKLRAAGLKRAKTLVTAAEHSIGSQEACDSARIELKILLNDYEIYHQREEELMELIEEKLSEVPYIDKLLEIKGIGMKTVSGFVAEVGDIKRFDNPKQLQKLAGYAIVECSSGKHKGESHISYRGRKRLRYVLYEAAISLIARNTEFKEIHRYYQTRGKNSLKKMQSVIAVACKALRIFYAILTKGVTYDGAKMLQDIKRPQLKVA

SEQ ID NO: 474858 - protein, 385 aa, unidentified
MEVLIPRCAGLDVHQETIVACVLIGEADESPRSETRTFPTMTRDLFALMTWLESEGVTHIAMESTGIYWKPVYNILEGYFDIALANAQRIKNVPGRKTDVSDAEWIAKLLRVGLIEKSFVPSEDLRELRDLTRLRKKRVGNLTAEKNRIQKMLEASNVKLGTVISDVFGVSGRNLLERLVEQGYVDPDDIEHRVHGNVKRNVARVAESLFGTLNKHQILMIRNCWEHITFLEKSITALDEEIEAHLEPYKEAQQLIQTIPGVSEVTAAAILAEIGVDMEQFPTADHLASWAGVAPGNHESAGKKKSTRTRKGNPHIKTALCEAAWAATKSRKSQLAVRFWKMASRRGKKKALIALARKMLTIIYMMLKTKTPYIEGGPVRTEPVA

SEQ ID NO: 474859 - protein, 359 aa, unidentified
MDGSKQQPMTTAGLDLGDKYSYLCLIDSQSGEVIEEGRLPTSPESFRRRFSSERPPMRIAIEAGTHSPWASRVLEECGHEVLVANSRKLRLIYANKRKTDEVDAENLARLARLDPKLLYPVAHRGEDSQAHMALIRSRQALIGCRTQLVNHVRGAVKSFGHRLPKCAASSFHNKAAEHIPEALLPALGPILETIGSLTGRIREYDRKLETISKERYPETELLRQVEGVGPLTALTFVLTLEDPYRFEKSRSVGAYLGLVPARDQSGDRDPQRRISKEGDEMLRRLLVSAAHYILGPFGSDSDLRRHGEKIASRGAKNAKKRAVVAVARKLAVLLHSLWASAEVYEPLRNAHRSAGGQAA

SEQ ID NO: 474860 - protein, 370 aa, unidentified
MAKRSMFVGMDVHKESIDVSIAEEGRDGEVRHYGVIPGDLEAVAKVVRALRAPSRHLRFVYEAGPCGFGLHRYLTAQGEDCVVVNPSSMPKRSGDRIKTDRRDGDALARLHRAGELTAIYIPTPDDEALRDLVRAREDAVGLSTQAKHRLKAFLLRQGRRYPGRAGWTRPYRRWLADLSFPLAPQHIALQEYRDTIDETERRVERLTDQLRQLTPAWRWAPVVDALQALRGISFVTAVGLVTEIGDIRRFTHPRQLMAYLGLVPSEYSSGPSVRRGGITKAGNPHARRLLAEAAWAYQGVPRIGRQMLYRQEALSKTVCDIPWKTQLRLTSRFRKLVARGKAKPKVATAVARELTGFIWAIAREVPPPPV

SEQ ID NO: 474861 - protein, 403 aa, unidentified
MSSAVSYLCRRMKGSTALVIIGVDPHKRTHTASVVETATDKVLATLQIDASLAGYRRLLKWASGFEQRRWAVENARGLGRHLAQWLVAREEVVDDVPSTATARVRELSGGGRRKNDVIDAAAAASVAALRGDANPVVADDLTTVLALLAERRDNMVTQRTRLINQLHALLRDLLPGGAPTALTAVDASRLLTGVRPAGPIEAARKHLARDLVAEIRDTDQRLKTLTAQIADTLDAHGTRLRDVAGIGPVIAGRLLGRTRRAGRFRSASAFAGYAGVAPIEVASGDHTRHRLPRGGDRQLNLALHIVALTQVRMRESTGRAYYDTKVAAGKSHNEAMRCLERQLADRVWRLMLADEHRLAAGPGGHSGATLTSSAAGSTPTTSSSDKSLPGPADRNSTTPSPAA

SEQ ID NO: 474862 - protein, 532 aa, unidentified
MLAQLSSRVASAILAEWRVAHADPVIRSSVALPDGATLTFGLGGEFLHRCTRAAPDRVGWKMATAAGISRSQSLGAVSPVLQMDPRRPAESPSVASPMGRAREAVAAQMGASLAAGMGWRPCAMETMHDRCAGIDIGKRSLTVCAITPGPRGEPVRETRSFGTLTSDLLRLADWLADREITAVAMESTGSYWKPIWNLLEDRFELLLANAAHIKAVPGRKTDVRDAEWIADLLRHGLLRASFIPARPDRELRELVRYRTTLVRERASEINRLAKVLEGANIKLGSVSTNLGGVSGRSMLAALSAGVDDAEALADLARGRLRAKREALIEALAGSVGAHQRFLLGTQLRHLVDLDGLIESLDAEIASRLATAGAVIERLATIPGIGRRTAEIIVAEIGLDMARFGSARQLASWAGMCPGNYESAGTSHGGRTRRGSPWLRSTLVSCARSASRTHTYLGAQYRRLAARRGARRAFVAVGHTILGIVYHVIRSGRPFEDLGPTYFDRRDADRVTKRLTRRLEDLGYDVVLRQAHG

SEQ ID NO: 474863 - protein, 485 aa, unidentified
MAVVHRRCAGLDVHRDKIAACIRIRVKGKYEEHHEVFGSFTDDLKKLSHWLRDRKVRHVAMESTGVYWIPVWNVLEKHRRFDLLLVNPAQVRALNGHKTDRIDCARIAEFLQHGRLAGSFIPPAEIREARAVERRRVTLQQDCNRVTNRIGRLLQTANIKLSSVLSNIVGVSGERMLRSIAAGESNGAKLADLVHYSLEGKKDSIVRSLEGRYSPHFRYLLNELLSDLDHLDQKLENVNAQLAKYMAPHGDLVLRLCTIPGIDKVVAWTIISEIGSDVSAFPDAKHLASWAALCPGNNESAGKRKSGRTNKGNKYLRRALVQAAWAAGRSKNTFLSALFSRILRRHGMKKAAVAVAHRMLTYIYYVIRDGGSYVEKGGDYFDRLHPERTASRLLARLDALDYYTSAIIRKVHQPEPPGELKPGRGRPCKCADRGVPCPHPPRLFRTSPSPRVLSKANPAKPVPEGQLCRKCNDWGVPCIHLKPRK

SEQ ID NO: 474864 - protein, 328 aa, unidentified
MGIDLAKSVFSLHGVDVAGHVVLRRSVRRDQLVEVVAGLSPCVIGMEACSGAHEWGRRFQEHGHTVRLMAPKFVAPYRKSGKNDGNDAEAICEAVTRPSMRFVPVKSAEQQALLAMHRVRQGFVVERTATINRLRGLLSEFGVVLPLRSVTVRRQAAAAAENLPELARRAIGDLLDELRVLDERIGGYDREIEAQARLCEPAQRLMKIRGIGPTTALAIVATVGNAREFKNGRQFAAWIGLVPGQYSTGGKTRLGHISKRGDAYLRNLLVQGARSVLHTAAAHRDHVSRWALELQPRRGYYRTLVAIANKNARIAWALLAKNETLRAA

SEQ ID NO: 474865 - protein, 316 aa, unidentified
MDVLGIDISKADFHGCLIQGKKQAKNSFPNVPVGYRRLRTWLRNRGCTKVHVCMEATGAYWEGLACALHEAGLEVSVVNPARTVHFARSQLRRTKTDRVDAEMIAEFCKTQKPDRWSPPAPEILEIRGLLSFRAQLLDDKLRLSQMISQIHVSKELQRLYSTQVKTLTASIAAAEKQLKTVAKTHRTLHRQVQKLTGVKGIALLTALEIIAKLPVERLRDAKAAAAYVGLTPRERQSGTSIHGHPHICKTGNASLRRALYMPAIVATRFNPILKAFADRLKAKGKPAKLVVVAVMRKLVVLAFAILNRDLKEVAMT

SEQ ID NO: 474866 - protein, 405 aa, unidentified
MVVYIGIDWSQNKHDFTFLSERGAVLAQFMIPHTQEGFLKLEETRRRLGLATSGCAVALETAHNLLIDFLWARGYSRVYVVPPKAVKSNRSRYRQSGAHTDQSDSFVLADLLRTDCGVLQPWHPDSLLTRQMRAKVNLISFLTRDILRLHNRLTAVLLRYYPAALHIFSRFSQIGTQFIQAYPTPQAAAALTFEQFVTFARQHKYQHPQKLRAYFASLQDNYPEALPETVQVYQDEAPMLAARLSELVKAKAHALGELQILFKQHPDYPVFSSLPGAADLLAPALLAMFGDDRQRFPTAVSVQALAGTCPVTESSGQSKFIHFRWSCNHDFRHIAQQWAKASLDKSIWANAYWRQVRPRCRSDSHAYRCLANRWLAILWKLWQLRQPYDEAYHCKQRALRSKPLG

SEQ ID NO: 474867 - protein, 324 aa, unidentified
MSLPSPPINVGIDVSKETLDIAVHETAAHWTSKHEFTEFPQLLKSLRAVAPTRIILEASGGVENLLVSYLAMAGLPVIVINPRQVRDFARATGQLAKTDRIDAFVLARFGATLEPAVRQLKSAETQELEALVARRAQLVNMLTAERIRLQQAQQQRRQSIVSDLKAHISWLQKRLDKCERDLSQLLRSSPIWRATDERLQSVPGIGPITSLVLIAELPELGQLPDKQIVALCGLAPHARDSGKWHGKRTTRGGRARVRTALYMAALVATKHNLVIKSFYRRLLSAGKQKKVALTACMRKLLVILNAMFRNQTSWQPPRLAQELN

SEQ ID NO: 474868 - protein, 377 aa, unidentified
MRKTIRFVGLDVHAETIAVAVAEPSGEVRSLGVVPNRPEAVRKLVRKLGPPHSLRVCYEAGPCGYVLYWQLTELGVHCEVIAPTLVPVRAGDRIKTDRRDALKLARSYRSGDLTAVWVPDEAHEALRDLVRAREAAKKDQLRARHRLHKFLLRHGLRPGEKIKAWSAKHLAWAKTLRLELPTLEATLLDYLTEVEHACERIARLERAIDQAIESAPATIRAVIDGLQALRGIARVSAATIVAELGQLSRFSRPKQLMGYMGAVPREHSSGEYVRRGAITKTGNAHLRRILVEAAWAYRHRPNVGRELRRRQRGASEEVKEIAWKAQQRLHYRYARLMGRSKLKQKAVTALARELAGFVWAIGVEVERHLALRPVRAA

SEQ ID NO: 474869 - protein, 340 aa, unidentified
MTITTVGIDLAKNVFAVHCVDQHGKTVLVKPKVSRAALPELIASLPPCVIGMEACSGAHYWARLFRQYGHEPRLMAAKFVSPYRMAGKSGKNDAADAQAICEAVRRPHMRFVPVKDESQQAMQCLHRIRQGFIEEKTATYNRLRGLISEFGVIAPQSTDALRHMVSEQKSSLPLQVQQCVNDLLEHIDRIEDNITEYDRILSRMAKTDHRSQRLMELKGIGPTTACALVASIGNAHDFKNGRQLAAWLGLTPSQYSSGGKSKLGRITKAGDSYLRTLLVQGARSVLIGAEKRTDLFSRWVCSLVDRRGYWRAVVAIAAKNARLCWASLHYGDDFRLFSAS

SEQ ID NO: 474870 - protein, 410 aa, unidentified
MVKENFIYVGIDLHKETHTAVMIDCYNQKLGEITFPNRPAAFPKLVTKVKKCNTDGKEVVYGLENAYGYGRALAVWLIDKGYLVKDVNTAISHRQAKHRGAMYRKSDSDDAKAIALATLNMLDKLPDACPNDAYWSLGQLVHRRDNIMKQRTRLVNQLHEQLCIAYPSYKQFFNDISRPTALYFWEHYPSRKYLKGKSVEDLRAELVPVSHNKCSTKTCEKILDAVASDKVKNNAYQDARDMVTLSIVSDLQHYDSQLTEVDKMLEQMYKMLGCTLTTIPGVNVITAVKILAEIGDIKRFSNANKLAQFAGIAPLHLSSSGKGKDVATKQGNRRLQATIYFLAIQMVQVSSKGTPRNSVVRAYYEKRKAEGKNSQQALICISRRLISIIYGMLKHGTEYRMPVVESAGEK

SEQ ID NO: 474871 - protein, 408 aa, unidentified
MYNAVGIDASKLKSTITIIQPAGVVIRKPFDVLHTSDELNTLVTYLKSLVGETRAVIECTGRYHEPVVKSLSEAGIFISAVNPKLIKGQKQNTLRKVKSDPADARKIAKYALDNWAELREYSSMDTTREQLKTLNSQFTFFMKQKVAAKTNLISLLDNTYPGVNKLFDSPTRDDGSEKWIDYAYSFWHVDCVRKIGLKAFTERYEAFCKKHHYNYQKNKPALLFEESKQLVAVFPKEKSYKLLIQQSIQQLRLASEHIEIIRKEMNELASTLPEYETVMSMYGVGETYGPQLIAEIGDVSRFTHREAITAFAGVDPGVNESGQFKQRSNRASKNGSTRLRKTLFQVMSTYLQNKPVNEPVYQFLDRKRAEGKPYLVYMTAGANKFLRIYYGKVKECLRNLEQSQIKES

SEQ ID NO: 474872 - protein, 362 aa, unidentified
MSSMTQSGMDVERAVIGGVDCHDQTHRFAALDALGRRLGDAEFPATAAGYVRAEQWLRCWGTVRMVGVESTGSYGAGLTRHLQAVGLTVVEVNQPHPHARSRRGKSDAIDAEMAARKVLSGEVTTVPKDTTGVVESIRQLTVARAGAVKARTAALVQLGQLLVTAPAPLREQVDAKTLLGRAAQCTRLRPDLTRLGDPVQASKLALRVARRITDLNHSIDELDEGLSPLVAKTAPRTLQRLGVGTQHAAQLLITAGANISRLRNEAAFAHLCGVDPIPASSGKTVRHRLNHGGDRAANSSLHMITVVRLRYCEQTRTYLQRRMNEGKTKREAMRCLKRYLARELFRTITADLKIMSGPLDGL

SEQ ID NO: 474873 - protein, 373 aa, unidentified
MTKITRFVGLDVHADMIAVAVAEAGRDGEVRSLGKIPNTGEAVWRLVKKLGPVARMKACYEAGPTGYALYWQLTQLGVACEVIAPTLVPVKAGDRVKTDRRDAVKLARCYRSGDLTPVWVPDKEHEALRDLVRAREAAKRDELRARHRLGKFLLRHGVRPPTKMKSWTQTHVAWIKTVKFDQPALDATLHDYLSEVEHVAQRIERLEHWIDTAVDLAPPRMRAVIGALQALRGVAKMSAVTIVTEVGCLSRFPRPKHLMGYSGTVPSEHTSGGPPKRGAITKTGNAHLRRVLVEAAWHYRLRPGLSRRMKRHQGEVSEEIQEIGWKAQHRLYRRFCKLAAKGKPHQKVVTAVARELLGFIWAIGVTAEREAAA

SEQ ID NO: 474874 - protein, 419 aa, unidentified
MNAVGIDVSNGKSMVAVLRPLGKTVAEPFEVSHTTASLHALAERIRQYDGETKIVMEHTGRYYESIAKVLHECGLFVCAVNPLLIKEYGGNSLRKVKTDKADAKKIARYALDNWGDLRDYGLMDTIRYDLKTMHRQFQLASRQRTACSNNLVALLEQSFPGVRSWFDSPPRADGSQKWVDFAETFWHADCVGKVSLNAFTERYRKWCKRRGYQFSATKAAEIHEAARLLVVLVPKSDTAKFMVQQAAQQLTSVSRCVETYRAQMNRLASQLPEYPIVTAMYGVGESTGPQLMAEIGDVRRFAGKQSLVAFAGVDPMPNQSGQKNVKSNKSSKRGAPYLRKTLFVVMSTLLRKAPVEEPVYQFLDKKRSEGKPYYVYMTAGANKFLRRYFGKVRDYLASLNPQPPVLSFSEAPDDTPVNP

SEQ ID NO: 474875 - protein, 403 aa, unidentified
MFYLGIDVAKKCSRYLVLDSEGKRVVSFSLENVKEQFQNLLSRLQETKIENKDILAGLEATGWFWENLYQFLQEKGFKVILLNPYYVNKFREALAKKAKTDDIDALVIANLLRTGEYMNSVVPEEKIQVLREYTNLRYEFLRTLQDYKRKVISLLGVVFPEYERTALRNPFGVASLQILKEFPTAKDLALAKPSRIEKIVRSIQGNNFDTKEIQSLIDGAKNSIYSGRAREVRGVSLRMLLEHIHNLDSNIQEIDKNIENILSPNSNNGSFPGENLLSIPGVGKKTVAAVLSYLGIDGSSFCSAKKVTGYVGFFPRLYESGETKRANKISHRGPKVLRWALYMSAVACLIHNKEMRAIYQRKISQGKSKKQALIVVAKKLLQVMLAMLKSGKPYNPIQVFANT

SEQ ID NO: 474876 - protein, 379 aa, unidentified
MAYPLQSTLLPLGADVSKLTIDLHLGTEKGRRFHKRIANTLSGFQEAQQWLVEQGALQVHVCAEATGTYSDAFATFMDAQGHRMSVVAPHKMHAFRKSEGQLAKTDPLDARLLALYAAQKQPPAWHPLDDLHIQLKLSLERLDQLEGLKQQEVNRLENQRLSPALREQIQALIAFVEHQKEQANAHMRDLLKQIAQQQRQTSEEALSASERTTTTPPPAKEEPLVLGHKKAVGLACVDHFQEIKGIGLLTAVRMYSLLKTMQEVHSAAQLAAYIGVVPHAATSGTSVRGKAQRRGGNAKARSWLYMSALNSKRFDPDMREWAQQLQARGLCQKQILVAVMHKLVRILFALYTTGQRYDARKAWPTHGSKDASSVMSQVA

SEQ ID NO: 474877 - protein, 340 aa, unidentified
MHKSSAEDFLSCGIDVSAAQLVVALEGEAGGWRQRSFPNRARGHQALIRWLQKTGERVRVCLEATGRYSLDLALALHAASGIEVAVLNPKVVHAFAATLCRSKTDPADAQVLAEYARRMSFQPWHPPSAVALELRTLTRHIAALTQQHTQQSNRLHALSASSAGSPWVRQDLKRSLRDLQRRMEKMRRAALALIAQDAELRPRLARLLSMPGIAEISALSLLGELALLAPDLTVRQWVAHSGLDPAHHDSGSSVHKRARISRAGNRYLRRALYMPALVAVRRDPHLRAFYHALLARHKAKLQALMAVARKMLHAIFGMFRGGTDYDGSRLFPALELAVAA

SEQ ID NO: 474878 - protein, 316 aa, unidentified
MLDCCAALDVHKKAVTVSARVSGRDGSREELMAEFATMAADLLALRDWLKELGVTHVAMEATGVYWKPVYYALEDDFELLLVNAQHVKNVPGRKTDTLDAQWLCRLLECGLLRASFVPPKPIRALRDLTRYRKSLIQERQREANRLHKMLEDAGIKLSCVATDVLGVSGRQMLAALLAGTRDPELLAELAKGKLRAKLPMLRRALAGNFQAHHALIVSQILAHLDYLEEMIAALTEEVQQRLVPFGEKVELLCTIPGVGARNSQVIIAELGPDMDRFATDRHAASWAGICPGNNESAGKRLAPDAPARATPTCASR

SEQ ID NO: 474879 - protein, 377 aa, unidentified
MKYVGVDLHKKTISACVVVIEQGKRKVIARTRLECRDEARITSWFATLGTFEVVVEATSSYEWFVKLVEPLAHRVVLAHPKKLRVIAESKRKSDKLDAQVLAEFLASDEIPLAYRPAPRVREHRTLVRYREYLQRRITSVKNKLRHILAKYNADVPHLFTEAGQEHLAAVALSPCDRLVADALSLELNQQGERLLEINRELRRFAAKAPLPEKEARAVLDSIPNVGPVTADIVLAELGDWRRFRSQADVVSYAGLAPGYRESAGKFQQLGITKEGSRILRWAMVELAWRMVRTSRKWGRHFTRLEVRVGAKKAIVAIARRLVGMIFALLRESKPYSLALEISPPASCGSQSPRDTHPSDPACLRGQPRQTSSLGAGG

SEQ ID NO: 474880 - protein, 347 aa, unidentified
MRFYTNQHHYYCGIDLHTKNMYVCILNQEGKILLHKNADVCEATLLKFIKPYLPDLVISVECMFTWYWIADFCNRHNIPFVLGHALYMKAIHGSKTKNDKIDSRKIAVLLRGGMIPMAYVYPQEMRATRDLLRRRMHFMRKRSELLAHIQNTRNQYNLPSFEKTISRKNNRGNIIEHFNDPAVQKSMELNLLLIDQYDGILRTTENYILNHVKAHNPNDFYLLRTIPGVGEILALVMLYEIHNIKRFEKVQNFTSYARLIKPQKESAGKVKGSGNGKMGNAFLKWAFSEATLLLLREKQEIKDFHARLKNKHGKARALAIISHKLGRAVYYMLKKQKAFDMNKFLNQ

SEQ ID NO: 474881 - protein, 469 aa, unidentified
MAARKQKQKQRRMSAQVVEDEDYQLRYEIVAGIDVAKESAVVCVRVPPAEGRKHRTSHLQAVPATVPAIGELAAELKAAGVQMVSMEATSDYWRVWFVVLEEAGLAVQLVNSSQARNLPGRPKTDKEDARWIARLTEMGMLRSSFVPPPEIRALRVYTRHIFDLTADRTRYWQRLEKLLEDALCKLSAVVSKLAGHQTARAVIEKMIEGERDPQVLAALGRGKMRNDRLPALAEALSGMRFGPQHAHAAASLLRAIDLLEAELRDLQGRVTAHLAAIPASWGVDADGVTGPDAGREEDAAVLPAAERLDEIPGLGREAAAALIAEIGLDMTRFPTPEALVSWAGLTPTARQSGPRKSRGKKGHGNTYAKRIAVLAAYAAANTDTFLGERFRRLASRPGGGGRKKAGCAVGRSILVIVWHLLNDPAARYRDLGSGWHARHTDRSRKARNARRQLEALGYDVIITLREDAA

SEQ ID NO: 474882 - protein, 419 aa, unidentified
MNRIETKKQRIVNAKTLIVAIDVSKTTDMGYCRCPSGEEMKSFEFSNNIKGFRMLWDRICWMKMSHHLEEVVVGFESTGAYGEPLVHYLRQKPVKLVQVNPMHTKRIKELEGNSPGKTDRKDPKVIADIISLGHALTVVVPEGAAAELRKLTLARERCIQRRTALYNQLQDLVFSLFPEFIQVLKDIKTKSAHYLLRNYPRPQDIRECGVEPLGSILKRVSRGKLGSAQAQALYEAAAESVGLREGTQGIVLEIEEILSALEACNRFIEKLEEEMLPHLEQIPYRDSLLSVKGIGVITVAGLVGEVGDFRHFHTLREVMKLAGLDLFEISSGNHTGNRHISKRGRPLLRKLLYFAAINTVRKGGIMHASYQRHLDKGMPKTKALIAIARKLLRVLFALVRDHSQYVQSYSKKEVLKLAA

SEQ ID NO: 474883 - protein, 401 aa, unidentified
MSKKNTRNALDTSLSYAVIGLDLAKADCAVAAVPCADDELGLIDRMDYESLFEQAEKLGPTLFAMEPCCGYSQISLRLQNMGHEVKVISGHAVKNWIATHKSNQKTDLNDATALAKLALYDHDLQPIRVKNVEECRIASVQAIRIQLRTQATKSLVCFKSLCQCWGIVIRRGSLNTKKMAEAVAAVEKLLGVEVASSLMILRAAYKFTMKQINALDKLLDALVEANEQARTMKTVLGIGTQTAARLAVTTGDIKRFPMPRSYVAYFGLAPRNIITGHSGTPSPSKRGALKPVSSRGQGKVSRRGDRVARSFIIQGAATIYMLYCKDMLPECQLRRWLHEQIKRGKPYGKIIVSLAAKLLRIVWALLTYGEKFDSHKAGVPRSVLAAMEKPLKHDAAAESAA

SEQ ID NO: 474884 - protein, 427 aa, unidentified
MSVTQNEKIRQVTDTTMVIGVDIASELHWARAFDWRGLELGKTVKFENSAEGFNFFLRWVSELTVEQKKDSVMVGLEPTGHYWFTLAAHLQGGDFKLVLVNPYHVKRSKELDDGHPSKSDKKDPKTIAKLVLEGRYVYPYIPQGLYAELRVAMNCRWRIRKELASLQNQIQRWLKIYFPEHSKVFGRFTGAGSMALLHSAPFPSDLISLGVEGISGIWKQMKLRGIGRKRAQRIYEAAQTSIGCTTGMEAARMELQILLEDYDAKLQQYERVMQVVENLCSQIPAVAELLKIQGLGLVTVAGLFAEIGDIRRFESPRQIQKLAGLAITENSSGKHKGPTEISRRGRSRLRAILFRAAIPLLAKNREFQLLHRYYTTRQNNPLQKIQSVIAICCKLLRVFYALATKDCAYSPEKMLADIQRNQPLKAA

SEQ ID NO: 474885 - protein, 378 aa, unidentified
MGDHSEAFVAFDTSKLRNAVAIADGGRGGEVRFLGEIENTEAAIAKLVKKLAGKYQRLRFCYEAGPTGYGVYRQITSLGHECSVVAPTLIPKKPGDRVKTNRRDAVSLAKLLRAGELTAVWVPDRHHEAMRDLTRARETAKQDLQRKRQQISAFLLRQGLHYPESKSTWTKRHMNWLASQKFELAEHRIVFEEMMEAMRQAQGRVARLEAAIGAAVPDWSLAEVVTALMAMRGLDLVSAATLLAEIGDLSRFQSPCELMAYLGLVPSENSTGDKVKRGPITKAGNRRARRMLVECSWSYQHPPRLSKKKQMKVDAVPPAVREIAWKAQCRLNRRYRALVKRGKLKTVAITAVAREFAGFIWAVARAAMTPTTAGTGAR

SEQ ID NO: 474886 - protein, 381 aa, unidentified
MTTPSTDNGQENTTEATLFVAFELSEKNWKLGFTTGAGQKPRERGMTARHQERILDEIAQAKRRFGLPETTPVVSCYEAGREGFWLHRFLLAHGITNHVVDSSAIEVSRRQRRAKSDGLDVRKLLSMLIRYHGGERQVWHVVNAPSVEAEDQRHLHRDLETLKQERGDTTRRIKGLLSSQGLRVTTLSNLPEQLDALRLWDGSPIPPGLRRRVLRVYAHHTFLSEQIAAVEAERRAQLQTSTEAHIAKVRQLMQLKGIGINGAWLLVMEFFGWRALKNRREVGGLAGLTPTPYQSGERAREQGITKSGNRRVRWMIMELAWGWLRFQPDSALSAWFRERFGDGGQRLRRIGIVAVARKLLIALWRFLKTGALPEGAELKAV

SEQ ID NO: 474887 - protein, 363 aa, unidentified
MLYVGIDLHKKSLTVCARNEQGDIVLRRQVSTQWAEMDRFLGALQERARPNGGYLAILEVCGFHDWLLRRLGRWGCLRSYVVAAPPRVRNKTDRRDAAKLSDLLWINRERIAGGGRLIELHVIYQPTEQEEHARQLTHLRLRLGRRQTRVKNEIHRIILRHNLAQECPTKGLFTLRALTWLDRLALPELDRFELDGLLEHLRLYRGQIAAVDKRIHQTADQNAAIPLIRTLPKLGRYTALALWAHIGPIARFPTARSLAHYFGITPGCRNSGPTERPGGITKAGHPLIRFLLAQYVVHALRGDPGLREWYRKIKRRRGSKIARVAIMRRLCEALWHMLTKQEPYRPMAVPDSPDPGRAKRPAA

SEQ ID NO: 474888 - protein, 419 aa, unidentified
MFSNTDLIAGVDVHQRTNVTLMMDGQGNVIDTHHSFANNGAGTEQFAHHLAQTATSGNFATIHIAAEATNNFWLPFFSQLQHSPFLTDWPMTLYPFNPRLVHNFKKALGEDEKTDLLDAGVIAERLRFGKKLPHPFTIEEMHLPLRSLTRYRFHLVQELVRIKNYCLSLLYLKATDYTAKGKRPFSDTFGVTSKAVLCQFSSLDEVTNMPFDELVEWLDVKGKRRFPNPEENARKLQQVAADAYRLPDEWADAVHHIVALNIRHITLLENLINRVETSITQQMKGIPNTLETIPGIGPVFAAGIIAEIGDASRFEYNEAKIASYAGLRWPRSQSDTFEAEDRRMSRSGNRFLRYYLCEAAQMVRLHAPEYREYYNRKYKEVRKHQHKRAVVLTARKLVRLIVRLLTTNEPYRLRLVLNG

SEQ ID NO: 474889 - protein, 430 aa, unidentified
MNYANDSRLKQFYQLRDEIRGSTEYLVVGLDIAKEKHNAFFGTATGRTLHRGMFFDNTLEGFRRLLTQVEALKTQYGLSKVVFGMEPTANYHKPLAEHLIRRGHMVVLVSPVSAAKNRELLDGRWDKHDTKDAANVADLIAQGKCLYYDYPEAAIRDIRSLLSFKKRLKKEEQALQVRIRNQLLAQYFPELDRHFRSEVSLAVIRHCLDPSIIAAMEYDQFCRTVAPGRVNFRQQRLLQQIWKLAHESVGCRVGETVLFEAQAMVSSLHRVRESIKAVDDKIEELCLTFPEYSFLLTIPGFGPEVSSTVLSAIGDPYRFSCGKQVLKMAGYDLCADRSGKTASHAVPVISKRGKVGLRSALYQAALIASSRNTYFMAYYTRKLKGRAQEKGIGTKMRVKLAAKLLIIAWTLMKRKEVFDPACLKRGDTRV

SEQ ID NO: 474890 - protein, 354 aa, unidentified
MPSKVTKPNTSAYPKLMSIGIDIGKDVFHLVGFDHNGKVVLRRKFRRLELDAVFEKLPRCVVGMEACLSAHFVSRRLRALGFEPRIIPAIYVKPFLKGQKNDYNDAEAIAEAALRPNLKLVKEKTQEQLDLQACHRVRSRLVSRRTATINQIRAFLIEHGIATRTGANNLRRSLPEILLQRADELSPRMRVLIEELHGDWLRLDARIEALNEEIEEISRQEKSCQNLMTIPGVGPLISTATVAAIGNGEAFERGRDFGAWLGLVPRQYSTGGRPILGRISKRGSKYLRTLFIQAANVILMRPQNWPRYSFGGWLVTAATRLHRNKLATALANKLARIAWSVLRHNERFDDAQTI

SEQ ID NO: 474891 - protein, 412 aa, unidentified
MNIRVEKACGIDVHQAFLAATILTSAGIKDTREFSTCLDGLLDLRTWILENGCQRVAIESTGVYHIPTYTILEGKVETIVANPLQIKYIPGRKNDDIDSEWIAEVCLNGQIKPSYIPCREIRDIRELTRTHVKFSNTRTVVKNKVHKILQRAGVRISGVLSDIFGKSGIIILNGIMDGKSIEQIFGCLTDKRMKNKRPEIKDAIKGELSQNDIFVIKECLETVKFLDTKIKEFDSRIFHSLTGLQKELDILMSIPGIGFTIAAAATAEIGDIKVFPKPKNLVSWSGLAPAVSESAGKSSNGHITKHGNKYLRTILVQAANSIAIGKPNKLRFFYQRIKAKKGHKKAIVALARKLASIIHHLLANDEKYSEEELKEKKVKLPKFVSLQDLDMDGMIKILCEAGYTINKSSSAG

SEQ ID NO: 474892 - protein, 411 aa, unidentified
MRRVIGIDIHRTFGEVVFWEDGRLRRAGRIDMTRTALEGFGKSLLTGDEVVIEATANSMGVSRVLEPFVARVIIANPLQVKAIAQAHVKTDRIDAGTLASLQAAGYLPQIWTPDASTERKRRSAARRYQVVRHRTRLKNEVHSILHAHLIPKCPHADLFNARGRAWLSAQPLPEDERAAIDRHVRELDRLAEDLALFDREIAQDAIDDPAVNRLMTITGVNLTVAAGIVAAIGDIGRFKSPQKLVSYFGLNPRVRQSGLGAAHHGRISKIGRSHARAMLVEAAWAAAKAPGPLHAFFVRIRARRGHQIAAVAVARKLTVLCWHLLAKGEDYQWARPALVANKTRAMQLQAGHPQQKGSRRGPAYAYNIKALRDREMMIAAQAERSYERFVAQWKPRRPKEARGRLSSAGHK

SEQ ID NO: 474893 - protein, 316 aa, unidentified
MNTQDHNEINIGIDASQPMLDIYVRPQGDFRSFENNPEGIRSAIRFIKPFKPTRVLIEATGRLEMAFFCAAHKAGLPVCVCNPIQVRNFAKSTGRLAKTDKLDAQDIAYFGEALKPALTDLKPEKLRLLSDLLTVRSQCLDMSTMQKNRLQRMPKTVHKHIRNVLNSISKEIEGIDRQLDKLIADIPQWQDKVNQLTSAKGVGKVLAYTLLSELPELGQLNRKQIAALVGIAPMNRDSGRHKGKRYIRGGRHKVRTVLFVSMMSAIQCHPKIKPMYERLLTAGKPKKVAIVACMRKQLTILNTMVKNGTYWDENMI

SEQ ID NO: 474894 - protein, 339 aa, unidentified
MTKATTIGLDIAKQVFQVHGADKAGRAVLRRKLRRSEVSRFFSEQPPCLVGIEASGSAHNWARVLGGLGHSVRLMAPQFVKPYVKSQKNDANDAEAICEAVTRPTMRFVPQKSIEQQDLQCLHRVRSRLVANRTQLINQIRGLLAEYGVVLPQHPGQVRRGLPAVLEDAESQLTGFGRELFQNLYEELAQLDEKIGDADARIQTAFQSTPDCRRIAAVEGVGPFIATAIVAAISNGHAFENGRQFSAWLGLVPRQNSSGGKSRLLGISKRGDPYLRTLLIHGARSVVYRAKAKTDKRSLWINDKQQRLGTSKACVAVANKNARIIWSLIAREQEYQRAA

SEQ ID NO: 474895 - protein, 417 aa, unidentified
MQVLYERCAGLDVHKKSVVASVRLATENKLVTEVRTFATTTAGLLALSDWLSENGCTHAAMEATGVYWKPVWHVLSDGEIDLVLANAAHVKNVPGRKTDVCDAAWLAELMAHGLIRASFVPDAQTQELRALLRTRKQLVRERTRHTQRIHKALEDANIKLDAHLADILGKSGRSILDAMIGGESEPVRLAALAHPNVKCSRAVLEEALRGRVTRHHRFLLRLHLGQIDGLDGAIATIDQEVEDNLAPFREAVDLVSTIPGVNTLSAEGITAETGIDMSRFPTVGHFLSWANICPRNDESAGKRRSTRMRKGGNWLKTTLIQCAWAAKRKNGSYLQAQFLRLRSRRGEKKAICAVAASILTAVYYILKNRVPYQDLGADHFQRRSKITHTQRLVRRLENLGYAVDIKPIAAREAQVSY

SEQ ID NO: 474896 - protein, 349 aa, unidentified
MRFYTKTHQHYGGIDLHAKTLYLCILDREGQILLHKNVRSRPDDFLAAVAPFRDDLVVAVECIFTWYWLADLCRNEGIEFVLGHALYMKAIHGGKAKNDKVDALKIATLLRGGTLPQAYVYPPEMRATRDLLRRRLHLVRRRANLLAHIQNTHHQYNLSPPAAKIAYKANREGVAEAFDDLDVRKSLEIDLAMIEHYDVTIRELELHLERRAKQHDPQAYHRLRSVPGIGKILALTILYEIQDIHRFERVQDFLSYSRLVKCEHSSAGKKLGTGGAKIGNAHLKWAFSEAASLFLRNNAAGQSHVRRRAGKHGKGKALSILAAKLGRAVYLILRKERVFEMDRFLAEAK

SEQ ID NO: 474897 - protein, 393 aa, unidentified
MPVLAAQPEAAIAVRTDLCAIFVSLELSRSTWLITSLSPGGGEKMSKYSVSAGDVDGLFRRFGDLQERARVRTGRSFAVVTIQEAGLDGFWIHRVLEREGIESWVVDPASILTSRRRRRAKTDRIDGETLVRTLLAHKRGEPRVCAMVQAPTPEDEDRRRLCRERKVLTAERISHVNRIKGLLFAQGVRDYEPLRRDRRVRLEELKTGDGRCLPVHLKAQISRELDRLEIILVQLKAVDSERDALLAKGNEDQPPTPASLLVQLKGIGPEFAAVLWSEGLYRSFKNRRQVAAYAGLAPTPWQSGSIDHEQGVSKAGNSRLRTTMIQLAWLWLQHQPGSALSIWFRERVQRNGGRGKKTAIVAMARKLLIALWKYAAHGVLIEGAVANTAFEKG

SEQ ID NO: 474898 - protein, 333 aa, unidentified
MENLINFYGVDVSKKTLDITLIIEGKKVLFTKIDNADKEIKQFLKSVFKDGRTIENTVFCMEYTGVYNYRLLMALLEFDVKIWLERALHIKRTMGLVRGKNDKVDAERIAMFAFKNVVDIKLWQPKRKVIIQLKSLLRVRSQTMKSIECYRLPIKESNEAGDKELAKLLKQNSSKIIKTLTTSKKEIEKQMLNIIKENENLSHLFKIITSIPYAGTICAITMIVTTNEFKDFKNARKFACYGGVAPFEHSSGTSIRGKTRVSQLANKEVKTLLNMIAIGSISKPGEMKTYFERKVVEGKNKMLILNNIRNKFIKRIFACINYNKLYNQELFVV

SEQ ID NO: 474899 - protein, 408 aa, unidentified
MKRYYMGVDWGDRLHQVYVGDQEGKKVKEIKVPETVEGLTEFGRWLDEKRAEGFELWAAIEKPAGRIVDFLLDHGVEVYPVNPKAVDRVRDRYRMSGSKSDAFDAYVLAEFLRTDQAHLRVLRPSSEKAQELKMLCRDQRRVGRHKTRLLHQLTTTLKEYYVRPLETFEDIETEVALDFLTRYPTPAHLQALKPKEFKRFATKQHHLSQQRCEELWEKLSQPQLKVPEHVVRAKAQLLEVLIDQLRAAIKAVNTYNHKVESFFASSPAAQIAKTLPGGKSGTLVAAIWAELGDAQGRWESFRHLQAEAGAVPVTKASGKSRVVQFRFACNKHLRYAMYWFSFVSLNHSEWAKLYYRQQRAQGHTHPEALRALGAKWLKIIFVMWRDHKPYDENYHLANIARQRMRQAA

SEQ ID NO: 474900 - protein, 412 aa, unidentified
MEVVYPCCCGLDVHKKSITACVLWAEAKGKSRKEKKRFATFTHDLLQLADWLAQCGVTHVAMESTGVYWKPVWNILAEQFEVLLVNAQHIKAVPGRKTDQKDSEWIADLLQHGLLRGSFVPPRPTRELRDITRYRVSLVQEINRIANRIQKVLEDANIKLASVATDALGASGRAILEALLAGEQDAARLAEMSKGLLRNKIPELKLALEGRMTEHHRFLLRQLFEHLRFTESKLREIEQEIEKRMRPFEDKVTRLCTIPGVDRVTAWGLLAEIGLDMNQFPSSGHLASWACLCPGSFESAGKRLSGKMRKGNVSLRRCLSQAAWAISMMKNNYLSALYRRIAARRGAKRAVMAVAHALLEIAYHMLKRKEDYRELGADHFDRIDVNRIRRSLVRRLERLGHKVTLEPLAQIA

SEQ ID NO: 474901 - protein, 357 aa, unidentified
MEGNQERSDRRIVGGVDTHKDLHVAAVVDEVDRVLASQCFATTRHGYKQMLAWMRTFGSLQRVGIEATGSYGAGLLRYMQKAGVEVLEVTTPDKHDRRKRGKNDDLDAQNAAHAGKRTVTPKSRDGMIESLRVLKACRKTAVAARRVALQMIQNTIVCAPDELRETLRKMTRMQLIRTRAAWRPDLTDYRNVASAYRITLKSLGRRYLELHDEIADLDTMIVAIVDELAPALVARNSIGHETAAQLLLTAGDNVQRLRSEASFAALCGVSPVPASSGKTTRHRLSRGGDRAANSALHIIAIGRLRTDPRTQAYVAKRITEGHSKLEAIRCLKRYIAREVFSLIKQRSQERHPAPTAA

SEQ ID NO: 474902 - protein, 366 aa, unidentified
MFKVGEKSKSVSADRDGSRDHIVKRRGSMSQLSKSATGVVFCGIDVSAATLAVAVEQQDQPVVEREFPNNASGHKALIGWLGQRGHARVSLEATGVYSLDLALALDAAEGIEVQVLNPKVAHRFGQTLSRSKTDPVDARTLAVYSRRMEFTGWRAPSRSQMQLRSLTRHIDNLTAELTRGKNRLHAAKVSDMTPACIVEDLQNALESLECRIHVLRREALALVRADAVLKENFELLISIPGIAKVSALQILGELVVLSPELSVRQWVAHSGLDPAHHISGSSIHKPSRISRAGNRALRRVLYMPALVAIQHDPHIKAFYRALVHRHKAKMQALIAVARKLLHAIYGVLKSATPYNGQKLFPQIQTI

SEQ ID NO: 474903 - protein, 410 aa, unidentified
MEVLYRVCCGLDVHKKTVVACLRFPGPNGKRAEEVRTFGTTTRELLKLADWLTAAGCTHIAMESTGVYWRPVYQILEGAFQLLLVNAQHVKMVPGRKTDIKDCQWIAQLLEHGLLRSSFVPPAPLRELRELTRYRRQLIEEHTREVNRVHKLLETANIKLGDVASDVFGASGRAMLKALIAGERDAATLADLARGLLRKKEAQLREALLGRVTDHHIFMLQGLLHHVEFLDRQIALFDARIEEQTRPFAAALERLDTITGVARRSAEQIVAELGDDMSRFPTAAHAASWTGICPGNNESAGKRKSGKTRKGNRWLRATLVECARGAVRARDSYLAAQYHRIARRRGDKKAIVAVGHSLLVAAWHVLRDDVAYRDLGPGYFDRLNRERLIRHYTRRLAELGVATIAPVPAA

SEQ ID NO: 474904 - protein, 407 aa, unidentified
MEVLHPVCCGVDVHKDLVVACLRVQQARGRAKVEVRKFGTTTGELLRLHAWLSEAGATHVAMESTSVYWKPVFNMLEGSVEVVLANAHHVKAVPGRKTDVKDCEWLADLLAHGLIRGSFIPPTPIRELRELTRHRKNLVRNRVDEVNRIQKLLETANIKLGSVVSDVLGVSGRTILRALVADERDPMVLAKLAKGSLIPKVTKLAEALRGRFTDHHAFLLGQLLRHVEHLDEFISVCDERISRLAMPYAAELTRLQTIPGIKARASQALISEIGVDMSRFPTAGHLASWARICPGNHESAGKRRTGSTGTGNNWLRSTLLECAWAASRSRKTYFGAQYRRIVRRRGPKRAVTAVAHSILVAAYHVLRSGVAHRELGPDCFDRIQTAKLTRYHLRRLAELGYPVAPAA

SEQ ID NO: 474905 - protein, 499 aa, unidentified
MYDLHSSTGEGVKVQRRVPGEGRVSGQEAKSSQIREAPSPGVQQSSNGILGRAARRSSRIDKEGREHRGRDSPNRSSKGLCMLVAGIDVGAEVHHVAVVDQSEAVVVKPTAFGEDANGYQELFALLARAGARGGEDLPLATASAPPPSALVVMEATGHYWQNLFAALVAKGFAVALVNPLRTHRFAGEELARTKTDRIDCLQIARFGAQKRPAAAHLPDAAVEELRALVRLRERLMQEVVARINQLHRLVDLGFPEFTRYLKDLNTALATAILHQYPTAQAFRGRARKRLAKLSYDGRHQVGAELAQQLIDAAAISVGSQHSSSHQLGVRYACEDLETLSKRLKRLDGDVAGMLQRHQVGQLLTTIGGIGETTAAMLIAELGDPARFASAAALTAYVGLCPGHKHSGKHQPQSSSLSPIGNRRLRRALWMPTLSAATQSNPWLMAFYRRLIQRGKPHKVALCAAMRKLLAAIYSVAKYRRSFIPFLSPPSAVRIDYEKA

SEQ ID NO: 474906 - protein, 357 aa, unidentified
MEQFIGCDAHKKFSLFVAMNEDGEYGRAIRVGHDREVFRAFLRDLPPGSQIALETSGSYYWLVDEMERAGHRPQLAHALTAKRRMEGRHTTDARDARGLAMLFRKGTLPRVWIPPAELRDQREMLRLRMSLVRMKTQLKNRIHGVLLRYNLGIQASDLYGDQGRAELISRQGELPQWSRESVLEQLQMVDSVQSQIVDCEKQLEAILYPNAERDLLKTLPCVGKVLSAVIALEMGDVRRFGAAKYLVSYAGLVPSARESAARKRQGRCPRDCNVYLKWAFVEAANLIASKQKAWSGRHAVRLYQRVKQNTKMHGKATMAVARHLAEASYWILTKQEVYREPKSKAAGSFVDARVSAN

SEQ ID NO: 474907 - protein, 366 aa, unidentified
MKKQTKQAIRLKKLCNEVTRILNLGLDEHYWQVTVAMQEDGGRIKVVGKMSHEAFLGWVKKKVAEGWEIRSCYEAGACGYWLHRELEKLGVKNLVVTPRAMGKTGQQQKTDKRDAVELCDTLDRYLRGQHRALSVVKVPTPEEEAKRALIRHHRQIMKDRCRCEARGKGLLCAQGIRVRGCWWKDQTWQELSTDPRLKDWLKQQLEHWRSQILSAQEKQLSLREEIAALAPARLPKGVGAYSAAVLHYELRGFERFKNRRQISSITGLCPGVHQSNGHGKEGSINRCGIGAVRWVLVEMVWRLMIWQPQYPPVRRLAAGLVKSRRAKKRLVVEAARRLAIDLWRLSTGQTTPEKLGLIMQDHSQSH

SEQ ID NO: 474908 - protein, 338 aa, unidentified
MGTYAGIDLHSSNNYIGIMDQDYKRLFGRRQPNDLTKVLNVLEPFKADLEGVIVESTYNWYWLVDGLQEHGYTVHLANPSAIKQYEGIKHTDDRWDSFWLAHMKHLNILPEGYIYPKEQRAVRDLLRRRLFFVRHRTANILSLQSTITRNLGIKMSSNEIKKLDMDDACDLFDSSNLVFMAQNNISTIKHLGKIIKGIEKGVKSQVQLRKEFVMLTTISGIGIILGLTIMLEVGDISRFYKVGNYSSYCRCVGSKRLSNGKKKGENNKKNGNKYLAWAYVEAAHFAKRYIPKAQRFYQQKMAKRNGAVATKALANKLARASYFIMRDQVPFDEDMLFR

SEQ ID NO: 474909 - protein, 358 aa, unidentified
MATQSLSNLQSFVAPYHAEPFWIGIDVHKRSYHLALLRADAKTITLVTPAIPEKLVEQLRQIEIKIAGVAYEAGPTGFSLARALQTEEIPVIVAAPSKIPRSISAGAKTDRLDCLKLAQFVSKGLLRPIAVPTPKEEAERALCRRRHQLVDSIRRCKQRIKGFLLYHGFKETESLRRWHTDYPDQIAALPLEAEGRLTIESHLRELTFFENELRSVIEHLEDMNQHPRHQPVIRSLTSVPGVGKIVATTFHTELFRPERFDRAEEVASYLGLAPNVRQSGERAARGHLAPVGQTRLRSLLIQAAWIWRAKDPYAQEVYHRVLSKTGIPQKAIVALARRLAIILWRLSIEQRAYRPLEA

SEQ ID NO: 474910 - protein, 465 aa, unidentified
MKSKTYKPKKQKQKISIDQGWETVNPHAAGIDIGAREHLACVPPGSTPNNVRSFGTFTADLEAMADWFRQCGVTTVAMEATGVYWIPAFQILERRGFAVILANARQTKHVAGRKSDVQDCQWIQRLHTYGLLQGSFRPADAYCVVRTYLRYRDELVSARGTQCQHMQKAMQQMNLQLTQVLSDIMGVSGLAIIGTILQGERDPVKLSQLVDRRVRATPAAIQKALVGDYRPEYLFVLQQAFDLYHTYDEKIRACDEQIVRAVAQLPDRADPARQPLPPRKTCRTSAQDQMAGQDLRTALYQKTGLDLTAIEGIGVLTSLVLFTEVGPDLSRFPTEKHFCSWLGLCPDNRISGGKVLSSKTRRVVNRASDALRIAATTLERSQSALGAFYRRMKARLGSAEAVTATAHKLARIIYRLIKHGEAYVRQGMELYEKQYQERKLRALQKAAKTMGLQLVPTQPAPSGVS

SEQ ID NO: 474911 - protein, 442 aa, unidentified
MHLYFSKESSHRFGEVVDPLSFRGAPQFGQPGEVNPMLTKLYAGIDISATDATLCCLDSAGKQLQPSQSFENNLSGAAQIADVLVNFGAKEIHVGLESTSVYGAHLRDFLLTSPLLQDGCFVYEINPALVNGFKRSFPKKPKTDNVDAWLIAERVRFGHLRPFSEKRLTTQPLLQLTRYRLHLIKLLTMEQNRACNLIFLKFSNYRKDNPFSNTFGKASLAVLGDLFPDDLINMDLEQLVTFITQNGNNRLNDPENMAKELKTIARNAYRLNPKMKDSVHVTLAMTIQNIEYFKNQVKRLDKLIARELKAIPQTLDTIPGIGPVFAAGIVTEIGDISRFDNEASLAQYAGLTWSRYQSGNFDAEERRLTKAGNRYLRYYLVEAANSLRVHNEEYKAYYYSKYKEVNKHQHKRALVLTARKFVRLVFALLSKGQIYQKQEVKM

SEQ ID NO: 474912 - protein, 342 aa, unidentified
MDHYAGIDVSLECSSVCVVDASGKIAREGKVASEPEALIAYFGSLRLPVVRVGLEAGPLSQWLYAAMKEAGLAVELLETRHVRRALETMPVKSDRNDARGIAQLIRLGWFRPVHCKSIGAQETRAVLTARKLVQSKLLDVENSMRGILRGFGLKVGHTTNRSFAGRVEDLVVHHASLHMIAAALLSVHAVLLRELKAFDKRVRSMARVDVKAKLLMSVPAVGPIVALTYASAIDDPGRFTSSRRVGAHFGLTPKKYQSGETDYTGRISKIGDATVRTALYEAAHIMLIKPIKGCAQLKSWAMRIARRAGMKKAKVALARKLAVILHRMLANATPFNAAMAAA

SEQ ID NO: 474913 - protein, 367 aa, unidentified
MSSIAHRGFVHLGMDVSKDSISVAVLSPDRDTAEVDKIFHDADSVRRLVKRLGKPKGIWACYEAGPTGYDLQRLLTSMGVRCDVVAPSLIPKSSGDRVKTDRRDARRLAGLHRAGELTPVAVPTPAQEGVRDLCRTRGDMVQDLTRARNRLSGFLLRHSVVWRGGSKWTERHRRWLATLSFDDPAIATTYSHYLATVKLRDTELESVEADLVPWCTKDPFGDQVTRLAAYRGVTTIGALCLAAEVFDWRRFPRARPFMSFTGLVPGENSTGLTQRRGSITRAGNAHLRGQLCEAAWAYQHSPNVGVAIKERQVNVQPETVARSWAAQVRLSRRFRQLGAHKNVRSVVAAAIARELAGFLWAEMVAQG

SEQ ID NO: 474914 - protein, 674 aa, unidentified
MGKLIVRIASLLLIAAFLPTAVLAAEWNLENGSIEITATANPEGGTTQTVSQGGSSAEDSNPTITSNGNQTGYTITIKAGGGTTANVTIKDTNISTGNAAIKTEGKGNVNLNVEGINTVSSGDKHAGVEKANDGNLTIGSESGEGELTANGGHGGAGIGGGYEGSGSDITITGGEITANGGGEAAGIGGGVLGSGSDITITGGEVTANGGWCGAGIGGGPRGNGSDITISGGKVIANGGLCGAGIGGGYKGSGSDVTISKDSRVEATGGDPCLLGGYGAAIGGGGYNTDTGNQVDGSEIEPDTSGLYTTGKVERKSGDGTVLDTIIIRHGKNPEEIHCRIGIDIAKNVFQVHGIDFKNGELITKTLKRDQVFEFFANMDTALIGIEACGTSQYWARELTKLGHVVRLLHPKAVKAFLQGSKSDANDAYAIFCAVQSPDIREVSVKDIELQSLDSLRVLRAGVVKEQTAAINRFRMVLAEYGQVMPKSVKAFFREASKTLVALEGVINGVTYHALVEELQCIRDREEKIKTYDRRIHEVVENNQLAKLLKTMPGVGDLIACAMAVALTDPGVFKSGRDFAAFLGLVPGHTGTGGKIIMLGITKRGDRSLRSLLINGAMSVLRQKHKPDFVERLLKKAKPKKVIAVAVAARMARALWAMASRKEAYVAKVLSISNP

SEQ ID NO: 474915 - protein, 329 aa, unidentified
MSSPNNVTEIIGADISEREIVLAWAGAQRPCLTIANRRAAILSWLKQLPAGCVIGMEATGRLHQLLADLGVAHAHSVYVLNPKHVASYAKGVGQRGKTDLLDAVVIARYLERERDALHPYTTPSALQRTLRDLISQRAGVVRHSTALKQSVQATTNDSHRALKRAHQAALKSLSKLLAQIDHELKRAIAAHTALEQKRKLLQSITGIGFVNSAALTHRFDRTPFANSDAVVAAYGLDPRPRDSGKLLGKRRLTKQGNAEDRRLIYLGAQSAAKTKLFSPLYRALRARGLASTEAIVIIARKLLRIAFAVWTTGTSFDPQKVGKTTCQKP

SEQ ID NO: 474916 - protein, 341 aa, unidentified
MKLTTIGIDLAKNVFQIHGADERGKAVLKKQLKRDQVVPFFANLVPCKIGMEACGSAHYWARKLQALGHSVQLIAPQYVKPFVKRNKNDAADAEAICEAVTRPNMPAVPIKNASQQAILSVHRARQGFVKARTAQANQIRGLLAEFGIIIPQGISHIATRVPEIIEDGENELPGSFRLLIQRLVDHLKVLDQQVGELEREIQAWHRENEASKKLAKIPGIGPMTASALVASVGNARSFRNGRQLAAWLGIVPKQHSTGGKATLLGISKRGDTYLRTLLIHGARAVIRVAERKPQPDAWLGKLLTRRNKNVAAVALANKNARTIWALLAHDRAYESDYRMAA

SEQ ID NO: 474917 - protein, 341 aa, unidentified
MEKITTIGLDIAKHVFQVHGINGAGATVSRRKLRRDDVVGFFKALPPCLIGIEACATGHHWARVLMALGHEVRLMPASYVKPYVKRQKNDATDAEAICEAVTRPTMRFVPVKSEEQQSVLMLHRVRELLIRQRTMLVNALRGHLAEFGIVTRQGIAGVGMLIALVDDDDHDLIPPLARSALLPLIGQLREVHEKVSELDRKIHAWHRSNELSRRLETIPGIGPITASAIAATVTDASLFKSGRQLAAWIGLVPRQNSSGGKDRLGRISKQGDPYLRRLLVVGAHAVLRFSGKAKVAPTRWAAELLVKKPYNVVAVALANKMARIVWALMTTGRRFEAPAAL

SEQ ID NO: 474918 - protein, 412 aa, unidentified
MQDILTCAMGLDVHRDIIVACLVKGAVDAEPEAETRTFSTLIPEMQKLRDWVIESECRNIAMESTGIYWQPIYEMLESCFDGEISILVVNARHMKNVPGRKTDMKDAQWIATLLRAGLLKGSFIPDKAFRELRHLTRYRKSVVHDITAQKNRIDNFLQSSGFRFTAFLSDTFGASGRNIIRHLIEHGSIDREALDKCLKTKTRNRIDEILVALNGSLSEHQRRFLNMVFRHLEDLEAHKHTVEDEITEEVLKHTDALNLLCSIPGIDVTAAAAIIAEIGTDMSSFPDSQHICSWAGLSPGNNESAGKRKSVHINKGNPYLKSMLCEVAWIMASHRKLYLSGWYWKVKQRKGAKRATIALARKILSIIYTMLKTGTPYNEECFEQRRLRCERKRANRLVNELQKLGYVVVAPD

SEQ ID NO: 474919 - protein, 342 aa, unidentified
MNKELYFGVDVSKNWLDVAYYNGVTIDWKGGHIRVDNNLHGFIQIGKWLKKLNAEKDCALFCMEYTGLYSQGFRLWLEKEGIKYGMVQPRKMHRFEPDLGENERAIDRIKTDEVDSFRIAMYCEKHQRKIKTSPSKLPGEAYLKLKRLLSERKQYTKQSTLYKQQLHDISEYDTEGSCKRKQYGLDFVKNQIHQTDKEIQKVVEQDPNLATNYNLLRSIKGIGLVVAVETIVLTENFTSISNPRKYACYIGIAPARKESGISVKGGEHVSRKGFTQAKADLSIVCLVSIKWDPNIKAYWERKKAEGKCTGIVLNAIKFKLVLRMFAVIKRQQPYVIIDGHKK

SEQ ID NO: 474920 - protein, 427 aa, unidentified
MPEKPVAGIDVSKDFSDMCIITPDNKVFQTVHIFHDATSLRRSLAALEAAAQEFREKPVIVMESTAHYHRVIAQFLQSAGYEVMVINPMQSGALKNINIRKVKSDKSDAHRLALLYRLKTLHTTNQPNELLSNIRDYCRQRADIMNSHTAYVNRLTSLLDQAFPGYARVFSRVACKSSLGILKTYPSPAAILASDPEQLAETISKYARRGVTTDYVIKKVAALRRAAENAEEINLKREAYSVLIVTVAELLEGLQRHIETLKKRIIELATEDPSVKFEVSLLQTIPGIGLYSAVLLRAEIGDFSLFQKPKQLVAFFGMDPSTRQSGKFVGTKTKISKRGSPYARAILDICAQSAVHPVKGKEPANPVLANYYAEKVKTKEPKVVKCIIMRKLVNIIFAVLRDKKPFELRTPEEHIELLKHPNISRAA

SEQ ID NO: 474921 - protein, 425 aa, unidentified
MEVGQVEVAQDDQEIIARVAALDIGKAEVVCCVRVPGVGPRARRMQEVRTYTTMTRSLLAMSDWLTGLGVTRVVMEATGDYWRPPFYLLENNFETWLVNARDVKHLPGRPKTDRLDAVWLCKVAERQMLRPSFVPPPAFRELRDLTRYRVDLVSTRTAEKQRVEKLLEDALIMMSVVASDIFGVSGRDMMAALVAGERDPKVLAQMARGRMRAKTARLEEAFTGRFTDHHAFLLRTMLARIDGITADIDVVQDRIDEQIAPFAATVTRLDEIPGVGVTTAQAIIAEIGLDMTRFPTPAHLASWARFAPGISESAGRKKGNSGTGKGNRYLARALGEAAVGVRRTDTFLGERYRRLAHRRGKKKAIVAVGRSILMIVWHLLSDDEARFVDLGSAYYESRVNLNRRTRNHVRELQALGYKVILEPAA

SEQ ID NO: 474922 - protein, 335 aa, unidentified
MQIYGIDLAKEKFDVSFFDLTSKKVSNQPSHKVVKNNFKSIGRFLETLPSDAVLVAEHTGVYGDTLLKCCMDSNVKIAFVGGYVIHRYRATPDRAKTDVLDCALLREFGERYPDKLKYRKFPEEALYELRQLARHREMLVEQRKQLMTADKSEDCRPIRSLAVKRSMDRIKEMLDTEIAETEKEMLKVINGHDSIHHNYEIVKSVNGVGLVTAVELLVKTDNFTKITTARQYAAYAGTAPYEKSSGKMDKGAHISKIGNRRSKTLLYICAESARLHNKEIKLYYERRTLIDKKPRHYVLNAIANKLLRIIFTLVEKGEFYDVNYIRQDPRLVKHN

SEQ ID NO: 474923 - protein, 403 aa, unidentified
MEDITSYRFVGVDTHKDQHTAAVIDCFNRCLGIVEVPNNPNCFDRFIEQVRVYTNSNSLAFGLEDTGGLGRSLACFLTTSGMLVKEVNPTLTERRRKARPHPEKSDPKDALAIAKILLSEFETLPDVSTNDLYVAIRDLSLHRDSLVKEQTRLKNRFHSLVREQYPMYESMFKDPFSKAALAFWQRFSSPSALRYIGVKRLASFLRKHSNNTVSTKKAEKILKATFPPPSSSLLQETRASILREIALRISATQNDLERISTQLGNLVAVSEYKLTSLTGVDTVTSAKIISNVGNINRFSSASKLAKFAGIAPCDKSSGRKQRHKKSNRGRRQLNSAIYHIALCQIGRDRSGKPKNPVALTYYQRKLAEDKSRKEALTCLMRRLCDIIFRLMKDGSEYVMPEIS

SEQ ID NO: 474924 - protein, 411 aa, unidentified
MLTEALFYVGIDWAAENHAVCVLDDRGRVAGAFTIAHTADGFADLARRLARLSGDASQVPVAIERPDGRLVDALLEAGHPVVPVKPNAIKAWREAEVLSGAKSDEADAEVIAEYLRLRAHKLRPAVPYSAETKALRTVVRTRDDLVEMRVAASNQLAALLDLHWPGAKAVFADVGSPITLEFLTRYPTPAAAARLGEKRMAAFCAKHGYSGRRPAAELLVRLRAAPAGTLDETLTEALRDAVLAMVAVLQALVGALRDLDRSVIAHLGEHPDAEIFTSLPRSGRINAAQVLAEWGDARAAYDSPDAVAALAGQTPVTDKSGKHHAVHFRWACNKRFRKAITTFADNSRHDSPWAAKIYTDARARGHDHPHAVRILARAWIRIIYRCWQDNIPYDTARHGNARRLQQELSAA

SEQ ID NO: 474925 - protein, 357 aa, unidentified
MVHKHTILDWLGQHVFIGLDIHKRSWIVAIVTEQADFKTFTQPPDIKLLVSYLHRHFPNATYHCVYEAGYSGYWICEQLRAHGIDCIVTNPADVPTMDKERKHKTNKVDARKLARSLRHGELVPLYVPSRAALEDRTLVRSRHTLVSKQTRCKNQIKALLSFYGITVPEDMTDRYWSARYVAWLESLCLQSPSGTHTLTILLDELAHLRKSILDTTRAICALARTEPYASNVVYLITISGISTLVAMILLTEIVTLERFHSLDHLACFVGLVPGEDSSGDERTMTGMTERKNHYLRWILIESAWVAIRHDESLALAFNTLSRRMPKNQAIVRIARKLLNRVRFVLKHQQPCIVSKAA

SEQ ID NO: 474926 - protein, 408 aa, unidentified
MEVVHPRCAGLDVHQKSVVACVRIAEGGKVRTDVRTFGTTTKALYELSDWLGANQVTHVVMEATGVYWKPVWHVLEESFQLTLANAKHVKNLPGRKTDVNDATWLAELHAHGLVRGSFVPPRAVQELREMTRARKQLVQERVRHVQRIQKVLEDANIKLSSFISDVVGKSGRAMLDALAAGQTEPEALASLAHPRLRASKEELTEALRGRVTQHHRVMLRLYLDQLDATDRAIAFIEGHVEAALGSFREARDFLETIPGVSAAVATAILAEIGDDMSRFPTPGHLISWAGLCPRADESAGKRRSTRIRKGAPWLKPMLVQAAWAAVRVKNAYERTHFFRLKARRGPGRAIIAVAASMLNAIWYMLSHREAYRDLGPHHFDGRDRERLARGLVRRLRSLGYDVPVPTLA

SEQ ID NO: 474927 - protein, 349 aa, unidentified
MLADELDYVIGVDTHLDEHVLAVVASPSGAPVARRSVGANTRGYASALRFALEAGRGARVWAIEGTGSYGAGLARYLASHGETVLETSRAPQTERRLRGKDDALDAVRTARAALASETLALPRRGERREALRLLLVARRSAVDVRREALGQLRAVIVTAPDGLREELRTLPVGKLLDRCSRLRRSSAMSSDEVATRLVLRSLARRIQAVTVEAAELERELLAHVRALGPRLLDEPGVGPIVAAQLLVAWSHRGRLRSEACFARLAGVAPVPASSGKTTRHRLSRGGDRQLNRALHTIVLHRRQHDPATRDYIERRIAEGKTRRDATRLLKRYLARHLYRLLQQTEPLMT

SEQ ID NO: 474928 - protein, 366 aa, unidentified
MKKYTVFRSVTAAPTEAKSKVTKSGSVLKLGLDIHRNKFVVVAQYDHATPRPPQGFAPAEFVPWVEGRLREGFEVHVVYESCGLGYGLYRALLEAGAHCYVIAPQQLDERNTRVKTDGRDGRALCLRLDRYLAGNKDSLAVIRVPSEREERARHWGRQREQLVGHRQKMEAQGRSLLISHGLPAPARWWRAQSWKRLGKLLPAWILPHLELYRPALLALDQEVRALTIELEKAAPAALPKGMGAMSSVVISREICDWQRFKNRRQISSYTGLCPGEYSSGTKRVTGSVTKHGNGRLRAALVELAWRMVRFQPRYHPVQKRLAVLARGARATGAQRKKAIVAVARQLAVDLWRFHTGRCTPRILGFN

SEQ ID NO: 474929 - protein, 427 aa, unidentified
MAYRIAAVDVHKKMLAVVIADVEGEGEYQFERRKFGASPEQLHILAQWLVEQEIEEVVMESTAQYWKPVWGTLERYWKPVRQKRDGATKMCGKLHLCQAKSNRGARGRKNDYADAERMIKRLVAQELVLSFVPDPEQLLWRTVTRRKQQLTRDKVRFQNQLESLLEQAHIKLSSLVSDLLGLSGRRMLQAIAEGETDPAAVAALADFRLRATPAELRDALGACAELNGVYRRLLQMALEELQLMEEQMEQLDREASNLLQEHHDTVQRVAEVPGFGVNSAMQMIAEVGAEAAAFKTAEKLASWVGVCPGEEETAGKSKSTRSPKGNSTMRRLLNQAAHAAVKVKGSIFEITFHKLQPRLQYQEAIWAIAHRLCRLLWMILHKRIRYEERGPAVSAKSQRARTGRMIKALQKLGYRIEGGALSVGSPA

SEQ ID NO: 474930 - protein, 330 aa, unidentified
MKNYEEVVGIDVSKKTIDAYCYQAQVHKAFINDVKGYKSLIKWVLKVTKTSSVFYCFENTGYYSLKLALYLHSQDLVYVEESPLKIKRSSGIVKEKTDRIDAILIARYAWLYREELERSTVKIRSHLELGRLLALRDQLVRNNAGLKGTLKELKALLSSPTTDAGCISLTRSIAYLEKQVNGIETRIKELITEDDSMSKNYALLTSLKGVGLVVACQLIYHTGNFSRFNSWRAFSSYCGTAPFKHESGTSIHRRKKCHYLGDRKMKSLLSMASVSAIQHDSELRLYYKRKLAEGKNRMIAVNNVRNKLLARAFAVIKRGTPYVVLQQHAA

SEQ ID NO: 474931 - protein, 453 aa, unidentified
MNGKFAIKNVLHFETGRRVGLDLVEPRVRIKNEKKPKPGNETDRQTPTKKGGENKIKPCISIDISKGKSFFQGFAALNEPVTKAAPIGHDREGYEKLTAMGDELKRKYGDVVYVFEATGIYHKSLQNYLETRNERYVILNPLEAAKVRKSKLRSTKTDAKDCASIALAYHTLASPDHDRKAARYETLQTMNRHYGHLVQVLRIEKVRFRNLLDVVFPKWDEAYPDPYTETSLELLRQYPHPEKMRSRTEETIVRHLERTTVHRHEASQNEARKAKRYAEQAASGCAEGACEVSLLSESIARIEGEMRMIAVRLNDMTALVRSDLFYDQLRSVPGIGDVLAVRLIAELGDLTRFLSKRQLVAYAGIDPIVYQSGQRTGEHLPITKKGNKTLRTLLYLAVKANIRGGKANPIRDFYNKKRQQASPLAYRAAVIACANKLLRILFSMHSSGEKFHF

SEQ ID NO: 474932 - protein, 408 aa, unidentified
MSKRCIGVDVHRDFCEIAIWEQGRVRAAGRVESRPSSLAAYAQTMLKATDEVALEATTGAGQVAEIIRPHVSRVVVANTHRLAAISDSKKKTDREDAKTLAQLLAAGVMESSWLPAEQTRALRRRVSRRHGLVTARTRAKNEVSAVLGRNLSQRPPMSDPFSEKGRRWLGSLALPDDEVETMSAALRQIDFFTGEIAVIERELARFGSGSAEVRRLMTVPGVAMLTAVTFMAQVGEIGRFASARQLVGYFGLDPRVRQSGNGPTHAGRISKEGSTLVRHVMVEAATAAVRTPGPLRAFYQRLRSRRGHQVAVVATARKMVTILWHVLHRGEDYRHQIELPTKKKLRKMELTAGAEPRRGGDGRPRNLNREQRRAADLARAREAEEDYRRLVARNRGSAEQAAGTDRGT

SEQ ID NO: 474933 - protein, 407 aa, unidentified
MSKPCICIDVSKNTSHVQGFINSIKTPISKPFKIKHTITGFNKIKDLYNKLVELTNLNPLIIFEYTGVYHKCLIQFFELENYDYHVVSPLKSAKHRNSEIRNAKTDKRDCKNLADMFYTDKLGIFHKHNSLYSNLKDLNREYHTNKIHLQKLEVTLNELIDTIFPCFNNLFSDLLSKASLDFLEKFFHPDLINNSSFEDIINFFLNSDVKHSQSYSKSKAAKIKDYASNIISGCTVNSYITLFLLDTIKQLKLLLDIQNNIICNLIELAKQTPYFTIIRSIPGIGDLTCSRLIAELGDISRFNKPEQINAFIGVDPIIDQSGIKDGKHLCISKKGNKIARSILFLIVRSMVRKKVVDNPIKLYYYKKKAQPNIPPKVALFACVNKFIRMLHSLCKSGLIYEYSIPQK

SEQ ID NO: 474934 - protein, 348 aa, unidentified
MEYIGIDVHKNSSQICVLTEGGELIERRIKTDRSSLHSLFSARPPSLILIESTTESEWVARYLEELGQQVIVADPNFAPMYATRSKKVKTDKRDARTLCEACRLGAYRPAHRTSDKQRNVRAHLAVRETLVQTRAKYISLIGALARREGCRIKSGVSRSFAARVEEAGLPQHVLIQIEPLLIMLTSLNDQIKQADEKLADIVKDDEVIKRLATVPGVGPVTATTYAATIDGVARFQDAKQVRSYLGLVPRENSSGEKQHRGRISKAGNSRVRSLLVEAAWSLLRWKTPKTQALHEWAMRIASRRGKAIAVVALARKMAGILFAIWRDGTEFNPEHQSDRQAFGTLVQA

SEQ ID NO: 474935 - protein, 411 aa, unidentified
MDLVYDRCAGLDVHKATVVASVRVPGAQRGERRTETKTFATTLRGLRELLAWLLAHGVTHVAMESTGVYWRPVFAVLEGAVQVRLVNARHVRMVPGRKTDVRDSEWLAQLLECGLLRGSFVPPAAVRDLRDLTRLRKTLSRERGHHVNRIEKILELANIKLGTVVTDIMGKTGRAILQALSAGMADPAALAALAQGSLRTKQGALREAVEGRLTPHYAFLLQQHVSLIDAVDAHLAPLDARIDTAMAPFADAAALAQTMPGVAARAAHAILAETGVDMDLFPTAQHLASWARLCPGTHESAGKRRPTTIGKGATWLRATLQEAAWAAVRTKKSYYRALYHRLKARRGSQKAIVAVQHAMLVALWHMLKHRVPHQDLGADYFDRRHTARLRRHHVRRLEQLGYQVLLVEEAA

SEQ ID NO: 474936 - protein, 355 aa, unidentified
MESTKYVGLDVHKEATTIAVMNSAGKLIMESIIETKAITIRQFIQGLHGDLHVTFEEGTWAAWLYDLLKPYVTKVVVCDPRKNTLLKVGNKSDRIDPKKLAELLRNGSLSEVYHGENGVRTLKELARSYLTISKDLGRVMNRVKALYRSWAIPCAGTQVYALCHRSEWLSKITEAGVRRRAEHYYQQLDALQTLCREVRKDLLLEGRKHNATKLLRQVPCIGPIRAAQLVALMQTPHRFRTKRQLWTYSGLGLETRDSAQYRYVEGQLQRSKKPQQLRGLNSNHNHDLKNIFKGAATTASVSAGPFHDFYQALLTKGMRPTMARLTLARKIAAITLIVWKKGARFDPQHLKQQAA

SEQ ID NO: 474937 - protein, 411 aa, unidentified
MEVVYRRCAGIDVHKGSISVCVLLMEGEGWKKQVRRFGTMTGDLLELSQWLQQLGVTHVAMESTGVYWKPVWNLLEGQLELLLVNAQHIKQVPGRKTDIRDCEWIADLLQHGLLRGSYVPKPEQRDLRDLTRYRVRLCEDKVRLANRIQKVLEDANVKLACVATDVLGVSGRAMLQAIAAGEHDPQKLAHLARKGLRKKLPQLQMALQGRIRDHHRFLLGQLLEELTFIEEKINKLEQRIQEGMRPYQHVITLWTSMPGIREVTAWSLVAEIGTNPEQFPQASNLASWAGMCPGNNESAGKRKSGKTRKGNRWLRRALNQAAWGAARTKNTYFAARFHRLAAKRGSKRAIVAIGHKILVLAHYLLKHNCLFRELGGDYYQRLRAPSLSQSLVRRLQRLGYQVTLTPAQQAV

SEQ ID NO: 474938 - protein, 354 aa, unidentified
MKGTTKYVALDVHQATTVASVREESGRVIARSILPTEEGTILEFLKGMRGAIHVAFEEGTQAQWLYDLLVPVVDRVLVCDRRGKSRQGNKGDQVDADELSELLRRGALRAVYHGSPHRSTLRELTRTYQNVVEDATRVMLRLKALFRARGIKAPGKGVYHPKNREEWLAKLAGDGVRLRARTLYAQLDVLRELRPRVKAAMVAEARRDPAWAVLGSIPFLGPVRVALLLAIMRTPWRFRTKRNLWAYCGLAVVTHSTAEYALVDGRPVRRRRAPMTRGLNRNYNRELKDVFKGAATAATGRPGPLQDFYEGMIARGMREELARVTLTRKLAAVTLRLWKEGERYDPEKLTMQAR

SEQ ID NO: 474939 - protein, 366 aa, unidentified
MKEVTTRYVGMDVHKATISVAVADEGVPPIAVGTIANHPGAVRKLVSQLKRGGKLVTAYEAGPTGYGLHRQLVDLGVDCVAPALIPRRAGDRVKTDNRDAITLARLLRSGDLTPVWVPGPEDEALRDLVRVRFDAKDDLRRAQHRLSKFLLRQSIQAPPGIKAWSARYNSWLDRLQLERPTSQLVLDDYRVAVHSARERIRRLESDLARAADQSPRLALILALQVLRGIAFLSAVTIVAEVGDFRRFADAPRFMSFTGLTASEHSTGESRHQSGITHPGNRYLRHILVQAAHNARFAPSLEGELKRRLQGVPPDLVDLSLKAQTRLHRRYRHLDRRIGRPKAVTAVARELAGFVWAIGRRMEASAA

SEQ ID NO: 474940 - protein, 428 aa, unidentified
MKKRMKFDHLSTLCVGLDIGSRSNFITALNFDSDRLINMRPVSNAANGVETMEAMILAVLEGSPQFRYLLVAMESTSFYGVHVANYLSTSDLLKPYGVKVFCLNPKTVANYKKTFTGLGKNDGIDSFIVADYVRAGLIEIEPWRGSQYLALQRLTRQRRHISEAIAREKNYVLNNIFLKFSEFALLSGEDSPVSNKFSTTAEAVLTEFKTTEDIANAPLDELIDFISTSGHDRFSDPDQVASLLQKAARNSYRLDKALYEPITTSIACSFNCIRAFEKEQKALDKAIAATVAGLNPTEYQILKSIPGIGPVYAAGILAEIGSVRCFNSNNALAKYSGIIWRDNQSGEFDSEDTPMMKAGNRYLRYYLIQAAGSVIRYCPKYEDYYNKKFAEVPKHQHKRALALTARKLIRLIFGLLDKNQLYSPAKGR

SEQ ID NO: 474941 - protein, 358 aa, unidentified
MQRNKISFKGQKIFIGIDVHKKNWDVAIAPEVGNVKRHTQKASAKELFDFLKKHYPDGDYLAVYESGFSGFSTYYALKEVGIDCIVIHAADVPTTQYEEVMKTDRVDSVKLARSLKAGLLKGIYIRERENIDDRSVVRIRKTIQKQLSGYKARVKHMLHCNGVLLPERFEKPGSHWSKAFIKWLKEDVALLSSTRNSLDLLIRQVETIRMTLLEATKMMRLLSQTERYKRKFDLLMTVPGIGVAASMCILTEVYDVKRFHNEKEFAAYLGLIPTSHSSGDKVAHGEMTFRGNKQLGPMIIEAAWITICKDAGLGSLYLHYKERMKPQEAIVRIARKLSNIIFAILKNEKEYVPYHTGK

SEQ ID NO: 474942 - protein, 310 aa, unidentified
MTIHHAYVGCDVSKHHLDFYDASTRKGWRIDNTEAAITAAARVFAEQSRFVILEATGIYDRCLRHGLAEAGVAFARINPTMARRFAQACGRRAKTDALDARLLADLGHKLQPEADPPIDTERERLTALVRRRDQLVAMRATEKGRLKDLADDAVADCIAETVGFLSRQIDILERRINAMVGDGKSLADDNRILSTAPGVGPVTSTTLLALMPELGKTSPKRIAALAGLAPYNHDSGMLKGQRCIAGGRRRVRKALYMAAIAAIRSCKRMNAFYNRIADRAPAKKIAIIAVARKLLTCLNAMLRDRKQYAQ

SEQ ID NO: 474943 - protein, 368 aa, unidentified
MSNKSIATIATMGIDIGKNSFHVVGLDRRGAIVLRQKWSRSQIEVRLAAMPPCLIGMEACVGAHHLSRKLQAHGHDARLMPANYVRAYSKGQKNDFRDAEAIAEAVQRPTMKFVATKTADQLDLQALHRVRERLVRQRTGIINQIRAFLLERGIAVRQGFRCLRTELPGILAKRSDVLSPRMMRLIEDLAGDWRRLDERIEGLSTDITSLVEQDPACGRLMTVPGVGPIVSSATVAAIGTGDVFSKGRDFAAWLGLVPRQISTGDRTILGKISKRGNRYLRVLFVQAAWVVLIRPQSWERYGLKPWIEAAKKRLHHNVLAIALANKLARIAWAVLNKQRNFEVTRTTAPSVPACVSVAPCSGPSRHGL

SEQ ID NO: 474944 - protein, 354 aa, unidentified
MNAPHYIGFDVHKKSISFCVKTASGEIVEEGSVPAQRRVLRQWASARPQPWQGALEATLFSGWIYDTLKPYGERLEMAHPAKMKAISAAKKKSDTIDARTIADLVRCNLLPACYVAAPRIRELRRLLRYRSLVVSEAVRMKNKMAGLLMETGALYVKEKLHRKKYFANLLEELEEVPESVIDLLRLSRGALEMFESTQKRLVRELLADPELAQRVERLMSIPAVGEITALTWALEVGDPQRFRSGSDAMSYCGLTAALQSSAGKQQRGPISKQRNRWLQTTLIEAAKLAPRWNPQLAALHARELERGHRNRATLAVARKLVAYLLAVDKSRQPFQVRGPSSEARTQQDWAQKAG

SEQ ID NO: 474945 - protein, 351 aa, unidentified
MSVRRILAKTINTDLEYEAIGIDLAKNCVSVALLTTDGEVVCIDRLDYSELEKSAQALSPTTFAMEPCTEMNYLVQKLEAWGHRCLVIGGKNVQNYVENHYSGQKTDLNDAQALAFLAQDTQLRTIKAKDMEQQKYASLTTLREQYIKQYRQTIVSLKGICQAWGLNISKGISGKARLKDLIENHAAFPEELKESLVDMVTHAQTAQKALNKITKTLELLAKNDKVCQLIQTIPGLGPICSCRLRATIGDIRRFKNPKDFPAYYGLVPRSIATGHNEKKGKITHRGDRTMRSLMVQGAGCVIRLATCGKLKSKQLTKWILKKQKEKMPWGKLVCAVAAKLFTNSQSCSYKP

SEQ ID NO: 474946 - protein, 355 aa, unidentified
MNDEKYIGLDVHQATIVVAVMDSTGKLVMESILETEAATILQFFAGLRGTLSVTFEEGTWSVWLYDLLNPHVDKLVVCNPRKNALLKDGNKSDRIDARKLAELLRGNQLKPVYHGETGVRMLRELSRSYLTIVKDLSRVMNRLKAVYRSWAIPCAGRDVYYRRHRAQWLAKIREAGVRRRAERLYEQLDMLQQLRQQARRELLAEGRKHAITAQLRQIPYLGPIRSVLAVALIQTPHRFRSKRQLWAYSGLALETRISAEYRLVEGQVRRSKKLLSIRGLNKDHNHDLKGLFNGAATMASVRPGPFQDFYQAALAKGIKPTMARLTLARKIAAITLTLWKKGENFDAEKLKSQAA

SEQ ID NO: 474947 - protein, 353 aa, unidentified
MRIIGCDLHSRQQTLSMLDVETGEVEEHVLGHEGEEVREFYSGLPGPVRVGIEASCATQWFLQLMEELGVECWVGHPAKIRAYEPRKQKNDRRDARLLMHLLEQDIFPRIWVPSVEQRDVRALLMHRHQWVRIRVRIQNALQSIALGHGLRRGSGLWSKDGQLSLLALSLSPHTDARRNELMTLYRQLEADIEVLDRMVAETAEERPLSRLLMTHPGVGPNTALATEVYLGDPTRFADGKAVGSYVGMIPQEKSSGKKWRLGKLTKQGNTMLRFLWCEAARHAVRHDAELKRFYTRKLAQKGLGKATVAAGRKLGIRLWIMLRDEIEYDEFCRRGRQCGEAHAERPGRERGPA

SEQ ID NO: 474948 - protein, 349 aa, unidentified
MRHIGVDLHKTNFVACFIEADDAKRIETYPLTRDGLLRFVAQLGESDELAVEATQNVYYFYDQIKAHVSRVAAVDTYRFGVVAKSKKKTDKADARALARFLKLGWLPEVAVPSEQVRALRQLLQARETLCSMRTKLKNMAHAAFSRNGIALTRAAFASAASRARLMSRADLPAADLLVLRAALRQMEQLDGEIKQVEEEVARRGRSLKGLPRLLQVHGLNLLSAISLLAEVGDIALFDTSKQLVSYAGLATSTRQSSETTRHGGITKRGRKRLRTVCIQAVLAMVNRTDTPLMSFYQKKKREKGAGKAICATARKLLTIIFVLLKKELDYWYLEDRLYNRKLRALNAAA

SEQ ID NO: 474949 - protein, 378 aa, unidentified
MSTTQTVLQCADTGIGGDLYVSFELGDKKWKVSAGDGRRGPSQYNVDAGDKEAVLDCLRKAKERCKLEPQAKVHSCYEAGRDGWWLHRWLIEQGIDNIVVDAASIEVNRRARRAKTDRLDGFKLLTMLLRHHGGERVWSVLREPTAEQEDARRRERERARLGKERTQHTNRIRSLLVLHNLRPRIVIGGRDWAAWWETQSGQLLAQQRGEIEREIARLSLIKQQILALEVAQREEVLAGEQPIVARLIQLRAIGIKGAWLLDKELFGWRNFANRRELAGSLGLVPTPYDSGDSQVEQGISKAGNRRVRVLLVELAWSWLRLQPDSALTQWFNRRFAAGGKRMRRVGIVALARRLAIALWRYLQHGEIPAGALLKPTAA

SEQ ID NO: 474950 - protein, 426 aa, unidentified
MCQADDIRLDEFRQFRKEVRGSNDYLIVGIDVAKEKHHAFFGTATGETLFKRLIFDNTIEGFEKLLDKAQAIQSEYDLKKIVFGLEPTANYHKPLGEFLIRCAKMVVLVSGVSVKRNRELLDGRWDKHDDKDAANVADLISQGKCLFYEYPVMGIRDLRDLLMLKRKLRKQEHSYRVRIRNQLIAQYFPELDRYSGYAETESIVLWCLDPSRIAGFENDQFETIVSSGRQTLAKKKRLDDIQKLATASIGCRMGEGANFDAKIMVEGLRHIRKAIKATEDKIEETCKQFSEYSCLLTIPGFGPDVSSKVLGALGNPHRFFNQKQVLKMAGLDLSANRSGKTSRAAVPVISKQGKADLRYALYQAAWIATTRNKDFKAYYAQQLQGREKEQGIKTKRRVKISAKLLIVAWTLMKNREAYDIKHLQQA

SEQ ID NO: 474951 - protein, 396 aa, unidentified
MYNLFVGIDVSKSSFSVTGLDPKGNVCFSITANMDCNGFSELFKSINSVCNDSSKVLAAMESTGCYHINLFSFLCSKGINTVVINPLLISNFAKLSLRKTKTDKKDSLTIAQFLLVHKDSISQFSIAQDIKDLRDIARERESLCNLIASTKNEIKRILQFTFPEIESLCNVFTQTMLYFLKEFPSVRVIKAAKPKAIAQALENFSRGRKINITADDIIKAAKSSVASFSLAKELILPEKISTLLHLMYWLDKMTDMLSSFCQSMMIQELEIITSIDGIDTTTGAAFLAEVGNISNFPSHKSLIAFAGIDPSVFQSGKFEGTSRISKRGNRHLRRVIYLMTVNVIRVNAFFKAYFLKRKQNGLPYRKAVLATAHKLVRTIFAMLSHKSFFHVKENSL

SEQ ID NO: 474952 - protein, 351 aa, unidentified
MMEITTIGLDLAKRVFQVHAVNGKGEVVVRKRLRRAQVLRFFEQLAPCLVGVEACGTSHYWAREIAKLGHEVRLMPPGYVKPYVKRGKTDASDAEAICEAVTRPTMRYVAIKSPEQQAALAIHRTRDLFVKQRTQLVNMIRGLLAEFGIDIRRGIGQALRLARHIDAGDMPDMPAAAAKMIAGLAGQILDLQVRLREIEGELLAWQRSNDLAKRLATIPGVRTVCATALAASVTDPHQFRSGRQFAAWLGLTPLQHSSGGKERLGRISKMGDKYLRRLLVVGMTSLVRRAKYKPNAVDPRLAHLLSRKPVRVVTVALANKTARVIWVIMTRGGTYRAPVSAATALFAASAA

SEQ ID NO: 474953 - protein, 316 aa, unidentified
MEAPSSGIDVSKDKLIVYFQGKLYEFTNDKRGYEEIRKILPKGCKVGIESTGVYHVNLAKYLNNEYDVRIINPFILKKFKGFRGKKSDKNDAKKLAEIVVSMGSEFVTSDARELTSQWDFITRSIARVKNRLRRDLVLLGYSSLSKRNLEEVLRGGGDSIVLAEVRFLLEELERLESRKREIEDRLRELVPKDSLIFTIPGIGKTLGCIILARVGDVKRFSDKKRFVAYCGLDPVVESSGKSVITRGISKRGDAVLRRAFYLAALTAIKVNPVIKRFYEEHKGRLRGRKLIIACARKLAVITWAVLYYNKPFDASE

SEQ ID NO: 474954 - protein, 325 aa, unidentified
MKNIVIGIDISKKTLDICIKEEKSFNYISIENKPQAIRRFFKPYTKEDLVVAMENTGRYNWHLLEVLEAFNFKVYVISPLHLKRSMGVTRGKNDKIDALRICSFIEKNQQETRQWKPCPDSIKKIKVLLTERASRIKAKKQFITTSHDYKLMKNINLDKLLSNLNLKMVKTIELQIKALEREIEDVIANDQKLAQQQKLIKSVPGVGKVLSWMLLSKTEGFSVITDPRKMACYSGVVPFDFQSGTSIKKRPSVSMLADKTIKTVLHMAAMSAIRRKNDLGDFYLRKVAEGKNKMSVINAVRNKIIHRVFAVIKNQTFYQKDLVLP

SEQ ID NO: 474955 - protein, 372 aa, unidentified
MDITIMWQVVAGFQPFVGVDLHKCTVTLKAVNAAGEAAGHLTISTKCVEKIETWLRALPRPVWLAVEACPFVEWFIERYRDVVDRIDIADATRLASCRGKRRKNDPNDALDIALRLARGECPLGFIAEAQLMQLRKLGRHWLQLSRLLARTKHAMKSMLNAANLHGPKFDGAGAQRWLLAHGTLLHPAQRQAFGNYLDVVLLVERQREVLRRQILMADRSPQFLDTQLILQSVPGIGDIWGLMIAAEIGPFDRFPNCDTLEFWAGMTADLKESAGRTQSGNITKAGSAPLRWALCQAAVTLCMCDARQEEIRQRLIKRIGKAKANVAMGRRLLRTLYAMVRDQKPYRCEKPVDRTTRMNQAKAPRKTQQKVA

SEQ ID NO: 474956 - protein, 491 aa, unidentified
MAKRKRSTFERLMSGKLNRKQRKEFARRLCSDDPGLEIIHPHAAGIDVGNESHYVAVPPKCDPEPVREFGSWTADLLKMADWLKSCSVTHVVMQSTGVYWIALYDVLEEAGFQVCLANARETKNLPGRKTDVQESQWLLKLHTYGLLRNSFRPPEEIRMVRTIWRLRSRHVREAARSIQHMQKALTTMNVQLANAISDLSGETGQAIIRAVVRGERDPYRLAKLRNYRIQASEEEIARSLEGNWREDVLFELRQAVEAYDFSQKQIGDCDVRLQQYVAELPDRPITPPQKPPAQAAANHKSDPPQRSRQKNKQKSRSKSQKNQPQFDLEAEFTRICGVNLKSIEGVDVMTIATFLSELGTDMSRWPTENHLVSWLKLAPSRQISGGKVIKQERQKVKNRVAEALRMAASTLSRSDSYLGARFRHLRSRLGPSKAIKAMAAHLARLIYRTLTHGQAWIDRGAQEHETKRAEREKLSLQRKAAALGFRLEPAA

SEQ ID NO: 474957 - protein, 430 aa, unidentified
MHDEVYYGRCAGIDVHKKVITVCLRIGRKTEVQTFGTLTHQLRSMIAWLKDNGCQMAAMESTGSYWKPLYNIFEQENLPVMVCNAHHIKNVPGRKTDVNDAQWIARCLSQGLLNPSYIPDREQRELRELTRFRQSQIQERARNINRLQKFLEGANIKMSSWLSDIEGKSATQLLELVIGKPDFTVDDVAACMYGRLKSSAEELFLSLEGYMTPIQRELFAHIMDIIRQQTAQIEKTDTMIKRSLSDNYKAAIEALDAIPDIGEISAEQIIAEIGTDMSRFRTPQRLSKWAGVCPGNNESAGKRKSGKTPPGNKTLKSTLTQSAQSAKRKKDSFFHAQYNRLVSHRGKNKATMAVAHSLFIAIFYVLSGKTFKDLGADYYTKFNREKKICSHVKQLSKLGVTIPEDVLRDITLNALREPPDSMDTSTFIVI

SEQ ID NO: 474958 - protein, 392 aa, unidentified
MYYVGVDIAKRAHVIGAVDERGKAACRAMQFDNSGEGFGRCVEWLEGLAGEPDDVLVGMEATGHYWMALFSHLVAAGYRACVINPSQVRAVRKLKGLERVKNDRVDAGLIAETLRIGQYDPSRLADDRVQSLRVLTRYHQSIKGDVAEAKTQLTCILDAYFPEYERLFSDPMCESSLALLELAPLPADLARRRTSTVARTLREASRGRLGDARADEVMAAARASVGHRIGSEAASMQARSLVRTIEFLQKEADKVAAQVSALLHEVEPLVLTIPGVGEVTGAQIVAEIGDVSRFPNAKALVRYAGLDSSVSQSGEFDSGGGPISKGGDPYLRRAVWLAANRAWQYDPRLNEFYRKKRSEGKPHRVAVTAVARKLCHIVYAVMRDHEEYDPDR

SEQ ID NO: 474959 - protein, 317 aa, unidentified
MAKPSMLCAGIDTGKRQLDASLVGGSERLQVDNGPAGHVSLARWLHRHRVKRVGIEASGGYEGAAVARLRCEGFVVVVFQPAQVRAYARFVLQRAKNDRLDAALIAECTAAAKKIHVPADPRLAAFAASLTMLDQLGEDIACLKNRRESCREARIERHWTAEIARLKAVQRVELRALAAAIRQHPDLAQRLDLLCSIDGIGLPTALAILVRLPEIGRVSREEAAALAGLAPWDDESGERQGQRHIAGGRERLRRALYTAAFAASFHWNDQLKRRYRQLIAAGKAHKLALVACARKLLIYANAVVARGTPWQPLPAAA

SEQ ID NO: 474960 - protein, 347 aa, unidentified
MHIAVLGIDLGKNSCSVAGLDTSGRVILRRRLHRDSVVKLASRLPACVIAMEACCGAHHLGRLLQACGHEIRLMSPEYVQPYVKAQKNDERDAEAIAEAATRPTMRFVELKTEQQLDMQSLHRARSRLVGERTALINQLRAVLLERGIAVAQGRYRLQRYLALALDGDGDPLPLNPRIRRLIDDMRAQWSELDRRIAAFDAEFVAAARSDADARRLSTIPGIGAINATALVAAVGNAQSFARARDLAAWLGLVPRQATTGGRPKLLGITKRGNKYMRTLLIHAARAALPSLINTEGSLGNWLRALSTRAHRNTVIVALASKLARIAWAVLRSTATYSATIGGRLATV

SEQ ID NO: 474961 - protein, 309 aa, unidentified
MTANQKFSRFIGIDVSKAKLDIYDDATGEFLTVENTAKAIEKYVSALSPDPELLIVVDLTGGYEALCVNTFYNRGFTVHRAEGRRVKAFMRSYGEHAKTDRIDAYALALFGRKLHETLRMYTPLPLNLKPVTERISDLKTMLLQEKNRSTAPSLPPDMKKEIVRHIAYLEKEIERLYQKCLDIIKNDPPLSEAFYKIIAIKGIAEKSAVLLLTTLPELGCANRRQIAAIAGVAPYAKDSGTLSGYRRIRHGRTTAKSALFIVTLVAIRHNAQIKEFYERLLKKGKSKMTAIIACARKLLIIVNATLKTC

SEQ ID NO: 474962 - protein, 344 aa, unidentified
MSKLDTCGIEVSAKELVVSLRRQGNLEPLRNFTNTPEGHLIILRYLRQAGRVVRACMESTGLYGLDLALALSGQEGIEVMVANPRAVRHFAQAMMKRSKNDQIDAGVLEQFAVHMPFKPWQRPSVVVLALHALARRLRELVEIQTAEKNRQHAAGLSEATPAVVRRDLARSLRAQERAIQRLTRQARKLIAQDPQLAERFELLDSVPGIGETSAMQLLGELGVLAPDLEARQWVAYAGLDPRQYTSGTSVHKKPRISKSGNKHLRHALFMPALVAVQHDPHLRAFYQHLLAQGKFKMQALVAVMRKLLHALHAMFKTHQPYDGSQLFQLKSAPAQEVTHVLVAS

SEQ ID NO: 474963 - protein, 387 aa, unidentified
MSEMFNPHAPATAYDHNTTIVAVLELSGKNWLFGAVAPGLSRRTRRSLEARNVEAVVRALEQAKGESAKARFEVARIVVGFESGRDGFWIARALQQRGIEVYVMHAASIAVERRGKRAKTDRLDVDLLLTTLIGWLRGEPGRCTMAPIPSEEEEDLREAGRRRETLVHARLKVENQIASLLIRHGIEGFKPRLKNAETRLCELRTFDGRSLPANTMNSLRLLLAQHRLLSAQLKEIEEARQRVVNVAKPDRLQRMIQALAHVVGVGVETATVLVHEVFSRSFKDRRALGAFVGLTGTPYNSGGAKAEQGISKNGNARVRRMLSQLAWRWLGHQPESALAQWFNARLGGAKGRMKKVLIVALMRKLVIALWRLAETGEVPMGARLAAR

SEQ ID NO: 474964 - protein, 342 aa, unidentified
MNHYAGIDVSLECSSVCVVDTNGKILREARVASEPEALIAWFASLGFGLERIGLEAGPLSQWLFAAMRQAGLAVELLETRHVRKAFEAMPVKSDRNDARGIAQLMRLGWFRPVHCKSMSAQETRTLLTARKLVQSKLRDVENSLRGILRGFGLKVGKTTEREFAGRIEELVAGHPHLQVIAKALLSVRAVLRSEFAAFEKQVRKMARSDMRTRLLMSTPAVGPIVALTYASAIDDPSRFKSSKQAGAHFGLTPKKHQSGETDYTGRISKIGDASVRTALYEAAHVMLTRPVKGCSQLKSWAMRIARRAGMSKAKVALARRLAVIMHRMLADGTSFNASGAAT

SEQ ID NO: 474965 - protein, 358 aa, unidentified
MTIVAHHHPFVIGVDTHARTHALAILACPTAEVVDQAQFPTTTAGLRRALVWVGRRTAGDLDVLWVIEGTGTYGARLAHAATETGYTVVEAPRMDSRNNRGLGKSDPLDAQRIAAAALPLDHLKLRMPRADDGVRAAIKVLLASRDHMSTERTATINALTALLRIVDLGIDARGPLNHSQITTASTWRPRSEDLATATARGEATRLARRVIDLDHDLATASRRILELLRMSPASVLLEEPGIGPITAAVAFTAWSHPGRVRSEAAFASLAGTSPIPASSGNTQRHRINPGGDRRLNQALHMATVTRMRMDPRTRAYVERRSAEGRTPREIRRCLKRYLARNIYRKLNTAAANCTPSSA

SEQ ID NO: 474966 - protein, 412 aa, unidentified
MEVVYERCCGLDVHKKKVVACLITPGEKQLKQEIRTFGTMTEDLEGLRGWLLENGVTAVAMESTGVYWKPIYNILEGQIPELILINPEHFKALKGKKTDCKDAVWLAELLRHGLLAGSFIPPKEIRELRELTRYRAALVAEHSREVQRVQKQLENSNIKLSSVATDIMGVSGREILKAMLNGNEDPKELAQMARGKLRKKIPELEKALEGKIEEHTRLLLKQQLEHLEFLEQQIEELNAEIEKRMEPFFEEAGRLAEVNGIKKEAAQDIIAEIGVDMTPFPDADHLASWAGVCPGNNESAGKRKSGKTRKGNQHLRAILVQCSWAAIRTKDSYLSAKYRRLAPRLGKKKALLAIAHSLIKIIYHLLKDKAHYQDPGPNYYTKEERERRIRRLVKQIEAQGYTVTLEEKPSVA

SEQ ID NO: 474967 - protein, 338 aa, unidentified
MDKIMTIGLDLAKNVFHVVGCNEHGKIVRKRMLKRSQVLAYFANLPVSLVGMEACASAHYWARELGVLGHEVRLIPPQYVKPYVRGNKNDYNDALAIAEAVVRPEMRFVGAKTPEQQDIQALHRLRERCLGDRTALCNQLRGLLAEYGLVFPKGVATLRRRLPELLEDGENGLSDLFRQLLAQGYQQLQELDGHIDFYTQELVYQSQQDDTCQRLQTIPGFGPIVASVFHSVVGHGEAYRRGRDVSASIGLVPRQHSSGGKEVLLGISKRGDRYLRSLLIHGARSVVIQAKAKDDRLSRWINRLVSARGFNKAVVALANKMARIGWVILAKKTTYQAA

SEQ ID NO: 474968 - protein, 317 aa, unidentified
MEQGQSNTKIAGIDVGKRQLDVAVHGHCDELQAANTVAGISELVAWLKAREVGRVGMEATGGYERAVRSALEAAGFEVVVHQPIEVRLFARLKRRRAKNDRLDARLIAAATAQVDTVRAAQDPRLAELAERLTAYEQITDHAAEMKIALEHVTLKDVARSIRAQIRSLERLKAKLAAQVIETIKAHPDLVARFRLLISLPGAGPIVAATLLVRMPELGSMRRGQAASLIGVAPFDRDSGQFKGLRFIGGGRARPRRMLYLAALAAKRCDPGLKAFAKHLLARGKAPKVVIVAVMRKLIEAANLVLSRGQPWVKQPAT

SEQ ID NO: 474969 - protein, 334 aa, unidentified
MNTLKETAWLALDIGSKKHAWCSETKGERESGDIGNDTSKLRTFLKARIKKATHLRMLVEATGVYYLDVTLIAHELGAEVMVINPRAAHHFAQALNQRNKTDKLDANMLLECLMRMPFQAWEPPRKTWRQLRNYGRFLVQLTEDGAADRNRLHALLSSKDSPAFLRKELKRKIATNDKRIERIRDKAVTLINADEYLKERFEAFTTAPGIANTSAVSILSELITLPQTLSGRACVSHAGLDPRVYESGTSVHKAPRISRHGNKYLRRALFYPAMSACQHDPRAKAFKERLVGRGKKSMQANVAVMRKMLTAAWAMMKNPQPYDSALLYADVENA

SEQ ID NO: 474970 - protein, 370 aa, unidentified
MAQPTPLFVGLDVHKDSIALAHAQGQSTDPPVFVGAIGTRQADIDQMVRRLESKTPALVFAYEAGPTGYGLYRYLTGRGFECRVVAPSLIPKRPGDKVKTDRRDAVELARLLRSGDLTGVYVPSVDDEAIRDLSRARDAARLTMKSAKVRLKAFLLRLGRHYEGRADWTEAHRRYLAKVVCPTPAQQIVFQESIRAVDEQVDRVKRLEAELLACTPTWRLQPVVEALQALRGVQWLVALTVVAELGDLTRFDNPRQLAAFVGLIPSEYSSGRTRRLGGITKTGNSRARRALIEAAWAYRHPAKVSEHIQKRIDGLPKPIQDIGWKAQVRLCKRYRRLTARGKHANVAVTAIARELLAFMWAIAKEVPVAP

SEQ ID NO: 474971 - protein, 365 aa, unidentified
MHDPTSTTVSVGLDVHKSSIRLAAVRADELLDERTIPYDHDAVQRLVSRWPGARCCYEAGPTGFGLYRHLSEVGIACEVIAPGLVPSRPGERFKTDPRDARKLARLHAGGLLEAIHVPSPEVEAARDLVRAREDARLDRMRDRHRLSKFLLRHGHVLPGKSWGVVRRKWLAQQRFEFPAQQQTFDAYLHTVDLVDHRVEALERAIREAAEQGPWRELVAKLRCFRGVDTLTALGTVVEIDDFGRFQSAEAFMSFVGLVPSEHSSGERRKQGPITKVGNAHVRRLLVEAAWHARRRPKVGYELARRQRGQDAAAVERAWRCQQRLHARWWRMAGRGKPNQKIVVACARELAGFVWAIATDQPLRGS

SEQ ID NO: 474972 - protein, 458 aa, unidentified
MFFLDSWPGTAARTPTKYMTTPSLPVLDPTAAAIDVGSEQLHVSIAGGPPKIFGATTGQLHALRDWLQENGVRSVAMEATGIYWLCPYEVLEQAGLKVVVVNGKYVKNLPGRKTDMKDCQWQATLHAHGLLRPGFVPPEHIRRLQDYLRLRADHVVLAGSHEQHMQKALERMNLKIHDVISDLTGVSGLKMVQAILAGERNPVALIALCDPQIQKRKAGALRAALEGNWKEEHLFALRQAHELWQFYQKKIAECDAALEAVLKEMAGPEDPQGPPPPAAAKRGGINTPQIAGLHALLYRLCGGKDPTTLPGIADHVLLQLIGEVGTELGENWKTEKHFTAYLGLAPGSRQSGQRRGSQKRSRNRAGRLFCVIARTVGRSVDKALGGYYRRIQGRRGGRVANIALARKLAELFWRLMVHGRAYVEEGLKKYEEKVAQTEQRLLQKLAHKYNLVLQPKAA

SEQ ID NO: 474973 - protein, 345 aa, unidentified
MDVAYDGRQVVGMDLHRRRSVLVRMTMDGRRLETARIENSPAALRGVLARCGQRPLVVLEATYGWYWAADVLEQAGAEVHLAHPLGVKAFSYRRVKNDERDAADLADLLRMGRLPEAWIAPPEARAVREVVRYRHKLVGQRTSCKDQVHAVLAKCGIPVTHSDVFGTGGGLWLDQLVLPAPYAAKVASLRALIAVLDGQIAGLGAEAAVMLAGQPGYAALRELPGIGPVLAAVIISEIGDITRFRKPAQLCSWAGLTPRHYESDLKVIRGHVSKQGSRLLRWALTEAIQHQPAGTRPRAAREAIIARRGPQARNIAKTASARVLLTQVFYALRDGHVRRAHDPAA

SEQ ID NO: 474974 - protein, 425 aa, unidentified
MSASDSLASPVEVSDFAYVVGVDIGSQQAVYCVCQPDKSQVVKPTEVANSRAGEDALDHRLRQLAVPPQRMLIGLEATGRYSENLYQFLQEQGYRLCLLHPRQTHQFAQQRGLRAKTDRLDATTIARLLLSGEARPGYVPDELISTYRELERLHSQLTDDSARYQNEIQALLVVLFPEFVQVFADPCRPTALGVLKRYPGAQAILDAGVEALTSTRRELAPRHYGRPTAQELVRLASQSVATPLASSGRALSLKVLCDQLEHTLTNLAQIAHELDQLLDRDHGASGLKSTPEFGRKTVAVLRAELGDVTRFQRVDQVVAYVGLDLQVRQSGKWKGQVKLSKRGSGRVRRVLYMAALRSLALPASAFGAYYRRLVARGLKARDALTAVMRKMLIVAYHLLRSNETYDPTKVCAVAGPPPHTPSSGS

SEQ ID NO: 474975 - protein, 421 aa, unidentified
MSNRTLSKKLAGVKPGALFVGVDLALDRNVAVVLSERAEQLARFGFPNERDGYDYFYRRLEAIQEQQQAPAVLVGMEPTNYFWKLLAADMEQQRPEYSYRLVNPYTVKKNREGDHLDRSKDDNRDAFTIGDLLRTGKYTETRLLHGGYAELRQYVTLHKRLQGDIRRQKTLIRNIAGQLFPELPHVFKDFTGETALAMLRNHAAAVTLRSKSQEMFITDVRADFHGRRLYEAKLRRVHVLAERSVGLKNGVAALQLALRTHIETLQVLQRQSEEVCTALIDAFLALPESAYLLSVHGLGVITAATILSEIGDPGNYTSGRQWVKLAGTQPVPNTSGRKSRSQTPMSHKGRPQLRTALFFAVMRLVQVDQAFARDYLHLQTREKNPLTKMQALGVLMNKLLRILWALMRNSTFYTPGFPGTA

SEQ ID NO: 474976 - protein, 371 aa, unidentified
MKKNNTCGQSRKGVAQGRSGTLTIGLDLGDKSSRYCVLDNNGEVQREGSVGSSKKAMKQVFGPRKRCRIALEVGTHSPWVSRLLKELGHEVIVANARQVKLISASSRKDDRLDAQTLARLARVDPQLLRPIQHRSEKAQGQLLQIRVRAALVDTRSGLVNTARGLVKAMGERLPCCDTDQMGVERMAGLPAEIQEALRPLLEEVESLTEKIKQCNEKIEQIARQEYPETALLQQVSGVGTLIALTFVLTLEDKQRFQRSRDVGCYVGLRPKRSSSGESQPELRITKEGDVYLRKLLVQGAHCILNRRGPDTDLKRWGLMLANKGRKNAKKRAVVAVARKLAILLHHLWVSGEVYEPLRNSNSRARQQKAVA

SEQ ID NO: 474977 - protein, 312 aa, unidentified
MTGIICGVDVSSQTLDARIGQDGPSRSFDRTPEGIQALAAFCKSHDVEFVAMEATGGYEKLPFGLLWLAGVPCAILNPRSVRRFAEAMGILEKTDEIDAGVIAHFAEVKRIVPQPPASATQQELEALVTRLRQITDLRASQTNQRRLVTDARVLEDIDELVALLNRQTRALEAKIAQSIDADPLWKALDAAFRSIKGVADRTVARLMADLPEIGTISGKKATKLVGLAPLANDSGKLKGKRSIFGGRAHVRSILFVVAELVRRHEPDFRKFHETLTAAGKPKKVIRVALARKLLVRLNAKARDARKELGLAV

SEQ ID NO: 474978 - protein, 360 aa, unidentified
MNGHKYVALDVDSANIVAGVHDCKGEQVMQAHIRTNSSDIRQFFKAVNGTVHVTFEEGTQAAWLYDVIRPLVAEVIVCNPRHNKLLQAGNKADKIDVAKLAKLLLLGELQPVYHGDQTMEGLKHLARAYQNLVADKTRVTNRLKAIFRGRAVGCRGSVVFNEEQQEEWLGKLDIEGLQTRGGYLYEELKCLVKLKEKARKAMCLEASRHPAFKLISSRVPGLGPIRTAQIIAIVGSPHRFRTKRQFWSYCGLAVVTRSSADYEWVEGRTRRRKKAVQTRGLNKNFNRPLKAIFKGAAVSAIQKDEFKQYHQRMIDKKIRPEMALLTTARKIAAITLAVWKKGETFDPKRLNQAGQSTDNQ

SEQ ID NO: 474979 - protein, 427 aa, unidentified
MSEVECIGHEPQFAAFIGIDWADQKHVWCLQAVDSEKRESGELEHTPEAVEAWVGQLCQRFGHRPIAVGLEQSRGALVFMLTKYEPLHLFPVPLRMAARMRKALYPSGSKDDPRDADLLLDLLLQHRDKLHRLSPDTQATRRVQNLVEERRQLVDEKTAQINRLTNHLKIYFPQILDWFEHLDSELVCAVLERWPTLEQLQKVPPAKLRTFFRKQRCREQELIERRILAIRQAIPAIRDRAVIEAKGTVVKVIVQLIRSLVQGIADLDEKIEEAAAAHPDFFIFDSLPGAGAVMAPRLLAAFGSQRERYGSAGEVQTYTGIAPVMESSGKKQWVHFRWACPKFLRQSFHEWAGHSIAHSVWARSYYQQQRSKGQDHHAAVRALAFKWIRVVFRCWKDGVAYDESKYLASLARCGSHLAAAAATAKTL

SEQ ID NO: 474980 - protein, 433 aa, unidentified
MKVMYEHVAGIDVHKDMIKVAIRSPGDKPWTRKTEILEYRTFYGVLQEMARELRRRGVTHVVMEASGVYTEPVYYALCEQDFTEVAVINPVHAKALKGHKTDAKDCARLAELFECGLLRGSCIPSAEQKEVRDLTRYRIKTVQARTSEIQRLGKALESAGIKLGSVASEITGKAATAMIEALIDGERRGGVLADLAIGRMRSAGKLADLSMALTGRFTGHHATLCRLHLDRINVFDDAVDGLDDRIAAGAARWQREAGLLKSVPGFGDVVSCAWLAEIGPAPHKWFSRHEKLASWVTLCPGNNISARKRKHGRTGDAGTYIKPMLIQAAWSAIRVRGRLQARYNRLVRRFGGDKNPAAKKKAITAIAHTLLKIAYQVLKSGTPYQDLGADFYTRRNSPEEQQKYLERQLQKLHPGCTITITISPPEAALPPGA

SEQ ID NO: 474981 - protein, 397 aa, unidentified
MPGSGRRRRLSVLNTRAEHDRLITLLSDLGQPVTCGFEATGNYHRPIAWRLLQAGFAVRLISSVALARTREALHNGWDKNDPKDAQVMLHMIRIGASQVYQDPLVAGINDVQELSKTHDAVSKAKTEVLHRILSHYLPLYFPEIDRFRHNSRSDWFFAFLDRFPTPASITALSKEAFIVAAWDVVGRKVAKAQVLGDIYETARSSIGLPVSPDAPAVSMFRLVIGEARGLIRQRDAIEVAADTLLSDSADYKLLRRIPGIGPINALTILAEAGDLRRFGHHRQFLKFCGLDLATQQSGTFRGQTKLSKYGNARLRRTLWLAGQVAIRQRENSFRDKFERYIARDRHNADLRRKALIAITAKMARVVHAVIKAGDDYRPFVEGPVPGGRTPLSRAVRA

SEQ ID NO: 474982 - protein, 342 aa, unidentified
MNKYNTIGVDLAKNVIQVCVVSTANKELQNKELTRKKFAEFLIKQKPALVAFEACATAHYWSRVARRHGHETKIIPALAVAPFRQGHKTDQNDALAVAEAARRPNIKEAPIKTVEQQSMQAIQRSRELLIQNRTALSNHIRGLLMEFGLVIPRGFASLHENIPWILEDGENELPDSYRPTLNLLYQRLCVLRDDLVFLDKQIAGVVKENVACRRLTQLEGVGPISSILLFATLGTGEAFKNGREFSAYLGLTPKQYSSGGKTNMIGISRRIANKRLRAVLIQGARAYVHRIKEPKTVKDQWLWALIQRAGYGRAAVALANKNVRTAWALLTKGTEYNRVQYA

SEQ ID NO: 474983 - protein, 522 aa, unidentified
MKLQRLKSVLFSVFAVVTVCLLGSCHRVTPRWTNSYFHREANVKRICDTMAGTYDMSYFRIYRTDLRGGQDVLKDSVIRAMLPDSAAPLQYVVGGYGDQRITIPNFPISLGAPCLKDTALARAVASAPLQNLLIRYGLSGGLSSKESEGYVRLAPEPLSLSLNVGGKQCVVEFDFECKIFIGIDVSKEKCDATAISAENGLTGVEKLDYLVFENRPKGFRTLLSWAKKLRSDIPQEDILFVCETTGAYDRALCDYIYSKGLDIWRESALQILWSSGVRRGKDDKTDSLMIAEYALHHMDKVHLYESPDSRILEIRTLFLYRRKLEQEKTSKLVRIKELEATTGKSRTLTFILRDAKKSIRQLEKSIKECEDKILELIEADKALNKSYQHLDSVKGLGIVNITALIVYTNNFKAFKTSRKMATYWGVAAFRSKSGTSVDKRADVRNLSSSMLKSYLTQAAMHTIAKGGIYHDYYHRKIAEGKTHSIALNNAKNKLLHLAMSLVTHDMDYEANHEFLRTQRVAN

SEQ ID NO: 474984 - protein, 339 aa, unidentified
MRRYVGVDLHKNSFQVCYYGKAAEEQRIYPMSQAGLKRFKEGLRRTDEVGIEATGNARYLASEVERVVKKVRIINPWQFKVISSSVKKTDEQDAKIIARYLSKGLVPEVRMRTKEEQQTASLITTRDKLVKLRSALKNKIHNILNANGIVTKREIFSSIKSLETVLALPLDQAYLFELEVIVEQIKSLTASIDKITEGLNQRGQKLKGFKNITSITGIGDVSATVMLNAIGDVNDFKDEDRLASYFGIVPRVQNSNKTIHHGHITKMGNKIARTALVQSTLIAIRYNGYLRSFYERLKAKKGSGKAIIATSRKLLAIIYRTLKYNLVFEDFNHYKLAAT

SEQ ID NO: 474985 - protein, 409 aa, unidentified
MALIFVGDDWAEDHHDIHLMDAEGARLASGRLPEGLIGVRGFHELVAAHAEEPSQVVVGIETDRGLWVDALTAAGYQVFGVNPLAVARYRDRHHVSGAKSDASDAKLLADLVRTDRHNHRLIAGDSEQAEAIKVLARAHQNLIWARTRHTNGLRSALREYYPAALEAFDDLADRDALAILGRAPTPADAGRLSLSKIRSALKAAGRQRNLDNRAVQIQDMLRSEQLSAPAAVTAAFGASTRAAVGIIAELNHQIADLEAELATHFEAHPDADVYRSLPGLGVILGARVLGEFGDDPNRYTTAKCRKNYAGTSPLTIASGKKRAVLARHVRNRRLYDAIDQWAFCALNASPGARALYDQHRAAGNTHHQALRALGNRLVGILHGCLRHHTAYNEHIAWAHRQTNPGNQAA

SEQ ID NO: 474986 - protein, 366 aa, unidentified
MLYLGIDIGKNNHEAGIVDGEGKQRGKSLRFANDQQGFFSLTSFLEQKVGPGEELRVGMEATGHYWIPLYSFLHGKGFILHVINPIQSDSLRNFTIRGAKTDSIDCFLIAHTIRFGDFSETRLADEDVLTLRNLARFRESLKDSCANYKRQVVTVLDQVFPEYDALFSNMFGESSKAFLKTYGTPEQTMELDTKSLAALLRKASRGRHGTKKAEEIKALAGRSIGVPFCKDAFAFQLKILIEQIEFTEKQIGEIDKKLAQLLKKLNPVILSIPGVGPATGAVILGEIGDINRFDKPKKLVAFAGIDPTVMQSGNFSGSHNRFSKRGSPYLRRAIWLAAVVAAGGLCGSHGQPSGTVSFSYSGLPPF

SEQ ID NO: 474987 - protein, 344 aa, unidentified
MGEVSTIGLDIAKSVFQVHGVDVAGAVVIRKRVSRAKVLEYFGELPQCLVGIEACPSAHHWGRELQALGHTVRLIPPSYVKAYLKRGKNDANDAAAICEAVTRPSMRFVPIKTKEQQTALMLHRTRQLLVRQRTMLSNALRGHLAELGVVSAKGRNGTAELLRIIAGGADSRVSPAVRGILEVLARQYGAIGTEIASIDKSIMALHRGCEASRRLAEIPGIGPVGATALVAEIGDWKTFSSGRSLAAWIGLVPKQHTTGGKDRLGSITKQGNRYLRWLLIVGAMAVIRYARKHGTQKRPWLGRLMERRPTKVAAVALANKIARMAWAIMVRGERYKEPKLLLAA

SEQ ID NO: 474988 - protein, 348 aa, unidentified
MAYFVGLDVSVKETSVCVVDEAGKVILEQKVLTEPDTIIALLTSLGATYGRIGIEAGPLSQWLVNALTAAELPVICVETRHMKALLTAQQINKTDRNDARGIAQMMRVGLFKPVHVKTLVAQEQRMLLTSRKLLQRKLLDVESDLRGTLRNFGLKVGVVGGSRYEARVRELVEGFPRLAVIVEPLLIVRRVMRQQFAVLHKMLLDTVRDDPVCRRLMTAPGVGAVVALTYRATVDQPQRFVHSRAVGAHVGLTPKRYQSGEIDYDGGVSKCGDALLRTMLYEAAHSLLTRNRKWSWLKAWGVRVAQRRGMRRAIVAVARRLAVVLHRMWVDGSEFRWSKDSTAVPGVT

SEQ ID NO: 474989 - protein, 419 aa, unidentified
MTRKDDSRIIRIVHPICCGLDVHKESVSACVIFPDSNGEEQHEIKVFGTFTDDLKLLRQWLLDHECPVVAMESTGVYWRPVHNVLEQTVQVVLANARNMKNVSGRKTDIGDSRWIAGLLRHGLLKASFIPPMTVRQWRELTRLRKKYVQSVGDYRKRTHKLFESANIKIDSVVSDLFGVTGRNLMKLLIVDRELTLTDIEACIRGKLKGKEVELFRSIQGFFMGHHRFILKTLLGTIANLEGQIEALEQQIRSLMKDQNDLLDRMKKAPGISDVSACDILAEIGPTLDSFPTDTALVSWSGLCPGNNESAGKRKSGRSPVRKHHLKTIMIEVAWAAIKKKGSYFKDKYYRLKARRGAKKAIVAIAHRILLGVYHVIKDGAEFRDLGEDYLTLRNKEKKVLYLQKQALALGFNLIPQTIQ

SEQ ID NO: 474990 - protein, 370 aa, unidentified
MVWTAPYGIECARMRLSISHTREPSVNQIIRIGMDTSKYIFQLHGVDAQERPVLRKRLSRSAMLEFFAKLPPTIIVIEACGAAHYWARELAKLGHEVKLIAPQLAKPYVARNKNDGRDADGLCEAGGRPRMHFVPVKTAEQQAAVMLLGIRERLIARRTQLSNMIRGHAAEFGLVAAKGTDKLPALLAAIAEDASLPELARDLFKLLSREYEQSQVELKAVEAKLKAWHRADEMSRRLAQVPGIGPVTAAALVMKAPNPHAFRSGRLFAAWLGLTPKDHSTGGKLRLGKITRAGDEMLRSLLVVGATSVIKVAKGPKKRGPRWLIELLKRKSPKHAAVALANKMARIAWKLMTTDEKYDSTKLNAASQAA

SEQ ID NO: 474991 - protein, 421 aa, unidentified
MKVTYQTCCGVDVHKTFLVATIIKTTSGVEPSCEKKRFSTFNSDIRRFKQWLLDNNCLDVCMESTGKYWVPVSNLLEDCINVTIANPKWVKAVKGNKDDVKDSKWIGDLFRLGLVPGSFIPCKEIRILREYTRYRFKLVSCKTSEKNRFQNAFTVCNVALDAVVSDMFGVSASAITDYLITSDEFDGETCKSFLKGTLKAKADAVVESIEGYQMTPDQKERLLLIRSHLEFVKMELDVIDAKLNDLVVPYESAIALLCTIPGVERASAITIISEIGIDMSQFDSSRRLCCWAGLTPGSNESAGKKKSVRITRAGVYLKPALVQCAHAAVKSIDSPYYKSKYERLLKRRGKKRAIIAIARMILTAIYHMISTGEEWNPCDLFKIDMPQELQEKQKAKANKQAVRFLVLEGIIPQPDIECATG

SEQ ID NO: 474992 - protein, 424 aa, unidentified
MDIVVACCAGLDVHKKTVVACRRCLQGNGTVRKEVRTFGTMTADLLALSDWLAAAGVTQVAMESTGVYWRPIWNILESRFQMLLVNARHIKQVPGRKTDVKDSEWIAELLQHGLLRGSYIPPAPQRELRELTRQRVQLMRQKATVANRLQKVLEDANIKLASVATDILGLSGRLMLEALIAGQDDPAALADLAQRKLRAKIPVLKIALLGRVTEHHRFLLRLLLDEVTQVEAWIARVSERIAAVLPASMAEALPRLVEVPGVGERAAENLLAEIGTDMAQFPTAAHLSSWVGMSPGNNESAGKRKSGRTTKGNQWLRATLVQVAWAASHTKDTYLAAQYRRLAGRRGTKRALVAVAHSILVILYHLLKRPQSTFRELGPLYLEQLDAKQVTRYLVRRLERLGHKVILERLDAAEAVGAAGARSP

SEQ ID NO: 474993 - protein, 391 aa, unidentified
MSMYFIGIDISKYKHDCCIISAADQKVVSKVTIKNNKSGFDELLTIINSLSNPEDIRIGFESTAHYALNLELFLENSLLTFMEVNPVLISEYKKSKTLRRTKTDSVDCESIARWLMTVEYKPHSKGFYHAYSLKSLTRLRDKLIRQRSFYLVKITNVLDHTFPEFKPFFNERLSKTALYLLENYGSAEKMARMNSASYEKLRSLSRGKFSPQQFLQLKELAANTVGVNNSIFDVELNSLLSLYESLVKEIDTIEKEINKLIEEVHPHYMSIPGIGTLSAAVIYSEYGDISNFSNPGQMLAFAGIEPGINESGTESHGGRMVKRGSSQLRYTLINCCLPLIRFDMTFATYYAKKREEGKPHRVAITHVAKKLIRVIYALERQDIDFNTQKLH

SEQ ID NO: 474994 - protein, 361 aa, unidentified
MDKYIGFDISSKDVSVCVIQKNSKERYATIGPDIGSMRNFLVNEKKDGSRVHLTFEISGQAGFLYDSLIDCVDSIKVANPDKMTWIYRTAKKNDRMDARKMAVLLSIGEIPAVHMPGKEVRQWRMIICHRKKLLAGLVAAKNRIRALIKSQGINKPLHKGGWWKVINRLWMRGICEGGFDVNNLWKIQLGNLLDELEQKEKQIESVTGYLDGYLDKQAGGKLLMSIPGVGPRTAEAVLAYTDDVERFAGSKEYCGYFGVTPRLDESGSSRRLGHISKKGPSVVRWVLCESSWKVIRYSKSMRSFYRRVTAGQKSRKKIAIVAVARKLLSIMRAMLLTGAMFDENFVSSIDYGRIERLRKSA

SEQ ID NO: 474995 - protein, 355 aa, unidentified
MSGEKYIGLDVHQATISVAVVDSQGKLIMESILETKALTLLEFLAGLRGSLFVTFEEGTWAAWLYDLLKPHVTEVLVCNPRKIPLLKHGNKSDKIDARKLAERLRLHDLKPVYHGENGIRMLRELARSYLTVVKDLSRVMNRLKALYRSWAIPCAGRDVYYTRHRSQWLEKIPEAGTRRRAEQLYQQLDVLQHLRQQARRELLAESRRHTITAKLRQIPSLGPIRSALAVALIQTPHRFRSKRQLWTYSGLGLETRDSGEYHYVRGQLQRRKKQATIRGLNKDYNHDLKGLFKGAATRASVQPGPFQEFYQRSLAKGIQPTMVRLTLARKIAAITLTLWKKGEDFDINKLNSQTA

SEQ ID NO: 474996 - protein, 281 aa, unidentified
MNDSGKRYIGLDVHKHYLIALGVDEELNVVLPARRVELVRLERWMKKTLTRQDAVVLEMTTNTWQLYDELAEYVGSVTVVHPPHVALITRSQVMNDKIAASILARLLAKGLLVGIWVPPQEVRDLRGLVAQRRKMTGLATQAKNRLHAVLQRHHLLPPQGNPFHEAQQHWWLALRLGGLEKVNMLSDLETLRFAEVQQLRLTSMMEEMTSQQEQVARLLQVPGFGVVTAVTVWAAIGNIQRFADAQHLVGYAGLGARIHDSGMSTRRGGLPKQEDVTCVWS

SEQ ID NO: 474997 - protein, 417 aa, unidentified
MEDKASASPCRYIALDIHKYYSVVAGVDREGEEVLRACRVEHLDLENWALKHLLPTDRVVIESTTNAWHVYDLLEPLVGEVQVANPIKVKQIACARVKTDKKDTLILARLLAANLVPVVWVPPKHVRELRQLISHRRRMAGMHTQVVNRMHSVAHRHHLNHPKGKDFQPKNTGWQRDESLSRLEKMQLELDMETREHLEKQIERMTRELGRMSHEEPWASEMLYLMQIPGCGVVTGMTILAAIGDITRFETPKALASYSGLVPGLEQSGVKLRGKGITKEGRRELRWVMVEVAWRAVKADPHWKKYFEELKRRMHPNQAIAAIARHLLTMVWYVLTRHEPYSHYSPERIAYKYLTWSWALDEDQRQRMTRPQFARYYLMRLGIGDELRRVALNPKFPYRLASVEEVLELKPELRPPD

SEQ ID NO: 474998 - protein, 363 aa, unidentified
MFSERTSVGLDVHARSVAAAAIDGVTGELFQTKLTPSFDHIRSWVTDLPGPVAVAYEAGPTGFGLYRQLNAAGIRCEVVAPSKLQKPAGERVKTDAKDAIHLARLLRLDDITSVAIPSIDQEAARDLVRVREDCRGDLMRARHRLSKLLLRYGIVYYGGQAWTGKHDMWLRNDALPQLTTRATRLTFDADYETALVTKARRDRLDAMIEEMAADSEFTPLVRRLGCLRGVSTLTGFGLAVEVGDWHRFTGNTIGSFVGLVPSEHSSGGPGPLGSITKTGNGHARRLLVEAAWHHRPRYTIGKTMRDRWNLAPATARIRGDEGNRRLHQRWVKFIDRRKRSTVANVAIARELAGWCWSLAVMED

SEQ ID NO: 474999 - protein, 366 aa, unidentified
MSSVTPAAGPIHLGMGTSKNTIVVGVLMPGDEVPVIDRIWNEEGSVRHLVGRLGDPVALRACYEAGPCGFELHRLLASMGVACEVVAPSLIPRRAGDRVKTGKRDASRLARLHRAGELTPIRVPSPAEEAVRDLVRVRAALLADRKRAQQRLTAMLLRHGRVWRSGSYWTQAHERWIAGQHFKEPALATALAHYRAGLGTRRAELDAIEAELAPWAGREPLAGTVARLGCYRGIAELHGLALAAEVIDWRRFGSARAFMGFTGLVPGEYSSGDRTRRGSITKAGSEPVRTALVEAAWAYRFKPAIGVTLRRRQRDAEPGTLARSWKAQRHLHSKYKTMTARGKPPGVAVTAVARELAGFVWAEMTS

SEQ ID NO: 475000 - protein, 367 aa, unidentified
MTIVAHAHPFVVGVDTHAKNHALSILATPAGVQVDDGEFPTTAAGMARAIDWVARRTGGDLAVLWVIECAASFGSQLAHAVTAASYQVVEAARMSAKANRGVGKSDPLDARRIAAAVLPLELDRLRHLRKDDGVRVGLRVLIAARDHMTGERTATLNALIALLRVLDLGIDARKPLTAAQIIEVSKWRTRTEDIGAAIARAEAVRLAKRVIVLEAELAENTKTTTDLLRRSPARVLLDKPGIGPVTAAVAMAAWSHDGRLRSEAAFASLAGVNPIPASSGNTVRHRLNRGGDRRLNQALHMAVVVRTRMDPATKAYVERRLTEGHTKKEIRRCLKRYLARQIYRTLTAVTRADEALAAVTSATPIPA

SEQ ID NO: 475001 - protein, 272 aa, unidentified
MLDAREKVLSTGRFGTDRDGYKNLLAAGRRWPDRVWAVEGCEGVGRHIAQRLVADGEAVVDVPAKLSARARVFSTGQGRKTDATDAHSVAVVALRTPGLRDVQVDGSTVALRLLVDRRDGLGAARTLTVNRLHCLLVELIPGGAKTFLSAAQAKALLATVRPRDLVGKTRRKLAAELVSELVSIDKRIKAANTELRELVEATGSTLLELHGIGPSGAARLLGDIRDVARFQTRGHFASWNGTAPIDASSGEQNRHRLSRAGNRRINRVACRV

SEQ ID NO: 475002 - protein, 353 aa, unidentified
MKYYTSRTEFNCGIDLHARQMYVCVMDRQGKKLVHTNIKNNDFQFFLKLIEPYRKNLTVCCECMFGWYWLADACEDAGITFVLAHALYLKAIHGGKNKNDRIDSEKLAHLLRSNLIPPAYVYPTQMRPIRALLRQRILYVWRRAELLSRIHSHQLAHNRAPMRQTRSNRDPWEERLLAAEEHPLRQFALQTDMAMIRHYDKQITALEVKLLNLAKERSGRDFALLQTVPGIGENLGLTILYEIGDIARFPTVKDFLSYCRLVKGTVASAGKIKGLRGSKLGNPYLRWAFGEAAVIAKRDHAIIGPLSQSLEAQMGGNKFKANTVVAIKIARSVYFMLKNKTVFDPDRLVAALT

SEQ ID NO: 475003 - protein, 357 aa, unidentified
MQTQVTKRLDFSGKKVFVGLDVHKKSWSVTIIVEGIEHKTFNQPADPRVLSDYLTRMFPNGEYSSAYEAGFSGYGTHRALHALGIHNRVINASDIPTTQKDTLGKTDRVDSRKISRALEKDMVQGIHVFDRDLEELRSLNRTRMNLMKDFRRSKNRIKSFLYYFGIILPPQFDNNHWSHDFEVWLEGVDMDTNGGKDALDQLLATYRYFRQQMLDIGSQLRKCIRKHDRELYDQLQTIPGVGPLTAITLITELGDIKRFRHINHLASFVGLIPRIKQSGEIERTGDLTFRCNHYLRTMIVEASWTAIRMDPVLMQYYQQKRVNSISQKAIIKVARKLLNRIRYVMKNRQPYVLGVIE

SEQ ID NO: 475004 - protein, 290 aa, unidentified
MQITTIGLDIAKNVFQVHGIDAAEKVVVRKQLRRGQVMRFFEQLSPCLVGLEACATAHYWARELTKLGHEVRLMPARDVKAYVKRNKNDAADAEAICEAVRRPTMRFVRVKSAEQQGQLMQHRARDLLMRQRTQLINAMRAHMAELGMIAPQGREGIKQLLAIIANDEDTRLPVDARASLIVLAAQLEAMQTMIGSLERRIVARHRPHPDSKRLETIPGVGVIGATAIAATVTDPAAFRCGRDFAAWVGLVPRQDSTGGKPRLGRSRSRETGTCDGSSLSAQFLCCAVPS

SEQ ID NO: 475005 - protein, 351 aa, unidentified
MERYLGADVHAASVTFCVLDASGKQLRRDVVETNGKALIGYLQQIPGHLHLCIEESEWSQWLYEILSPYVVELVVYRGKWTPGMKSDAIDAHGLAEKLRTGQIDRPVYKDARLFTALRDHARTYTMITRDLARVKSRLKSFFRSRGLPCTGEAVFKPEERAKRARALPPATREAVDLLGRELEQLKVLKAEAEVAMLRESHRHRIARVLETAPGLGPVRVAQMLPIVVTPHRFRTKRQFWSYCGFAIVTRTSSDWVRENGRWVRAPVVQTRGLNFNHNPTLKMLFKGAATTVIAHAASNPLREGYDRQLENGTKPNLAKLTVARNIAAIVLAMWKTEEPYDPRKIHELSRS

SEQ ID NO: 475006 - protein, 322 aa, unidentified
MTVYVGIDVSKVSLDIGVLDGQQREHAEFSNEGDGFVKLRRFLKKRRGKVQVCLEATGPYGEGVADFLYEAGYRVSVVNPARIKGYAESQLSRNKTDKMDAYLIADFCRTQQPEAWSPPPPEIRELNALVRHLEDLEHNRSQCANRLSAAKATSTVAAQLRAQLALLDEQLLQTKQAIQDHIDRYPDLKRQRDLLTSIPGIAELTAGKLLAEFRAITDFANVRQLVAFAGLNPRQHVSGTSVHKNSHISKCGRASLRAALYMPAIVAKRHNPVLSDFAQRLQARGVSGKRLIVAIMRKLLHLVYGILKSGKPFDPHFAYLPA

SEQ ID NO: 475007 - protein, 429 aa, unidentified
MRNESAPGARGPVFCGVDTHADSHWLCVLDWRGRKVLSRQFPADAAGYEALAGAIAAAGEPACVAMEGTSSYGAGLTRHLASLGMPVREALSPARTQRRRPGQGKCDESDAERAARAAMSGSKLGTPKSQDGWVDGVRYMLAARSGAVKARTSAVNTARSLLTTAPEGPRSRFRGMAGPRLMEELPSVRAEGALGAALGALADLWAAARDAALDMELAIEASLEENCPALLAMYGCGPVSAAKLAVAAGDNPGRLRSEASFAAICGACPIPASSGKTVRHRLNRGGDRQANSALHEIARQRVMRDPETAEYAERARGRGKSDREVMRCLKRYVAREAYRALMRPHEIRRPEDASELVAARRAAKVSQVRAASILGTSEKYISMLERGQRELKPIRRAYEAWVEAGLPLDWDRQAFEAERKFDSKKHLAK

SEQ ID NO: 475008 - protein, 348 aa, unidentified
MDHYAGLDVSLEETAICVVDGTGRIVKETRASSEPDALIVALREIDVPLERVGLEACSLTAWLHDELHQAGLPAICIETRQANAAMKTMPNKTDRNDARALAQIMRTGWFRQVHVKSRQCRMWRSLLVARRTVLNEMRAIENVVRAILREAGIKLGTPSRMAFAGRVRELAGGDSLVMALVEPLLAIIATMLDQLACLTKQVLAIARREDVCRRLMSVPGVGPITALAFRATIDRPDRFRRSRDVGAHLGLTPARYQSGETDIQGRISRCGDELARTSLYEAAHTLLVRSKKWSSLRAWGMKVAKARGMARARVAVARKLAVILHRMWSDGAEFRFGKEPSATSLASA

SEQ ID NO: 475009 - protein, 363 aa, unidentified
MKIMTGIDLHSNNALCGLMDESGRRLVHKKLPCELPAILQLLEPYKDRIAAVAIESTYNWYWLADGLQDHGYPVVLANPARMKPYDGLKHTDDVSDAYFLTELLRLGILPTGHLYDRKHRPVRDLLRRRLLLVRQRTSLILSFKSLNERTLGQRVPLSRVKTMSAEDARARFTEPADQLLGGQQIELMGQLQQAITQIEQHVLGVAGKWNSYQRLQELPGIGKILGLTIALETGDAQRFAGAGNYASYCRCVKSLRQSNGKKKGENNRKCGNRYLAWAFVEAAHFACRYDERCRRFYDRKAKQTNPIIATKALACKLAKAAWHVMKENVSFDADRVFGPGRKEAFGETGREPAKGSGRKSPQD

SEQ ID NO: 475010 - protein, 411 aa, unidentified
MHNRQNYLYVGVDLHKEHHTAVIINCWQEKLGEIQFENKPSAFSKFLLEVETYVSDGLSVVFGLEDVGGYGRALAKYLVDHEQVVKEVNPALSFLERKSQVMIQKNDSWDAVCVARILINKLNQLPDAKPNDLFWSIQQLVSRRNALVKAQSALKNQLHIQLNHHYPSYKKFFSELDGKTALAFWEQYPSPSCLEGVNIKRLTAFLLDVSNNTCSVRKASEILRLVKEDGQTMKEYQEMRNFLVRSIVREIEFKKKEMKYIERELKQLVNLLDYQLETMPGIELVTASALIAEIGDVRRFPNANKLARFAGIAPVYFGSGGKGKTHKSKQGNRALHALFYNLAVQQVQVAKGSKLPRNPVFHAYYQKKLKEGKTKGQALVCIMRRLVNIVYGMMKYKIAYELPVVEEKEVV

SEQ ID NO: 475011 - protein, 369 aa, unidentified
MEQNSEVFVGLDVAKARHAVAIADEGRSGEVRYLGEIDSDPVSVRRMVARLEKPHRRLHFCYEAGPTGYGLYRQLTAMGHDCAVVAPSLIPKRLGDRIKTNRRDAIQLAKLLRAGELTPVWVPDETHEAVRELVRSREAAVDDLRRKRQSISSLMLRYGRAYPGKKTWGARHRQWLQAQRFDHPAQQLVLQEMILAAQHAVERLKRTEAAIVEFLPEWSLAPVVDALQALRGVQLITAATIMVEIGDLRRFDSPRQLMGYLSLVPGERSTGDSVRRTGITKAGNGRVRRALVESAWTYRHLPRTSKLKHYVHERVPTAVRDIALKAEARLCGRYRALPGRGKKLTVVVTAIARELAGFVWAIGRIVQTA

SEQ ID NO: 475012 - protein, 355 aa, unidentified
MNSVRYIGLDVHRDTISAAVLSESDRLIQQSVLMTRAAAILDFIGGVRGTVHVTFEEGTHSAWLYDLLSRRVDKLVVCNPRKNALLKSGNKGDAIDARKLAELLRAGLLSAVYHGETSALEVQHLARSYLMLTEDTTRVMGRLKAVFRSQAIGSTGKKLYGPKHRGEYLEALGACALRRRAECLYQQLDALQQLRHQARRELIVECRKHAEAKWLQSVPFLGPLRAAILIGRVQTPHRFRTKRQFWAYCGLALETRDSAEYRVVDGQVERRKRPAQIRGLNWNHNHELKNVFKAAATSASVCPGVFRDHYLGLLKKNMRPEMARLTLARKIAAITLKIWKKGEAFDAEQVKIQAA

SEQ ID NO: 475013 - protein, 353 aa, unidentified
MEFTMIVRKDAACYVGIDLHKDTLTACTITAKDREVSYRKLACVCREQIREFFAGLPRPSVVAIETVGFYRWLWTEAEPIVDQVILADARGCRALAGRRIKTDREDAFNVADLLMTERLPKAWAPPGHIQLLRNLTRHRNGLSRDHAKTLHRVKSILNRLNRPGPTRMDAAGLNRYLVGSTERIEADDLMMLWQHQRMLVEIEQDRAMIERRIIDVMRAKEFRRLREILESIPGVGLITAATAIAEIGDFSRFNDAKAIGRYAGLTPTGYSSADKHRLGRICKTGSPDLRWVLQQAAWTAIRCEPAFKKIALKISKGSKKKAAAVAVARKLLVLMWTLVRKEELYKAREPIAA

SEQ ID NO: 475014 - protein, 421 aa, unidentified
MELEPQELERVFRERACGLDVHFSFVTACLIVPGKGRRLRILEETFETTVKGLNRLKAWLTEHECEAVGMEATGVYWMPVYAALEGAFDLEVANPLQIKSLRGQKTDRKDARWIAEQVRHGRIKRSFVPPPEFRDARKLARFRRQLIQARTTISNEIQRTLAESGITLAAWVSDILGVSGMAILEALAEGKSIQDELPDCLKTTLKKKMAPIAAALEAPLGEVSRSILALHLERLEQVEVHIARVEGDLFKVLEPHADKLALLMTIPGLARMSAAIILAEIGVNMAAWPTEKQFSAWAGVAPGCKETGGKAKRAPVRKGNPYLCTILMECAGPAVKKKDCHLNPTYHRLCRQLGSKKKARMAIAHKLALIIYRNLAASSEYKEPVPKPMSKKVQAKIRQKRVADLERLGYKVTLEPIESAS

SEQ ID NO: 475015 - protein, 317 aa, unidentified
MPYATRFVGIDISKSFLDVCLLPDQEKARFANTAEGVAALIAFLAPLKGIERLILEPTGGYERLTVAALQAAQLPVAKVNAGQVRQFARACGQLSKTDTIDAFVLADYGRRMQTRILPQRSSRQAALEELVLRYRQLSHMIVQEKNRREKLNDRTQGRTKEWIEQTLGFLVKQRQAVVDDMAECLRADPELGKKAEVLMSLKGIGLRTACFLLAGLPELGLLNKAQIAKLVGVAPLNRDSGAMRGKRTIAGGRRPVRDALYLAALPAIRFDPAIKAFYTSLRGRGKPGKVALVAVIRKMLIILNARLRDNNPAVLDR

SEQ ID NO: 475016 - protein, 364 aa, unidentified
MRKGSTWVGLDVHKKDIVAARLVGSSQEPEIWRFANEPRAIGRFERKLLRESAGAVHCAYEAGPCGYPLQRRLQSSGISCQVVAPSLIPAKPGERIKTDRRDAGKLAELLRAGLLTEVVPPGEDEESVRDLCRCRDSVRQDLTRARHRLSKLLLRRDVRYGPGRAWTRRHRQWLLGLRFEHAAAEAAFRAYLGSVEQLEDRLLELDEAIAQVAETDPYRESVGRLRCFRGIDTWSAMLILAELHDVRRFSSPRQLMAYLGLVPSEHSSGERTRRGGITKAGNSRLRRALIEAAWHARHRPAISKELRRRRQGQPPGAILLADRALRRLYHRYWRLLSMGKPPQKVVTAVARELTGFVWATLMCD

SEQ ID NO: 475017 - protein, 451 aa, unidentified
MSPRKSDATLSLAHPDAAGIDIGSASHFVAVPSDRDEQPVREFKSFTADLYRLAQWLKDCGITAVAMESTGVYWIPLYELLDSQGFTVYLVNARHVKNVSGRKSDVLDCQWLQQLMSYGLLAGAFRPSDEICVLREFSRQREMLLASQVRHVQHMQKALAQMNIQLTHVLSDVVGVTGQAIIRAIVDGERNPHVLARLKKRQVKASEDDIAAALQGNWRHEHLFALRQALALYDTYQQLLNECNQHIQAELQKLHRHDGDPGKSQRRWPKKAMAFDLRTHLFAMCGVDLTRINGIDEMTAFTVLAEVGPDMSRFPSAKHFASWLGLCPGTRISGGKVLNGATKRSPNRAAQALRLAAMALRHSQSALGAYYRRLCARLDKRRAITAAAHKLARLIYTLLTKGAEYVDQGELYYEERHRQRVLHHLTKRAETMGYSLVPLATPEKANEISTA

SEQ ID NO: 475018 - protein, 344 aa, unidentified
MDHFAGLDVSVNETSVCIVDDTGRIVREAKVASEPEALLAVLTNPGYRFKRIGLEAGPLSQWLFSALAEAGLPVICVETRHMRAVLKAQINKTDRNDARGMAQMMRAGLYRPVHVKTLRSQKLRMLLTHRKLLQSKAIAVENDLRGTLRNFGLKVGIVGKLKFEARIRELVESHPDLAVLVEPLLVVRRVLREQLGILHRRLLAIVQDDEVCRRLMTTPGVGPVVALTFRATVDVPARFRNSKAVGAVLGLTPSRYQSGEINRTGAISKCGDEMMRVMLYEAAQSMLVRSAKWSWLKAWAMQIARRRGMKKAIVALARRLAVIMHRIWVDGAEFRWSRQETAAA

SEQ ID NO: 475019 - protein, 313 aa, unidentified
MMASQDVFVGIAVSKDRLDVHVRPLGVGFSVGNEAAGYAGLIARLRPLRVKRIVLEATGGYERALWLALSEAGLVAAVVNPRQVREFARAAGRLAKTDRLDAEVIAHFAETFAPRIGKPDAVADRLGEHVLYRRSLQDELVALEHQRRRLATPALRERADRRLAALRAEVKEIEREMRAIVDSDPAKKALFACLTALKGVGLVLACTLIANMRELGSLSRHQAAALIGVAPLNHDSGTRRGYRAIAGGRRRVRNVLYVATLSAVRSNPPIKEFYRRLSASGKPHKVALVACMRKMLVMLNGRVRDELAAATIP

SEQ ID NO: 475020 - protein, 343 aa, unidentified
MDHFAGLDISVKETSVCIVDDTGKIVREVKVASEPEALLAVLKDCAYRFKRIGLEAGPLSQWLYSGLAEAELPVVCVETRHMQAVLKAQINKTDRNDARGIAQMMRAGLYRPVHVKTLRSQKLRMLLTHRQLLLSKAIAIENELRGTLRNFGLKVGMVGTVKFEARIRELVENLPDLAVLVEPLLVVRRVLRQQIGLLHRHLLTIARDDDVCRRLMTVPGVGPVVALTYRATVDVPARFKNSKAVAASFGLTPCKYQSGEIDRDGRISRCGDEMMRVMLYEAAQVMLTRTNKWSWLKAWAMQIARHRGMKKAIVALARRLAVILHRIWVDGTVFRWTREVVTA

SEQ ID NO: 475021 - protein, 365 aa, unidentified
MKKSNKKMMVVEKPSTTVGLDIGDRLSHYCMLNAEGEVMEEGRIRTEEGALRKQFEGEVRMRIAMECGTHSPWISRLLERFGHEVIVANARKLKAITTSESKNDRNDAEKLARFAHWDLRLLSPLRHRSVERQQDLTLIYARKTLVRARTMIINSARGLVKSAGGRLPNCSSKAFEKLVKPALPPALIECVSPMLEQITALNLQIARMDKQIEAFAGRYSEIPRLRTAHGVGPLVAATYVLTLDQPHAITNSRQVGAYLGLRPRQCQSGDHDPQRRITKTGNPYLRVLLVQSAHHVLGRFGPDSALRRWGLKLSATGGKRGKKRAIVAVARKLAVILHRMWRTGESFQPFPIAPIHTSLQPVAST

SEQ ID NO: 475022 - protein, 347 aa, unidentified
MRFYTDQHRYYCGIDLHARTMYACVLDGSGEIVAQRNLRTDPAMFLEFLAPFRPDVVVAVECIFTWYWLADLCADEGISFVLGHALYMKAIHGGKAKNDRIDAHKIATLLRGGMLPRAYVYPREMRATRDLLRRRLYLTRLRGLLLAHIQNTNHQYNLPPIPAKLHYPSNRVGFLARFEDPSVHKNMEADMTLIAGLERTIRDLELYIARQAKRQQSDLFHRLRSIPGIGKILALTILYEVQDIRRFERVQEFASYCRLIRCAKESAGKRKGSSGKKIGNVHLKWAFSEAAALFLRANPAGQRYLAKLTKKHGKGKALSILAHKIGRTAYYIMTHKRNFDMNKFLAA

SEQ ID NO: 475023 - protein, 458 aa, unidentified
MTKRKQESPKEATPLEVLKQLNLNAAGLDIGAEEIYVCVPVDRDEQPVRVFPTFTADLYALADWLAACRIDTVAMESTGVYWIPAYEILDARGFQLHLVNARQLKNVPGRKTDVLDCQWIQQLHTYGLLRGSFRPPEDICALRALARHRDNLIRYRSNHIQHMQKALQLMNLKLTQVVSDITGVTGMRIIRAIVAGERNPQTLACMRQAGCAKSQAEIAKALHGNYKTEHLFVLKQALAQYDFYQQQIEECDAEMEAMYAALPPSEPGNLASPPPKPTQRKPRKNQAHFDLATSLYRMVGVDLTAIDGLDALTVQTILTEIGTDMSCWPTVKHFSSWLCLSPYNDISGGKVLRSRTKKTKNRANTAFRLAAQSLSRSQSALGAFYRRMRAKHGPAKANMATAHRLARIVYHMLKHRDAYADPGEAAYIQQHRDRTIRNLKRRANLLGLQLVPAHVTVS

SEQ ID NO: 475024 - protein, 411 aa, unidentified
MIKENYIYVGIDLHKETHTAVMIDCYNQKLGEITFPNRPADFPKLVAKVKKCNTDGKTIVFGLENAYGYGRALAVWLIDKGYLVKDVNTAISHRQAKHRGAMYRKSDSDDAKAIALATLNMLDKLPDACPNDAYWSLGQLVHRRDNIMKQRTRLVNQLHEQLCIAYPSYKQFFNDISRPTALYFWEHYPSRKYLKGKSVEDLRAELVPVSHNKCSTRTCEKILDAIAGDKVKNNAYQDARDMVTLSIVSDLQHYDKQLAEVDKMLEQMYKMLGCTLTTIPGVNVITAVKILAEIGDIKRFSNANKLAQFAGIAPLHLSSSGKGKDLATKQGNRRLQATIYFLAIQMVQISSKGTPRNPVVRAYYEKRKAEGKTSQQALICISRRLISIIYGMLKNGTEYRMPVMENTGETV

SEQ ID NO: 475025 - protein, 374 aa, unidentified
MDVHSTSYTLCAMEPVLGGEDRIFANIQVTSDYRNVVQFIDKLKEKLGSSDSYSIECGYEAGCLGYSLYHQLTKAGVKCTILAPTTMLTQQGKRVKTDKRDAVMIAQCLSYGGYHAVHVPADKDVSVKEYLRMRDDHKVALKKIKQQINAFCLRQGYFYAGNKWTIKHLNWLKKLVLSDLYRETLNEYLTSYEEQTAKIERFDKRIEELAEDSDYQENVKKLGCLLGIKTHTALSLIVETGDFKRFRKGNTYAAFLGLAPGESSSGEKINRTGITKAGNSHLRTLLIEAARGMCRGRIGYKSKVLRSRQDGNPTEVIAYADRGNTRMRSKYYRMIRHGKKDNVAVAAVARELACFIWGLMTNNITPKEEGTKAA

SEQ ID NO: 475026 - protein, 338 aa, unidentified
MKLYGAIDLHSTNNVTVVINEQDQVVYQKRLPNDLPLIAQQLSSYRKSLQGIVVESTYNWYWLVDGLMEKGYRLHLANTAAIQQYNGLKYTDDHSDARWLAHLLRLGVLPEGYIYPKQERAVRDLLRKRGQLVHQRTANLLSIQSLISRTTGNSINAQYIRALNIQSVDGVLPNPDHVLALKANLAVMNSADAQIEILEKAVQDRVKLRPQFRFLKTVPGIGPILALTIMLETGEMERFASVGNYASYCRCVGSKKISNGKRKGTGNTKNGNKYLAWAFIEAANFAIRFNAKIKSFYQKKKSKSHAIVAIKAVAHKLCRACYYIIKDQAPFHIAKAFA

SEQ ID NO: 475027 - protein, 339 aa, unidentified
MHNITTIGLDLAKRVFQVHGINHEGQAVLRKKLRRGHVLKFFRTLPPCLVGMEACGSAHYWARELSAQGHQVRLIPPQYVRPFLKTNKHDAADAEAIAEALVRPTMRFAPIKSADQQAVLMLHRSRELLVKQRTMLINAVRGHCSELGVTASQGASRVTDLIVMIEDSDDARLPVFAREALGVLIAQLQTVKEAIRKLESKLQAWHRSQQASQRLTTIPGVGVITATALVATIGDGSQFTSGRHLSAWLGLVPRQHSSGGKSRLGRISKRGDGYLRRLLVHGSRAVLRWQRGAPKQPSPWIGELLTRRPTNVVLVAMANKTARTVWAMMRDQQAFKAVA

SEQ ID NO: 475028 - protein, 387 aa, unidentified
MAVTNDLKKSLVALEQDSTLIAVIELSQSSWLVGGIVPGVEREPLKKLDADPEEVLKLLHRWRDEATKAGRRVTRITVAFEAGRDGLWLARWLRGRDIEAYVIHPTSVAVSREHRRAKTDRIDVRLLKRTFVGWLRGEPEHCRMVAIGTLAAEDARRPNREHQRLVGERTSLVNQLKGALARLGIRGFKATLRKAPERLAAVRTPEGEPIPPNSQDELRRTMVRLGLIKAQIKQIETTRLERLEKAPNDGPHAMVRLLARVLGLGIETADTLVHEVLSRELRDGRAVARYAGLTGSPDESGKRRREKGLARAGNARVRRSMIQLAWRFLMFQKDSALARWYRARTEAGNKDARKTMIVALARKLLIALWRYVTTGVAPEGVVLRASA

SEQ ID NO: 475029 - protein, 394 aa, unidentified
MKLVGIDVGKNSHHFCVMDKETGEFNVTPSSFPNNKEGFDFLINSLKPYSKKSILIGMEDTGHYHVALLKFLLSNGYTVALINPKTTDLTRKMEGGITKNDKLDTITICDVLDTPERKKQYRITKVDRFDLYEQRQLTRHHHNLKEELNVYCNRLQKSIDLVFPEFNTLFSSKYGIVYMNLLKTFGSSEAIASTDIRTIRKCFEIKGRGNRISLTPEKLKECAKNSIGISSEVETIQIKHLVSQITLIKEQIAEIDKKIEEFSITNNSPILSIPGISHFSGTSILAELGDIGNYSKPSQIIKFAGVAPYHYESSQYNAQHTAITKKGSKYLRKTLYQIILPVINNNPVFKKYYLLKISQGKGHRCAQGHCIRKLLRIIYHLLETGQSFDSALLR

SEQ ID NO: 475030 - protein, 350 aa, unidentified
MNVNHYIGFDVHKKSVSYCVKLADGKIVEEGKLRAAHDVLRRWAGERPEPWHGAMEATLFSGWIYDTLQPFAAELQMGHPALMKAIAASKKKNDKLDARKIADMVRCNLLPACYVAPVEIRELRRMLRYRNLVVGQATRMKNKMSGLLMEVGAEYNKERLHGKQYFTQLLDTVAEVPDSVKDLLRLSRGAMEIFEATQQQLLIRLHKDPLLSRRVILLESIRGVGEVTALTWALEVGDPHRFSSVAHAVSYCGLTSALVSSADKQQRGPLSKQRNAHLQTVLVEAAKLAPRWNPQLAALHTRELARGNRNRATLAVARKLVAYLLAVDKSGQPFAVRSAPSAETEATKVA

SEQ ID NO: 475031 - protein, 401 aa, unidentified
MHRDTVVACCCQVKQTDRSIELTKQTIATTAIGLGELAPRLSDSGVETVAMEATGVYWKPVYYCLEGLFDELWLCNAQHVKNVPGRKTDLSDAEWLADVAAHGMVRPSFVPPAVIRELRDVTRYRKTQVEARVKEIQRLEKTLQDASIKLSSVASKVWSQSSRAMIEAMIEGERDPSVLAQMAKSRLRAKIPQLEEAFSGRFDSHHALVCRQVIEHIDFLDRSIATLTADVTERLCPFESAVTILCSIPGVSRITAEVMIAEMGVDMSRFPTSGHLCAWAGVAPASHESAGKRHPVGTRKGSTWLQRALIEAARGASRTKGTYLSAQYSRLARRRGSNKATIAVAHSILDVSWHLLTNGALYDDPGAQFFQLRHNPAVEAKRLQRRIEDLGFDVSIAPAAA

SEQ ID NO: 475032 - protein, 399 aa, unidentified
MADGKAERTCRTYDTTTDGLKSLLAWLTEQRCTHVAMEATGVYWKPVWNILSDGTFELLVANAAHIKNVPGRKTDVNDATWIANLLACGLIKGSFVPCEEIQQLRTLLRSRKQLTREQTSHTQRIQKTLEEANIKLDTVISEILGVSGRRMIEAMIAGVTSPLKLAALADRRIKATPKVLYDALHGRLTGHHRFLLQLYLDQYDAAAEGILRIDQEVDAAIEKMDQAVPAGQASFRSLIGLLYTIPGVSGLSATTILAEIGTDMSRFPDAGHLLAWAGMCPSQNESAGKRKSSRLRKGAPWLKTMLVQCAWAAKRKKDSYYRALFHRIRGKRGQKVAACAVAASLLTAIYHMLKDGTTHQDLGINHFEERSVEVRARRLVGQLSKLGFQVQLQPLATAA

SEQ ID NO: 475033 - protein, 414 aa, unidentified
MDIVHSHCAGLDVHKKTVVAAIIVPDPKGGLHKEMRSFGTMTIELLALSDWLMEHGVTHVAMESTGEYWKPVFNILENNFEVLLVNAQHIKAVPGHKTDVKDSEWIAELLRHGLLRASFVPPLGQRELRELTRYRSTFVKERATLVNRLQKVLESANIKLASVATDVMGVSGRAMLEALIEGNASPEEMAELAKGRLREKRELLAKALQGRVKSHHRFVLTELLCQIDGLNETVVRFDEQIQEYCRPFEEVVELLDTIPGVARETAEIIVAEIGTDMSRFPSADHLASWAGVASGNNESAGKRRTGKTTQGNHALGVALNHAANAASHTKNTYLSAQYHRLASRRGKKRSIVALEHSILIIAYHIIQRKEPYRELGGDYFDRRRPEATTQRLVKRLEHLGFQVSLQQMPASVAI

SEQ ID NO: 475034 - protein, 351 aa, unidentified
MDFFAGVDTHRDTHSVAVVNELGEVLDTFTISADQVGYAEAIERARKFPGLVWGLEGTGSYGRPFADTLMRDGHVVFEVPGTITKRHRRRLRRRGKSDPQDAHAIAEAVLRERETLPRHLEVDEEEATRLLYERRDRNVRERTAKINRIRALSLRIELDLPSDLTLASALDAVEAKVRKSPIQGYAEYEVVDEIRDLISDLRAIAHRISELEARMRPFVERLAPVLLELRGCSVISAAGLIGHVGSTNNYRSPDAFAAHAGTAPVECSSGKYQSVRLNTGGNRQLNRCLHNIANSQMHAAGHAGKVYYDRKRAEGKTHREAMRCLKRRLAAVVFRTLRSAQSAREIISRAA

SEQ ID NO: 475035 - protein, 306 aa, unidentified
MVTGLKHQKEKRSMEHFAGLDVSVKETSVCVVDDTGRIVREVKVASEPEALLAALTNGAYRFKRIGLEAGPLSQWLFSGLAEAGLPVICVETRHMRAVLKAQLNKTDRNDARGIAQMMRVALYRPVHVKTLRSQKLRMLLTHRKLLQSKAIAIDNDLRGTLRNFGLKVGMVGTVKFEARIKELVENLPDLAALVEPLLVVRRVLREQLGLLHRRLLAIVKDDEVCRRLMTVPGVGPVVALTYRATVDVPARFRTSKAVGAVFGLTPSTHQSGETEYTGAISKCGDELMRMMLHEAAQIMLVRSTRN

SEQ ID NO: 475036 - protein, 381 aa, unidentified
MLYVGIDVAKNKHDVTVIDNTGKMVLNPITITNRKQGFELLHNTLKQLNQNCLIAMEDTGHYALNLLTFLHQNNYQIYTYNPLLIKEFTKSLSLRKTKTDKKDARTIALKLLSDPNRALFMHDNRQEELKIMTRHMNRLKKHQSDWKVQYTKCLDIIFPELHQVVTKHSDYVYELLKRFPSPEKMVTAGFDKLIEIKRLTAKHALDILELAPNSIGTTSLAREFELIEIIENIQHYEKLIKQTEKKIDELMAELNSVITTVPGISNRLGSVILAEIRNINTFNHSAQLQAFAGLEPAIYQSGQLDAQEKMVKRGSSHLRWALIQAAIKVARYSPAFKAYFKTKLAQGKHYNVAISHVAKKLIRVLFYLLKNNETFDEDKLR

SEQ ID NO: 475037 - protein, 321 aa, unidentified
MYKHNILFIGLDTHKVSTEVAHVEDHRGVKPVHCGKIKTTKAAITKLARQYQSKYPQATLHFVYEAGPCGYWIYRLLTSLGHCCYVVAPSLIPKKPGERVKTDKRDALKLAKLIKDEELTPIYVPESEDEAIRDLSRARETAMKDLKDAKYQLKALFLRNNITCKVNDNWSLQHLRWLTELILPHPSQQIVLQEMIQIITERIQREKRLANELFHQVKSWRYYPVVKALQAIRGVRLLIATGLVAELGDLRRFDHPRKLMAYLGLVSKEHSSGDKRRLGSITKCGNSRARRLLVQGAHTYKHNAKISTELKTTRRFTQGNK

SEQ ID NO: 475038 - protein, 352 aa, unidentified
MTYYIGCDAHKHFSLFAVLDDDGHLHERIRINHAPGAIKNYLSQFPEGTTVALESVGNWYWIVDEIEASGCVPKMAHAAKAKVMMGNVNKTDKLDAKGLATLERLGSLPTVWLPPGDLRDERDLPRTRMAITKIRTALKNRIHSTLAKYNLSLDTSSDIFAPKWRNQLLHAFQALPPETKRCMEQELELLDYVHTHIQRLEERILERIELSETIQLVKTLPGVAKILSIVIEREIGSIYRLPSCPNFTSYAGTTSKVKGSAGKYRYGRMRKQSNNYLKWALIDAANVVVRQRNHPNWRNKHVSRLYERTQQRKGHFVAVGAATRYLSDAAYWVLKKGETCQEPEPKTVSPRH

SEQ ID NO: 475039 - protein, 351 aa, unidentified
MNTQITAHSKLYIGIDIHKRSWKVHCSTDLFSGKSFSMEPEPEQLRNYVEKHFSDHEVSVAYEAGCCGYYAHRCFSGYGWRSLVVNPADIHRKGKEKHTKTDRIDAQLISRELKDGRLESIHVPSIEREELRSLFRRRNDLVKDFRRIKSYIKMQLLYFGIKEPVHFDNDHWSHNYRRWLDDMVFKHPTAKATLDSRMRFFRFVDKELRDVSTQIRGYCRKHHKQDYYLLRSIPGIGGIVACGIISELGDLRRFNSVKHLAGYVGLAPGVHQSGGNYKTMGITMRAHRLIRSYFVEASWQAIRADPVMQAYYRKHTGKNVKSVIIKVARKLLSRTLAVIKTETPYTIGVLE

SEQ ID NO: 475040 - protein, 303 aa, unidentified
MLYLGIDQHKSQLTVNVRGEDGEVVLKRQVSTRWEKVRAFFADLAEKARPEGGLMAIVEVCGMNAWLLEMLKSYGCVEIVVTQPTSRSKQKTDRRDAGELSHGLWVHRQQLVGGKHPSGMRRIEPATPQEADDRQLTALRAKLTKKRTAVLNGIHKILRKHNREQECPTKVFQTQKVRRWLAEMELPGVDRMEMNLLLPQWAMFDEQLEVVEAKIAERAAADEQAKLLESMPGMGHYSAVAIASRIGKIERFKRPGSLANYFGLTPGCRNSGERTEGCVFRGASPGPPKDLSHASSNPSSTLG

SEQ ID NO: 475041 - protein, 343 aa, unidentified
MNEYDGKQFVGIDLHRRHSVIVRQTSTGERLSAVRIVNDPDSLALQLEEAGEHPDVVLEATYGWYWAVDALQAAGATVHLAHPLGVKGFRYRRVKNDVRDAGDLADLLRMNRLPEAWIAPPPTRELRELVRYRAKLVALRSGLKAQAHAVLAKAGVLIAVSDLFGVEGRQRLARVPLGAAYAQRMSSLLELIDVLDTHERRFAEQIAAKLYDDRGYGAIQQLPGVGPVLGAVFVAEIGDVHRFADPSHLCSWAGLTPQHRESDTVVRRGHITKQGSKLVRWAAVEAIQRQPAGTKISVDRKRIEARRGKNIAKVAAARKLLTLVYYGLRDGHIRALTHQPAAA

SEQ ID NO: 475042 - protein, 369 aa, unidentified
MKRTVYVGMDVHADTIAVAVADEGRDGEIRFYGTIRNTGDSLLRLTKRLSGAGSAPVFCYEAGPCGYGIHRLLQKLGFDCAVVAPAMIPRKAGDKVKTDRRDAEMLARLWRSGELTPIWTPDEEHEAMRDLIRTRKQAIDALRVAKQQLLSFLLRHGLRYDRPSRWTKSHWRWINELRKFRYPHQQLAFEELKRAIRQIEERTTSLDQIITDTIPTWHLGPVVDALRALRGVNTTIAVTLVAEIGDINRFSNPRQLMAWLGLVPSEHSSGNTIRRGRITRTGNALARTMMVEASWSYRHPARERHPYLKRSEHLPQEIRDIGWKAQVRLCKRYRDLSRKGKPQPRVLTAIARELAGFIWDIARKVPIPA

SEQ ID NO: 475043 - protein, 341 aa, unidentified
MKLRAIGIDLAKNVFQACGVNEHMKPQFNKRLKRHELLDFMRQQEPTMVVMEACYSSHYWGREMTKLGHNVKLIPAQHVTPFVRGNKNDPNDSFAITEASQRPYIRFVPVKTEFQQEILCLHRIRERLIKNKGALSNQARGLLSEFGVVFPCGHKALLNGLNGVIDNAQYSHRLQNMMIDMLSEYETTLKRLKGIEQQLGIFVEGSESGRILLSIPGIGIINASALLASIDKGQAFNNPKEFAVWLGLTPKQHASGNINKMGGITKRGDRYLRKQLVHGARSVVSRAAKKTDPLSLWATKLRVTKPFNKVAVAMAHRLARLIWILLTRQEHYSATPTGVSA

SEQ ID NO: 475044 - protein, 380 aa, unidentified
MNTTTVGIDLAKSIFAVCEGDSRGHGSRSSILKSGEFLKWLRTLPTGTVVAMEACSSAHSWGRTMQALGLEPRLIAAEFVRPYRKNQRIKNDTRDAEAVLTALHAPGMRFVTIKTEDQQQRLAWHRLREGWKAERTALFNRIRGLLTEFGIVVELGAAKIRRKLAELESDAAYPQSIQLMAQSVRAQIGILDQRLAECERQIARQSKSDPAVARLRSRPGIGPLTADAIVATVGNARQFKNGRQFAASLGMTPRQHGSGGKTHLGAITRRGDSYLRCLLVQGARCVLQAALRLHKNKPDTLNRLQLWMITLNERVGYHKAAVAIANKHARQVWAMIARGEAYNAEAYKDWEAAHATVRPGDIQEASDYDLSTAALAAASV

SEQ ID NO: 475045 - protein, 402 aa, unidentified
MSACFAGLDWASRTHAVCVIDECGALCLQFEISHDASGLADLVRRLRGASVTTVAIERPSGLIVDALLEAGFAVVPIHPNVVKASRPRYRSHGGKSDASDAYLLADLLRTDGHRFKPLAPQSDDIRALRALVRGRDDLVATRVQLANQLRELLLSFWPGAVAVFADIDSPIALAFIRRYPTPKSASRLGTKRIAAFCKQHAYSGRRSPEELLERLRQAPAVAVAPVEMDAKGKLALCLVQTLSRLTDQLRALTRRIEDHVCACDDGAILMSFPRAGRINAAQILAELGSVRERFASDEHLAAEAGIAPVTYQSGKSKAVTFRWACNHRLRRALTCLADNSRHASDWAASVYAKAKARGCDHPHAIRILARAWLRVIWRAWQDRKPYDPSLHGAAQALKTAGG

SEQ ID NO: 475046 - protein, 416 aa, unidentified
MEVIVSRCAGLDVHKNTVMACVRVPGPNGGRTSTVRQFRTFTAGLRQLRDWLVAEQVSQVVMEATGVCWKPVWHVLDATPGLELMLVNAHAVKNMPGRKTDVADAVWLAELGECGLLRPSFVPPPVIAQLRDLTRYRKKLIEERARETQRIQKLLEDAGIKLDSVVSDILGVSARQMLEALIAGVRDVAALAELARTRMRPKIPQLRQALEGRFGAHHALMLRMHLEHLDQLSVSIDRLDSEVDRVIRPFRSVLQRLITIPGVGRRTAEVIIAETGADMRRFRTAGHLASWAGMCPGNHESGGKRRSGRARKGNAALRAALCEAAWAASHARSGYLPAQYRHLLRTFGKKGQTRAVFAVGHSILVIAWHLMAHDRDYADLGGDHFTRATDAEARERYLVRQLEALGHKVTLEPAAA

SEQ ID NO: 475047 - protein, 342 aa, unidentified
MTQFNFFVGVDIASASFMACVGATPWKLTVKPEKFKNIEDGFASFLNWLKNNNLPPEKTVVCMEATGVYGEGLAYFLFASGYSIAVEPPLNIQRKFPANASKTDELDCQYIAEYACRYVDKLAFWKPRADILEKVKVLLTTRQHFSVQLTGHKNALIAVNRKKVSSELAKQVHQSMIEQINKHIKAIDQEIRRLIDEDPNFKQTFLLLMSVPGIGLQLASHLLIHMQESLDPKVLAAFIGICPIKHESGTSIYSAPTSRHYGPPVMRKLLYLGACSVRTHKKQFQQYFFRKVAEGKHKKVVLNNIENKILKIACAVVRSQKPYIPNYVSVNPLVFQKTLTLS

SEQ ID NO: 475048 - protein, 369 aa, unidentified
MTDLTLFIGLDVHKKTISVAIVEGSAGAAVRFYGTIANTPDSLRTLCRKLSRSGQQLHFCYEAGPCGYGVQRQLTRLGHRCDVVAPALIPRKAGDKVKTDRRDAMMLAQTLRAGQLTAVWVPDEAHEAMRDLVRLRAQAVRDLRKTRQQLLSFLLRHGLISPYGHWTKMHRRWLGELVFAHPAQHLAHEEMLQRIERAEALCDRLKAAILELVPQWSLAPVVEAIQALRGVSLIVASVIVAEVGNFGRFDSPRQLMAYLGLNPSEHSSGATIRRGAITKTGNTLARTCLVEAAWTYRFPARVTQIIRNRLQCLPEPIRNVAWKAQVRLSARYRRLAAAGKPAAKVVVAIARELVGFIWAIARMVEPKFA

SEQ ID NO: 475049 - protein, 342 aa, unidentified
MKFYCGIDLSARDCHVCIIDEQLEIMVQQKLRNDLPKIIKLLMPYQANLQIVVESTFNWYWLIDGLKAAGFEVVLAHTLGLYLITGAKVKTDRRDAYSLAKLLLVGAVPKAYIYPIETRPVRDLLRRRARLVQVRAGEYGSLRRLLLRQGILSSKQQEIKTASEAELKQWFEHPLVRLHASQELERIALYSEQIAELEKTILAQAKSERSYDLLLKLPGVGQTIALTILYEVGELTRFANVKVFSSYCRVVPGIAQSGNVSRRGRASKQGNHYLKAAFSQAAVHAVRCYPKVRRYYERQLKRHQGRGRKLICYNIIAHKLAQAAFHILKEQTEYREELLFGR

SEQ ID NO: 475050 - protein, 339 aa, unidentified
MQLYAAFDLHANNSLLGIIDGDGKRVFKKRLHNERELILEVLRPHQEHIVGIAVESTYNWYWMVDALMEEGYRVHLANPSEIQKYEGLKHADDNHDAFWLAQMLRLGILPEGYIYPKEERPVRDLLRKRGHLVKIRTSLILSLQNIITRNCGLRLNVNDVKRLRENRVSPLLEENDDLALAGMVSKETIDFLTHKIRKIERAVEGKIQLKKEYRYLLTLPGVGTVLALTIMLETGPISRFVKVGNYVSYCRKVSTQWTTNGKRKGKGNKKNGNRYLAWAFSEAAELARRYNSQARAYYNRKMQKTNFMVAHSALSHKLARAAYFIIRDQVVFEPEKLFR

SEQ ID NO: 475051 - protein, 347 aa, unidentified
MTIVGCDLHTRKQQVAVLHTDTGEVEEQELLHSDNAVEQFYSALPRPVTVGIESTGYALWFHELMQRLGHTLLVGEAAKIRAMVVRKTKTDRRDAQHLLDLLKHERFPTVWIPDPATRDLRALVTHRVRLVRIRTMVKNGLQAIALNRRLALGSKLWSQRGRAQLAALDLSPHTARRREDSLELLTWLETHIAGLDARIADAAHAHPGARLLLTHPGVGALTALTTVLVLGPAARFPGSKHVVSYVGLAPAVSASADTCHLGAITKQGSALLRWVLGQAAPLAARADDDLHRLYRTLLHRRGRPKARVAVARKLLVRLFIMVRDQIDYAEFRRRGRIARPDLHPSPA

SEQ ID NO: 475052 - protein, 350 aa, unidentified
MLIIGCDLHTRYQNVAMLDTQTGEVVERRLEHENGEARRFYAHLPTPARVGIEATGHTQWFERLLAELGHELWVGDAAQIRAQVVRKQKTDPRDAAHLLELLRTDRFPRLWIPSVTERDLRQLLKHRHKLVQMRTAVKNQLHALAMNQGLCRGRKLWSIRGQQELEKLRLGPWASRRRQALLELLHDLGARIGELDPVIEQQAQAHPQARRLMTHPGVGPVVALAFVLTLGPVERFRRSKQVVSYLGLNPREHSSGGRQRLGAISKQGNTMLRWLLVEAAHSAARHDAELHRAYYRLKFRRCGAVAKVAIARKLAVRLYGMLCRQANYAPPVRTPGSPVKTRVDASPSAL

SEQ ID NO: 475053 - protein, 511 aa, unidentified
MSRNRYAKVNTAGHIRGEQGLSFLKLTEGLAPKEIFVVPIEVAKKVHWTLVCDGSGRILQPDFDFNSLQEGLDAFVALLRTLIEAHHPRLILIGVEPTGIYHEPLLHYLNATFATELARQPGDPGLLVRLCYVSSDAVAANRSEKRLRHFKTDHVDLACIADLLLRGEGFPARLPDPTTLQLRVESTLVRHRERQMLHLRPLMTRLLDSIWPGLILHPDPRGKPHDAGSDLKPLFVDFWGSQKARALILACPNPYQVLRLGAPALRDHVKRHSGIKYWGIEVAHKAVAYAQRAPLPPEPAVYAQIPALLSHLALFNRYQADIQAAVSRVTVCLVDTPAQHIVDIPSGATPRLVARFMAYFGDVSYYAHAGQVWSKAGFTPIVYQSGGKFYNGQISKEGSPGLRAAISILARSLAYHCAYFGTTFMNACERGKSTAEAYVITAHQVVRVCFALLRDDLPFDPPTIDDYPAFEAAWVARKPAFRHWLRHRPAPSKRPIPKAGKRKRKRRHRRR

SEQ ID NO: 475054 - protein, 481 aa, unidentified
MGEKKSAPRGKSGHGGKRRGRGVQKTLQVVNPDAAGIDIGAESHYVSVPEDRSEEPVRQFGCYTPQLEEMAGWLIECGIKTVVMEATGVYWIPVFRVLESRGLEVLLVNPKHVKHVPGRKSDVADCQWLRQLHTFGLLRGAFVPPQDVAAMRTYWRQRRTLVEAASREILHMQKALTQMNLHLHVVLSDVTGVSGMKILRAIVAGEHDPVQLAGLAGTQVRASREEIAQALSGHYTGEHLFVLGQALELFDVFQAKIRDCDGQLAMHLSRFEGKAGAGAPPSNPKRSRRVSRRKNEPYFDLRAELWRLTGVDFNRIDGIDSLTAFTVLSETGFDVSAFATEHHYASWMGLCPNNSITGGRVKRRHTRRVINRAADALRIAAQSLWRSKSYLGAYYRRLAARMGAPKAITATAHKLACIMYRAVKYGQQYVDKGEQYLEEQHRKRNLKSLVHRAKDLGYMLVHSETGECLSLTNQPLTRCVS

SEQ ID NO: 475055 - protein, 355 aa, unidentified
MDNTKYIGMDVHTESISIAVRNGAGKIVMECVIETKASMILEFINGLRGDLQVTFEEGTWAAWLYDLLKPHVTELVVCDPRKNASMREGNQSDKIDARRLAELLRLNHLSPVYHGEHGLRSLKELVRSYLTITKDLARVMTRVKAIYRSWAIPCTGKQVYAPRHRAEWLGKISEPGVRRRAEFYYQQLDALRALRQEVRRDLLAESKKHQAWKRLCEIPSIGPIRAAVLLGILQTPHRFRSKRQLWTYSGFGIETQSSADHRSVNGQLQRAKKQICIRGLNRNCNHDLKNLFKGAAIVASSKPGPFQEFYTALLSKGIRPEMARLTLARKIATIALIVWKRGASFDAQHLKPQTA

SEQ ID NO: 475056 - protein, 319 aa, unidentified
MTQNDLVVVGIDVAKDKVDACIRTVTERRTFPTAASGRRSLIAWLRKHQVGKAVMEASGGYERVWAKALRQAGLEVRIVDPKRVRSFAESAGRLAKNDKIDAEMIAWFAETFSEAPSQVEDPAHEEIKALVKGRKSLIDLRARLEMQKEHEVPAVVGKAHARLLKKLAGEIAAIETAIGAKIKATPAFAVRAEIIQSVPGFAEATALTLLAGLPELGQVSNEVAAALVGVAPYDDDSGKRHGQRCIKGGRRWVRNALYMPCVGAATLNNPVFKAFYQRLIAKGKEPKAALIACMRKLIVILNTMIARGEKWDPKRYQVA

SEQ ID NO: 475057 - protein, 349 aa, unidentified
MRTKPKPNATAYGIDIGKKVFHVVSLDADGRPLQRAKFSRETLMSFFEAADSALIGMEACAGSQWLARKLAAFGHDAKIIPAKFVKPYVKSNKSDTIDAEAIAEAVTRPTMRFVQVRSEAQVDLQALHRIRDRLIRNRTGLMNQARAFCIEYGLAMRTGAGGFHADIRRHLADSENDLTGTMRALLTDLLDDLAHIEKRVAELTKEIEAIAHSNETVRRLLTIPGIGALGATALVAAAGDGRQFRKARDMAAWLGLVPAEHSSGGKQTLLGISKRGNGYVRRLIIHGARSCFLHLHRETHALGRWLSGLEERTHRNKAVVALANKLTRIAWAILTRPGENYLRTKGAAA

SEQ ID NO: 475058 - protein, 326 aa, unidentified
MEHELHYIGIDTAKEKLDVDVLRPDGRHRTKKFANTTKGHDELVSWLKGHKIDHAHICIEATGTYMEPVAECLYDAGYIVSVINPALGKAFAQSEGLRNKTDTVDARMLAEFCRQKRPAAWEAPHPLERALRALVVRHQALTDMHTQELNRTETAREVQRPSIDAHLLWLEAELKRLEKQIKDLTHDDPDMKHRRKLLESIPGIGEKTSAVLLAYIGLKDRFAHARQFAAFAGLTPRRYESGSSVRGASRMSKAGHVSLRRALYMPAMVATSKTEWGRAFRDRLAANGKKGKVILGAMMRKLAQVAYGVLKSGVPFDASRHNPVAA

SEQ ID NO: 475059 - protein, 387 aa, unidentified
MNVKARRTKKQVNVENWAINLLPKEELSKKIEVVEKELRSYTWRDLETNGKFAKNDKLSFITDDMLIVGCDIGSENHYIRAIDVRGRELSRGAFEFSNTSEGFENAKAWVLALAAKHDKKQIVLGLEPTGHYWFALAAWMISNGISVVQVNPYAVKQSKEIENNSQLKDDRKDPKLIANLVKDGNYGMPYLPEKVYADMRRLSMFRDQLTEDRIRNINRLHRELKIYFLEYMDAFGKIDGAFTLEILKVSAIPSDITALGAEGMKNIWHNAKLRGRGYSRANEIVSYAEKSVGLTDGTDAGREAVKWYAEQILRLDEQLAEIESALHEKCREIPYAENILAINGVGENILAGILAEMGDISRFDDVKEIQKLSGMGLVACSSGKHKG

SEQ ID NO: 475060 - protein, 449 aa, unidentified
MSRPQVIDDQEHERIYERVAAIDVAKDTGMVCTRTPHPSRPGSQRATVWTVKARMGTVRALGRQLRKDGIEVVTLESTSDYWRIWFFVLEACGLAVQLVSAAQAKNLPGRPKTDKLDAMWLARLTEMGLLRASFVPPRAIRDLRDYTRARARLIRERTRCWQRLEKLLEGALIKLSSVASKLTTLSAQDMIKAMIAGQRDPEALAGLARRRMKAKHDDLVEALDGMFDDHHGELAALLLDQIAALDAKIAQLGARAAELTAAMPAAWGIDPDGATGPAAGTGPDAPVLNAVDRLAEIPGLSPDLARTIIAETGLDMTRFPTAAHLVSWAGLCPSARQSGPRTRTGKKGQGDTWLRGALGQAANNAARTATFLGERYGRIARRRGKAKAQVAVARSILVIIWHLLADPAAQFTDLGPGYYQARTDTDRKIRNHIQQIQALGFTVTITKAG

SEQ ID NO: 475061 - protein, 398 aa, unidentified
MTESSDYESVQVFIGVDVGKDTHHAVAINRSGKRLFDKALPNDENKLRSLISDLKQHGQILLVVDQSATIGALPVAVARSEGVLVGYLPGLAMRRIADLHAGEAKTDARDAAIIAEAARTLPHALRTLKLADEQIAELSMLCGFDDNLAAQTTQASNRIRGLLTQIHPALERVLGPRLEHPAVLDLLQRYPSPEKLASLGEKKLAAQLCKLAPRLGKRLAADIAQALAEQTVVVPGTNAAAVVLPRLALQLITLRKQRDEVALEVEQRVLAHPLYPVLTSMPGVGVRTAARLLTEVACRAFASAAHLAAYAGLAPVTRRSGSSIRGEHPSRRGNKALKRALFLSAFAALRDPLSRAYYTRKMSQGKRHNQALIALARRRCDVLFAMMRDGTFYTPQGS

SEQ ID NO: 475062 - protein, 338 aa, unidentified
MNITTLAIDIAKSVFHLYAVNKAGRLVKKKMLKRSFLLTHVAKMDPCTIAIEACGSANYWAREFNKLGHKTVLIAPQFVAPYRRGNKNDYNDAQAIAEAAQRPDMRFVPIKSIEQQDVQILHRIRERLVKQRTALTNQTRGMLAEYGIIMGKGRKAFREAMPLILEDGKNELTVISRVLFCQLKDEFKEIEDKLVEYDKMIIQENKTNTVCQRLHGILGVGPITATALYAAVGDGKVFKNGRHFSAWCGLVPKQHSTGGKSNLLGISKRGNTYLRTLFIHGGRSVLRHCTNKTDKFSLWAKALEERSGFNKACVAIANKLARISWVIMAREEEFKPSL

SEQ ID NO: 475063 - protein, 346 aa, unidentified
MRIIGCDFHPSWQQVAVLDSETGEVSERKLVNGDGEAERFYRTLPVPSLVGVEACGNSQWFIELLPQLGHEVWVGDAAQIRASYVRKQKTDKRDAAHILKLLMEGRFPRLWMPSAEQRDLRQLLIHRHKLVEIRTRVKNGLQHLMLNRGVQKKHKLWTEAGQKALRELPLEGWAGRRRADLLGLLKSLDGQICELDQAAQRAAEEHAQARLLMTQPGVGPITALAFAVTIGDVTRFPRGKQVASYLGLIPREHSSGGRQQLGAISKQGNRFVRMLLVEAAHSVLRLDEGFRKQYKQRCHRMDKGVAKVAAARRLAVRLYWMLRTNTAYPEIVRIESSPRVPLIGAS

SEQ ID NO: 475064 - protein, 392 aa, unidentified
MEAGTSQPHSPTAIRTDLAAIFVSLELSRSTWLITSLSPGNGEKMSKHSVVGGDVTALLGRFTQLQEKVRSRTGNQVPIVSIQEAGLDGFWIDRVLKANGIESYVVDPASIATSRRRRRAKTDKLDGEALVRALLAFKRGEPRVCAMVNAPSPEEEDRRRLCRERKVLIAERVKHVNRIKGLLFGQGISGYEPLRKNRRKQLDELHTGDGRPLPTHLKTQIGRELDRLELLLEQITAVENERDTLLAAQKNSVAATLIPTGAMLCEVKGIGLEFAAVLWTEGLFRHFDNRRQVAAYAGLAPTSWQSGTIDHEQGVSKAGNPRLRTTMIQLSWLWLRHQPQSALSQWFTARVQSSGGRAKKSAIVALARKLLVALWKYVIAGVVIEGAVLKTA

SEQ ID NO: 475065 - protein, 338 aa, unidentified
MALYCGIDLHSNNSYVAVRTKEGEDVLCRRLRNDLATILQSLEPYRGELEAIAVESTYNWYWLVDGLIAAGYDVRLVNTTKAADYSGMKYTDDRHDARWIAHLLALGILPEGYIMPPQERSLRDLVRRRSMLVEKRTSLLLSVGTTVTRSTGIKVPTDEIVDLSIADLRRLVGEELVTESIALVLPVIRVLSQQIKAIEKKILAHGKLRPEFALLKTAPGIGDVLALTVMCETGDIRRFKDVGNYASYCRSVKCERWSNLKRKGSGNRKNGNKYLSWAYSEAAHHWRRLDPRAKLWFEHKRKRSHVMVANRALANKMARACYFVLRDQVPFDPSRMFH

SEQ ID NO: 475066 - protein, 413 aa, unidentified
MNKRWDKACGADVHKRFIEATILISDGTKKHKRFLTNIEDLLAFKDWLIGEDCPVVAIESTGIYWIPNNTVLEGFVKVLVANAYKIKNIPGRKTDLKDSEWIAELCLNGMIEPSRIFPKEDRELRDLTRAREAFVNSRTQVKNRIHAVLDTANIKLSSVFTDLFGKSGIELVKGLTSGQALDSIISNTRNKWIKERAEEIQQAVKGTLGTTQAFVIRECLEVIRTIDSRIKNIDAEISSRMSAKDDDLKIAMSIPGIGFVSGSTILAEVGNFNDFKTPDKLAAWTGIVSSVYQSANKLSLGRITKRGSKHLRRILVEVANAVIKVKGRNKLKSFFLRVKARQGFKKAIVALARKILCILHHLLTNRELYTEAGEAQVKKSKIPKENGSVTMTADEMIKILSEAGYVVSKPVLG

SEQ ID NO: 475067 - protein, 427 aa, unidentified
MVAVMIGIDPHKASHTAVAIDPAEVPLGQLRVRACAAQAERLLGWAQAWPQRTWAVEGAGGVGHLLAQQLAAAGERVLDVPPKLAARVRLLATGNINKNDPNDARSVAVAALRSAGVREACGDDHAAVLKVWSKRYRDLGRARTQMACRLHQVLCELIPGGVAGEITAGQAERILASITPAEAVQAARWELAAEFTEDLRGIDARIRQTRKTLAAAVAAAGTSLTGLFGVGPVIAAAVIGDVRHVSRFPDRDHFAACNGTAPIEVSSGGRKIYRLSRRGNRRLNHAIHMAAVTQIRYRHSPGRAYYDKKLAEGKTGKEALRCLKRQISDAIFACLQADARRAAAAPEKSPGGQPGNHSASRAAGSNPEHRRFGQATPGPATHPTTPTAAFPAPLPSRASGRTGQGPGAARPRSGARRASLTRPSASR

SEQ ID NO: 475068 - protein, 408 aa, unidentified
MPRYYLGVDWADRVHQLYGGDENGIKVMEMKVQENPEGLAELGRWLDQSRAEQVELWAAIEKPHGRIVDFLLDHGVAVYPINPKVLDRARDRFRMSQSKSDPFDAWVLSDFLRTDYGHLRPLRPNSEQAQELKLLTRDQQRMVRHKTRLLNQLKFTLKEYYPRPVEVFGDLESRVAVDFLKQYSTPTALSKLSRKQWNRFAEQHPHLGQARSTKLWEELKKPQLIIPDHVIRAKAQLLEVLLDQLEASLRAVEKYSDKVERFFASTPAARLVEKLPGGKSGTLLPTLWAELGDAPDRWQSFKHLQAEAGAVPVTKSSGKSRIVEFRFSCNKPLRYALYWFAFISINRSEWAKAFYRDQRARGHSHPQALRALGAKWLKIIFVMWRDHKPYDETHHLANIARQKLRQAA

SEQ ID NO: 475069 - protein, 369 aa, unidentified
MEERIKFFVGLDVHADSIEVAVAEAGRQPARCVGRIAHDVAKLLKLLKPYGDSQYVHVVYEAGPTGYGLQRALAKRGYRCQVIAPSLVPKRAGDRVKTDRRDGLRLAELSRAGELRAVWVPDPADEAIRDVARAREDAVKARMQARQQLKAFLLRHELRYPQRTSWTQTFYRWLATLSFQSDGAQTAFTEYWQAVTAADERVGRLSAALVRSIEDWRFEPVVKALLALRGIDHISAIGLVAEIGDLSRFAHPRQLMAYLGLVPSEHSSGERVVRGSITKTGNTHARRLLTEAAWSYRFRARIGYGAQRRAEGLPQVIRDWGWKAQLRLSGRFARLQARGVHTNKVCVAVARELAGFVWAIGRQAQLEQH

SEQ ID NO: 475070 - protein, 405 aa, unidentified
MERVIERCAGLDVHKKTVAACVRVRGTQHVRTFGTTATELLVLRDWLFAHEVTHVAMESTGVYWKPIFYVLEDAFTCVLANAAQIAQVPGRKTDVKDCMWIAQLLEHGLIRASFVPPAPIRELRDLTRYRRALIEERTREANRLHKVLEDAGIKLASVASDVLGVSGRAILAALIEGTTDPMVLAELARGVLRKKLPALRHALMGRFREHHAFLVTQILAHLDYLDELIATVCGQVEVAIAPFADELARLDTIPGINQRTAEAVIAEIGVDMTVFPSARHLASWAGLCPGNNESAGKHRPAHARKGNRWLRSALTEAALAGAVRSKKGALAARYRRVMPHRGHKKAVVAVAHAILVTAYHLLARQVTYTDPGADYYERRHADRVRQRAVQTLERQGYRVSLEPAA

SEQ ID NO: 475071 - protein, 451 aa, unidentified
MTKSKRRCPERDFTPTHPNAAAIDIGSRMHVAAVPPDRDPEPVRAFGTCTGDLQQLADWFERCGVRTVAMESTGVYWIPAYELLEQRGFEVVLVNARDAKHVPGRKTDVSDAQWLRRLHEYGLLRASFRPKGELAALRAYLRQRERLLDYSASHIQHMQKALMQMNVQLHHMVTDVTGETGMGIIRAVVAGERDPAVLATHRDRRCHASEEEIAAALAGNWREEHVFALGQALELYDAYHAKVVECDLRIEIVLRRLRDAAAKPTGRLPPARHRDKTANAPTFDARAALHAVLGVDLTQIHGLGPSLALKLIGECGTDLSAWPNAKHFTSWLCLAPANKISGGKVLSTRTRRSGSRAAALLRLAAVTVGRTQTALGAFYRRLSARVGKAKAVTATARKIATLFYNALRHGIDYADPGASYYEDRYRARVLANLRRRAKSLGYMLHETPASG

SEQ ID NO: 475072 - protein, 428 aa, unidentified
MRFIGLDVHRDFCEVAIAEDGKVRSAGRIRTTREELELFAQSLGADDAVALEVTGGAEAIARILRPHVARVVIANTKKLRSISEAKAKTDRIDAQALAELLASGYLAEVWSPDERTRALRRRIARRAQLVRQRTRAKNEIRAAGQRNLAARSEVSDLAGKKGRDFLAGLDLPADERQTVDGCLRQISFLDEELALIDSELSRAALASEEMRRLMTVPGVNIHTAATFMASVGDIARFENPRKLVSYLGLDPRVRQSGSEPARHGRISKEGASEARHMLCEAAWVVMRSPSPLRAFAERVRARRGSNVAIVALARKLVVLFWHLLSKEQDYAFERPSLTRQKLRRLELMAGAEQRPRGRRAGAAPVPTQAAMKAAERELAEQSERAYRRLVADWREAPKRGAGATQGRASSGRQSGKQRGRASVPDPAL

SEQ ID NO: 475073 - protein, 356 aa, unidentified
MNYVGIDYHKRYSVVTAVDDKGQVIRTQRLDNHHDPFQAFFGSLDGPSEAVLEATRTWGVLYDLLEDLEGVESVTLAHSLKVRAIAEAKIKTDKIDSHTLAQLLRVDLIPAAYIPGKETRSFKDMVRQRVFLVRMRTRLKNRIHVLLDRRHIPPPPVTDIFGKGGTAYLKKLALPGIDGEILRENLELLAVFDTLIKDAEHEIQRLIGNDPRVQLLRTIPGLGPILAAVVALEIDDVTRFGAAPKLAAYAGLVPSTYASGGKIFHGHLIHMSNKWLRWALVEAAWVAMRNSPYCRGYFESRKRHKGPHVAIIALARRLSEIVWHVLNEKRTYEERPSKIYKRTPSKETTPAALTIT

SEQ ID NO: 475074 - protein, 401 aa, unidentified
MNAVGIDVSKGKSMVCVMRPFGEVALEPFEVLHTAQSLNDLAGKLKALDGETRVVMEATGNYHKPVAFVLHDAGLFVSVVNPVLIHDYDNNSLRRVKTDRKDAVKIANYTLDKWTRLRQYLPEDDTRLALKNCYRQYQQAVAVRTMLKNNLISSLDLTFPDANKLFSSPAKSNGCEKWVDFIGDFWHSECVSSLSSDAFAKKYLKWCQKHGYNFTRSKSDTIYACAVNAASLPKSPTSKLLIQQQVAQLKAVSQSVAAFQQEMLRLSQQLPEFDTVMEMYGVGPSLGPQLMAEIGDVRRFSSKKSLIAFAGIEPQPNDSGKIVGNDSGISKVGSAVLRRTLFLIMTVILKTQPQDEPVFQFMNKKRSEGKPYKVYMMASANKFLRIYYARVKAVMDSKHSK

SEQ ID NO: 475075 - protein, 447 aa, unidentified
MNNFEQINLNAAGVDIGSGEHWVSVPPDRDPQSVRRFTCFTPDLQALADWLQQCGLETVAMESTGVYWIPLFQILETRGFEVKLVNAHYVKTVPGRKSDVLDCQWLQQLHTYGLLSGSFRPSDQVCVLRSYIRQRDNLIRSSCVHVQRMQKALTEMNLQLHKVISDITGVTGLAILRAIVAGERNPLALAELKHGRIRRSKTEIAAALTGDYRGEHVFVLQQELSLWEFYQAQIAACDRQIEQCLSEFADKVDLGQSPLAKPKRCQRNSGNAPDFDLRTHLYRISGVDFTRIDGLGVLTVQTILSEVGLDPKRFPTVKHFTSWLGLCPGSRITGGKVKSSQTRHVVNRAANAFRMGAQCLRNSPTALGAFYRRLRSRLGAPKAITATAHKLARLFYRLWTTGGEYTDPGANYYEQQYQQRMFKNLSKKAQALGFSLVPQPSMTEDVS

SEQ ID NO: 475076 - protein, 343 aa, unidentified
MQIHSVGIDLGKTTFHLVALSATGTVLLRKKFTQKQLITFTANLQTPLIGMEACSGAHFLGRTLREQGHDVRLIPAQFVKPFVKSNKNDFLDAEAIAEAVDRQNMRFVPIKTDDQLDLQALHRVRDRLIARRTSVINQLRAFLLERGMTFARTPGKLRLAMPDILENADANLTPRMRNLVGLLWSEWKELEQQIATINGEVEQIASSDAACVRLRQIPGIGPLIATAIVAAIGNGSAFRKGREFASWLGLVPRQHSTGGKARLLGISKRGNSYLRKILIHGARSAVVRMKRERAPLGAWLDALQTRAPLNVVVTATANKLARIAWAVLSTGNDYRAHPNSTAA

SEQ ID NO: 475077 - protein, 344 aa, unidentified
MKATTIGIDLAKNVFQIHGVNEFGKPVIKKQLKRDQMAAFFANTPPALIGMEACASAHHWARKLQSLGHTVKLMAPQFVKPYVKSNKNDANDAEAICEAVARPNMRFVPIKNVEQQAVLSLHRVRQGFVAARTAQANQIRGLLGEFGLVIPQGIAHIARRVPELIEDASNELPGAFRLLIERLMEHLKGLHRQVLDLEAQIEAWHRKSEASRKLEAIPGIGPITASALVASIGDANNFADGRQLAAWLGLVPRQHSSGGKQNLLGISKRGDSYLRTLLIHGARSAILAFTRKGNSTGWLHALLQRRNHNVAAVALANKNARIVWALLAQKRQYVAGYSRPVTMA

SEQ ID NO: 475078 - protein, 355 aa, unidentified
MTSVKYIGLDVHKESISICVRNSVGKVVMESVIETKASTILQFIDGLRGDLRVTFEEGTWAAWLYDLLKPRVSGVEVCNPRKNALLKDGSKSDRIDANKLSEQLYRNNIKSVYHGEHGLRTLKELARSYLTISKDLTRVMNRLKALYRGWAIPCAGKEVYAPRHRAEWLGKISESGVRRRAEFYYQQLDALRLLRQEVRRDLLREVKKHQAWKLLRQIPGIGPIRAAVLMAVMQTPHRFRTKRQLWTYSGLGLETHDSGEYRAVKGQLQRAKKQATVRGLNRDHNHDLKDIFKGAAMRASTAAGPLHDFYENLLAKGRKPTMARLTLARKIAAITLIVWKKEVRFDANYLKQQAA

SEQ ID NO: 475079 - protein, 444 aa, unidentified
MVCPGMILIREVADAPVIMGISKPAGLKSPCGEVKIVNPLFVGIDVSSRSNVAYLMKPDGSKHSSFSVQNNLGGAKMLSERIVSALSSMRLSDVVIGLEATSIYGNNLVYALREDGSLSRFQRKIHVLNPKQVKKFKEAYPDLPKNDFVDAFVIADHLRFGRIAKEVYMDDYRYQALRTLTRARFDVIQNLTREKQRFANYLFLKCSGIAQEKDIQNTSATTIALMEHFETVDDLANTDLDELTDFIAQAGRGRFVDPDATARAVRAAAKGSYRLPKTVNDTVNQAMSVSIASMRALKEQVKVLDKAIEQQLEIIPNTLTSIPGIGKVYSAGIIAEIGDIHRFDSQASVAKFAGLVWTQYQSGEFEAEHSRMIKSGNRYLRYYLLEAANSVRRCDSEFRRYYDLKFKEVNKYQHKRALALTARKLVRLVFRLLKDNRLYIPSEG

SEQ ID NO: 475080 - protein, 341 aa, unidentified
MCNLSKNYLFFVGIDNSKKKFDAGVLDDNGKKLGHKKFINGNDSFLDFLEWVCELTSGSSEVLFIMEHTGIYSRLLWFFLQDQDCCLWVESGFVINRASGIKKTKNDKVDSFSIAEYGLSKRYKVKLTPKYDENLTLLHDLLSNRKRVSDQLKAIETPLKEIKMYGNAKSNKILHDLNKLAITGLKATLKEIENAIDNLIKENETWVENINLATSVKGIGKLVVCWMLVYTRNFSEDMTARKFAALAGIAPFEHTSGTSINKGTHNSHFSHKFLKGLLHLSVMSAIQHNPNIKIYYKRKKEEGKKGFVAMNNVKNKLVQLVFAVVRSKQKYDVNFKHKLVA

SEQ ID NO: 475081 - protein, 433 aa, unidentified
MAEVPPDRRREAMAAFRMKRRDAMEVMFDRVAGLDVGKETVTVCLRTPGSKGRRHAETRTFKTMSGSLRVMRDWLVGAGVSIAAMESTSTYWKPAFYCLEEVMEVWLLNAAHMKAVPGRKSDVRDAEWIAQLLEHGLLAPSFVPPPEIRRLRMLTRYRVQLMGDRRRDIVRLELMLEDASIKLSSVASSLKTVSARAMLTAMINGETDPLRLADLAKGRMRRKIPDLAQALTGHFDANHARLARSMLRRLDLVEQAMAELDQVIVEACQPWARQIELLQTIPGVGEKVAQVIIAETGGDMSRFPTAAHLAAWAGLAPAMNESAGKQSPAGKRHGNKWLTAMLVEAAGSVGRMHGKNYLAAQHARLMKRRGMGRAQVAVAHSMLVSAYWMLKRDEPYHDLGADWHRRRNDQAHTRRLVAQLERLGHTVIIDPAA

SEQ ID NO: 475082 - protein, 289 aa, unidentified
MKILGCDLHAKQQTIAMVDRETGEFTEKTLSHEGNEVREFYAALEGPVVVGIEATGAMQWFLELLEELGIVCRVGHPAKIRAAETRKQKHDRRDARLMLELLIEDRFPEIWMPSIEERDLRTLLRDRHQWVRMRARLQHTLQAMALNHALRRGPALWSVAGQNALQALPLPPYSSQRRTELLRLYVQLQKRIQALDKEVDVQARQRPQARRRLTHPGVGAVTALATEVFLGDPNRFDTGNQVASYIGMIPCEHSSGKRQRLGKLSQEGTRCCATCGRKQRCMRSGKTRS

SEQ ID NO: 475083 - protein, 483 aa, unidentified
MKRKSIPSSRGPKTSRPSKSKKQAWKVVHPHAAGIDIGATEHYVAVPPDAVAAGESTVRSFGCFTQDLDALVEWLKACGVDTVAMESTGVYWIVPFQKLEAAGLEVVLVNAHTLKHVPGRKTDVQDCQWIQQLHTYGLLRASFRPDELTCRLRTLVRHRANTVSSGAEYILQMQKALTQMNVQLHHVVSHLTGETGLRILRAILNGQRDPLMLVELRDPQITRSTKEEMRKALVGDWRPELLFVLKQSLRGWEFCQEQMRECDGQIEQLLKEMPSAVAAKTPAARPQPDPLASTNPRPKGKQSRKRNDPEKDLAPELARICGVDLTAAHGLRLLTVLTLVSEIGVDVSKWRSAKAFVSWLGLCPNNKISGGRILSSRTRKVINRAANAMRMAAVGVGDTDTWLGSFHRRMRAKLGPAAATTATARKIGTVVYHLLKHQEPFIDRDLMAYEAKVYRHKLARIKKQAAALGYALVKTDEEKQLTE

SEQ ID NO: 475084 - protein, 433 aa, unidentified
MITVGIDISSTKFDVAIFDGEKFKHYVFKQSYDGFNEFFDLIKGIDDEYMIAMESTGTYHVALKQFLNKKGIQVLVLHPYSLKNFMKSFSHSKTDKIDSKNIAKAVYILKDYVIKSSEPEDLVLELRNLLRARESIAKNLGSLKTQLKNDLKKYMPELLNHFSKMDSPVLLKLLSRYPTLNSIMKHRRKATNLLASFKNWNKEKALKVINDLKISIGIRHDSSAILIKSKIILIKDYKEQLELLEEEIQRIANELIGNFKDNDSNEKNNKHKNERDYDNHESNNNQNRKDKNITENEYYQAYRAIMSIPDSGELVTPYTIISEIGDISRFKTKRHLVSYIGFDPTISQSGKYRKNKRISKKGNSHLRRIFSLWAERIIKSIPQYKAKYESLIERGKPRKVALTAITRKLIELVYTLWKNKTTFNYEYLNLKTA

SEQ ID NO: 475085 - protein, 355 aa, unidentified
MTITKYIGMDVHKESISIAVMNSAGKFVMECVIETKGSMLLQFIDGLRGDVHVTFEEGTWAAWLYDLLKPHVSEVVVCNPRKNALLKDGSKSDRIDARKLAELLRGNHLKPVYHGEQGLRTLKELARSYLNISKDVTRVMNRLKALYRSWGIACAGTKVYARRHRSEWLGRIGEAGVRQRAEHCYQQLDVLRLLHQQVRRDLLLESKKHQAWRLLGLIPGIGPIRAALLIALIQTPHRFRTKRQLWTYSGLGLETHDSAQYRVVEGQLQRSKKPVKLRGLNQDHNHDLKDIFKGAATRASSSSGPFHDFYEHLLAQGRKPTMARLTLARKIAAITLIVWKKEVRFDASYLKSQAA

SEQ ID NO: 475086 - protein, 312 aa, unidentified
MVEHCYGGIDVSKDRLDVQVLPQGRCFSVANTSAGWSQLVDRLRGLSIAALGIEPSGGYERGVIRALLAAGLSVRRINPNKLRQFARARGVLAKNDRLDARLIAEYVAIMPTRVVHRDPAAEQLAAVVTMRRQLSDEHVAVENQTAHIEDAMLRRLNKRRLARLEADILLLDNRMAEIVASNANLARRYDLLTSMRGVGPTLAFTLIALLPELGQMSRKQIAALVGLAPYDFDSGKLKGHRCIYGGRIPVRNVLYMAALSAARYNPALKTFHDRLAAANKKPKVVIVAVMRKMITTLNAMLRDNVAWQPKSA

SEQ ID NO: 475087 - protein, 376 aa, unidentified
MFLAVVWLETGESNIYPNQECPLRFTINQEGNSMTIMIGIDPHKATHTAVAVDGEENVLGEIKLGASNVQAQRLAEWAEPFGRRSWAVESANGLGYLVSQQLVASGETVFDVPPVLASRVRVLDTERSQKNDPNDARSVAIAALRSDRLARVRPDDHTRVLRLLAKRHRDMARLRNKHCTRLHALLCELEPGGISTEITVNKANQLLEIVEAANEVIRHRVIIARELVDDIARLDTTLKTSKQRIRTAVSASGTSLCEIRGIGPICAAIILGFTGDIGRFPTKGHYATYNATAPIEVSSANKTRHRLNLRGNRKLNHAIHIAAVTQLRYPGEGRDYYEKKKAEGKTTKEAIRALKRRISDVVYRHLVSDAQRTTTD

SEQ ID NO: 475088 - protein, 338 aa, unidentified
MNIVFLGIDLAKNVFQLCGLNQAGKPVYTKRTGRKELLQTLANIPACLIGIEASTGAFYWQREFEKLGHKVKVISPQYVKPFVRGQKNDGNDAQAIAVDLMQPTMQFVPPKSPEQQDIQALHRARQRIVNHRTATVCQIRGLLLDRGIPIGSAVSRARRAIPLILEDAENGLSSRMRRTIAELYDLFNDLGRRIHFFDKEIETVFRQSEACQRIAKVKGIGPETATAVVAAIGKGTEFKNGRHFAAWLGLVPRQHSSGDRQVLMNMTKKGDKHLRTLFIHGARAVVRVATNNNDGHMNQWVNQLKERRGFNKTTVAVANKNARIIWSMLRNDTGYQVV

SEQ ID NO: 475089 - protein, 347 aa, unidentified
MKHYAGIDVSLNSSSVCVVDESGKIVREVKVASEPVVLIHCIKSLGVSVERIGLEAGPLSQWLYGALRESGLPVELLETRHVKAALSVMPVKTDRNDARGLAQLMRLGWFRPVHCKSMAAQEVRALLTARKLVQSKLYDIEMSLRGILRGFGLKVGPTTSRSFAARINHLAAGHPSLEMVAQALLSTHAAALCAFKDLEKNVRQISRADARVRLLMSTPGVGPLVALTYVSAIDDPKRFTSSKRVGAHFGLTPKKYQSGEIDISGRISKIGDSSVRAVLYEAAHIILTRPIHGGALKSWAMRLAKRAGMKKAKVALARKLAVVLHRMWVSASTFDFEKASGCMRAAA

SEQ ID NO: 475090 - protein, 388 aa, unidentified
MKKNSKNETMKSKRETKKVAELEAGWTRLDEREANTLVIGIDLGDRTSAYCVRTLGQQIVKEATVATTATALLEAFQGVRRQRVVIETGTHSRWVAQLLELMGHEVIVANARKLKLISENNQKSDKVDARLLSKLGCMDVDWLHPVYQRSQAAHSDLLLARARQALVDARTALINHVRGSVKSFGSRVEKCASERFVEVARGALPEALKPALSGVLATLEELNEQIYGYDCQIEHLCNTKYREAAKCLLQVNGVGPVTTLTFVLTIENKDRFEQSRDVGPYLGLVPKKRQSGQRDPQLGISKEGDEMLRKLLVNCAHHILGAKGQDSDLRRWGLELVRAVERKGKKGARKLAAAAVARKLAVLLHRLWVTGAAYEPLRNRGAQQAPAA

SEQ ID NO: 475091 - protein, 462 aa, unidentified
MINRNTKQRRKKDAPLPTSLPVIRPRVAGSDVGSSQHWVCGPARPDGTPNVRVFGTTTAQLEELAAWLVEQHVESVAMESTYVYWIPIYELLESRGIEVLLVNARQLHHVPGRKTDFSDCQWLQLLHSCGLLRGSFRPGEAITRLRALQRQLANLVAEQTRCVQWMQKALDQMNVQVHRAVTDLTGVTGMAIVRAIVGGERDPARLAEHRDRRCRKSADEIARYLTGTWRDEHLFNLASALRLFDALDTEVASYDARLLAEVEALQPPDRQEQSVPAHPNPAKEKALTARGQQQARTALWRFAGVDLTRIDGLSTGATQTILTEVGPDLSAFPSEDHFVSWLRLCPRVPISGGKPLKKRRNSLGANRIAGVLRMAATSLQRSKTALGATFRRVARHKGGAVAVFATARQLARLIYRMLRYGHDYVDIGEQAYESQFHIRRLSAITETARALGYTLVPKVALS

SEQ ID NO: 475092 - protein, 392 aa, unidentified
MFNVGIDIAKYKHDFAIIDEQGLIVVPPKTISNSQEGFNDLLVALSSLDCSQEIKIGLEATGHYGSNLKAFLTKHGFNYVELNPLKVLRFHQQISLRRTKTDKVDCIVIAQFISTKNNKAKSYQQPLYHLEVLKSLTRLRETYVSQRSLILVKMTNVLDAVFPEFKVFFSNKLKSNTALYILKKYKTPLRISKWNEQDLIDVHNVSRRIPISKLDDLREIASNTVGISSSFLTKELLSLIRMYEALNNEVTAIEKEIINIMSTIDSPTASIPGIGLVSAATIISEFGDFAKFDSQTQCVAYAGLDAGISQSGTKCFKGKMVKRGSSHLRYVLMNVVKMVCIHNDTFKSYWMKKKVREHKNMRVADSHTAKKLIRLIYHLETNQIKFDPLLSR

SEQ ID NO: 475093 - protein, 389 aa, unidentified
MNSSRHTDTLAAVEEHCTMYVAFELGKAKWKLGIVVPGKTKLSRYVVDGGNVEAAWRLMTKAAAQAQKRLGRPVRLVSCYEAGYDGFWLHRWLVKRGVESRVLDPASLQVDRRARRAKTDRLDLEQLMQALIRHEGGDRRAYSVVRSPSVEHEDDRRPGRERERLVKERTAHPNRISGLLPGQGVRELAPRAKDFMARLTEVRSGDGHALPAKLVAEIRREAMRLELVEEQIAEIEAHCRIARQAAAPGTMAAKAAQLMELKSLGPVSSQTLVNEVFWRDFQNRRQVGSYFGLTGTPYDSGRSVREQGISKAGNARARTSAVELAWLWLRNQPSSALSRWFKERVGTQQGRVKRIAIVALARKLMVALWRFLTQGLMPEGAVLRAPARG

SEQ ID NO: 475094 - protein, 338 aa, unidentified
MTIVMGLDQHRAQITAEWIDTSTGEVSRTRIAPADRDRVRRFAGRFRGQELEVALEATTGWRFVVEELQAVGARVHLAEPAETAARRGTKKRAKSDRADARHLRELVMVGRLPESWIPPEHLLELRARVRLRHTLVDQRREWQQRIQAVLYHHGVPPRSWLLGAESRAWLAGLALPPAAREQITVALALIDAHDAQLAPLDTELREYAKRQPGCRALMRHYGIGPLTSITILAELGDARRFSSSREAVRYAGMDITVHQSDVRRGPGRLSRQGPSALRWALFEAAQCARRPGSPDHKYYVETAARLGGNRACLAVARKLLKRSYHTLRELGQEALQPA

SEQ ID NO: 475095 - protein, 411 aa, unidentified
METIVERPAALDVHKASVMACVRVPAAGGGRDEHVEQFSTTVQGLLTLADWLEAHGVTQVAMEATGVYWKPVWAILEDRFACMLVNARHVKQVPGRKTDVLDAQWLCRLLEAGLLKPSLVPPKPIRTLRNLTRYRKSNIRDRQREANRLHKIMEDTGIKLDCVATDLLGKSGRAMLDALVSGTTDPHVLADLARGQLRTKLPALREALEGRFDSEHALVVGQILAHIDFLDESIDRLSAAIDEQIAPFAAAVELLCTIPGVQRRAAEVIIAETGGDMTAFATAGHLASWAGVCPGNDESAGKRRSGRARKGSKWLRGTLIEAARAAARTRDTYLAAQYQRVRGRRGANKASLAVAHSLLVAVWHMLQTGETYLDPGGDYYTRRDPARTTRRLIAQLERLGHTVTLTEGAAA

SEQ ID NO: 475096 - protein, 341 aa, unidentified
MKHPDMKKSYFLGIDVAKNSCKFALLKANGSCLWSGQFENNSSSIQRWLALLGTRKLDRRKILFGFEATGVYSHALLLHLQQLELAACQLNPAQVKYFGVSVNRRTKNDPADARLIAYFLLERQPVATRTLNPIEHQLKVLVHEREALSIDLVRERNRAEKHALSPFKAPPMLAEQRAERLLKLKTWIKDLDAALKELIDSDPVLCAKAQLLCSIPGIAFCTAAKILSQVAGKEFQSAHQLALYAGLTPKENQSGLLKGKTTLCKIGNAFLRKALFMPATVATRCCQPIRLWAQQIQSRRPELSKLAIRCAVMHKLIRIIFGVLKNQTPFNPNFGSFSHAA

SEQ ID NO: 475097 - protein, 355 aa, unidentified
MDEYIALDSHTHYSLAEREDVRTGRTRQERIEHRPGAILEYLAECPAGTAVAVEATGNWYWIIEEIEAAGMLPRLVHPRKAKLMMGMINKTDKLDVHGLNRLQRNGTLPTVWIPPAPLRDLRELTRGRLVLVQQRTRLKNRVTSTLRKYGRGVVDASDPWGRKGRQEMERNVAMLPPETAWVTRLLVEQLDLLDRHILAQETRLKALVEVTPSMERLMTLPGVAVILAATIALEVGRIDRFATAERLASYAGTTPRVHSSGDKTRYGRLRSDVNRYLKWAFVEAANSVAVNHRRCPQRHVSHVYARLRQRRGHAKAIGAVARHLAEATFHVWRRETAYQDPALGRYAEGVSAALS

SEQ ID NO: 475098 - protein, 390 aa, unidentified
MQAADHQPEKPTAIRTDLGVIFVSLELSRSTWLITSLLPGGGEKMSKHSVSGGDVTALLARFSQLQEKVKRRIGRCVPIVVIQEAGLDGFWIHRMLETEGIESHVVDAASIATSRRRRRAKTDRIDGEALVRALLAYKRGEPRVCAMVRVPTPEEEDRRRISRERKTLTAERVAHVNRIKGLLFTHGVEYEPAHRNRRARLEELRTRDGGALPIHLKRQINRELDRLELTLEQIKAVEAERNALLAPATPAEVPTPAKMLMDLNGIGAEFTMVLWTEGLFRQFDNRRQVAAYAGLAPTPWQSGTIDREQGVGKSGNPRLRTTMLQLAWLWLRHQPDSALSRWFHERVERNGGRFRKTMITALARKLLVALWKYATAGVVIEGATMRTASQ

SEQ ID NO: 475099 - protein, 368 aa, unidentified
MAHCIIIGADVHVKSILVKAAADRDEPVQRSFRNTVSGRTALLGWLACWSERLGGARVLVVYETSSLGYVLYDEVMAAGFECMVVATSRLARSWRHRRNKTDERDAQLLLELGRSHVLAGNPLAAVWVPDPELRDHRELTRARTDLANKITRVKAQVKSLLHRYGLERPAGTGKGWTKGFAAWLDGLAEGPTLGWGARVALCTLLAQLGSLVKEAAYVDDHLVALSAHPRHAAAVEAMDAGYKGVGLKVALTVLTELGDLWRFPNRRSLASYAGLAPSSHESGEANDRKGHITHQGPSRLRRALCQAVQHWVRWDPEAKARYRRLVARGGRRAKKIAKVAMMRRLLIRLWHTARKAQAAARTAQDRCE

SEQ ID NO: 475100 - protein, 311 aa, unidentified
MDNVFIGIDVSKGYCDVAVIPDGTRKRFTNDEEGQEAVAAFMLPLKPGRIVIEATGGYEMGVVRVLADNLLPVVAVNPRQVRDFAKATGRLAKTDTIDAEVLSQFARAIQPDIRPLPEKEAQVFRALVARRRQLVQMLTMEKNRLEKSPPAGSKDIRNHIYYLTEALKKIDRDISRTIRKSPLWKEKETILTSTPGIGPVISCTLIAALPELGTLNRKEIAALVGVAPFNRDSGKHRGKRTIWGGRSHVRATLYMGTLSAIRFNPVIRAFYKRLVDAGKVKKLAITACMRKLLTILNTMMKNKTTWAEVRS

SEQ ID NO: 475101 - protein, 364 aa, unidentified
MKRKVYVGMDVHKETIRIACLTNNTKEIVKEQQIKHNEVQIKKFVNKLKSEWNEIHSCYEAGVTGYPLYRYLKSLGVNCILVAPGKIPRQSSDKIKTDKRDAIKLAKLLRSGELESIHVPSEEDEAVRDYLRSRDSLRLDLGRNRQRLMKFLLRKGITYSATKYWTVSHNKWLNNLQFNNEILQETFNDYYSRVRVQEENLKAMDKRIQEIAESEPYREKVGILRCFRGVDYLTAMFLLCEVCDFKRFKTAGSFMSFLGLVPGEYSSGSKRKQTGITKTGSPRLRRILTEAAWQHRFPGTGSKIVTARRSGQPALVVALAEKASLRLHKKFRNLQQRGKTPQVMITAVSRELSGFLWAAMNLVA

SEQ ID NO: 475102 - protein, 362 aa, unidentified
MFRPHTLYIRIRIVRKVSEPAFAMKDQDVTDVIRRKQQTAMRYIGIDVSKATFVVAYSSDKGGEIRTFNNTTTGIKQFIGALPKDSSIHCVMEATGNYSAMLLYLLNVAGIAVSMENPLKIKNFARAMLSTVKTDKIDARLIALYGEKMNPQPFKVQGEAILRLRQKRTVIRQLTKQITAMSNLRGSLACLPVPDKGATHTVDETIKFLEKRRDRLQSELTDLVEVEFSRQLALLTTIKGIGITLATALILTTGGFTYFQNAKQVSRYLGICPTYEQSGTSVNIRGHINRNGDAYTRGLLYIAAWPASRFNAQCKETYTRLRQNGKPGKLAMIAVANKLVRQAFAVVAHDKEYIDGFVSNRP

SEQ ID NO: 475103 - protein, 314 aa, unidentified
MSSKVIVGIDVSKARLDCFGLPKQEAWSCDNGPEGIERLVHRLRELDCELALMEATGGYETQAATALAAAGLRVAVVNPRQVRHFAKALNKLAKTDRIDARVLAEFALSVNPQVRALPDEHTRELSELLGRRAQLVGMRTQEKNRLGQAAGRLREGIKTHIKWLDVEITKLEADLSAKLHASEAWCDKRDLLLSAPGVGPTTTFALLAELPELGQLNRQRIAALVGVAPLNDDSGKHQGRRFTWGGRASIRSVLYMAAVSAMRHNPVIRVFYQRLREKGKPFKVAIVACMRKLLTILNAMVKHNKPWQSLPQTA

SEQ ID NO: 475104 - protein, 399 aa, unidentified
MAQPVWAGVDAGKADHYCMVINDDAQRLLSQRVANDEAALLELIAAVTTLADGGEVTWAIDLNAGGAALLIALLIAAGQRLLYIPGRTVHHAAGSYRGEGKTDAKDAAIIADQARMRHDLQPLRAGDDIAVELRILTSRRSDLVADRTRAINRMRAQLLEYFPALERAFDYNKSRAALILLTGYQTPDALRSAGGARVAAFLRKRKARNADTVAATALQAANAQHSIVPGQQLAATVVARLAKEVMALNTEIGDTDAMIEERFRRHRHAEIILSMPGFGVILGAEFLAATGGDMAAFASADRLAGVAGLAPVPRDSGRISGNLKRPRRYDRRLLRACYLSALVSIRTDPSSRTYYDRKRTEGKRHTQAVLALARRRLNVLWAMLRDHAVYHPATTTAAA

SEQ ID NO: 475105 - protein, 339 aa, unidentified
MGLYVGFDLHSSNTYVGIIDEEGKRIWKRKLRNDPNLISEFLRPYKNDIVGIVVESTYNWYWLVDYMMEDGYEMHLANPTRIQQYSGLKHGDDEHDAFWLAEMLRLKILPEGYIYPKDQRPLRDLLRKRGHLVRLRTSLILSLQNILARNIGAKMNASHMKALKKDRVTPLLEGNDDLALAGRVSKDAIDSLTNQIRSIERVVEKKMSLKKPYDFLLSLPGVGRVLGLTIMMETGPIDRFPKVGNYVSYCRKVPAARFSNNKKKGSGNRKNGNKYLSWAYAEAAEHARRLDPEAKAYYARKRKRTNDPIAHSALAHKLARAAYYILRDKIPFKPEKAFV

SEQ ID NO: 475106 - protein, 400 aa, unidentified
MKRLSGGIDIGSVSHHITILDEEDHILYNQKVSHNLNEFRKTIKQFKKIEKKEKGEISFALEGKNGYSAPFDRILLDKGFTLYNIDNLKLKRFREAFAGEWRDDGRDALMLSKMLKLKKYINSKREKVFIKIERPSPVTESLKILSRHQQTLIDEKVRLTNRLSKKLLEVCPQVLELGKLKNKRIIAILAKYPDFSKYKRMTLKSLLKIKGIGKRQVPFLLKRLNNIEYVGLTDIYKTIILSYAKRISELQEEIKDIDKKLDKIGEKDKSVKHLKSLPGVATKLASRFIGEIGDINRFPSEKQLAVYCGIACVNNDSGKVTKAKAVYKANKICKQTLIIMAGCSIRFIPQCKFYYLKKRAEGKSHNHTLRCLARQLIKVIYKMLTEDRDYIVRKVLKKVA

SEQ ID NO: 475107 - protein, 332 aa, unidentified
MRFYTQQHPFYCGIDLHARTMYLCILDQAGATLLHRNRPAPPEALLKAITPSRDQIVLAAACMFTWYWLADLCADHGIPFVLGHALSMQAIHGGTAKNDKIDAHKIAVLLRGGMLPHADVSPAEMRATRDLLRRRMPLARTRGALLAHVHHTNSQYTLPAMGKKIASKANRDGVAERFADPAVQKSMAVDLALITSDDALLRDVERTIVTTAKHHDAQTLSLLQTVPGIGKILSRVLLYDMHDIARFPRVQDFASYCRLVKCAKASAGKRAGTSGSQIGNAHLTWAFSEAAVLCLRDHPAAQKFLARLEHTHSKGKALTILAHKLARAVYDM

SEQ ID NO: 475108 - protein, 376 aa, unidentified
MHDSTFIGLDVHKATISVAVAKGERGGEVRHWGTIPHRPDHIRKLVEKLGAGGSRLHFCYEAGPCGYGLHRQLVELGHDCIVVAPSLIPVKAGDRVKTDRRDAAMLAKLHRADELTAVWVPDAAHEAMRDLVRARATAMRVLGKARQHLQGFLLRHGRIYPGKKGWTVAYRRWLTTVRFQHPAQQIVLQDYIDAVTDTEARVERLAGQIEALLPSWSLAPVVEAVQAMRGVAFIVAVTVVAEVGDFNRFDNPRLLMAYLGLTPSEHSSGNTVRRGGITKAGSGLARRALIEGAWSYRMQARVSRKLHDRIEGLPKAVRDIAWKGQLRMCQRYRHLLAAGKAKVVVITAIAREMVGFIWAIARAVTAAPVVNARTQS

SEQ ID NO: 475109 - protein, 320 aa, unidentified
MGTEKVYVGIDVSKETLDMAVHDSDQRWRFANSDEGITETLSCLEELCPTLVVLEATGGFQDPLAAALAVASVPMVVVNPRQVRDFARATGRLAKTDAIDARVLAHFAAAVHPLSRLLPDTQGQELKAILTRRRQLIEMLTAERNRLHSAHSRFVKAHIQSHISWLEEEMAHIDHDLGHSIRQSPIWREKDDLLKSVPGVGPVLSTTLLADLPELGLLNRRQIAALVGVAPFNRDSGHFRGQRTIWGGRAVVRSALYMATLVATRYNPIIRDFYRHLLSAGKPKKLALTACMRKLLTILNAMLKHKTPWQYPITEMLKTS

SEQ ID NO: 475110 - protein, 367 aa, unidentified
MEKSSKVFVGMDVHKESIDITLAEQGGEVHRLGQIGGDRVSLLKMVRKQRSKGRELVFVYEAGPCGFWIYREITALGQVCMVVSPALVPKRAGDHVKTDRRDSERLASLARAGELEAIHVPDMRDEAIRDLVRGRDDAVIAQRRVRQQLKALLLRNDIRYVGKTSWTGAHRRWLSELKLPEPAQQIVFQEYVDAITGATDRIERLTRAIETEVLTWRFAPVVRALQAMRGIQFVHAVTLVAELGDLTRFVSARALMGYLGLVPREDSSGEHRRQGSITKAGNSYARRALIEAAWAYRHPARVTRIIATRQTGLPKAACDIAWRAQLRLSAKYRRLNARHVNHNKIVVALARELSGFIWAIGQSVKPQ

SEQ ID NO: 475111 - protein, 316 aa, unidentified
MTAQCVAGIDVSKARLDVFVLPLRLAFECTNDEAGITMLRQKLQGLGVERVVLEATGGLEYCAARALADAELSVERVQPGRIRAFRTVLGKRAKSDPLDAKLAARFAQAMPEEQARSIPNHQAEAIRSLSARQRQLVDLLVQEKTRLKMSRDPFVLESLKITITHLKQERARIEALLESAIEKDAAIARKNALLRTIPGIGPVVATTLVTDLPELGRLNRHEVASLAGLAPHPERSGISRPGDHIGGGRACVRTALYMAAVCAIRCNPGLKTFYKRLVEGGKPRKVAVVAVARKLIVLANTLIRTDAPWNPAFGIG

SEQ ID NO: 475112 - protein, 344 aa, unidentified
MKIVGCDFHPSFQQIAVLDTRTGEMEQRRLCHGDGEAERFYRELEGPALIGIEAVGNCLWFEQLMARLGHQLWIGDAAQIRASYVRRQKTDRRDAGHILRLLVEERFPRIWVPTSEQRDVRQLLLHRHKLVQMRTRVKTELQHLALNQGMQKKRHLWSVRGRADFKTLSLAPWAAQRREDLLAVLSLVESQVEKLDIAVEELAGRDPQARLLMSQPGVGPITALAFVVTIGDVSRFRRGKQVASYLGLIPAERSSGNKRRLGSISKQGNTFLRTMLVEAAQSACRYDEQFRREYQHRCHQKPKGVAKVAAARKLAVRLYWMLRNQTPYAPAVHNEGSSGHSVAG

SEQ ID NO: 475113 - protein, 347 aa, unidentified
MRFYTQSHRYYCGIDLHARWMYLCILDPQGEVLLHRNLRACPETFLKAVEPYRQDLVVAVECIFSWYWLADLCAQEGIEFILGHALYMKAIHGGKAKNDKIDSQKIAVLLRGGMIPVAYVYPPEMRSTRDLLRRRTYLMRKRAELLVHVQNTNSQYNLPEIGKKIAYRANRSGVAQRFSDPAVQTSIAADLSLIDFYDTLLNRLELFITSQAKQQDHHPFYLLRSVPGIGKILALTILYEIHDITRFPRVQEFVSYCRLVKCSRQSAGKNYGFSGKKIGNVHLKWAFSEAAVLFLRHNPEGQKLLARLERKHGKAKALTILAHKLARAVYFILRREKAFDLTQFLAA

SEQ ID NO: 475114 - protein, 380 aa, unidentified
MKRIRLYLGLDVHKDSITIAIAQSGLHGEIRFFGTITNSIQALERALIQIRKAHHGAPVQVAYEAGPCGFGIAGRLQQLAGPCLVVAPSLIPKQPGAPFKTDQRDARTLARLLRAGELTGVYIPEPTDEAIRDLCRARTDAVDDLRRCRLRLKSFLLRHSYRYQGKANWSQPHMRYLRELVLPHPAMKVILEEYLQGIDAAHQRVQRIEASMLALLETWRLKPAVQALMAFRGFQLVAAMITVSELGDIHRFAHPRQLMTCLGLVSVEDSSGPRQRLGHISRCGNGHQRWLLTECAEHYLSPPKVSKELSRRQEGQPPQVRALSWKAQNRLHLRFTRLLARRLQRNKAKVAIARELCGFVWALLRTQPCYLQPSTRTATA

SEQ ID NO: 475115 - protein, 371 aa, unidentified
MTSTDAATETVYAAIELSKKTWVLAIAFPDRDRPSIHRVSGGNVAELVSRLRVAARNNRRILVCYEAGYDGFWLARALAKMGIECRVLDPASIQVNRRARRVKTDRIDVLALLRALIATDRGERHVCAIVRVPSVEEEDARRSHRERQRLIRERTGHINRIKGLLFAQGIRDIKPKLRRTRIDFAALETGEGHPLPDRLRRELEREYARLALIETQLREVEKERDLADAQDPVVERKRQMLVALQGVGGTSAAILAREVFARPFANRRQLGSYLGLTPSAYDSGSVTRCQGISKAGNSWARRILIEVAWLWQKHQPASPLSHWYIQKTSGQSSRIRRIMLIALARKLAISLWRYVETGLVPEGVVIARAEA

SEQ ID NO: 475116 - protein, 402 aa, unidentified
MNSIGIDVSKNKSMVAVLRPLGEVLRVPFEVNHTVKELAALIKDLKSLDGDSKVFMECTGSYHLPIANALTKAGFKVHTLNAMLIKNFGNNSIRKVKTDKADALKIASYGLTYWNDVTEYSIDDDIRIKLKSFNRQYSKYIKLRTAMCNNFTSLIDLTFPGINNLFSSPERKSDGHKKWIDFSLRYWHCDCVASLSLNAFISSYQAWCKLHKYNFSHSKAKEIHQFARQCCPVIPKDEETRFLITHAARELNTLTETTNSIAGKALELASQLPEYPIVSKMYGVGDITSFQLIAEIGNIYRFPKKSSLVCYAGLDTEPNDSGTITHKSNDISKKGSPYLRRTLFLVMSNILMLAPSDEPIYQFLDRKRAEGKHYYTYLCAGAAKFLRIYYARVKEYLDKQLP

SEQ ID NO: 475117 - protein, 371 aa, unidentified
MAESSKMLFVGLDVHKDTIAVAYAAEDRGAEVVSLGMIGTRQCDLDKLIRRLESKGATLVFAYEAGPCGYWLYRYLTRRGLSCSVVAPSLIPRKPGDRVKTDRRDAVTLARLLRSGDLSAIYVPTIDDEAIRDLSRGREDAVRDLKRSKVRLKAFLLRQDIRYEGRANWNAAHLRWLAQVVCPTPAQQIVFQEYVHSVSEQTERLRRLEAELHAAVKTWRRYPVVEAVQALRGLDLTGAVTLIAEVGDLTRFDTPRKLMSSLGLTPSEYSSGERRHQGGITKAGNGHARRALVEGAWAYRYPAKVSRHLQLRLENLPTEVRAIAWKAQLRLCKRYRLLSARGKHVNQVVVAIAREMAAFAWAIARTVPVAV

SEQ ID NO: 475118 - protein, 485 aa, unidentified
MKTKQQEGASKTSRQAAAGSQDKWHEMNRKQRREMMRKIQNEDLRLEVVHPDAAGIDIGNESHYVAVPPSRDSQSVRRFGCTTAELKAMAAWLNQCSIHTVAMQSTSVYWIAVYDILEQAGLEVYLVNARDTKNLPGRKSDVQESQWLMKLHTYGLLRNSFRPSQEVRTMRTYWRQRNDLVRAAARHIHRIQKALTQMNIQLANVLSDVSGMTGQAIIKAILAGERDPRKLAAFRDPRVKASEEQIALSLEGNWQQDLLFVLHQEQDGYEFCQRQMTECDRQLNHYLEQTEDRSQGAPLPEEKRTERLKKKKGNKPQFDLREGLFHMTGTDLTQIDCVDVMTATTVISEAGWDMSKWETEHHFVSWLRLCPDNRISGEKIIGKGRLPTNNRVTTALKISASNLRLSNTYLGAQFRRLRTKLGAPIAIKAMAAKLARLVYRILRYGMKYVDRGAAFYEAQHRQLQIKHLKWKAAKLGFKVVEAPAA

SEQ ID NO: 475119 - protein, 427 aa, unidentified
MKQEAPEQQEFGAYIGLDWADRTHVISLRGTDSGKVEHYQLVHKPEALAEWVSDLQRRFPGQRVAVALEQARGAVVHALMGYDFLVLYPVNPKTLAKYREAFSPSGAKDDPTDADLLLELVTLHRDKLRAWLPDDELTRTITLLVEYRRQLVATQTSLSNRLTSLLKLYYPQALAWAGELTTVQACDFLQRWPTLAQVQQAPPAKLRQFYLAHGCRKADVIEQRLQEIKLAQPLTRDGAVISASVVMVQATTTQLRPLMEAIARMEKQIAELFSQHADHDLFSSFPGAGPVLAPRLLAALGADRGRFAAATEVQQLSGIAPVMERSGKTCWVHRRWACPKFVRQSFHEFAGQSIRWSTWARAFYDQQRQRGNGHHAAVRSLAYRWIRIIYRCWQMRVPYCEETYCRALQRRQSPLARVLAAPMQNAS

SEQ ID NO: 475120 - protein, 397 aa, unidentified
MLRRILPTAERTVSPGQQPKVIDKGGAIRERPPTHRLCQNEVVADLRQWRPSVEQVSRIGMDTSKHFFQLHGVNAAEKVVLRKKLRRKDMVAFFKALAPTVIGIEACGAAHYLARLLGSFGHEVKLIAPQLVKPYVKRGKNDGADAEALCEAMSRPTMRFVPVKTTEQQAALMMVGLRDRLIRNCTQLSNSIRGYAAEFGFTATKGKAHLVTLLERIQADESVPALARELFAAQAAEYARLQAQIDEVDAKLMAWHKANECSRRLAKIPSVGPIGAVLLMMKTPAPELFRSGREFAAWIGLTPKDHSTAGKVRLGGITRAGDEALRSVLVVGATSIIQHVRRGGRGSPWIVDLLKRKPPKLAAVALANKMARIAWKLMITGESYVAKSTLATLASAA

SEQ ID NO: 475121 - protein, 345 aa, unidentified
MPIVGGLDIHRKQITFDYLDTVTGEVKRGQMAPADRAHLRSWLARFAGREDVAFALEGCTGWRYVTEELAAAGVAAHVAEPADTAFARGRKRHAKTDKTDSRHLRQLLAEGRLPECWIPPGHILECRALLELYHDLRAEHTAWVQRIHAVFFHQGAPALGDGALRTGKDLAALRAAAAAHLSPVGQLQVAVSLEVLEALEARMHQVRHQMLAAARHLTGAKVLAARLYGVGPVTALAMTCWLAGKDRFSSSRKAVRFAGLDVTVWSSDRKGPPGRLSRQGPPVLRWAVYEAGKTHARSSAPDHRYYAQVKDRQDGKRAALSEARKILRQACHILAELGDDALTAA

SEQ ID NO: 475122 - protein, 400 aa, unidentified
MHLTANISVPQKNFIAIDLHSDSAVICVRRNALNKAGELVGKNIWCGLVSIRDGLDSFVKALLPYCQDFDHVAVVESTYNWYCLADVFEEQGWLLRIADPSTVSQANLKSSEDRTDAQYLAERLRVGSLKHYLPLSYSSRALWDLCRYRMAMVQDCASLKIKLINLYRNQLSKNLLVADLLDRCRNHMQSNYRFDPDILEEFKDPNIRLRVAFEVSRIAMLEEMIEECNAEIQKQCKDQELVKLCKTIPGCGPVLSAVICTEIGTMQRFKSAGDFVSYCRLCSTSKLSNGKSKGLGNAKNGNAYLSWAFTEVAQYASRNPVIREILQRLLRKYGGLRVKAIRTQAAKIARVTFYVLKNKQPFNAAKCFGIELTKSIKKKLTHKTLREDAAVVLPTVAGQA

SEQ ID NO: 475123 - protein, 459 aa, unidentified
MSLDVVYSHVAGIDVHKKQVTVSVRVPDPQRSGRRWEQTRTFRTFYADLLAMGAWLAGRGVTRAAMESTGAYWWPVYTALRESGGADLTVDVVNAAHVKAVPGRKSDVKDAQWLARLLEVGLLRGGFLPPDDIRAIRDLTRYRTKLTEERSREKQRLLKVLEAAGIKLDVVASNTFGVSGRAMLDALAAGERDPHVLAGLARGVLRNKIEDLRLALTGRFTAHHGLMVRLHLSRLDHFDEMLAEVQHRIGHSGQATRARRSPAEPAGLVAPFADQIRLLSTIPGIGEHVATVIISEIGVDMSRFPTAKHLAAWAGLAPGNNESAGRRRRARHRNGNTHVQSVLVEAAHAAARTRTRIGARYHRLHRRFGGRANKSAGKKAAFAVAHTLIRIIWTVLSNGRSYADLGADYYTHGVDPDRRLRRLIAHLEAVSGKKIVLTDPDDPPDPDNLETGNRDEAAA

SEQ ID NO: 475124 - protein, 339 aa, unidentified
MTRIAVFVGVDYHQESVQVCVVDVEGNVLMNRRLPSTVEAILAAVGQGSDVRGVAIEACCGAADLAEKLVQGAGWSVSLAHPGYVARMKQNRDKTDFGDARVLADLLRVGYLPKVWLAPKELRQLRHLVRLRQDLVAQRRKIKLQIRALLRENRIIAPDRRKPWTCAWLAWLRETDALTDDDRWIMDRRLESLGEVFLKIRAVEKRLRERAEEDAIIQKLCRFHGVGLVTSVTMRAEIGQFDRFATGKQLARFCGLSPRNVSSGERQADAGLIKAGNTQLRVVVIETAQRLLWQPDNDWARLAMRLLRKGKPRNVVVAAVANRWVRWLYHQMQPDRLAV

SEQ ID NO: 475125 - protein, 442 aa, unidentified
MNQEDRSRLEEFRQFRKEVRGSREYLLVGIDVAKDKHHAFFGTATGKTLFRRLVFENNLEGFRKLLGQAEAMRVQEGLKKVVFGMEPTGNYHKPLGEHLIRCGREVVLVSGAAAHENRKTLDGRWDTNDTRDAANVADLISQGKCLFYEFPGGPLQDLRNLLSLKRRMKKQEHGYRVRIRNHLLAKYFPELDRYYEQSESTALAIVRWCLDPSEIAGLEYKRFFQLVSLSFARERSSQERRLQAIWKMAVDSVGCEAGPTVELEAQVMVEGLRRVRESLRQIDEKIHEICCPFPEYEYLLSIPGFGRDLAAKVLGAIGDPDRFQNGRQVLKTAGFDLNAERSGKSSERAVPVISKRGKADLRFALYQAALIASVKNRDFIEYYTEKLRGREREPGIKIKMRVKLAAKMLILAWTLMKKREPFDPTYLRAAGQAFSAGGRRER

SEQ ID NO: 475126 - protein, 389 aa, unidentified
MKIYVGIDIAKLNHFAAAISSDGEIILEPFKFTNDADGFQLLVSKLESFDKNSIIIGLESTAHYGDNLVRYLVAEFYQVCVLNPIKTCQMRKNNVRKTKTDKVDTFVIAKTLMMQDDLRFITFFDLDMMDLKALGRFRQKTIKQRTRLKIQLTTYVDQVFPEIQYFFKSGLHQNAVYALLKEAPSPKEIASMHMTHLANLLKVNSHGHFTKEQAKELRVLAQKSVGANDSAISIQITQTIQQIELLDSQLEKIEAEMTDIMKFNDSVIMTIPGIGYINGGMILGEIGDIHRFSNPNKLLAFAGLDPSVYQSGNFQAKTTRMSKRGSRILRYALVNAAWNVVRNNATFKAYYDAKRAEGRSHYNALGHCAGKLVRVIWKMLTDEVEFNLK

SEQ ID NO: 475127 - protein, 319 aa, unidentified
MHRSFIGVDVCQDYLDVHVRPASLRQRFANTTAGITELLAWVRPHAAERIVFESTGPYQKAAVGALLAEGLPVVVVNARQVRDFAKAMNYLAKTDTIDAAVIAHFGEVATTTVRPLESQEIRDLRELYDRRGQLVRMLAVEKNQRHSATVARASPKVLKSIDKHIDYLEGHIQDLEQRMDGIIESSAAFQARGEILQTITAIRPQLSRTLLAYLPELGRYSRQSIAALVGLAPFNDDSGTHTGPRHIRGGRSKVRVGLYQAAIAAIRHCPHMKAFYAALKARGKASRVAIIAVARKLLVLANALVRDMVPYKAPANSVC

SEQ ID NO: 475128 - protein, 427 aa, unidentified
MSYRIAGIDVHKRMIVVVVADVDVAGDYEFERRQYGSSPAQLRLLAAWLVEQGVEEVVMESTAQYWKPVWASLERYWKPICEKREGAGPMSGSLHLAQAQSNRGARGRKNDFADAERLVRRLVAEELTLSFVPDAEQRLWRTVMRTRYQLRCNQVQLQNRLEALLEEAHLKLSSLVSDLLGLSGRRMLQAVAEGETDPAVVAARADCRLRATQEQLCDALGACRELHPVYRRLLKAALEEWERIEAQIAQLGQEMASLIGPQQEQVQRLAEVPGLGVDSGQQILAEVGASAATFPSGRALASWVGACPGEEETAGVNRNRRSPKGNRHLRRILNQAAHAAVKLKGSIFALLYRRYVVRFGHNQTIAVIAHRLCRLIWKILHEGVRYEERGPAVSQRAKQRRTARMIRQLRSLGYSVELLHAAAGVPA

SEQ ID NO: 475129 - protein, 289 aa, unidentified
MDANSIFVGIDISKLTLDVDIYPTSEPRRFLNDESSREELCEWLKTRTPTLIVMEATGGLEIPVAGLLAAAGLPVAVINPRQARDFAKAIGVLAKTDAVDAIVLARFAQAVRPAVRALKSEEAQELESVLTRRRQIVEMITAERNRQTKAQARIGHIAWMGKRLEEANDDLDRLIRKSPIWQHKAELLKSVPGVGCVVATTLVAELPELGSLNRREIGALVGVCPFNHDSGGRRGKRLIWGGRSSVRAALYMATLCAKKRSACTRQSVLGILDKFRDLAFDAAYAYGKH

SEQ ID NO: 475130 - protein, 458 aa, unidentified
MAQARKRKLKEKKAPELPVLNPTAAGIDIGATEIYVAVHPDCDPEPVRSFATFTEDLPRLADWLKSCQVNSVAMESTGVYWIPLFQILEERGFEVCLVNARYYQNVPGRRTDVSDCQWLRHLHSVGLLRASFRPADQVCVLRSLLRHRDSFLQAASSHVLRMQKALNQMNLQIHHVISDITGVTGLRILDAILAGERDPSKLAALRDGRIKASEATILKSLVGDYRREHLFTLRPCLAAWRNYQRLIAECDREIEEQLSTFDAAIDVLAKPLPPAKMHRRNLYTNEPSFDLRGHLYRIFGVDLTAVPGISVLTAHTLLAEVGPDLARFRSGSAFASWLGLCPDNDIRGGKKLLAKTRPVNNRAAGALRMAVNGLYKSQTWLGNFFRRMRAKLGAPKAITATAHKLARIIYQLLSTRQPYDESIFAKSEQVARLRLEIKLKAQAKALGFQLVPTETAPA

SEQ ID NO: 475131 - protein, 428 aa, unidentified
MGTFSAACSNPAWVAIDVAKSRHEALLETVRGDRRRFAIGNTLAEFKRFAGELQPHRPCEIAIEPTGDYHRPLANFLLREGHHVHFVSSIATSRAREALFNSWDKNDPKDAQVILYLLKSGTTQVFSDPLECGNQDLQELLGTYRQVVDRKTRVYHSLQTHYLPLYFPEAEPFISTARAEWFLNVLYDAPCPSAVLKRSKKAFVKKFTAAGGKITLRQRLVGDYYEAAKESVGIPVAADSWAVQMFKLTVEQYIRLTKQRRKLEELIHAQLAPNTDYRLLRTIPGIGPIVALTVLAEGGDLRRFSHYRKFLNYCGLALSTSQSGTYRGTPQLSKRGNARLRCAFWMAAKAAIMQRQNGFRRKYDNYVRANPLDPNLKRKAYTAVAAKMARVAFGLVKSGKEYRRFIEAPVLDGRIPSPVPSRRSRPRR

SEQ ID NO: 475132 - protein, 338 aa, unidentified
MKVKRQNVGVDVSKGTLASCMVFLTEDFEVKIKASKTFPNNAKGFSELLNWANSKKDGNLELSFTMEPTGVYYEGLAYYLFEKKQIVHVVLPSRAKKYADSLQEKAKTDKLDAKSLGRLGVERKLEKWHVGSPVYRKLKTLTRERNALIKERTVFQNQLHALNHSADPFKKSVTRLKQIIRFINKQIKTIELDCEHIVNKDEMVKAKVDKVTTIPGVGFITAIVVIAETHGFALITSIKQLVSYAGLDIKIRESGKWKGKSKITKKGNVHIRKALYFPSYSSVKYSETNRKFYLRLFDKKGKSMVAATAVQRKLLGLIYTLWKNDTIYIENYKQNKAA

SEQ ID NO: 475133 - protein, 370 aa, unidentified
MEFIGIDLHTNKFTCSWRDEHTPPDAKKGKRTETFELTDYGLANFYRTLTPDTYVLVEATITTFSFVRLIQPLVKEVIVANTYELKQVSHARVNTDKIDANILSRILKMQVLGREQAVSPVVVPPVEIQELRSLFTTYRLYKKQTVQTKNRIHSLLKEKLYGFTQEEIFDKKNREKIRRIETGTAMSYQINDLLDLLDYKESRIERLKKRIMAHAEPYMREIEILTSMKGISVFIAIAIIADIIRVDRFKNSKSFTSYLRSAPKVVSSNTSTRILGTNKMGRKLSSTLICQALHHVLNSSPKLDEWYQKLTQFKKAGLVRTGLRRRVFAEIFQMLKKGEYHYGRDARNHESKMLQYRNFLEKRKNLLETA

SEQ ID NO: 475134 - protein, 343 aa, unidentified
MKLTRVGVDLAKNIFQLHGVDGAERPVWCKRLKRNRWIKEIEQNVEPGVEIGMEACGGAHHWARLLQSKGYRVRLIAPQFVKPYVKSNKTDANDAQAVCEAMSRPSMRYVAVKTIEQQDIQAVHRVRASLISERGAKANQLRGLAYEYGLVAPREIAALRVAVPVWLEDASNGLTVRLRALLSGLYADLRALDERVRELDKEIRAIARENEAVGRVQQLRGIGPLIASALVAMIGDARQFKNGRHVAVALGLTPRQHSSGSKERILGISKRGDSYVRTLLIHGARSALRTAPGKNDRLSRWALALAERSHVNVAVTALANKMARVAWAMLRHGTVYEPNGLAA

SEQ ID NO: 475135 - protein, 346 aa, unidentified
MDVSLIASVGIDLGKTTFHLVALDCHAKVIVRKKFSRAQLLAFTANLPWSIIGMEACSGAHFFAAKLRDQGHEVKLIPGQFVKPFVKTNKNDFNDAEAIAEAVIRQNMRFVPIKTDDQLDLQAMHRVRDRLVHRRTALINQIRGFLLERGIVFRKGPANLRNQMPVILEDAEQNITPRMRTLLADLWQEWQQLETDINHISEQIERISREDAACQRLRQIPGVGPLVSTAMVAAVGNGAAFRNGRDFASWIGLVPRQHSTGGRSLLLGISKRGNTYLRRMFIHGARAVLLRVKYDTGGLGHWVHKLEARTARNKVIVAIANKLARIAWAVLYHAESYRATAAASAA

SEQ ID NO: 475136 - protein, 423 aa, unidentified
MAYRIAGIDVHKKMLAVVICDVEVDGEFEFERRRCGSNPEQLRLLVEWLIDQQVEEIVMESTAQYWKPVWGALERYWKPICQKREGAGPMSGTLHLAQAQSNRGRRGRKKDFPDAERLVKRLVANELILSFVPDAEQRLWRTVTRRKYQLRREHVRLQNQLESVLEECQIKLSSLVSDLLGASARRMLKALAEGETNAAALAALADKNLRATQAQLCDALGACAELKPIYRRLLKMFLEELQLIDQQISQLDQELATLLSRHQDAVEHLAEVPGLGVDSAQQIIAEVGAKAATFPSAKQLSSWVGACPGDDESAGVSKSHRSPKGNRHMRRILNQTANAAAKSKGTVFEIVYRRLTPRLGHNQTIGAIAHRLCRLIWIILHEGVRYEERGPSVSAISKRRRTNRMIRELRGLGYRVEPLVTTV

SEQ ID NO: 475137 - protein, 356 aa, unidentified
MSHDVKYIGMDVHKEAIVIAVQNESGKQVLESVIETRASSILEFLHGLRGELHVTWEEGTWAAWLYDLLQPQVQHIVVCNPRRNALLKEGSKSDKVDARKLADLLRTGMLRPVYHGENGVRTLRELGRSYQTIGKDLTRVMNRLKALYRGWGIPCAGTQVYAARTREEWLDKLPQAGVRRRAELLYQQLDGLQALRREVRPELLAESRKHKAAKLLRQIPCIGPIRAARLIALMQTPHRFRSKRQLWTYSGLGIETHDSAQYRFVRGQLQLSKKPQQLRGLNRNHNHEMKEIFKSAATRASCGRGPFYDFYTALLAKGMKPEMARLTLARKIAAITLTLWKKEERFDAEQLKTQAA

SEQ ID NO: 475138 - protein, 384 aa, unidentified
MNKHSMIFIGLDTHKEFHEVAYCEEQRGASPVHYGRIPSSKVSVKKLIRQFESKYPGATIHVVYEAGPCGYWIYRLITSLGHCCYVVAPSLIPKKPGERIKTDRRDALKLVRSLKSEDLTPIYVPEPEDEAVRDLSRAREAAMKDLKEAKYQLKALLLRNNIRYEGTANWSKKHLRWLTELILPHPTQQIVLQEQLQTIEERIRRLERLDNELTHHVHQWRYYPVVKAIQAMRGVRLLVAVGVVAELGDLHRFDHPRKLMAYLGLVPNEQSSGGKRHLGAITKAGNGRARRLLIEGAHSYRYPANVSTELQLRQEGLPKDIVDIAWKAQLRLCKRYQRMSNKGKHYNLIITAIAREMSAYIWAIAKEVVLTPVNPKLRLSRVPA

SEQ ID NO: 475139 - protein, 361 aa, unidentified
MQQQVRQKKYTFFIGTDISRNKLDHVVMKGKQQLFHREIKNEPSEIDHFIEEVKALPGFTMTRAVFCMEQTGIYGNHLVRCLQRVKANIVVEGALQIRNSLGNIRGKNDKVDAMRIGEFAYKNREHLRLWVPKRPVINQLANLSTLRSRLLALQVALQTPLTEQVSFEKKGRAKENIKLCSRSTAALKADLKQIDECIANVIASDERLKRLQEIVTSVHGVGPVTALQFLICTNEFRDINNPKKFACYAGVAPFTKESGTMKSKAKVSPMANKKMKALLHACALAAYRSSPDLRAYFERKTGEGKHRMLVFNAIRYKIILRVFACVNQNRCYEKEYVRKQPGAIVPEPMQIQIVEEANLAN

SEQ ID NO: 475140 - protein, 429 aa, unidentified
MGSETVLIGVDPHKASNTLAVLDPATRVVVASKRFANTSSGYDQLRSFADQWSDHRWTVEGCHGAGRSLAQRLVRGGEVVFDVPAKLAARVRIYSQGHGRKTDLDDAVSVGTAALLGDGIARVHADDGLVSLRLLSDRRAELVALRTQAVCRLHRLLVELTPGGLARKLGADKALRTLALLRPDTPIDVVRVQLAHEHVADIQALDVKIKAVGRQIGELVTASGTHLTDLYGIGPVIAGRILAEVENINRFPSRHHFASYNGTAPIDASSGEQVRHRLSRSGNRRLNHALHMMAVTQIRYPGSQGRGYYERKRLEGKTPKEALRCLKRRLSDVVYWQLLADQASTIDACGSPTTATPTRPISTSPKANSSPAAPPPRPRSRPASPGSSPSTGKTTASSASKSSTPTNASAPTFSNKPRRPRTTRSRAHS

SEQ ID NO: 475141 - protein, 320 aa, unidentified
MAILTSPTVIGIDVAKAEIVAYREDQKTTEAVNNDRETLGRWLKALPAHSSIALEATSIYHLDTVELAHEMGHRVYVVDAYRLSHYRESIGQRAKTDPCDARLLARYLSSEQERLRLWSPPPKAYKVLKSLLHRRAELISVRVGITLSWSSEPLLKDELARQVKSFKQAEQAIQKLLYKVSKEAGITENIKRCKAIEGIGELTATGLATAFMRGQFSSGDAFIAFLGMDLRAKDSGKKNGPRRLSKKGDTELRRLAHNAAMAACRSPVWKPFYESYLARGLAKTQALVILARKLCRVAFALMKNQSEYQPNLRLQGSPAT

SEQ ID NO: 475142 - protein, 402 aa, unidentified
MKKNTTAKRNQKAVPKRHENQIRHMAAKQRLTIGLDLGDRNSRYCILDEAGEVVSEGQLPTTKTGFRALFEKMPSSRVALEVGTHSPWCSRHLAGMGHEVIVANPHKVKLITQSTRKNDRIDAEQLARLARVDPKLLSPIRHRGEEAQGDLAVIRARAELVEARTGLINCARGLVKPMGERLKKCDADQVGETLLGGLSDQVGRVVGPLLKSVEGLNEQIAEYDRRIEAVAQRYPEVELLTQVYGVGILIALTFVLTIEDAERFAHSRDVGAYLGLVPKQRDSGDSQPQLGISKSGDRLMRSLLVQGAHCILRKGAPDSDLRAWGMARLESGDNQVQQPSGGKKAKQQKSGSKRGKRRTIVAVARKLAVLLHRLWVTGEVYDPLYNRKAAMQAGQGQAKVAA

SEQ ID NO: 475143 - protein, 317 aa, unidentified
MDDAGHVVLRKRLPRDALMPFITQLPPVIIGMEACGGAHYWARRFREHGHTAKLIAPQFVKPYVKSNKHDPGDAEAICEAVTRPTMRFVPIKEVEQQALQSLHRARERVVKARTALVNEIRGLGLEYGIVLPQGVAKFRTTFMAVLDAERTKLTSMGLELFMQLYEEFCVLDKRLASYNAKIEAIATAHPVCQRLETIPGVGPLTATAFIAAVSDVSAFKNGRQFAAWLGLVPRQHSTGGKARLLGISKRGDVYLRTLLVHGARATLRWARLKTDRRSKWVRALMERRGKNKTAVALANKNARIAWVLLNSDQIYMG

SEQ ID NO: 475144 - protein, 342 aa, unidentified
MSTITVLGIDLGKSTFHVVGHDSSGKEQLRKKFNRHQLIEFLNNHPVTTVAMESCGGSHWLARKCQAFQHHVKLIPPQYVKPYVKTNKNDFIDANAIAEASTRPSMRYVGVKTQSSQVLCVIQRIRSSYIKDRTACMSRVGAFLLEFGLAFPRGHSAMKNLFPWLAKQSETLPKALMRELVEYHEHYIFLNEKIALQDKKIKELVNQDERAQLLKTIPGIGDLTACQCLADIANAGDFKNGRHMAAWAGLVPHQYSTGGKSTLLGISKRGNKALRTLFIHGARAMMSRPELAEKAFGNWVYELRQRKPFNVAVVALANKLARIAWSVMYYQKPFEAVKVGHQ

SEQ ID NO: 475145 - protein, 414 aa, unidentified
MSKNVKVIEYEQVISRGCGLDVHRDTVVATVMGSGIKTETRTYNTTTSSLNELGEWLSSLGVTDGAMESTGIYWKPVMHVLRVYPINLIVVNARHVKNVPGRKTDKKDSEWICQLLISGLLKGSFIPPEKIQNMRDLHRYKKKLIGMQSSEKNRIIKFLEDANVKLASVVSDTSGVTATHLINGLIEGRTDLDKLISECYHKKLKSSPQQIKEAITGRLTAHHAFILKSIQKHIKSIEEQITEIEKEIDKYIIDFEKEIELLRTIPGVQKEGAIGIISEIGVDMSVFPNEHHLAAHSGMCPGNNETGGKKKSTRIRHGNKYLKATLVELAWGATRTKKSFYKAKYESMVSRRGKKKALIAIGHKILCAAYLIIKNKEEFKELGYEYLLERKKKAKIEYLKRELKEFGYNIEKVA

SEQ ID NO: 475146 - protein, 467 aa, unidentified
MASAGSGKRRRKRKGMCLEDRPLLEANAAGIDIGAREVFVAVSSDRDKNPVRVFATFTEDLNEMARWLVNCRITTVAMESTGVYWIPLYDVLEQYGIKPCLVDARNMKNVPGRRTDWHECQWLQYLHSVGLLRAAFRPEADVCAVRVLMRHCSDLAEMSHQHIQHMHKALTQMNLQIHHVISDITGLTGLAIVDAILDGQRDPVELAKLRDPHIRASEEMIRKSLVGNWRPEHLFTLRQARQMYQRYREQIRACEQEIETLVVRFQPRVDPAERPLPPDRKKRYRARKSKGAKQSTCFDTRMESYKLFGVDVTQIPGLLLMALRLFSEVGRDMSRWPTAAHFVSWLALCPDNDLSGGRVLWTGRRRAKNPAGQLFRLAAHSLHHDETPLGDYLRRMKSKLGPAAATTATAHKIAIIFYTMVKNQAEYDLTCWSQRNAEREKRFEATLKRQAEARGYKLVRVEAEPAA

SEQ ID NO: 475147 - protein, 359 aa, unidentified
MIPDNISVTLLKGLIMKKYFLGCDVSKGYADFIVLDCDKNIVENNFQLDDTFNGHNQLYSILVDFYKEHPNTSILSAVESTGGYENNWFNTLSKLGEVLNISVIRLNPLGVSHSQKALMNRAITDEISAKNIAEYLINHQNKLQPATNSYYSSLRKQWVFVKLLVKQKVQLLNQLESIVYTANTEVLTYCKHSTPNWLLRVLKQYPTAKRLARAQVSSLAKIPYVSREKAEDLIAKAKLSISSSNDKITETIIKATVEQILQLEKTIAVNEKQMSDSCKLPEVKILESFKGIATYSAVGLILEIGAIERFSSSKKLASFFGLHPTLKSSGDGFAAVRMSKKGRREPRLILFNVARTAIN

SEQ ID NO: 475148 - protein, 423 aa, unidentified
MAKIVRPICCGADIHKNFIVATIATVGAEQETTHVRETFTTLNSGLGSFCTWLLNHQCYEVCMESTGKYWIPIFNVLEEAGIHVCLTHPKYTRAIKGQKTDPKDSKWIADLFQGDYLHASYIPCKMVREWRELARYRTKLVYMRSSERNRYQNCLTTANIGLGSVLSNTLGKTAKDIVGYILSTSTIDEEYLVTLIQRTARKKTKLILESIRGHRLDREQRFKMREARAHMEYLDQSITRTEDELYKRMEPYEGLIEGLAQIPGISKLSAALILAEIGVDMTVWDSSKKLVSWAGLAPTNNESAGKKKSVRISRAGQYLKPVLVQCALAAIRDKKNPYFAIKYRQIKVRRGHNRAIIAIARMMLTCIYHMISSDDLVFMPKDYDEVINSTGVHRFSKPLNEEIAIAFLAAQGYDVSTLAKKLE

SEQ ID NO: 475149 - protein, 381 aa, unidentified
MDAATRDQQCNSEPVLFMAMELSASKWKLGFTVGLGQKPRERTIDAGDLEALSEAVGRAKRRFHLCEDTRVVSCYEAGRDGFWIDRYLRGQGIGNVVIDPASVEGNRRRKKRKTDRLDLGKLLRCLVRWHRGEEKVWAVVRPPSEEAEDARQFHRELEVLKGERTRHVARIKSLLVSQGIQVKRVGTDFVTELEAARTWDGSPVPPQLRDRLVRELARLQVLRQQIRELEGQRREAIRKVKDRRMEQVRHLMRLRGVGENGAWLLVMELFGWREFRNRGEVGSIAGLTPTPWASGDEDREQGIDKAGNRRVRAMMIELAWCWLRYQPRSELSIWFEQRFGSGSKRTRRIGIVALARRLLVALWHFLRDGWVPKGAVLTAPG

SEQ ID NO: 475150 - protein, 369 aa, unidentified
MVERRVWVGFDVGADELAACAKCDEGLPIAEALLPATIEGVISFLDGCGQPEHVTIGLEAGSTGIHLTRKLRERGYRVHVFDTRQASKFLAIRANKTDPNDASGLSDLVRLGMGVVSEVTVKGIECQLLRSKLMLRQKLIQHRMAGEGAIRSAFRLNGGKLDKCYSATSLRRNVLAEISNIRDREGFDLSDDIVPVLDICEATRRHLEKIDRALMHMAKDHPICSRFLTIPGVGPITALSFYSSVEDPARFKRNGDVGAYLGLVPRLKQSGTSSVRWGISKMGNSMTRTHLVSAAAAMMRQKGEVGPLRAWADNLRERSNYRRVTTALARKLAVVMLSMWKSGQSFKFSTNIVSEPKSEAEEPITKLAA

SEQ ID NO: 475151 - protein, 358 aa, unidentified
MAVIEGVCRIVGGVDTHKDLHVAAIVDEQDRIIGTRSFATTRQGYRQMLAWMRSFGELQRIGIESTGSYGAGLLRFMQQAKVTVLEVTTPDKQDRRRRGENDDLDAQNAAHAAFAGQRTVTPRSRDGMIESLRVLMACRKTAVSARRIALQMIHNTIVCAPDGLRDQLRSLTRMQLVRTLASWRPDLTAYRDLDSAYRIGLKSLARRYLELHDEIADLDAMIAALVDELAPNLVARNSIGHTGAAQLLLTAGDNPERLRSEASFASLCGASPVPASSGRTVRHRLNRGGDRAANSALHIIAIGRLRTDQRTKDYVARRLAKGHSKLDALRALKRYLAREVFTLITQRRKEINATRIAA

SEQ ID NO: 475152 - protein, 421 aa, unidentified
MEQAGDEEQVIERVAALDIGKASLVCCVRVPDPARGGRRLQEVREFSTMTRSLGLMATWLLDLGVTRVVMEATSDYWKPAFYVLEAHGFQTWLVNARDVKHLPGRPKTDRLDAVWLCKVAERQMLRASFVPPPPIRRLRDLTRYRADLVSDCTGEKNRVEKLLEDAQIKVSVVASDIFGVSGRAMLAALVAGQRDPLVLADLARGSMRTKLPALAEALTGRFDEHHAYLLARMLARIDAIEADIAALDARIEVKIAPFAEAAQRLDEIPGIGPRAAQVIIAEIGTDMTRFPTAGHLASWARFAPSVKESAGRRRGNAATGHGNRYLAAVLGNAAAGAARTDTFLGERYRRIARRRGKKRAIVAVSRSILIIIWHLQSEPPARYKDLGSDYYDTRRDPQRKARNHIRQLQALGFRVTLEPAA

SEQ ID NO: 475153 - protein, 465 aa, unidentified
MIGDLEEDRVVRRLVGVDLGIASCHTVRVLDGEGRDVCRRRCEPTVESLGRVEAAALAGTPAGTVLEVVMEPTGPAWLPVAVFFTARGHLVFRASSAKAADLRRFLSRHAKSNGIDADTLARLPLVDPAGLHPLELPGEQAAALDRRVRATDRLTMLAAQHKTRIKDLVRQLMPCSPLTGDLGLADMAVLERWADPRALLAAAPARLTRLIGTASHGHQGADRAAQWRQAAADAVALYGGHPAAAFADLADEVRTEVRLLRATQAELAGHAAERETAYRYTDVGGLARSLPGLATVGGPVLVAVMGRPGRFPTAAAFKSFTGLAPKASETGNTDRKGQPMSKAGSALLRTTLIRAADTARKQDPQLARIYHTQMVDRGAEHLKALCVVAGALAERGWAVMNRQMPYVICDIDGHPVTPQQAKRIIAEQYTVPEEVRRRRRSSKTARRAPAQAQRGRPLSKPPAAA

SEQ ID NO: 475154 - protein, 370 aa, unidentified
MGKSVLYVGLDVHKMSVDVAIAEAGSGGEVRYYGRIGGDLEALDKVTRKLQAQGAELRFAYEAGPCGYQVYRHLTGQGWPCLVAAPALIPRRPGDRLKNDRRDALTLARLFRAGELTPVKVPDADDEAMRDLSRAREDAISVERRAKQRTGALLLRHGRRYPGKTTWGRGHWRWLLQQVMEHPAQQIVLQEYLDAVREASARVQRLTGQIRELIPQWRRGPLVAAYQAMRGVSLIVAVTVVAEVGDLSRFNNPKELMAYLGLVPSEYSSGASVRRGHITKTGNGHARRVLVEAAWAYRLRARVTRPLLQRQEGLPESIRQLAWKAQLRLCARYRRLLARGKAKQTIVTAIARELAAFIWAIGQAVEPVTT

SEQ ID NO: 475155 - protein, 318 aa, unidentified
MIQEHTFVGIDASKLRFDGYAHPSGRRLSAGSSARDIAAFTRQVAALSPAAVGLEASGGYERRLADSLHAAGLEVHILPPARVRGFARALGQVAKTDAIDAAMIAQYLAAAHHRLKPYAPDPARARLSALAAHRRRLVAENSGLASQLDTIDEPVVRAMIEARRRSIAQDVKALDKAVQALLAATADLRQRHRRLCQVTGVGPIFATTLLADLPELGHVSPKVAAALLGVAPHARQSGNTSRPGRCAGGRKHLRDIAYMGALSAIKARDPVLQPFYARLRSNGKPFKLAMIATIRKLITILNAIARSDPAFSEQSTVA

SEQ ID NO: 475156 - protein, 319 aa, unidentified
MAQMVVTAGIDVSKGWLNIALWPHNAELQVDRAAAGYDQLTAWLTQHGVMRVGLEASGGYEIAVIDALEARGFEVVRFNAQRVRLFARAKGRLAKNDRADARAIAQATAVLLDGAPARRRRDLDPLVEHLTYRRQMRVWITDCASQLEHLRDRSLRKKTEQRQIALRQELAALDRTLAKLVAEHDDWHVLEQRLRSVPGVGPVLVHTLIALLPELGRLSRRAIASLVGVAPFDDDSGKYAGERHIRGGRTAVREVLYMAALVAKRYNPLIAAFAKRLAGKKPKVILVACMRKLLVILNAMLRDGQPWKHADKPVLNPAA

SEQ ID NO: 475157 - protein, 440 aa, unidentified
MRIMYERCCGLDIHKASIAACALISEKGKPQEETRRFGTMTADLRELAGWLQQKGIRHVAMESTGVYWKPVWNILEPAGFELLLANAQEVKVVPGRKTDKKDSQWIADLHKHGLLRNSFVPPRAIRDLRDLTRTRAILTQEHTSICNRIQKVLEDANIKLGSVASDVFGVSGRAILRALMKEENDAEALADLSKGLLRKKIPQFRRALEGQVRAHHRSLLTGQWSRMEFLEREIVDLETQIAERMKPTPEETALTLPNTAEDAPAPLSPREEAIQLWMEIPGVGWTAACSMVAELGVNMDQFPSAAHVASWAALCPGNNESAGKRLSGKTRKGNVWLRRTMCEVAWAASHTKDTYFAAQFHRIASRRGNKRALMAVAHSILVTAYHMLKHKRHYQELGADFFDAINRDKVRDRLVQRLAKLGFDVTLKSKASIASDSQKN

SEQ ID NO: 475158 - protein, 533 aa, unidentified
MAAKRNSRKSRTISPDVLGKPKGVIQPRVQEVGPERFGIVAVDCAKARSKWMLCNFYGKVLIPPTVVEHQRTALELATAELRDAIEQHGLADHVVAVEMTGTYHRPVQRAFRKAGSETRLVHPFASRHYRVAAHGDQKTDDHDLDGIFRATVNGFGLLEPVWDEIYLRLQVLARHRRDLVRKRAALQSQIRQLLERCLPGYGALFPQDDLWTRPVAMVVACRAVRPEDILAAGMAGASRWLKEDRVQAQARTVERIVTWAANAAAADPLCESLTRVWRTLYEDWQTKSQQIGRLEQELAEILVKTPYLLLLSHPGINVVSASELAGEMGPIEHYAHAKAITGRAGLFPSRYQSDEVDRAGRPLTRFRNARLRAAWLRVADCLIRTNAHYRGKRELWKQQGVDPRDIHCRVANRVTRTVFQMVSGRQLYRHPSRLDRSYVLDKLLKFHQQHGTAPMETLRDLRQAAAQIPQPDRAEEAKPLQETCRRARRSRRAGPQAIGEILVQVLAKLGVDQVQSETEAPGPDAIESGTGTR

SEQ ID NO: 475159 - protein, 423 aa, unidentified
MKLAAEQPFTALVGIDWSDKKHDFCLQGADSRQREFGVVAHRPEAIDSWAKALYQRFGGSIAVCLEIAKGPLVHALQRYPFIVLLPVNPATIAKYREAFVPSHAKDDPTDAEIALELLLRHRDKLQVLKPQSAAMRALTTLVEQRRNLIGDKTRITNRLCSTLKEYFPQALDWFEDRDTALFCDFLQRWPSLKHVKRARQATLRSFFCEHNMRRTELIEERIRGIRSARALTEDVAVIGPHQLLVLALIAQLRVTLQAIDQFDVEIADVAKRLPDYALFAALPGAGAILAPRLLVAFGEHRERYASAAQLQQYAGVAPVLERSGNKCWVHWRIACPTFLRQTFVEWAGSTIPRSFWASAYYQRQRDKGCSHQAALRALAYKWIRIVYRCWQTRTPYDESTYLHALKRRGSPLIAALSVALQSP

SEQ ID NO: 475160 - protein, 347 aa, unidentified
MNLYKLPHKYYCGVDLHSRTLYLCVVGQEGGVLLHRSLPCDPTRFLLAIAPFREDLVVAVECVYSWYWLADLCAKEGIAFVLGHALYMRIIHGAKAKSDRIDSEKIAVLLRGGLMPTAYAYPADMRATRDLMRRRLLFVRQRGSLLAHIQITHHQYNVDPPGKRITYRSNREGLGEAFEDPSVRQSIASDLAIADHLEVVIGELELAVLRQARVHDPNAFTLLTSVPGLGKVLALTILYEIHDISRFPSVRDFASYCRLVKCERRSAGKNLGSGGNKIGNAYLKWAFSEAAVLFVAKSEQGRAVLKRLERKYGKPKALSVLAHKLGRAVYFMLARKQAFDPQRFAAA

SEQ ID NO: 475161 - protein, 354 aa, unidentified
MPRKVNQLEAVATLGIDIGKNTFHLVGFDRKGAVALRQKLSRSQVEARLANIPPCLIGMEACVGAHHLSRQLKAHGHDARLMPGRYVRPYSKGPKNDFRDADAIAEAVLRPTMKFVGIKTVQQLDLQGLHRVRERLVCQRTSVIDQIRSFLLERGIAVRQGLRALRTEIPIILAMTDKLSPRMIHMLEDLCTDWRYFDERIDAVSNEIETLSQQDDGARRLMTVPGIGPIISTATVAAIGSGDVFAKGRDFGAWLGLVPRQMSTGGRTVLGPISKRGNRYLRMLFVQAARAVLLRPQSWERHGLKSWIEAAARRLNRFKLAIALANKLARIAWGVLHGGRNFEIRSTKPAPHAA

SEQ ID NO: 475162 - protein, 371 aa, unidentified
MNNNNTKSTSGSEGNEAREQHKGDRVLKLGLDLHYRQVTVAMQEDGGRIKGAGKMSHQAFGHWMDKKLAAGWQIESCYEAGASGYWLHRQLVALGVKNLVVAPKAMGQGGKRQKTDRRDSAELVDGLDRYLRGQDKALSVVAVPSVEGEEKRALIRYHRQVMADRSRLEGRGKGLLCAQGIEVRGRWWQAKGWRELNADPGLKDWMKEQLEAWRQKVLSAEEEQGELRRRIEALAPAMRPKGVGAYSTAVLEYEMKGWQRFHHRGQVSSYTGLCPGIHQSDGRGKEGSINRCGNRVVRWNLVEMVWRLMVWQPHYGPVRQLAAGLVRSKRAKRRLVVKAARQLAIDLWRLATDQTTAEKLGLIMHSDRRRQ

SEQ ID NO: 475163 - protein, 484 aa, unidentified
MAAKNKDPKTDTDGKSAGAAPEHSGDGAEVAEDRVQVVERAAAIDVAKGSGMVCTRVPGSRPDRRRQKVWRAEATCGEVTALMDHLRCEGIQRLVLESTSDYWRIWYYLAEAAGLEVWLVNARDVRHLPGRGKSDRLDCVWHCKLNERGMLRRSFVPPQETRDLRALTRTRARLAQDQARHQARVEKILEDALLKISVVISDLFGASGRRFLDALVAGERSPKALAALGDTRLKATRRELEAALTGRFRDIHAFEISTHLRLIDAINEEIALLDEKIAQQLALVPRTAPACVACGLAGGGHVPGCPDEGAAVPGLAGRLDEITGVGECNARVIIAELGTDPSQFPTPGHAAAWARLTPRSRQSGETARPGRTGKGNRYLRGALGQAAMAAASTDTRLGAMYRRIARKRGKQKAIVAVSRVICEIAWILICDPGARYEELGPDYYSPRSPARQTRDKIREIERLNPGKKVILAPADPGAGAGQAA

SEQ ID NO: 475164 - protein, 356 aa, unidentified
MSTITIGVDLAKSVFSVCEVDGSGRVLRRQDLRRDAFSVWLAQVPAGTVVAMEACSGSHHWARRCLEYGLQPRLMAAQLVKPYRKSQHSKNDRNDAEAIATAARQGNMHFVPIKTIDQQARLGWHRVREGYKAEALAISNRLRGLLAEFGIVMAKSDKALRRVLADLHEQTTLPAEFTALVRDLATHWEQVRTAFDACDARIEAHARDDERCVRLRGIVGVGAITADAMVASLGKAQEFRNGRQLSAWLGMVPSQYSSGGHTRLGAISCRGDGYLRTLLIQGARSSLQRAKAVATEKATPEQLWIRALAGRLPFGKVLVAIANKHARQLWVMLAHDVDYDASASLRHPMHRSAQSA

SEQ ID NO: 475165 - protein, 369 aa, unidentified
MPHVTSIGLDVHARSVAAAAFNPFTGEVVHRDFGTDAAEIAEWALGFEDPRACYESGPTGFHMARELRALGLDCAVAAVSRMQRPAADARRKNDRRDAEFIARMLATHNIVEVPLPDAAVEAARDLDRALEDAAADYLRARQRLNMFLIRLGYVWDERNADGTRKGSWTRAHWRWISEIRLEGPQRDVLEHYVTAARCAESDRRQLEKKVLALARTDRWRPAVEALSCIKGIDALTAFRLAAEAGSFTRFRTAPAFASWCGLIPSERSSGETERRGGITKAGNRLARTALIESAWHYSRCTPRPKAPPLGADVPAAIRARAGDCTARLCRRREALAAAGKSACKANAAVARELACWVWEIGRRAEGTLG

SEQ ID NO: 475166 - protein, 359 aa, unidentified
MKIMKKQCVGTDISKANFSALICSKSSTDALSYSVSKKFGNDKKGFNQFTRWVAKESDKDIPLVFLMEATGVYHEALANHLHKIGKTIHVILPNTSKNYFRSLNIKTKTDDVDARILAQFGVERKHKEWQPPKKIYKEMRDLSRYRIQLQEQKTALMNIAHSKEYSHEVSSEIKKSNKRLIRILDKEIEAIKVKLEALVATDENLSERIRKICTTKGLAIQTVAGLIAETNGFEGFQNGKQLASFAGYDIVHKESGTSVRGKTRISKKGNRYIRHLMYLPAMSASKYVPELKNLRDRILKRTGIPMKAQGAVQRKLLLLTYTLWKNETEYEPEHHKKKIARAKAQATQDKLKASFPLEV

SEQ ID NO: 475167 - protein, 469 aa, unidentified
MRIIGLDLAITSAHKAVVADETGKFLTPVFSVATWPRDLAAMLCRARQGAAADLPLTVVMEPTGLAWLPVAVYLLLQQVTVYLVNSQQVADLRRYYKKHAKSDRIDARVLAKLPVVSPEKLHPLVLPSADLFALQRACKQVDWLITHITALHNQIVALDRVVWLGGWEAFVFGNPFSPAARWCREHYYNPMTVLSAGTQTIRQAWRASNLDPTDAGAWARLLVALAKQVVALYGNPSSHVDFGALQAEVNLKQKWMAQFEADRDHWRLEVVRPLYRRLHPSRNLETLKGVGQDSAAVFLSFIGDPKRFPNGRVFRGWSGLVPRSAQSAESEAKGLHISQAGPDLPKKYAFLDGDVGRRWDPQLAKIYYDQMVHYGKHHTQAVVAVATHLLDRILVVLQEDRPYELRDVDGTPVTVEQAQRIIAEKYTVPDDVRQRNNRRARRARAEVQAERQHARREKRKGKSASFVRG

SEQ ID NO: 475168 - protein, 339 aa, unidentified
MKTYAGIDLHSSNNFIGVIDTKDKRLYSKRHPNRMQDVLKVLGKFKATLQGVVVESTYNWYWLVDGLMEAGYSSAHLANPSAIKQYEGLKHSDDQHDAFFLAQLLILGILPQGYIYPKKDRPVRDLARKRMFLVQHKTAHILSLQSLIARCCAMKVSASDMRHLTVKELKAWLEEEYLVLSAQANLESINFFKQNIQRLEKAIRKKVKLRKAFHYLKTVPGIGDILALTIMLEVGDINRFSKVGNFTSYCRCVPSRRLSDGKTKGYGNRKNGNRYLSWAFTEAAQLGRRHNERFRKYYNRKVAQANTSLATKALGNKLARICYFIIKDQVPFREELFCQ

SEQ ID NO: 475169 - protein, 344 aa, unidentified
MDYYAGIDVSLEYSSVCVVDASGKVVREAKVVSEPEALIGWFGSLGLELARIGLEAGPLSQWLYAAMKQAGLAVELLETRHVSDAFKAMPVKSDRNDARKIAQLMRLGWFRPVHCKSTTAQEIRAMLTARKLVQSKLLDLENSLRGILRGFGLKVGKTTRTKFAGRIEELVKGHPNLQTIGQALLRARAVLLAEFNGFEKRVRAMSRLHDKARLLMSTPAVGPIVSLTFACAIDDPSRFTSSKQAGPHFGLTPKKYQSGETDYTGRISKHGDASVREALYEAAHIMLTKPIKRCSGLKSWAMRIARRAGTNKAKVALARKLAVIMLRMLKDNVPFNPAAKPATA

SEQ ID NO: 475170 - protein, 346 aa, unidentified
MTIVERDRTITGGVDTHLDVHVAAALDPVGGLLGVESFEVNARGYRALLHWMGSFGAIHKVGVEGTGAYGAGLARYLQQKGIDVVEVDRPNRQARRQSGKSDPADAVEAARAALSGRAAGTPKTRDGRVEAIRALVVAKRSARRARIAALCQMRQLSFTAPDPIRERLKGLSTTALWETCASLRPRPATDVVDHATKVALRSLGRRIEELEDEVAVIDALLSELVTKTAPGLLALYGVGTDTAASLLVAAGDNPERLRSEAAFAHLCGVAPIEASSGKVIRHRLNRGGDRYANQALWRIVMVRLVSDPRTRAYMERRTKDGRSKLEVIRILKRYVAREVYRQLPRP

SEQ ID NO: 475171 - protein, 380 aa, unidentified
MPEAVEAWVAQMSQRFAGRPIAVAVEQSRGALVFLLSKYEQLHIFPVPPAMTANLRKAFYSSGAKNDPSDADLLLDLLQRHREKLRRLSPDTEATRLIQNLVEERRRLVDEKTAQSNRLEAHLKIYFPQIPRWFGDVGSPMVCALLERWPTLEALQKARPDTLRSFFRKQHSRKEELIESRIKAIGEAMPALKDRAVVEAKVAVVKVSVQLIQDLHEGIEGFNRQIQEAAEAHPDFFIFDSLPGAGAVMAPRLLAAFGSQRERYQNAAEVQTFSGIAPVTESSGKSSWVHFRFACSKFLRQSFHEWAALSIPQSKWARAYYELQCRRGKKHHAAVRALAFKWIRIIYRCWKERVAYDENVYLAALAKHNSPLVAATKAAL

SEQ ID NO: 475172 - protein, 409 aa, unidentified
MRIIGLDIHRAFAEAVAWDDGKLKRLGRVDMRRHLLEAFAKKLSKEDVVVIEATGNASSVAAVIAPHVKKVVIANPKQVRIIAHAKIKTDTIDASVLAQLYASGFLPEVWIPDEPTQALRRQVTRRNQIVRQRSRLKNIIQSILHSHLIPSCPHADLCGASGRAWLFHQVLPEDERLAVERHLREFDRLGEDLKVIERDLARSALADEGVKRLMTIPGVDMVVALAIVAAIGDVGRFGQSQKLVSYLGLNPSVRQSGPGPAYHGRITKQGRGHARGMLVEAAWAAARAPGPLRAFFLRVRARRGQHVAAVATARKLAVLIWHLLSKGESYVWARPALHARKLRDLELKAGYKAARGQRGAAHAYNIKSHRDQERRWVEQAETAYARFVSGWNPRGPKRVRTGAATEVRR

SEQ ID NO: 475173 - protein, 372 aa, unidentified
MTIVADEHAPVHVTGGVDTHADVHVVAALDQLGRELGWSSFPTTPAGYTNLERWLGAFGPVGVIGVEGTGVYGAGLTRALSAGGLRVVEVDRPDRKARHRQGKSDPIDAYAAARAAQSGRADGTPKTRDGTVEMIRTLRVARTSAVKARATALTQLKALIKTAPEPLRSDLRHLDGAALLHRCGGLRSARGPAPTPSPFAKRTPRPGALVDPTAACKRALATLARRISVLADEIADLDDDLEPLVTDTAPRLLAMFGVGLDVAGQLLATVGDNPERIGSESAFAHLCGVAPIPASSGKTNRHRLNRGGDRHANHALWRIAMNRLRYDPATIAYRDRRAKEQKSNKEIMRCLKRYIAREVYSAITADAGQTGR

SEQ ID NO: 475174 - protein, 342 aa, unidentified
MYYIGLDVHKKTISYCAKDASGRVHQEGKLGATRCELDSWMRTLPQPWTVAMEATIFTGWIYDHLHPHATQIKVAHPLMLRAIAAAKKKNDRVDASKIADCLRCDFLPECYMAPTEIRDRRRTLRYRYLLVRQMVQTKNRISGLLMETGVTHNKQRLHKVGYFRELLASNEEVSESIRPLLRLSRDTIARLQKTERALVSSLQRDPLLTERIKRLRTVPGVGPITALTWTLEMGEISRFRSIRQAISYCGLCGDERSSAEKSIRTPISKQRNKNIQFVLIEAAKLAPRQDHDLALLYEREKQKGNANRATPAVARKMVAYFLAVDRGQRDFVPAEDCRGAVA

SEQ ID NO: 475175 - protein, 316 aa, unidentified
MDDKHTVYGVDVAKAELMIGHDETEALLRIANTPEGIAAWLAQLPTGSWVAMEASGHYHQLLAHMAHAAGMVVYVLNPQLIKHYGRAVGMRGKTDRLDAQLIARYVLREHSKLRIWEPPAPGADALSRLLVRRQALVNARQMLAQSLSGLAELKAPRQALMASFKRMLAQVELLIRTEIARVPAMAALHRRLVSIVGIGTIVAAQLVASLTALRFTRADSFIAYTGLDPRPDDSGQRRGRRRLSKRGHGLLRCLLYNAGMAAARSKLFKPTYQQLRDRGLQSTEAIVILARKLARIAFALYQSGQSFDAQRHVKTA

SEQ ID NO: 475176 - protein, 360 aa, unidentified
MRHEITKESFKNQSFYVGIDFHKKSWKVTILGEHYEHKTMSQDPSAEHLVRYLNHHFPGATYQAVYEAGFSGFNSCRELNQLGVNCIVIHPADVPTNQKERLQKTDKADSRKLARALRNKELEAIHVPDPELEADRSLVRQRFRLVKDISRTKNRVKSLLLQFGISIPEHITSAQSRHWSKVYSNWLKNLPVDRTSLRQVIDNYINIAESQRKELLIVNKQIRQLSLTQGYQSNYTLLLSVPGIGLMTAMTVLTQLGDIRRFERLDDLCNYIGLVPSMYGSGDKMQTGKMIHRGRKELKIMLIEASWEAIRKDPALMLKFNELTKTMHKNKAIVRIARKLLGRIRFVLNNNQPYELSVVK

SEQ ID NO: 475177 - protein, 397 aa, unidentified
MYIVGIDIAKRKHEAAVIDGEGTVIIKPFSFTNNCSGYNRLLAMLTKAKLPLDEVSFAMEATGHYWLALFTRLQKEGFRVQVINPVQTNSIRSFYIRQAKTDPRDALLIAEVIRFGHFSESTLHPENIYELRELCRGRHAIVSMQADVKRKVVALLDQVFPEYETAFTNMFSDTSMAILQTCPTPKELSEMPFAELCHLIEVSSHKRFRMAKAQELQELARNSFGFAMAGDVFSTMIRLYAKHLDFLKQQVREMDRKIAEIMETLDTPITTITGIGPTLGAYILSEIGDISRFSSAAKLAAYAGIDPTMRQSGEYNGVRNRMSKRGSPYLRHAIWLAASSAVLHDPALKLYFQKKRDEGKPYMASVGHACRKMVSIIYAVMRDNKAYTPCIPNEISA

SEQ ID NO: 475178 - protein, 412 aa, unidentified
MEVIHSRCAGMDIAKRDAKVCIRLAGSGRRRTVETVTTWGATTRQILALREHLVAERVTCIVMEATSDYWKPFYYLLEDLVGVEVMLVNARHVKNLPGRKTDVADATWLAQLGAHGLVRGSFVPPAPVRQLRDLTRTRTAVTRERGREIQRLEKVLEDAGIKLSSVASDITGVSGRAMLEALIAGNSDPTAMADLARRRLREKIPALTEALTGRFTGHHAFLTRTHLNLIDQHTAAIDELTARIEVVIEPFRRFRDLICTIPGIGGNTADVIVAETGADMSRFPSAEHLASWAGTTPGNNESAGKVKSSRTRPGNPYLQGALGIAAISVSHTKHTYLAAKYRRIASRRGPLKANVAVQRAMLIAIWNMATTDTAYLDPGADYFTRLNPEKARTKAIRQLEAMGYHVTLEQAS

SEQ ID NO: 475179 - protein, 391 aa, unidentified
MIYVGIDIASEKHDFFMIQAETGISFSKSSITIKNSDDGYKKLHESIRAFCGATGDSQIRIGLESTGIYHTNIISFLLSQNYQVMMINPILTNMARKASKVHCPKNDNLDSQTICKYMIDNSDKFSPYTLSLYHNEALKSLSRKRFYIVEDLRKAKLAVNSLIQQIFPEFKSFFSNIYGDSAIAILKEYRTPKNLAKAHTKKVASFIHGRCKCTAEQLIAAAKASVGISEPHLAFQLTDAIDEMEHIQKRIKSYDAQIKEYVDLLCPNLLSIPGVGYTTAGLIAGEIRDIGRFHSAESLISYSGVDVTVYESGKYKAKHLMMSKKGSKYLRYALFQVARIIWQHDPVFQAYYNKKKAEGKHYYVILGHIQKKLCRVIYSILKSASSYSSAS

SEQ ID NO: 475180 - protein, 431 aa, unidentified
MKNRINAKIEEITVNTLIVGVDIAKEVHWARFVDYRGMEIGKAISFTSEKKGFEKIIAEIETICKMKILKNPINKIKIGMEPTGHYWKPLANYLVKKEYTVVCVNPYHTKKAKELDDNSPTASDKKDAITIARLVKDGRYFTPYLPEEVYAELRILTNIRHGILKRNSAAKNNITAVLDEYFPEITTVFKNPLTGKASRQVLKNCPFPCMILELGEDEVLKKIKEGVKKTVGVKKVRQLIESASNSIGVEYGLESAKLKLKILLDELELVEKQLAEVEELMEKMLHSTGYSKQILSIKGIGVISAASFLGEVGDPLRFNNAKQISNYAGYNLTEDSSGKNKSGTCISKRGRSQLRSVLYKMALTMVATNDEMKQLYSYLKTRKNNPLKKKQALVVISKKIITVIYSLFKKQEIYNPELMLGEVRKQMMTAV

SEQ ID NO: 475181 - protein, 426 aa, unidentified
MKVMHDRAAAIDVHKDMVKVAIRVPGAKRGSRKTDVLEFRTFYGVLQAMGRELRRRGVTHVVMEASGPYTEPVYYALAELGFEEVMVINPAHAKALKGHKTDARDAIRLLDLYECGLLSGSYIPSPELKEVRDLARYRMKTVQARTSEIQRLQKTLESAGIKLDSVVSDITGKGPTAMIEALIDGERRGAVLADLAQGRARTAGKLADLSMALTGRFTDHHALMCRLHLDRIKLFDASVADLDATIAPLAARYSREAELLKTLPGFGDVVAAGWLGAIGPAPHEHFATAQKLASWATVCPGNYISARKSKGGRTGDGGTYIKPLLVQAAWAAVRTPGRIQARFQRLVRRFGGSRNKGAVKRAIMAIAHTLLKIAYNVLKTGRPYQDLGADFCTKRESPQARQDYLIRQLQKLSPGCTITITPAEAA

SEQ ID NO: 475182 - protein, 414 aa, unidentified
MEELSFRIFVGVDWGDREHQVCAVVEDKPRQRRFDHSGTGIAALICWLMELCERRPDTVGIAIETPHGVLVDAFLEHGFAVFAINPKQLDRFRDRFSMAGAKDDRRDALVLGSSLRTDPQAFRRLSPEDPLILQLREFTRAYRSLEKENRRLSNQLRAQLNRFFPQVLQLSKAADEPWVWSLLERFPSPDKVRHAHHRSVERILREHRISRVTAVEALAILKSPPLPVTEGVVEAATQHIALLLPRLRLVNQQRRHCEQHMARLVNKVAEAEDAQPGPKREHRDVEILLSQPGVGDIVAATVLAEAHQPLVQRNYHALRTSGGIAPVTRQTGNSHTVSMRYACNQHLRRAFHWWGSSASLHEPRARDIYKAHRDKGQSHARAVRAVMDRELNVLVACLDSGRLYETDHSTEKSP

SEQ ID NO: 475183 - protein, 356 aa, unidentified
MSYDVKYIGMDVHKEAIVIAVQNGSGKLVMESVIETKASSILQFLHGLRGELHVTWEEGTWAAWLYDLLQPQVQHIVVCNPRRNALLKEGSKSDKVDAQKLADLLRTGMLRPVYHGENGLRTLRELGRSYQTISKDLTRVMNRLKALYRGWGIPCAGTQVYAARAREEWLSKIPQAGVRRRAELLYQQLDGLQALRREVRPEFLAESRKHKAAKLLRQIPCIGPIRAARLIALMQTPYRFRSKRQLWTYSGLGIETHDSAQYHFVSGQVQRSKKPQQVRGLNRNHNHEMKEIFKSAATRASCGRGPFHDFYAALLAKGMKPEMARLTLARKIAAITLTLWKKEERFDVEQLKTQAA

SEQ ID NO: 475184 - protein, 373 aa, unidentified
MNYSTVYVGMDVHKETFSLCCYTNEKEQAEYPQKVDGHYSKVINYIEAMRFHYGDDALFICGYEAGCLGFTLYHQLTDHNVKCVILAPTTMLQQRGKKKVKTDKRDAALIARCLAHHDYSPVHVPTDEDEQTKEYIRMRDDHKLALKKVKQQILSFCLRHGYHFTGTGSHWTQAHLTWLKALEPDGLYKEILQEYLLTYTQLTDKIQRLDQRIEELASGDSYRENVRKLSCFLGVKTITALGVLTEVGDFKRFRSARHFAAFIGLIPGEDSSGGDQNHLSITKAGNRHVRSLLVEAAQSYTRGQIGYKSKALKQRQAGNNPEVIAYADKANERLRRRYYRMVLRNNKKTNVAKIAVARELACFMWGMITGNVA

SEQ ID NO: 475185 - protein, 343 aa, unidentified
MLYIGLDVHKEFCQACVMNESGKVLSNERFLSNQEALDEFLDRFEDAKFVLESTGIWEFIYEGIEKRGFEAVLAHPLKVRAIAEAKVKTDKVDAQTLAHLLRADLVPRSWVPSKDVRDLRQLVRQRSYLVRQSTSLKNRIHAELLRRGARRPEESGGAFTKKGVGWMRSLRIPTVDSCLACLENVQEQIEAINVKLLEEFGRRPEARLIATIPGIGFYGALLIHAEIDDIRRFAHPSKLCAYAGLVPTVSQSASSVRYGGVSKEGSAYLRWILTEAVHVHIRHNPTSRLSKFYSRIERRRGKHKATIATARKLLHIIYWMLLNKERYHGHGFNPGSQTCMRNA

SEQ ID NO: 475186 - protein, 352 aa, unidentified
MIIIGVDFHPEFQQIASVDTDTGEFLEKRLAHPEEAEKFYRGLTGKKVRVGMEASGHAHWFERLLAELQFELWIGDAAVIRTKRVRKQKTDRQDAQLILGLLLEDRFPRIWVPSGENRDLRQLLWHRHRMVQARTRIMNQLQAVALNEGLRCKKRLWRERGRQQLESFPLAPQANRRRHDLLELLDRLSPTIAELSQAIEQEVEKCPAAQRLMTHPGVGALTALAFVLILGDANRFHCGKQVASYLGLVPLEDSSGNRRRLGHITKQGSSILRFLLVEAAQVTVRSLPEWRSKYFHLTLRRGRKIAKVAMARKLAVCLYWMWRKGWNYEQVRKFGSHAGQPGNRHGVQSNTE

SEQ ID NO: 475187 - protein, 423 aa, unidentified
MEMLHKRVAGLDVHKATVVACVRTMSAGKVERECRSFETTTAGLLALLDWLRESRCTHVAMEATGVYWKPVWNILSDGAFELILVNAAHIKNVPGRKTDMNDAMWIADLVACGLLKPSFVPNEGLQELRSLMRTRKQLSREQTRHVQRIEKTLEAANIKLGTVICEVMGVSGRRMIEAMISGVRDPHKLAALAHRQIKASPKELYDALHGRLTDHHRFLLQLHIGQYDALSGAIDQIDRQVDTAIAKLDEEAADGQATFRDLISLLCTMPGVSTLAATVILAEIGRDMNRFPSAGHLVAWAGLCPGQNESAGKRKRTRLRKGAPWLKTMLVQCAWAAKRKKDSYYKAQFFRLSSRRGPQKAICAVAASLLTAIYHMLKDGTEHHDLGAAHFDHRSTAAKTKRLVTQLAKLGYAVQLQPLSEAA

SEQ ID NO: 475188 - protein, 341 aa, unidentified
MKNKSFIGIDISKNVIDASIFTEGASIKDFPHAVFNNSRKGFGGMVTWLKKNHVVLSNCLFGMEFTGSYSMELEKFLTARKYQFCMLSTHTVKHYPMGPKDKNDKIDSAKIADFLYRYNGTECVKPYKMPDKTMQRLKTLMNERKFLVEQRTCFMNRRQLCTTKEDTQLYDGYIKKLSRDIENIELEEQKLLATDESLLTTYRNLLTIPGIGSVNAINVIVITRNFTAFETARQYASYVGVAPHFRTSGTSVRWRPRPSARCDGQAKADLSMAALITVQYDAELQSFYNRKLGGKQDSDTKRKALNAVKFKLILRMFAIGKQNRKWKTLDSMSNNEILAIS

SEQ ID NO: 475189 - protein, 357 aa, unidentified
MTWVGLDVHARSTHGAAIDSLSGELSRVRFGPGAEPVVTWLRELPGPVRAAYEAGPTGFGLARAAEAAGIAMQVVAPGKTPRAGGDRVKTDRKDAELLARLLLAGQLHPVFVPPGWLEAMRHLARRREQVRADVMRARHRVSKLLLVHGRVYPEPTTWNQRHRRWLGAQVFEHEPTELVFVDLLAALDGLVARREALEERLSRLAQDPRVWPTVSRLRCFRGIDTLTALTLQLELGGDWQRFASPRKLSGWLGLTPSLNQSGESKTQGSITKSGSGLARRLLVEAAWHYSRRPAIGATLANRQAGQPDPVLQIAWRAQHRLHRVHHRLKDRGKPHNLATVAVARELAGFLWAAATAP

SEQ ID NO: 475190 - protein, 341 aa, unidentified
MKRFIGVDLHKNSFTVCYMQEGGEYSLKSFKVDKRGIEEFKRTLAKDDELALESTGNAGYLARQIEGLVARIRIINPVQFKVISESIKKTDEHDATVISRYLSKGLIPEVRMRSKEEAKLASLISTRDKFVKLRTALKNKIHNILNANGIVTTKEMFNADKSLDKVLEMELDEGDLFELRVIIDEIKNLNRSIDEINKELVDRGKKLSGHKNLTSIKGIGDISATILLSAIGNIDDFKDDSKLAAYLGIVPRVYVSNEMSHYGRITKMGNKIARTALVQSTLIAIRYSPYLRGSYLKLKTKKGSGKAIIATSRKLLTIVYRTLKNNWVFEDFDNFKLAVSI

SEQ ID NO: 475191 - protein, 387 aa, unidentified
MPQSNDFSRSLVPFEQNSTLVAVIELSQSNWLVAGTVPGIERQPLKKITPDETALLHLLHRWRDEAIGKGRTITRIAVAFEAGRDGFWLARWLAKQGIEVHVIHSSSVAVSREHKRAKTDRLDTAMLTRVFLGWLRGEHGHCGMVVVPTIEEEDAKRPGREREKLVGERTRIINRLKSDLARLGIRGFKPQLRKAPQLIETLRTPEDIPIPPHTLEEMRRDFARLSILCEQIKAIEEARLKRLKDAPQTEPNAMVLLLASVIGLGIETAYMLVQEVFSRNLRDRRAVARYAGVTGAPDESGSKRREKGLAKAGNGRVRRGMIQLAWRFLLFQKDSALAQWFRSRTEGANGARKTKMIVALARKLLIALWRMVTTGEVPHGVVLRQAG

SEQ ID NO: 475192 - protein, 396 aa, unidentified
MSVAHKKRENLATFHALHRSAIGIDVHSNLIVATYQNCEYGSSSLFNENRGSGASKTELDAFASWCKAKEAEVLIMESTGVYWQSLYESLENVGFTNKQIVVVNARDVKNKRGSKTDLADAIHLAEVARQETYRASFVPAKEFRQLRCLWRSFFTLKISRKRFLNIMHKQLCQVGCRASSVFSDIRGKKATKIIDCLINGEHGETLYNHIIEITSCKQDKLKATPQQIYDALQADMESEVWFAIRQNMEHIKFLDAQIAESEANLRDKLKPYTHPMKLLTSIPGIKDITAMGIICELGDDISQFTSIRRFCKWIGLAPGNNESAGKKYSGRTTPGNKYLKVLLVEAVSGIVLMKKGFLHEVLQRFKERRGTKKSNVALAHKMCRIIFSVLTHGTAY

SEQ ID NO: 475193 - protein, 377 aa, unidentified
MKQSQMIQGKDSTGKRRLYIAFELSNKAWKIAFGDGFKKREKTIVARCLPVFEAELEKARKHFRMEADVEIYSCYEAGRDGFWLHRYLESIGIKNVVVDSASIEVNRRYRRAKTDRMDAGKLLHMLVRDIAGERKVWSVVRVPSVEQEDKRRINRERERLLKERTGHLNRMRSLLVLHGIDMKVGKRFKEDVEHVRLWDGSLLPEHVKKELCREYDRYELVKGQMDNLKEEQEEKLRVDDNISQQVEALKKLRGIGHVSSCQLVLECFGWRRFANVKEVGAAAGLTPTPYSSGTSQIEQGISKSGNRRVRKLMIELGWSWLRFQGQSKLSKWFTERFASGGKRMRRIGIVALARKLLIGLWRYLEDGTVPEGAQLKA

SEQ ID NO: 475194 - protein, 353 aa, unidentified
MGIVVALDVHRNQITFKALDRETGELSRGRIAPAARVDVRAWLERFAGRQAEFALEGTTGWRFVVEEIERAGHRAHLADPAETAAKRGRKRRAKTDNADCDLQLRLLLAGELPESWIPPAHILELRTLVRLRKTLIDQRTAWQQRIHAQLFHQGVPAGLRLRTEAGREALAKAELSPAGRELVALGLRMLDALDLELAPLDQELRAFARRQPGCRALIERLYGVGPVSATAILAELGDPRRFSSSDDAVRHAGLDITVYQSDSKRAPGHLSHEGPAVLRWALFEAAQSAARTSSPDRSYYLQVAERIDHNRACLSVARKLCRRAYHILRELGDEALLPIEQAATDEEAIAAAA

SEQ ID NO: 475195 - protein, 416 aa, unidentified
MEQVTWYVGIDWGSENHAVCVVDEAGQRREERRVDHTADAVQACLDWVMSYTGVPPSQIAVAIETPRGALVDTCLAREWRVFAVNPKQLDRFRDRHTVAGAKDDRRDAWVLADSLRTDPGAFQPVRQEDPLVVQLRELSRAEEDLDAEFRRLANQLRSQVHRLVPDLLALCPGADEPWFWALLQLAPTPAAQRRLTRARVDHLLRAHRIRRWRGADVVARLQAALFPHAPGVVEASEAQIRLTLPRLEVVHTQRLACGRQLEHLLQQLRDRPREADQRGEHRDIAILESLPGVGRKVAVTMLAEAADPLACRDYDRLRAHVGTAPVTVASGKRRVVSMRRACNRRLRWAAYHWGRASVQHDAPSAAYYQDLRARGHGHGRALRSVVDRWLRILIAMLRQNTLYEAGRFAVAGDNGA

SEQ ID NO: 475196 - protein, 345 aa, unidentified
MEHYAGIDVSLESASICVVDASGRITHEAKVASEPEVLIRWFSGLRIAVARIGLEARPLSQWLYAGMRDVGLPVELLETRHVRDAFKAMPVKTDRKDARGIAQLMRLGWFRPVHCKSLPAQEVRALLTARKLLQSKNHDVEMSLRGVLRGFGLKVGPTTPRTFPNRIRELVAGHTTLSAIAEALLAARNTLFEQWQKLEKRLRSLARQDHRVRLLMTAPGVGPIVGLTYVSAIDDPGRFRSSKAVGAHFGLTPKKYQSGETDITGRISKIGDGGVRTALYEAANVILTRPVKGSTLKSWGMRLAARAGMRKAKVAVARKLAIVLHRMLADGTEFFTEKAAAVAAH

SEQ ID NO: 475197 - protein, 372 aa, unidentified
MTSIIYVGMDVHTTNHTLCCYSMEDDRFFAEVQVEPDAKNILKYLARIEKQQSRDCRIVCGYEAGCLGYSLYHQLHAHGIDCVILAPTTMMTKPGKRIKTDRRDARLISKCLAFHTYSPVYIPTEVDDAVKEYIRMRDDANSALARVKQQIIAFCIRHGKIHDGKSYWTNKHLEWLSSLDLGNKILSEVLQEYLIRYYQLREQVDMYDMRINELAQAEPYRQKVEKLGCFRGIAAHTALSFCVEVGDFRRFATAQQFASYLGLVPGECSSGDKQQYTGITKAGNSHLRKLLVETAQVFGRSATKSGKSVALKERQAKCDSLTVAYADKANARLKKKYFKIAMRSKVNIAKTAVAREMACFIWGMMTDNISCA

SEQ ID NO: 475198 - protein, 341 aa, unidentified
MKNISVIGLDIAKHIFHIIGLDKNGNKVYRKKLTRSELTAFFANLPKCTIGIEGCSHAHYWSRELTKLGHQVKLLPAQYVKAHLRGNKNDYNDALAIAEACRVPEIREVTPKTEEQQSIQALHRMRDTAVRDRTALCNQVRSLLGEFGIIINKGIGSIRKALPRILEDGENGLYSIFRESLDLKYAQLTQLDELIDRLKKLITEHGKNHQTVKLLQSIPGYGAIVSSSYFSVVGDGKSFSNGRNVSASVGVVPKQHSTGGKTVLLRISKCGDGYLRKMLINGARSVINHAHKKDDALSLWVTRLVEKQGRNKAAVALANKLARIGWAVITSGKPYQENYGR

SEQ ID NO: 475199 - protein, 460 aa, unidentified
MDAYLGIDVSKGYSDFALLDSNKKQLEEVFQLDDTRSGHDCLKKQLQEMIKDHHLSKIWCAVESTGGFENNWYASLMEWSKTMPLKVARLNPSGVKQNIHAGLNRNVTDALSARYIAEYIIAHPQVVTYDKQDVEYSSFRSLHKHINLQKKQQTQLVNQLKAVLYSAFPELMRYCKSSVPVWVLEVLKKYPSVKHIAKLKPEQLSKINHVDNDKAQSLINKAKSSVSSRDNKTTAFLIKSFAIQILEKQELVFEHKKFLEKTCQGPEVILLTSLIGVGAYSAAAIMIEIENIHRFETPNGLVCYFGVHPELKDSGDKIPKHRMSKKGRASMRAILYMCAQTAVIFDEHMKKIYHKHRSKGKNHKQAIGVIMQKMLRIIWGMLNSNTPYNAVIDETNQNKKVVTIEQTNKKELITKRRFQELDKEAPITNKQSKKRKVHSESQVEVFQQVRDHLCAPGAKI

SEQ ID NO: 475200 - protein, 341 aa, unidentified
MDDTLIIGMDVAKATFTAATSFHGTQTYHGQFAQTAAGRQVFVEAIGVLVLATGATAVHLIVEPTGGYELAWLLEAQQQGWLVTRVNPGNVRLWGQSRGFRSKTDRRDALLLAQYGAETQPAPQTLLRAEVSELDDLLRRQTDLEQLLQSERNRQARLAQLPRQTPAVTDSLQRTIEALEKELTAINDAIRQLFAAQPGLKKQRALLLTLPGVGEKIAPYLLVDLHRYQARTQGAGTLKGFAAFLGLDPQLYESGTSVHRRSTISRQGDEVMRTKLYLGALGGIRGANPLKTFYQSLLGRHKPKKLALVACARKIAVWAWAIFTTGVPFDATRFNKAAAAA

SEQ ID NO: 475201 - protein, 342 aa, unidentified
MGKGSVQVAAMVFCGIDVSAKKLDVALLVEGRDGLVEQEFSNTAAGHKLLISWLQRQGARVRVSLEATGVYSLDLALALDQAPAIEVAVLNPKLANRFAETLRRSKNDRTDAAALAEYSRRMPFVAWQRPSRMALELRAITRHLAQLSQERTRLLNRLHAAGGSQTTPDCVRRELKHSLARCEKAMHRLRGEATIRVQQDPALRRQAELMTSIPGVGEASAVQLLSELAGLDPAMTVRQWVALSGLDPVQQSSGSSVRKPAHISRQGNRNLRRALYMPALVASRCDPHLRHFYLTLQQRHKTKLQALIAVARKLLHAIYGICKTATPYDGAKLFPQTQLLTS

SEQ ID NO: 475202 - protein, 391 aa, unidentified
MVCVGIDVAKDKHDCCILDSDGMVRADCFTIPNNMDGFKQLLQTIRNCTKKSDKIKVGLEATGHYSYNILGFLLDNDLAVYVMNPLHTNLYRKSLSLRKTKTDRVDARTIATMLLSDVDLKPYTDIAYHNEELKSLTRYRFDKVQERAKLKQSVSRLATILFPELEGLVSSIHGTSIYALLSEYPGAKQISEVHLTKLTNLLTTASKGRYGKEKAIQIREAARASIGSVMPAKSLELKHTIKLIQELASEIDEIEDSIQKIIDELNPPILSIPGMGVNSAAVILAEIGDFSNFSSPDKILAYAGCSPSTYQSGKLTNCYAHMEKRGSRYLRHALYNATKYVCYWNPVFAEYLAKKRAEGKHYNVALSHAMKKLVRLIYALQKSGKAYLAAA

SEQ ID NO: 475203 - protein, 346 aa, unidentified
MKITRVGVDIAKNTFYVHGVDRHEQPQWRGQYKRGRWLDALCKRVPAGSEIGMEACGTAHYWGRELERRGYRVKLLAAQFVKPYVKSNKNDRADAEAICEAMSRPSMRYVAVKSGAQQDMQSAHRIRETLIGQRTAKANQIRGLAGEYGLIAPVGISALRRAIPEWLEDAENGLSELFRILLADLGDDLRRLDDRIQSLDDQISQNAQADPIARRLLQLRGVGPLTASALAGALGDGQAFSKGRDFAASLGLVPRQHGTGGKSGLQGISKRGDSYLRKLLIHGARAVVRHAVGREDGLSQWINRLGQRKHVNIACVALANKTARMAWAIVHHEADYDPALAAGTAA

SEQ ID NO: 475204 - protein, 345 aa, unidentified
MSIVGGMDVHRKQLTFDYVDRATGELQRGQIAPADRRRLAVWLRRFDGMSNVEFAVEGCTGWRYVVEELRQAGVTAHLAEPADTAAARGPKKRAKTDRADSKLLRELLDGDRIPECWIPPAQILECRALLGLYHDLRREHTGWIQRVHAVLFHQGAEALGNNGVNTDEGRARLRLVAAEQLSPAGQLQITTAVAMLDVLEVHLDELRQQLRHAARHLRGAKTLIEAIYGVGPITALALCCWLAGTNRFSSSRKAVRFAGLDVTVHSSDGKRSPGRLSRQGPAILRWCLYEAGKTSARANAPNHRYYAQVRQRIDGKRAALSQGRRIVRQAHHILTALGEDAFAKV

SEQ ID NO: 475205 - protein, 340 aa, unidentified
MDGDTGEVFQRRLCPDHREVLEWIGSLPAPVAVTYEAGPTGFGLARALGAAGIDCVVAAPSKLQRPAGDRVKTDARDAAHLARLLHLGQVVAVTIPSVAQEAARDVVRAREDCRGDLMTVRHRISKLLLRQGIVYSGGQAWTGKHELWLRGQHFDAPGLQLAFDAAFDAMVACVHRRDRLDAAITAMAADSEFTPVVQRLSCLRGVSTLTAFGLAVEIGDWHRLSGRSIGAYLGLVPCEYSSGATRVLGGVTKTGNGHARRLLVEAAWHHRAPYRPSRDLRGRWTAAGPAARARGHTANHRLHTRWAGFDKRKKRPVVANAAIARELAGWCWSLAVLDDV

SEQ ID NO: 475206 - protein, 386 aa, unidentified
MRKPNDLSRSLTVLEANSTLIAVIEMSQSSWLIAGIVPGVERQPLKKIAVDANALLKLLNRWREEAEKAGCRIERIAVAFEAGRDGFWLARWLRARDIEAHVIHASSIAVSREHRRAKTDRLDTDLLKRAFLGWLRGERDHCKMVAIPTIKDEDAKRPNRERENLVGEQNRIINRMKATLTRLGIRGFNPKLKKAAEGLDALRTPEGEPIPPNTLAELRRDMMRRRLVNDQIRQIEDARLERIEDASGDGSQAMLRLLARVIGVGIETADMLVQEVLSRNMRDRRAVARYAGLTGSPAESGTRRRERGLARSGNARVRRGMIQLAWRFLMFQKDSALARWYRERTEHARGTRKTMIVALARKLLIALWRLVREGVVPEGVVLRPAN

SEQ ID NO: 475207 - protein, 452 aa, unidentified
MTEKDKISMEIVNPRAAGIDIGSRSHWVAVGQGSTDFKEFGVYNEDLYSIAQWLRENEIKTVAMESTGTYWQSLYAVLIAEGFQVILCNGKFTKNIKGKKTDIQDCQWIQKLHSIGLLSGSFLPDQATEQLRTLCRHRANLLDSAAAASKKMQKYLRLLNLRLDVVVNDICGLTGMAIIKAICNGEKNPERLADLRHHNCKKSKEEIAKALHSNGRQDYIFALKQELEMYEMFQAKIAQCDIEIEKMLNETIDNDENKKQHYIERKSYKKVNKNTPKNIDLNLMAYQHFEGVDLMAIEGMSYSTILSLISEVGVDGIKRFSTAKHFASWLRLAPNNKISGGKVLSSKIPKGSNRLKIALRNAANAIGNLKDSTPLSDFFKRINFRKGRVSAISATARKLAVIIWNMVVKGVPYHNPEEYLFRDQKKKLGLLRKIQKQINKFELESTDFQFAN

SEQ ID NO: 475208 - protein, 315 aa, unidentified
MTQITTTTAGIDTSKSKLDIAVHGRTERWQVPNTLPGWRALAGKLAKVGVARVGIEATGGYERGVVEHLRAAGFPVLVLQPIQVKAFGRVHLRRAKNDVLDAVLIAACAATLDQPRIVPDPRLAELAEYLTFLEQTEEDIRRFKTRLEHIDEARLRRMVLGDIARLKARRLAQIQDIAKRLRAHDDLARRLDLVLSIPGIGERTALALLIRMPELGQVSREEAAALAGLAPFDDDSGQHRGQRHIAGGRARLRRSLFAAALPAAYRWNTALIALYARLKARGKAHNLALVACARKLLVYANTVVQRGTPWTEKAA

SEQ ID NO: 475209 - protein, 323 aa, unidentified
MTIVEAPPGITGGVDTHLDKHVAAALDPLGRLVGTESFDADAAGYKALLVWLEDFGEVTKVGVEGTGSYGVGLSRFLRRKGIEVVEVNRPNRQSRRNQGKTDSLDAVEAARAAISGRASGVGKTKDGPVEAIRVLVVAKRSARQARVKAIVQMRHLGFTAPDQLHSRLKGLSVTALVAEGAKLRGAKSADTVTAATKASLSSLAHRIQGLDLEIAELDEKIESLLLATAPDLMARFGVGPDTAASLLVAAGDNPERLHSEAAWAHLCGVSPVPADSGKNAGHLRRHTGGDRQANSALWRIAMVRIAHDPETTQYFPLNTSSGG

SEQ ID NO: 475210 - protein, 346 aa, unidentified
MMVIGCDYHPSWQQICWLDTATGETEERKLEHASGEAEKFYRGLPGHALIGMESTGNSQWFVEMATTAGHDVWIGDAAQIRASEVRQQKHDRRDAALILKLLLEGRFPRIWTPSGQEKDLRQLLIHRYKLVRIRAQVKTELQHLAMNQGVTKKQKLWSKAGEKVLRELPLKPWASRRREDLFKVREMLNGQIVLLDQAVVEAAEKNEKARLLMTQPGVGPITSMAFVLTMGDVNRFQRGKQVASYLGLIPREYSSGGHQRFGSISKQGNRFLRMLLVEAAQGAVRCDPGFRNEYLHRCHKKAKGVAKVAAARKLAVRLYWMLRTNTGYPEVVRVESSSRVPLVSAS

SEQ ID NO: 475211 - protein, 321 aa, unidentified
MNTSLVSSIGIDVSKASLSFATLRVDHSAVVKSCANSENGIDLLLASLKEDRTATTVPCVIESTGDYHLRCALMVAEAGFTVNVINPLITKQYQRASVRNSKDDSVDAVRLARIGLMEPNLRRFKGTKQSLALKKIVASVGKLDHYQQQLKAHVKQLKETGVLLGVKVNLSQLEKAIKSIAKQIDEFETYIHDHAPKEAIEISNAVRGVSQTGVAKVLSLLDGHEFTDKDKLVAFTGLDVAARRSGAWKGRERISKRGNPHFRKLLFQMAWGLKQHNAIYREYYQKMRERGKHYFTCLIAVARKFLRFLFAYVWKKSISFS

SEQ ID NO: 475212 - protein, 346 aa, unidentified
MEHYAGIDVSLELSSVCVVDAQGKIVRETKVASEPEALVAFFASLGFAVKRIGLEAGPLSAWLHAGLKRAGFDTVLLETRHVKAALSAMMVKTDRKDARGLAQLIRMGWFRPVHAKSMGSQEVRALLVARKQLLGRLIDVELSIRGILRGFGLKVGVVTRKGFEGRIRELVTGHITLERIAGAMLSARATLKAEYEKLHKIVLAIVREDAVCRRLMTVPSVGPLVAITYKSAMDDPNRIAKSKAAGALFGLTPKKYQSGEKDVTGGITRTGDEMVRTALYEAANVLLARITRFSKLKRWGMDVAKRRGSKRAKVALARKIAVILHRMWVDGTTYRWTNAHPTAVQV

SEQ ID NO: 475213 - protein, 401 aa, unidentified
MNPVIGLDVSKGQSQGQVFLDKGQPYGKSFAFLHTQEGLHYLLNLINDVTKLTGHSPTIILESTGHYQAAVVQFLEEHSIIFIVVNPLISNQAKKSSSLRKVKTDAVDAYQLCELYYKEEFEAYKQRGVHFLNLRHLTRQFESLTDMYVQAKLQFHAVLDQVFPEYNGVFGDLFSRISLLLLREFPTAESILAAGENTIWERVACICTSRSERWAKEKAELIMAAATRNPFQKTAYPSHLISLELYISLILQYQEHLSNLQDQIDALAEEVEEYEIIQSIPGIGKKIAATILSEIGEIDRFTHAKKLVAYAGVDPSVYSSGKFTATANRITKRGSKRLRHALYLAVLCGLRRSCNKKLKEFYDKKREEGKPYRVAVIACVNKLLHWIYAVLRSKQSFLDLA

SEQ ID NO: 475214 - protein, 418 aa, unidentified
MEKHSKSSQRSEPSLKRTKARGPVQRDAKEVLAEVLEKLRGKLEAPAVSTSAKEQRRGNTVGPNRDRLTVGVDLGDRWSQYCILGLEGETLAEGQLRTTQEDVREFFQALTVARVVMEVGTHSAWMQDVITEWGHEVLVANPRLMEGSKRRKRKSDRIDANKLARLGRVDPQSLHPIRHRSREVRQDLVVLRARDALVSIRTELINTTRGLVKSMGTRLPRCSSPSFAEKVKDAIPDEVREALLPLVQLTETVNDCIARYDQKIEELGQKKYGHTTLLRQVKGVGPITSLAYVLTLEDPQRFSSSREVGPYLGLVPKQEDSGDSQPQLGISKTGDRMLRRLLVGSSQYMLGAFGPDTDLRRYGLRLCERGGKNAKKRAVVAVARKLAVLLHHLWVTGDVYEPLRRTGTETRTAQATAA

SEQ ID NO: 475215 - protein, 463 aa, unidentified
MSKPIIVAADVSKGYGDFIVIDSDKKLLMELFQLDDNKAGHTKLGELLISLKKKHKVKRVLFIVESTGGLEDNWLRMAKQASLSDFVEGYRLNPKLIHHEYRVQKRNSISDGVSALTMAHHVAKHLEYFEPSEIVVDPAYAPARNLIRHITSLKQDCTGHKNSLQQLLYQYLPSLLPFLPANWSQYFLKILITHGGRRAIQLAAKQGFKSVPRVPKGKANQIYDALKDGIDMKETPPLVVAAIRSKARQILSLLEEIKELEELLCQVAPVAGKQVEQLCSIKGMGKVSATTLLCFFEDIDRFDQASSMAAFFGVQPRVKKSGDGTIKIGMSKQGNGLVRREVYLLAFRTLSNEPYLKSIYAKFRKQGMTHDGALGVLMHKLIRIMYGILKSGTPFNPGIDQLNQIDPRSKEEAQEAESIVRDDPKRRFQSVSQDAPLSNRQRQKRKKDQESQAAIVAESTGSS

SEQ ID NO: 475216 - protein, 371 aa, unidentified
MGDQKRFVGIDVAKAQLEVFIRPDGETFSVANDEVGIGELLRQLEPADFVILEATGGLEMPVASALAAAGIAVAIVNPRQVRDFARATGRLAKTDRLDAEVLARFGEAVRPEARPLANEQAQALEALVTRRRQLVEMLTAEKNRRANAPKVLHRSIDEHIRWLEKRLSGLDDELAELIRDTPLWRERDELLRSVPGVGKVLSSTLLAHLPELGMLNRKQIAALAGLAPFNRDSGNLRGSRCIWGGRAQVRRVLYMATVSGVRSNPAIRTFYLRLRASGKHAKPALIACMRKFLVILNAMLHNKTPWHTPALTSSTATLSPLPGADIQHGCCASGLGQHKHIIPRPPQPVRPRIGTGTNTGTGRSGEKSGIT

SEQ ID NO: 475217 - protein, 377 aa, unidentified
MSRSIIHVGMDVHKDTIMVAVFVDDAPKPELVKQLPNDLSKLRRFFGRLTRRGEVRACYEASGAGYVLHREITAWGVHCDVIAPSLIPTRPGERRKFDRYDATQLGRLYRVGELTPIRIPSPAEERVRDLVRCRQCFQREILRSRHYILKFLRRRDFIFREASHWGQVHRKWLQRLLKPGALAPEDRSVFAEYLALLDYKVSRRDDLDEQIEKLAFSSLYRPFVQRLTCFRGISTLAAMTLVTEIGDWRRFERPSQLMAFLGLVPSEDSSADRIRKGSITKAGNSRCRHVLVQAAWKYRYRPAVSAQLKKRQLGQPPHVIAHAWKAQHRLFKLFHRINAKKPSQVAAVATARELVGFLWAVMQDEELQNAAQVRSAA

SEQ ID NO: 475218 - protein, 317 aa, unidentified
MPCSSRPPARFIGCDVGKTSITVFDSATGLSRCLANRPSLLRSFARTLDATCLVVCEATGGYEAKLLAAMLAAEVPAHRADARKVKAFIRSFGTLGKSDAIDAAALARYGAERHHGLARWQAPDPVREVLQTLVLTRRDLVEQRHGHSNRLQAPGAGAVAAALRSLMRALDAQLRALDARIAALLQRHPALQRDVRVLRDMHGIGPVTAATLLALMPELGHLSGRQAASLAGVAPHPHDSGQRNGYRKTRGGRPEVKRTLFMAALSASRGTGKLAETYRSLVARGKKPIGAITAVMRKLIVISNAKLRDARAIPATN

SEQ ID NO: 475219 - protein, 347 aa, unidentified
MNITRVGVDIAKSVFHIHAVDGRDKLVWQAKLKRDQWLAALSERLAPGAEIGMEACASAHHWARELQRRGYRVKLIAAQFVKPYVKSNKNDLVDAEAICEAMNRPGMRFVAVKGVEQQDIQAAHRIREELVRQRTAKSNQIRGLVGEYGIVAPIGIHQLRRALPLWLEDGENGLTDDFRALLAGLADDLRYLDNRITDLDERIAACVKTDPVARRLLEIRGVGPLTASALAGVLGDGRAFSKGRDFAASIGLTPRQHSTGGKDRLLGITKRGDSYLRKLLVHGARAVIRHAKGRDDGLSDWLQALSARKHANVVAVALANKTARVAWSVVRNDVAYDPSLICGGQAV

SEQ ID NO: 475220 - protein, 414 aa, unidentified
MDVIHGRCAGMDVSKRDAKVCVRIAGRGRRKTVETVRRWASTTNAVLALREHLVDEQVSLVVMEATGDYWKPFYYLLEDAGFEVMLVNARQVKNLPGRKSDVSDAAWLAQLGAHGLVRGSLVPPAPIRELRDLTRARTMMTRERGRDIQRLEKLLEDAGIKLSSVASDITGVSGRLMLQALIDGQRDPAVLADLAKRRLRHKLPQLTEALTGRFADHHAFLARMYLEAIDQRSRAITELTARIEVVIEPFRSFCNLIGTVPGIGVRCAEVIAAETGADMSVFPTAAHLASWAGTCPGSNESAGRVKSTLTRPGNPYLKAALGAAALSIANTRGTYLAAKYRRIAARRGPKKALVAVEHAILIAIWNMAHTGAEYDDPGADYYTRRDPERVRLHAMNQLQRLGYHVTLSPAAATA

SEQ ID NO: 475221 - protein, 328 aa, unidentified
MKILHIMGADLSKDSIDLGLYPGKSYLRIDNSINGFHLMLNWLKDQGINASTVMIVMEHTGLYSYHMEAFLHKHQIRFTKVPAIQIKRSLGMIRGKTDKIDAQRIARYGYEKKNSLIAAAKPDQTLKRLQILHSTRKRLVRYRASLKCSVKENRVVLKDSDIVIQTDLVLIKNFTKQIKTIESEIQKLVTTSKSIKHNCELLESVIGVGPVVAVTSIVKTGNFTEFANGRKFACYSGIAPFEHSSGKSIRKKTRVSHLADKEMKALLDRAASSAIQYDKELKAYYERRLQMGKSPRSTLNIVRNKIVHRMFAVIKRGTPFVENYLRAV

SEQ ID NO: 475222 - protein, 353 aa, unidentified
MRVAFSPVAPLKYVVGIDIAKDTFVACFGHINTSQSLSFGKETTFANTLAGFTALLVWTAKQQVVAAPQWFVVEATGVYYEELAYFLADNGQALSVLLPNKVKHFAQSTEQKSKTDQLDARLLCRLGLERALPAWQPPTPALRQLRVLSRERQNLTQQAIRLKAQRHAYQHSYQPDERTLDRLATRLQLLSQQLSAISQDLAALLATEPELAHKLAHLTSVPGIGLTTAIVVVAETTGFGLMENERQLASYAGLDVVQRQSGLSAGATRISRRGNVRLRTALYLPAVSSLRFNPQQMAFYARLRARQPSGKPGVIAVMRKLLLLCYSLWKNDCAYDPHYHPAHCLKKEVAPTS

SEQ ID NO: 475223 - protein, 507 aa, unidentified
MTTPTTRTTRRKPAPSPTGGPQARARADRQAYSGRKARAKGKSEALRQQEAAQVEALPVRHSHAAGIDIGSRSHWVCVGFTTEANSGSIQEFPAHTDGLKAIAAFLHEHQVGTVAMESTGIYWIALYELLESEGFEVLLVDPSYTHQLRGRPKTDRRDCQWIYRLHRVGLLAPAFRPDEKTVQLRAYLRQRATLIRSASRHVQHMQKALEQMNLKLTEVLSDITGVTGRSILRAILRGTRAPEKLAKYRDKQCKASEAEIAQALTGSYREEHLFELKQAYEAWQFTLKQVATVDAQVALQLGRMKCDRALPPLKPKPRSKRRVNSPGFDVRTALYYVVGLDLTEIEGISELTALTLISEIGPGVSKFPTVKKFCSWLGLCPNWKKTGGRVKSSRTRRGVNRAAQALRVAAQSLHHSQGALGAFLRRMKGRLGAQAALTATAHKLARIVYLALKHGMTYVRQSQEDYEAQMREKQLKALKRKARQLGLEVVEKASGVVATAAAAPVQG

SEQ ID NO: 475224 - protein, 312 aa, unidentified
MMQQTFIGVDVAKSWLDIHHPKQRSLRIDNTPKAARAFAGACAKEGAWVIFEASGGYDRILREALETTEVPFSRVNPRQARDFARAMGVIGKTDRVDARMLVELGIRLNPPRTEPLAQARKALQAQTVRRRQLVDLRKQEDTRLKQTADTDVRADIKSLIAVLERRIAKIEREMVRLVNADAELAAIDEILQSAPGVGPIVSATLIAELPELGNVDRRAIAALAGLAPVARDSGKRSGPRAIEGGRPVIRTILYLAGLHASRAASRFRDFRDRLQRAGKAPKAAIIATAHKLLVTLNAMVATRQRYDVQPPG

SEQ ID NO: 475225 - protein, 344 aa, unidentified
MEHFAGLDVSVNETSVCIVDDTGRIVREVKVKSEPGALLQVLKNATYRFKRIGLEAGPLSQWLYSALAEAGLPVICVETRHMRAVLKAQINKTDRNDARGIAQMMRAGLYRSVHVKTLRSQKLRTLLTHRKLLQSKAIAIENDLRGTLRNFGLKVGIVGKLKFEARIKELVENHPDLAMLVEPLLVVRRVLREQTAVLHRRVLAIVRDDEVCRRLMTVPSVGPVVALTYRATVDVPARFRNSKAVGAVLGLTPCKDQSGERDHTGAISKCGDEMMRVMLYEAAQILLTRTVKWSWLKAWAMQIARRRGMKRAIVALARRLAVILHRIWVDGTEFRWTRQEAAAA

SEQ ID NO: 475226 - protein, 310 aa, unidentified
MQSICGVDVCADALDGWIEGAGDRRFGNDEEGWGQLAGWAAGLGASLVVMEASGGIEQQAFLALWRQGCPCAIADPKAVRRFAQAMGQLEKTDRIDARMIAGFAAARRLEPTPPPSAGQQRLDALAARLRQVTADLAVQKRRLHTARDPEALASLKEAIAFFTRQAKALADQIATLIKDDPLWQALDKTFRSVKGVAARTVTTLLAELPEIGTLSNKAVAKLAGLAPIANDSGKRSGPRSIRGGRSHVRTILYLVADVARKYDPSLADFRDRLLAQGKPKMVVRIALARKLLVRLNAKARETRAELAYAL

SEQ ID NO: 475227 - protein, 415 aa, unidentified
MESMESIIPRCAGLDVHKESVEADVRRIERDGGMHHETRRWGTMTRDLLAMSDWMAAQGVTHVAMESTGVFWKPIYNILESRFTVLLVNARHLKHVPGRKSDVRDCQWIAQLLQHGLLKGSFIPPRPQRELRDLTRHQRQLTEEKARTVNRIQKVLEDANIKLASVATDILGVSGRAMLHGLIEGEKDPVKLADFAQRKLRGKIPELEKALEGHLTEHHQFMLRLLWKQLTPQEELIAELEGKIDEHVRPFAEAIERLDAVPGVDHRVAVAVLAEVGADMTPFPSDQHLASWAGMCPGNEESAGKRRRRRITPGNRWLKRTLTQAAWAASHTKNTYLASQYRRLAGRRGKKRAVIAVGHSMLVIFYHMLKADTTYADLGGAFLDRLQPQRMTRYYLKRLQALGHKVTLELNVVPA

SEQ ID NO: 475228 - protein, 342 aa, unidentified
MYYIGLDVHKKTISYCVKDASGQVHREGTIGATRNELDCWVRTLPQPRIMAMEATIFTGWIYDHLLPHAEQVKVAHPLMLRAIAAAKKKNDRIDAGKIADCLRCDFLPECHMASTEIRDRRRTLRYRHLLVRQMVQMKNRISGLLMETGVSHNKQRLHKVGYFRELISNSAEIHESIRPLLRLSRETIVRCQKTEYALVSSLERDPLLAERLKRLRTVPGVGPITALTWALEMGDVSRFRSVKQAISYCGLCGEEKSSADKVLRTPLSKQRNKHIQHVLVEAAKLAPRQNHELALVHERETQKGNRNRATLAVARKMVAYLLAVDRREREFVPAEGGSTAAA

SEQ ID NO: 475229 - protein, 351 aa, unidentified
MEHYAGIDVSLELSSLCVVDATGKIVREAKVASEPEALIIFFQQLGVAVTRIGLEAGPLSQWLHAGLAKAGFEVVLLETRQVKAALSAMVVKTDRKDARGIAQLLRMGWYRPVRCKSPPAQETRALLVGRKLLQGKLLDVELSIRGILRGFGLKVGPVSKGRFAARVRELIDGQPMLERVIEPMLRAREALQREFHTLHRAMLAIVRHDGVCRRLMTVPGVGALVAITFTSAIDDPARFRRSRAVGAHFGLTPKKHQSGETEVTGGISRVGDPLVRTALYEAAHIMLTRTVRFSGLKRWALEVARRRGMVDRAAINGQGGAGQEAGGGAAAPVDGRQRVPLRPGGRGRVMM

SEQ ID NO: 475230 - protein, 338 aa, unidentified
MVYGAIDLHMRDSQIRIVDAEGRVLRDARVRTTAERLVAVFTGYGPMRILWETGTESDWVAEALEAAGHAVIVADPNYAPMYGEIRRKVKTDRRDVAALAEANRQGWYRATHRVSRAQRDVRQVLRSRRHLVRMRAGTISLIRSLLRQDGYRLPSGSSAQAPDRLAALALPARLRATIAPLQRMVETLTTEIATVDTSLATVADADPIVERLQSVPGVGPVVALTFRAFVDDVSRFAHAGQVSAAIGLVPREDSSAERRHRGHITKAGPRELRSLLVQAAWACWRSKASGTLRAWVERLAGRRGKRIAVVALARRLSRILFALWRDQSVFTTATLAGA

SEQ ID NO: 475231 - protein, 346 aa, unidentified
MRKIVKQVAGIDVAAKELVVTLGRMYDDWTPETYASKSFANNQKGFLSLVLWVKKLTGAVEAVRYVMEATGVYHEALAYFLEAQGHPLTIVLPSKISNYFKTLDVKSVTDTTAAEAIARFGLERKLDNWKKPNAVFKKLRQLTRERDQVVEARTVAKNQLHAEAAEAEPGPNTVARLKKQIAFFNKQEKEIKEEIRALVKADPQVSQAVDIMSTLPGVGSLTAAIVLAETNGFELVRNKRQLSSYAGLDVKEKQSGTSVKGKPRISKKGNKQLRKAMHLPALAAIRHAPRFKAVYARLVARHGIKMKAAVAVQRKLLEIMYVMYKTKTPYQKEYVPKIAEENQAAA

SEQ ID NO: 475232 - protein, 340 aa, unidentified
MNHYAGIDVSLEASCVCAVDAAGKIVREGKVPSEPEALIAWFRSLGVEVTRIGLEAGPLSQWLYAGMQQAGLAVELLETRHVRNAFKIMPVKTDRKDARGISELMRLGWFRPVHCKSMDAQETRAMLTARKLVQKELLETESSLRGILRGFGLKVGKTTPVQFEGRIRELVAGNPSLEIVASALLSVRTTLRREFEGFEKRLRAMARTDTRTRLLMTTPGVGVIVALTFVNAIDDPSRFKSSKTVGAHFGLTPTRYQSGETDYSGRISKNGDGSVRAVLYEAAHVILTRPLKGCTALKSWGMRIAKRAGMKKATVALSRKLAVIMHRMLADGAPFKNQPA

SEQ ID NO: 475233 - protein, 317 aa, unidentified
MTKIICGVDVSSTSLDAFVGPSGPAHSFRNTAEGIAELAAFCRQQSVDLVAMEASGGYEKQAFALLWAGGVPVALLNPRAVRDFAKGMGLLEKTDCIDARVIAWFAAVKGSMSNAPASAEQQRLKALVTRLRQLTELQAAQRNQRLLVSEATVLELIAELLKVVAWQIRMLEAEIAALLASDPLWQKLDQALRSIKGVADRTVARVMAEMPEIGTLSNQAVSKLAGLAPLAHDSGKREGKRLVRGGRRNVRAILFVVAGVVRRHDPDFAAFHQRLSAAGKPRKVIRIALAHKLLVRLNARARDARKAFAGASVCQSA

SEQ ID NO: 475234 - protein, 442 aa, unidentified
MVHPNAAAIDVGATMHMAAVRAERTPEPVRSFGTFTTDLHRLVNWFKECGVETVVMESTSVYWIPIFELLDARGFTVFLVNARDAKHVPGRKTDVSDAQWLQRLHSYGLLRASFQPKGQIAELRAYVRQRERLLEYAASHIQHMQKALTQMNLQLHHVVADITGVTGVQIIRAILAGERDPKVLARLRHYNCHSSAETIEKALTGSYRAEHLFALEQALALYDAYHEKVSACDVRIEAVLKELSIGRGCRSDSLPSSRRRTDQANGLAFDVRAALFALLGKDITQIDGLGPYLSLKLIAECGDDLSAWPSSKHFTSWLCLAPSNKISGGKVLSSRTRRCGSRASALLRLAAVTVGRTDTALGAFYRRLSARIGKAKAVTATARKIAVLFYNAVRHGMEYVDPGASFYETRYRKRVVDNLHRRAKAFGFVLQPMEPTPDVVVS

SEQ ID NO: 475235 - protein, 337 aa, unidentified
MNYSGIDLHSNNSVIVVSDETDRVLCKRRVANDLRVVLSTLEPYRQELAAVAVESTFNWYWLVDGLQAAGYTVRLANTAAMKRYEGLKYSDDDTDAAYLAHLLRLGILPTGYICPIEERGVRDLARKRLQLSRSRTQHILAVESNVARQTGARIASRVVKQLTEQTVQELGLSEEVRWALAANVAVIQTLNAQIKKLEGHLGARVRPRAEFKLLTTVPGIGEILATTIMLETSSIERFARVGNFASYARCVDSKRLSNGKKKGRGNVKNGNHYLAWAFVEAAHFARRYCPEAKRFYERKQSRTNPIVARMALAHKLARACYHMLKENQPFDVKRCFA

SEQ ID NO: 475236 - protein, 304 aa, unidentified
MHLTANISIPQKNFIAIDLHSDNAVICVRRNALNKASELVGKNIWCGRVSIRDGLDNFIKVLVPHCQDFDHVAVVESTYNWYCLADAFEEQGWLLRVADPSTVSQANLKSSDDRTDAQYLAERLRVGSLKHYLPLNYSSRALRDLCRYRMAMVQDCASLKIKLINLYRNQLSKNVRVADLLERCQPHMQPNYRFNSDILEEFKDPNIRLRVAFEISRIAMLEEMIEECNAEIQKQCKDQELVKLCKTIPGCGPVLSAVICTEIGTMQRFKSAGDFVSYCRLCSTSKLSNGKSKGLGNAKTATPT

SEQ ID NO: 475237 - protein, 352 aa, unidentified
MTAITTIGIDLAKKVFQIHGVDAESKLVVARKLRRKEVLAFFAKLAPCLVGMEACGSAHYWAREIAKFGHNVKLMPPKYVKAYVKRGKTDASDAAAICEAVTRPSMLFVPVKGVEQQGLSMLHSARLQLIGQRTQMINAVRGHLSEFGIVAERGLLGFAQLTGIVRDEKDQRLPATARAALMILVRQIERVSAEIAALDTLLRKENKANELGLRLVTIPSIGQVIASALRARVTDPKLFENGRHLSAWIGIVPENDSTGGKVKQKGLSKKGDRYLRSLLITGAIAGVRQAKIRPDKYPGVTKLLGRMSTKQAAVAIANKTARIAWAIMVHGGVYEAGHRASQYRAEACAVTG

SEQ ID NO: 475238 - protein, 359 aa, unidentified
MEAQEGAVRRIVGGVDTHKDLHVAAAVDEQDRVLGTQSFASTRQGYRRMLAWMRSFGEVQRVGVESTGSYGAGLLRFLQQAGITVLEVTTPDRQDRRRRGKNDDFDAQNAAHAAFAGIRTVTPKSRDGMIEALRVLSACRKTAVAARRIALQMIQNTVVCAPESLREGLRRMTRMQLVRTLVAWRPDLTAYRDMETAYRISLKSLARRYLELHDEIADLDAMIAAIVDESAPNLVARNSIGHVGAAQLLLTAGDNPQRLRSEAGFAALRGVSPVPASSGKTARHRLNRGGDRAANSALHIIAIGRLRTDAQTQAYVAKRIAEGHSKMEAIRCLKRYIAREVFRLIKQRQKEINRTRIAA

SEQ ID NO: 475239 - protein, 324 aa, unidentified
MQGKEASEQETKVQSNVGIDVSKCWLDAHVLPGDERLHVANNCAGIRQLKRWLSHYQIALVAIEATGKWHRHLHRSLVASAIPVAIVDPYRVRMFAKAQGILAKTDQLDARVLALFAAMMAPPVRPVAPHAMAELAELVVARASAVEAQATLKNQFGTAESKFLKRQLDRRISRAGKDIAALDREILKRIKADGSLARRYAVLTSIPSFGFAVAATIIACLAEIGSTTAKQIGMLAGLAPIANQSGDREGIRVIWGGRPAVRRVLYLAALSATRFNADMKAFYKRLIDNGKPPKVALIAVARKLVVLANTLVSEDRTWQPSAPI

SEQ ID NO: 475240 - protein, 344 aa, unidentified
MNKNWFIGIDVSKKTLDASIFVAGEDINKFPHTQVRNEKAGFKDLLRWAKEQGVDTKDTLFGLEFTGYYSDALEHFLTDKELSYTMLPTTVVKHYQRGTRDKNDKTDSAKIADYLFRFNGTECIRLRVLPSKAMQELKALKCERKFYVQQRVACENRQKVAKSKQEQKRLQKAIDLFNEQIELIEQQIADVVASDEEIYTTFRLLTSIPGIGFVNAVNTIANTQNFTAFETARQYAKYVGVAPSEHSSGTSVHWRRRPSPHADLQAKADLSMAALHAIELSAEMRQLYERKLGNRPKDKDIQKKALNAVKFKLIREMFAVAKQARNFELRGLDKAQAETHSTGK

SEQ ID NO: 475241 - protein, 409 aa, unidentified
MEVLYPRCAGLDVHKDSVVACARLAEGQRVEQQVESFGTTTGELERVRAWLSARGVTHVAMEATGVYWKPVWHILEGTFALVLANAAHVKNVPGRKTDVNDATWLADLLAHGLIRASFVPERPVQELRTLTRTRKQLVREKTQHVQRIEKTLQDANLKLSSALSDIMGENGRALLEALIAGESDPEHLVTLTSRRLKATPTQLREALRGRITSHHRFLLRLHYDQVRQLESAIAAIDQEVDDALGPQRRDQVKRLTTIPGVGDLVAEVIVSEIGTDMSRFPSPGHLISWAALCPRNDESAGKRRSTRLRKGAPWLKTQLVQAAWSATRAKRCYPRAQFLRLKARRGPKKAVMAVAATLLTAAYFILRDGVPYRDLGPDHFDRLERGKVLRRLVRKIEDLGYDVEVKRAA

SEQ ID NO: 475242 - protein, 346 aa, unidentified
MENLLKHFVGIDISKKTFDVSVLKPVSGKEGKIAHKQFTQKAEGFSEMEQWLKAQDIFLNNQTLFCMEHTGIYNQPIVSWLTAKKALVWVEMAIRIKKASGFSRGNDDKTDSAMIATYAFRFRDKMQIWNQTDENLVQVKNLMAQRDRVINAISALTVPVEELLSMGCKSEAKQLENLQKGAISKLEESKNKIEATILILIKKDTNLFDKVKKVVSIKGIGMVTAVSFLVYTNGFSSFKTAKELACYCGVVPFVSKESGTSVKAKARVSHFANKKLKCLLHLCSLIAIRCDEEIKGYYERKVKEGKNKMCVINAVRNKLVARIFAVVRDNREFVDNYVNKVGLSKC

SEQ ID NO: 475243 - protein, 347 aa, unidentified
MTIVENHTQITGGVDTHLDFHVAAAVDANGGVLGVETFSTRGAGYAQLVAWLQRFGPIDRVGVEGTGSYGTGLTRHLRSEGIAVVEVDRPNRQARRRHGKSDTVDAIAAARAALSRAATGQAKHRDGYVEAIRVLMVARRSAVDERIKVLNQIRHLVLCAPDPIRARFHGLTSTSLLNQTSSLRPRDHGDVVDYTTLITLRELGRRAKNLHDENLRLNKLLRPLIRRTSPGLLEVYGVGYDTAAKLLVAAGDNPERLRSEAAWAHMCGVAPIEASSGKTKRHRLNRGGNRQANSAIYHIMLTRLSYDQRTRDYFARRSAEGKTNGEICRILRRYIAREIYKQLPRQT

SEQ ID NO: 475244 - protein, 309 aa, unidentified
MFVGIDVSKLTLDICVLKNENDFMHLKIKNNITEISKFISNLDKDSLVVFESTATYSYTISNLLTQNNISYSELNPNKLSHFLRYFSDKKTDKEDSYILAFYAFMFKDTLKLTKFNYDDKLLKCNQSAINILNKISTQLKNFLDGQKSIMNPNLEKTLLNIVKNIEENKSVLEDDLFEYICLTIPNTLDILENEKGIGKSLAINLFPILDNNRDKNYKQIISFLGLSPKIFESGTSVKKRSSIDKKGSSLVRRSLYMSSLSCVRFNPKFSDFYMRLVLNGKPKKLALIAVCNKIIRHLKNKYFMDLKNE

SEQ ID NO: 475245 - protein, 410 aa, unidentified
MEVLYPHCAGLDVHKETVVACLRHMVDGTVKREIRTVKTTTKDLLGLSDWLASEGCTHIVMEATGVYWKPVWHVLGDGDFGLVLANAAHVKNVPGRKTDINDATWLADLLAHGLVRGSFVPDAQTQEMRGLLRTRKQLVRERTSHVQRLQKTLEDANIKLDSVISDVMGMSGRAMVEALIAGETDPLKLAALANRRIKAPPEELREALRGRVTKHHRFLLRLHRQQIDALDAAICEIDQEVDANLAPFRTAIRLLTTIPGVSDLSAQTILAEIGNDMSRFSTEGHLISWAGLCPRNDESAGKRRSNRMRKGAPWLKTALIQCAWAAARKKGSYLQAQFHRLRSRRGAKKAIGAVAASILTAVYHMLKDGTLYADLGADHFDRRAKAVQTKRLVNRLRNLGYAVQITPVAA

SEQ ID NO: 475246 - protein, 424 aa, unidentified
MQQSAPEEFGAYIGIDWADQIHFVSLRDANSQEVKRYKLEQKPEVLLQWVNELQQRFPGQRVAVALEQTRGALIYALMSYEFFVLFPVNPKALARYREAFNVGGAKDDPTDSDLLLELVTLHRSKLRAWRPDDELTRTITLLVQYRRDLVDTRTALTHRLAALLKLYFPQALQWAGELDTFQACDFLQRWPTLAKVQKTPATKLRQFYVSHNCRTVAVIEKRLQQIPTARPLTTDGAVITTSVAMVQAIVNQLRPLMMSIKELDKQIAELFAKHEDHELFSSFPGAGEVLAPRLLSAFGADRDRFASAEEIQQLSGIAPVTERSGKTCWVHHRYACPKFLRQSFHEFAAQSIALSPWARTYYKRRRERGNGHQAAVRSLAFRWIRIIYRCWQMRVPYSEQTYQQALRRRGSPIAKLIPLVEQAS

SEQ ID NO: 475247 - protein, 361 aa, unidentified
MTNSMTTPPEARAVIVGVDTHKHVHVAVVIDTRGIRLGGQSFVADAGGYRALLTWADTHGRIEAFGIEGTGSYGAGLARAVRRAGHRVAEVNRSDRRLRRVAGKSDTIDAEAAARSVLAGQSTAIPKTADGAVEMMRLLKIARDTAVKARTTAMITLKQIVVNMSPALREILQDLTDQALLTRCAGLRSGPLDTPTASAKHTLRALARRWIALADEITTHDRHLARLTTETSPTLRAGFGVGAGTAAEMLILFGDNPDRIHSEAAFAKLCGACPIPASSGRTTGRHRLSRGGHRQANAALYRCVIVRMRFHHPTVAYVARRTADGRTKREIIRCLKRFLAREIYQRVMTDFRARQKLTQAA

SEQ ID NO: 475248 - protein, 349 aa, unidentified
MSMVGGLDLHRRQITYDVLDVETGESWRGRLWQPDRTRFRHWLQVEVAKRAGDGSVALAVEGCTGWRYVVEEISAAGYSPFLAEPADTQAARGRKHRAKTDRTDAQLLRELLQAGELPESWIPPEEVLEWRERVRLYKSLVDQRTLWCQRIHAVLYHHGVSIPEGAIRSEKIRATLASGELEISSAGRERIVAGYKMIDAADQEALPLKHDLQRFGTRQPACRALVDAQYGIGGLLAVVLWTEHGDCRRFSRSEQVVRHSGLDVTVDSSDRRRAGGHLSRQGPETLRWALYEAAKNSSHGRSPDHRYYAKVKERHDGKIASISVARQLARRSYHVLRGVEPDLVYAIPA

SEQ ID NO: 475249 - protein, 322 aa, unidentified
MKNLSFLGVDVAKDTLVIFDGQKVYEFQNERGLKKFKRKFFKKKEDRKKRVVIYEPTGPYSVFLEEFCATNMIKVVSLNPRKVPRLREVLGHRAKTDNLDAKLLYEYHKIVSEDEIKEIEYNENLEKLSLLLSEYQLYQNIENKLSNFLDYLDRVPVDSKESKKHIQKNLEETRQRLQKIKKEMEELVNKDDDINKGVKEIEKVKGIGKMIATYCYIFFRKRRIRNRREVVALAGLDPEVKESGKRKLVTRISKKGDNRLRSLLFMGALSAIRCKEGGLKEYYESLIKRGKPKKVAIIACARKLLIFAFYNYKKWQMEVQSA

SEQ ID NO: 475250 - protein, 413 aa, unidentified
MEYKTITAVGIDVSKGKSTIAVRRPGGEVVLVPFQVNHDAAGLSGLVKTLREIDGDIRVVMEHTGMYWRPIALALKEAGFFVSVVNAILIHDFSDNSLRKIKTDKADSMKIANYALAFWQELREYSNEDETRQLLKTQSRLYERTQSAGVALRNSLISLIDQIFPGANHFFGSIPRKSNGHVKWVDFVKRFWHKDCVAGISLAAFSAVYRKWCSNNGYKFYSSDAEKIHRSARGAVATFPKNDSTKLLITQSVDSLNAVYDALYVMRGEMMRLASLLPEFEVVMSIQGAGEITGPQLMAEIGDVRRFTHKGALVAFAGVDAPPFQSGAFDSKSRRVSKRGSPHLRRTLFQITSILLQHSDPANPVFQFMDRKRAEGKHFYVYMVAGAAKFLRIYYARVKAHLEVSDTGSDNAA

SEQ ID NO: 475251 - protein, 338 aa, unidentified
MIVIGVDVHKHSLTAVAVDELGRPLAERSGPVEDELVRWARSLADGRLLWAVEDCRHVTRRLEQLLLVAGERLVRVPPRLTGPERRRGRTRGKSDRLDALAVARAALREPRLDGPRPQEPRLRELKLLVDHRDDLVAERRRCQQRLRWHLHELDPSVQVPLGALDRTVWLDRLRRQLARREQTTQVRIARDLLGRCRELTRSISELDQELQERMQTTAPRLLELAGCGPISGAKLVCEIGPIDRFASDAQLARHAGVAPLDASSGKHQRHRLDRGGNRQLNCALHRIAVTQGRTYGPARAYLERKQNEGKSRREAIRCLKRQLARTVYTTLKTESALT

SEQ ID NO: 475252 - protein, 285 aa, unidentified
MKEKVRFWGLDVHAETIIVAVAEPDGSVRSLGTIANRAEPIRKLVKKLGPVEQLKACYEAGPTGYVLYWQLAELGIQCDVIAPTLVPVKAGDRVKTDRRDATKLARCHRAGDLTAVWVPDAGSEALRDLVRAREAAKQDQLRARHRLSKFLLRTGQRPASGVKAWTELYMAWVRQLRFAQVAQESTRLDYLHEVEHMAQRVKRLEQAIVEAVKLASPQMQEVIRGLQALRGIAAISAVTIAAELGNITRFESARQLMGYSGTVPSENSSGKRQQRGSITKTGTRT

SEQ ID NO: 475253 - protein, 428 aa, unidentified
MHSTQNERINQITSSTLIVGVDIAKFKHVARAQDYRGVELGKSITFENNREGFELFISWFQKIVAEQGLQDVIVGMEPTGHYWLNLAHYLREQQVKYGVVNPLHVKKSKELDDNSPTKNDIKDAKVIAQLVKDGRYAVPSLPQGVYAELREAMKIREHLTTDLCVVQARVHNWLDRYFPEFLTVFKDWECKSAIQMLSLYLLPHELVSVPEEILLQHLREAAKRGLGLGRIKNLKAAASRSVGIQQGSELAKMELKVLLNQYEWLHRKLEELKTKLDELLKQIPHVQQVLAMKGIGRDTIAGFLAEVGDISQYRHPKQITKLAGLNLKTNSSGTHTGQTRITKRGRKRLRALLFRVMMPLVAKNAAFRALHEYYTKRSRNPLKKMQSLIALCNKLIRILFGILKKGHEFREEKMMQDIPRCIELPQAA

SEQ ID NO: 475254 - protein, 411 aa, unidentified
MKAQVNFPQVIERGCGMDVHRDTVVVTVMGVGITVETRSFTTYTNSLRSLRDWLISLNITHMAIESTGIYWKPVYNILEQDFEVILVNARHVKNVPGHKTDKKDSRWLAKLLISGLLKASFIPPKDIRDMRDLTRYRKKLVQNAAADRNRFEKILQDANFKLSNVISDIFGKSGTLLINALIDGVDDFNLLLSLCHGRIKKKREILYESLQGVLTDNHKYMLNAIRTNLYNTLSKIESVDNQLLQLSQPYDTELELLKTMPGLNQISATMLLSEIGVDMSRFPTVNHLASWAGICPGNNESAGKSRSSRTNQGNQYIKPILVECAWAASHVKNSYLKKKYESLIGRRGKKRALIAVGHKMLNAAYYIIRDKVPYQDLGYEYLDSRKKQKQIQSYIDKLKDLGVDIEIPNIQ

SEQ ID NO: 475255 - protein, 373 aa, unidentified
MKQSTTTYVAMDTHKRTISVALAEGGRRGETRFIGEIPSRPEAVAKMVDRLAKKHGQVAFCYEAGPCGYGLYRQIKVLGHECVVVAPSLIPTRPGDRVKTDRRDAVTQASLFRAGELTPVWVPDDAHEAMRDLSRARQAAVEALRRARQQVLSFLLRQGRVYSGGENWTKKHRLWLATQRFEHPARQIAFEELAQAVDEAKARRDRLAQQMEELLPSWSLAKVVTALQALRGVAMISAITLVAEIGDFKRFANPRQLMAYLGLTPSEHSSGAKTARGAITKAGNTRARRVLVEGAWTYRLPARMGVDILERNETLPQAIKEIAWKAQARLCARYRRLSKAGKPTNVVCVAIARELAAFVWAIATNDAMAAVVA

SEQ ID NO: 475256 - protein, 392 aa, unidentified
MVVSVGIDVSKDKHDCFIVSSDGEVLADVFTIPNTLDGFTCLLQRIRECTTPQDKIKVGLEATGHYSYNLLGFLLDNGLATYVLNPLRTNLYRKSLSLRKTKTDRVDARTIAFMLLSDAGLKPYTDTAYHNEELKSLTRYRFDKVKERAKLKSSISRLVCILFPELEKLVPTLHIASAYALLEEFPGAKQIASAHLTRLKALLESASKGHYKRDMALEIRDAARNSIGSRMPAKSLELQHTIRLIRELDVEIAEIEEQIQSIMDELHSPITTIPGLGFRMAAMILAEVGDFTRFDSPDKLLAYAGMSPSTYQSGQLKNCYPHMEKRGSRYLRYALYNATKYVCHWDPTFAAYLAKKRNEGKHYNIALSHAAKKLVRLIFAMEKSRAAYRLTA

SEQ ID NO: 475257 - protein, 380 aa, unidentified
MPDVSSAAPIEVSTWVAIDQHKLSLVAATLPASGGQPEVVRLENTERAIRRFIERLGGGDGLAVAYEAGPGGYELHRLLSSIGVACDVIAPSLVPVRAGDRVKTDRRDAKKLVRLYRAGELSFVAPPSPAQEGLRDLVRARDDLRCARTAARHRVVKALLRHGHIYRDGKAWTIRHRAWVASRRLEDELAQSALEHMSAHLAALDAQIAAVDQQLEQVATAEPWADPVGWLCCFRGISTRTALGLLAEIGDFRRFGHPRELMSYLGLTPSEYSSGEQQHRGHITKSGNRHARRLLVEAAWHYRHHPRTCARATSLAGHVPPEVGAHAWQAQVRLHHRYRVLGEHGKRSTVANVAVARELTGFIWATMTRTPLREQERTAA

SEQ ID NO: 475258 - protein, 413 aa, unidentified
MYIVGIDIAKKSHQAAIMKPDGTLVGRSFRFTNTKQGFEFLMDKLATVDSSLENFEFGMEATGHYWLNLYTWLADKHAIVHVINPLQSDALRNLYIRKTKTDSVDAKIIAQVIRIGQYSETKLADDRMLMMRDLCRQRFFLVDMVANLKRKIIVMMDRIFPEYQGFFSDTFGKSSTAILKHCTTPEEITLFGEDNLAQLLQVASNGKFGLKKAQELISLARNSFAARLSSKTLSLLVKQMMDQMELLQNQIGILEKHISSHFKSFGTKITQIPGIGPVLGASILSEIGDISRFANPKKLCAYAGIDPSVKQSGQFLGNENHMSKRGSGYLRRCLWMASFVSVNHCREITIVYKSQVSKGKTHFQSMGFVCHKLLNIIYTVLKNDIDYSPMLCINPAITARTSRRIARAALKAR

SEQ ID NO: 475259 - protein, 387 aa, unidentified
MAQVNDLSRSLTAFDPISTLVVVVEMSKASWLVSGVVPGVERQPLKKLEPDATALLRLIERWRNEAVRAGRPISRIALAYEAGRDGFWLARWLIARGIEAHVIHSASVAVSRERKRAKTDRLDAAMLMRVFLGWLRGERGHCGMVAIPTMEEEDARRPSRERESLVDERSRITNRMKSALARLGIRGFKPHLRKAPERLAGLRTAEGTGLPANIIEEFRRDMARLALVREQISSIEKTRAERLERAPDTGPHAMVRLLARVIGIGIETADMLVREILSRKLRDRRAVARYAGLTGSPDESGLKRREKGLAKAGNARVRRGLIQLAWRFLMFQKDSALARWYRMRTEGPSGARKTTMIVALARKLLIALWRLVTTGEVPDGVELRPAA

SEQ ID NO: 475260 - protein, 520 aa, unidentified
MHQTKYRGIITEGRIIDVSSLGASGFPLVKPLRKSVNPFGGDLCFGWLGSLRLYLYKPLGCVSTLWRWMPAGKDITMHYHKVLEMFESIPYLSVGLDVGADFTWMSIMLPNGILTGKPFKIIHSDPQSRELAVSKIKEAQEMYSLESRCFLESTGIYHIPLLYFLRDKGFDCAVINPIITKNSTNRNVRKLHNDKFDSKKAAKVGLDASLKTSIVPDDAIIDLRNLVRDYYYFKDLQSAIVLKLNAELKVSFPAYLNVFSKVTTQTSLKLLEAYPLAADMLAAPKDELVEIIRSTARFGEKYALAKYDAICTAAKDAAVFGRALKSNALRIRLYIKMYWEYHAHLDSILEELHQAVDKLEGTPDYDRICLIQTLHGIGFLSAVVLIAEMGSFDLFPSPKKLYAYFGLDPGVNDSGKFHGDRVHMSKRGSSLARRILHMIAINNLKVDKATKAPVNPVIYNYYIRKCASKKKIVAVGAVMHKICNIIFAMLRDNKPFELITPKEHCERYATEHPESVNNAA

SEQ ID NO: 475261 - protein, 408 aa, unidentified
MEKFLKLCVGADVSKDTLDVCLSGLREDLSIRDVERKSFSNNADGIKKLMKWASQKTEGNPYQIVMEATGVYHEKLAFTLSKNGVEAVVVLPKLMSNYFKSHNLRVVNDEICAEHIAMFGLSRKLDVWKEPEPVYMALRALCRHRHQLAKLTTQCSNQIHAQKHSETSLQETIDMSEDMVKLAEKQIKEIDNKLRAILNENVWLKAKVDKVCTVIGLGWITVVKIIAETSGFNLIRNSRQLVAYAGYDVQSKESGTSVRTKSKMSKKGNKYIRAAMYMPALAAIRSDPQMAAFYSRLFQRHFIPKKSNVAVQKKLLVLIYTLWKNDCAFDPDYRHPASLSQNQENNQGNDPQCDQETEQPSKIAEKTINKNREAIRRSLHRLDQVRLQGFDETKIKKNPQNEHRQRIE

SEQ ID NO: 475262 - protein, 368 aa, unidentified
MSHLTIGAVSSDANNRQSAVVTPLARVIKLGIDVHAKDYVVVRQVDEAVSQPAQRFNLEGLLGFVRRQVAVAQSVHSCYEAGPFGYVLHRQLSALGVHNLVVRPRDWSTYGERVKTDQRDASALCSCLDRHLAGNQGALAVVRVPSEAEEQARAIARQRQSLVRERVRLTLQGKSAALLRGHQLRGEWWRVSTLSKLAPDLPPELLTLLQPWQQVILLLDTQVQALTEQLEQAAPPELPCGLGSMTWEILSREVGDWHRFRNRRQVASYTGLCPGEHSSGASRQQGSITRHGNPRLRHLLIEAVWRLLRYNPEYRGIAKWRDQFTAVRVTQARKKKIVVAIARQLAVDLWRLGTGRTTPAALGLQTPS

SEQ ID NO: 475263 - protein, 417 aa, unidentified
MLKTIFNNCAGIDVHKKVIVVTIAKTDSNNITTYQTKSFPTFTEDLEKCRDWLVDNNTFDVCMESTGKYWIPVFNVLETKCNCVITHPKYVRSIPGKKTDKKDSKWIADMFKHGLVESSFMPPADIRQLRDLMRYRNKLVNMRTSEKNRFQNSLTVSNVQIASVVTDVFGKTSQSILKLMLDNPNLTLDDITPLIDKRLKSTPEDILKSINGNFDDSQSSKMSVCLKHYDSINECIELIEQQVLKLTVKYSTEVKLLMSIPGINETSAIFIIAEIGTNMNAFIDDKHLNSWAGLTPRCKESAGKKQSVRIIKAGQYIKPLLVECALNAIKDKSCPYIKARYESLKRRRGHKKAIIAIARFLLTCAFHILTDEVPFDSDRFDELLNKKIKKHNKSIKNTDDMISYLTKLGYNITMQNN

SEQ ID NO: 475264 - protein, 395 aa, unidentified
MFIVGIDIAKRSHEAIIIAEDGQVVRKAFSFRNNCTGYNLLLEQVRRLTLVKSQIVFAMESTAHYWLALYARLLKDGYAVMVLNPIQSHSLRELYIRKAKTDARDSLIIADLVRFGRCKASNVPQDKILALRELCRSRAYLVDMAADLKRKLIALLDRIFPEYESLFDSVFSKASIAVLSKYSTPQKVKNANLRKLTDLLMESSNGHFGEWKAHQLKEAACSSFGIDDSGGVYSTLLGMFLEQILSLTAQADSLEKQISIFFQEFNNPLTSIPGVGTVLAATILSEIGDITRFSSADKLLAYAGLDPSVKQSGEFKSNQNRMSKRGSPYLRRAIWLASTVAVHRDPMFQTYYEKKISEGLHYMNVIGHVSRKMTAVIFAVLRDGQPYQPILQSAG

SEQ ID NO: 475265 - protein, 331 aa, unidentified
MKDSKIILGCDLSKDKIDIASIENRSRKILSEKTETNTLKGFKNIIKPYSSIVGELHVVLEATGNYHIKFTDFLEKENIKFSIVNPLRIKRFAQMKMLRLKTDKADAMIIAQYGIEQNPKPHKPLTTAQKELKALGTVRNHLIKQRTMTKNLLHSHNLLSDTTKESVSAITSTLKIFNAEIKKLDDKIEALIKEHYNDTYSKLLSIKGIGPKTASGTIAYLGDLKNFESHKQMASFIGITPAIRQSGKSLNKTTGITKQGNANLRTLFYLAALSASRSNFACIELYNRLILKGKQKKTALIAVANKLIKQLFAIIKFNRTFINNYNIKLVS

SEQ ID NO: 475266 - protein, 351 aa, unidentified
MNYVGVDYHKKYSYMVVKDENGNVAGRGTVNNTKEEVQQFLEPYRPGMAVVEATRNWGLIYDWLDEVLDDVALAHPLKVKAIAEARIKTDKISADILADLLRANLIPKAYAPAREIRELKSILRQRMFLVRIQGMVKNRIYDILDRHPEVLGQAPEVSDLFGAAGTRWLNGVVLQGEDNRLLTNELELLAFVRERIAESNSVVKELAKKDTKAQLLQTIPGIGPFFSLLILYEIDDISRFRSEKNLCAYAGLVPSTYASGGKVFHGRITKTGSKWLRWAAVEAVQPAIRNNPDFYAYYQRTKARKGNNAAKVATARRLLTVVYRILKHGRPFERRITAQEQRIVPAALVSI

SEQ ID NO: 475267 - protein, 396 aa, unidentified
MAQAKTWAGFDVHVRGVVAATLGRESGELRVQRLAGGSDPVVEFAAALPGPVRATYEAGPTGFVLARKLEAIGVDCLVCAPGLIPRGPSDRVKTDRRDAERLVRLLAAGELRRVAVPSVEEEALRDLVRAREDLRGDLMRARHRLAKLLLRHEVRFEGPQGNWTQAHLGWLAGVQLPQLASQRALEDYRGAVLALMIRREQLEAEIARALPDSPWAKTARRLMCLRGVDTLTAAGLCAEIGDFGRFRQPAQVMSYLGVVPSEHSSGDKRRRGPITKSGSQHARRLLVEAAWHYRRPPRVAGSLARRQTNGEPEIIALSWKAQRRLHHVWNPDGAARQATHEHRRRRRARARRFLLGGRDHRLTSQHDVGRAGRRDAGPSRQSIRDTPMGSRPDPGR

SEQ ID NO: 475268 - protein, 405 aa, unidentified
MYMNAIGIDVSKRKSMVAILRPGGEVVAKPFEVSHLSRDLQSLIHRIKSLEGESRIVMECTGHYYETIAHELVSAGLFVSAVNPQLIRHYQDEDNSLRKVKSDKADSLKIARYTLDRWAKLKQYGLMDELRNQLKTMNRQFGFYMKHKTAMKNNLIGLLDQTYPGVNTYFDSPAREDGSQKWVDFADCYWHADCVRKISVDAFVDHYQKWCHRKKYNFSKTKAEEIYETAKEPVSVLPKDVFTKRIIKQAVEQLNTASRTVEQLRSLMNETAAQLPEYTVVMAMKGVGPSLGPQLIAEIGDVARFTHRNAITAFAGVDPGVNESGDYSQKSVHASKHGSPTLRKTLFQVMDVLIKTKPQDDPVYLFMDKKRAQGKAYYVYMIAGANKFLRIYYGRVKEYLASLPQ

SEQ ID NO: 475269 - protein, 400 aa, unidentified
MRVVFGIDVSKASSEVAILVNGEKIHGYTIPNDAIGFNRLLEDLGTVYQPEIVFEATGVYSRRLHAFFEDNSYAYIRLNPLESKKQLDSLRVRKTDKIDAEKLATSQFILNRTPSYVQEALYQELRDLSRFYQNLTEDIVCSKNRLHKVLQVTFPELENILSSPTGKQYWNLVMAFPCNSFVLELDDAALRAIIRQSTSKRISENRVTYLVDKLTKLANHSYCAVKKTSPMMEEVKYYAGELLRLSEYRQSVLEKMITLAHPLPEYEILLSIPRIAETKATSIIGELGDIRRFHPANQINAFIGIDLRHYESGDFLAKEHITKRGNPYARKILFKCIHNIASASHTNPCHIADFYEKRKRQSQVTSTKPHTIASIHRLIRTMYYLITHNKLYDYTSTQNR

SEQ ID NO: 475270 - protein, 357 aa, unidentified
MEGLDEERRDAPVFLGVDTHSEAHVAVALDGAGGRLGELVVPNDRAGYARLWDWAMSLGILVAAGVEGTGSYGAGLSRFLRARGASVQEVNRTSRQHRRRHGKHDAGDAEAAARQVLSGTAAGEPKGADGAAESLRALRVARRSAVKAKTQAANQLHALLSTAPDELREGLRGLPTKHLAAKASRFRCGAGPVDPARATKLAMRSVARRHQALSGEIAELDAHIEALVEEAAPELVALEGVGPDTAAALLIAAGDNPERLKSEASFAHLCGTAPVPASSGKVVRHRLNPGGNRDANRALHVVALNRLRRDPRTQEYLARRTAEGKSKKEALRCLKRYIARETYRAVLLDVGAGRPPG

SEQ ID NO: 475271 - protein, 422 aa, unidentified
MSCLPALAGVCPHPMPVRRDIIILTESTLIVAGADTHADTLHVAAISMTGAALGDREFPTTRTGYATAIRFLTSWGQIERIGVEGTASYGAGFTRALSTAGIEVVEVTRAVKSTRRLKGKSDPLDAYSAARTALAGDGLATPKDDATSGLRALHIARRSAIKHRTAVINQIKARLISAPDMVREKYRASTTLKMIEALARCRPDAQAEPWAQSVLVAAKMLAQRVQFLETQVESLQAQIDAIVTEANPGLRAAYGVGSDTAAQLLITAGANPHRLHSEAAFAALCGAAPVPASSGKTNRHRLSRGGDRAANNALHRIALVRMSHHQPTKDYVQRQLALGHNRMEILRKLKRAIARETFKLLTRQIAVPEYADLRPARQAKNITVTAAANHFGIWPTVISRIERGLQRDDTFADTYRNWLRAA

SEQ ID NO: 475272 - protein, 368 aa, unidentified
MKQVTTFVGIDAHKKDLFVAMLSGAATTPVTWQLANERGAVRRMVRKLERDAPGPVHVFYEAGPCGYALQRQMATDRIACDVIAPALMPRKPGERVKTNRRDARKLAELGRAGLLTVVQPPTPADEAVRDLARARDDAREDLQRCRHRLGKLLLRRGLHYAGRNWTQAHRQWVDSLTWTHAAERTVVDDYQLAIDHTEARLLELDARLAELAEQAPYREPVGWLRCFRGIDTLTAMLMLAELHDFRRFGSARALMAFLGLVPGEDSSGEKHRRGRITKMGNALVRRILVEASWHYQHRPGIGRALKARRTGQPARVIAIADKAQQRLCRRFRKLAAEHKPAPKIAVAIARELAGFLWAALQPAPASVT

SEQ ID NO: 475273 - protein, 344 aa, unidentified
MEHFAGLDVSVKETSVCIVDDTGKIVHEVKVASEPEALLAVLKNPAYRFKRIGLEAGPLSQWLFSALAEAGLPVICVETRHMRAVLKAQINKTDRNDARGMSQMMRVGLYRPVHVKTLRSQKLRMLLTHRKLLQSKAIAIDNDLRGTLRNFGLKVGMVRAVRFEARIRKLVENLPDLAALVEPLLIVRRTLREQFCILHRRLLAIVRDDEVCRRLMTTPGVGPVVSLTYRATVDVPARFRKSKAVGAVFGLTCAKYQSGEVDWDGRISRCGDEMMRVMLYEAAQSMMRSKKWSWLKAWAMQIARRRGMKKGIVALARRLAVIMHRMWVDGTEFRWAREQATAAA

SEQ ID NO: 475274 - protein, 428 aa, unidentified
MSYRIAGIDVHKKMLAVVVSDVEIESEYQFERRMFSSNPEQLRSLAAWLVEQKAEEIVMESTAQYWKPVWETLERYWKPLCEKREGTRRRSGTLHLAQALSNRGRRGRKRDFIDAERLVKRLVARELTLSFVPDPEQRLWRTVTRKKYQLRRDVVRLHNQLEALLEEAHIKLSSLVSDLLGVSARRMLKALADGETNPAALAALAHERLRATPEQLCDALGACTELKPVYRRLLKMTLEQLQILEQQIGQLDHELATLLHPHQDAVERLAEVPGFAVDSAQQIIAEVGPTAATFPSEKCLSSWVGACPGEEESAGVNYSHRSPKGNRHMRRLLNQTANAAVKAKGSIFEIIYRRCVPRLGHNQAIGVIAHRQCRLIWLILHQGTRYEERGPAVTKRSRYQRTWRMIRQLRNLGYRIELPNPQASQAQA

SEQ ID NO: 475275 - protein, 342 aa, unidentified
MKYIGLDCHKKFDHATMIDTETGEVKAKRLAHVKEDFAEFIGERSDTRLVMESCWNWCKTYELVKDLVEEVTLAHPLKVRAIASAKIKTDAIDSRTLVKLLMADLVPEAHLRKAENRIKQRIIRHRAFLIAMRTRLKCRIHDLVDSQLLSRDAVQAKPVNIFSKKGMKWLCSLVFNTEEDRKMLESYLKLLEAINHEIASSNEMVEEIYDKDKDAQLLATIPGIGVTLATLISTEIDGIERFKSSSRLCSYAGLVPSTRSSGGKTYHGRITSEGNRWLRWGLIEAVVPASYADAEIRRQLSDLRRIKSGNVAKTIMARRLLKIVYHVLKEHRAYVPDYPGRL

SEQ ID NO: 475276 - protein, 379 aa, unidentified
MERIIYIGMDVHSTSYSLCALEPIFGQENKFFFETKVAAEPSNIIKYLDDIESCFANDECTFVTGYEAGCLGFSLYNYLKGRGIDCKILAPTKMSEEKGGKKVKTDKRDARAIAQNLAYGTYSAVFVPTEEDLAVRDYIRMRNDHKAAVKRIKQQINALCMRHGYIYQRTKWTAEHLKYIQGMTLSPLYREILQEYLATMEQLNNKIKAFDARIEELSQTERYKDNVGKLACFTGITRSRALAIIAEIGDFRRFLKPLNFAAYLGLVPGEKSSGKKQKRIAITKAGNSHIRKELIEAAQSICRGLPGYKSRALLARQQGCDNTVINYADKASARLRRRYYKLGRCGKKHNVAVTAVARELSCFICGMMNGLTEVQIKKA

SEQ ID NO: 475277 - protein, 317 aa, unidentified
MNNSKVQIPVNIGVDVGKANLDIALHPTGEFYSIPNSEAHIRRFVKILKGYSIERIVVEATGRYEHALVQACDQASLPIIVVNPTSVRRYAQAIGVLAKTDRIDAQVIAKYAATLKPEFKPIPDKTSQKIKDLLTRRSQLLDMSTMEKNRLQILPKTLHRSINSLLKMLQSQVKTITQQIDQEVAKVDHWRVKAEILTSVPGVGKVLTYTLLSELPELGSLNRKEIAALVGVAPINRDSGKLNGKRRIRGGRHRVRTVMFMAMLSSIQCNPVFKRFYEHLKAQGKLPKVALIACMRKMIVVLNTMVKNQEPWREIMA

SEQ ID NO: 475278 - protein, 352 aa, unidentified
MYNKNYISVGIDVGSAFSFMTIVAPDGSVIQKPFKITHNKPDSLEKAVSAIKKAEELHSLESRTFLESTGIYHFPLFCYLVDCGFHVSIINPIITHSANNTSIRKVKNDKVDSIGIAKLGLSGDIPVSQFPAKLVLEIRSLTRKYYDLTDERSAHINKLKGDLHTVFPQYLDIFCDVTGKTSTMILRQYGTPDKILRGHKKTMIEKISKASRKGLSKAAERYEKLCAAATAAKTFGCQIDSIYFNISLTLDLIEKLDSALDSILQRIHQLVTFNKSEKFIQQIKWLDTIKGVGFLTAVTIMCEIGDFSAFRNPKQLFAYFGLDPEVNQSGKFVGTEMHMTKRGSRIARKKFI

SEQ ID NO: 475279 - protein, 326 aa, unidentified
MKKSYFVGADVSKEKINFCFLTSIESSKPKFVSLPNDTTTIKAYFQSFIKDNIFIVFEHTNNYHVPLQSALSDLQIKHSALNPAKISHFLKHLTFQKSDITDAYGLALYCRIFKADLNPSTYNHEYNLIKSYNSTILLLSKIQTQLKNFKKSQDFVTDTELSEIIHALTIQVKKTQEKIKLIAFEILKSFVPNCEQIIKSNKGFGIDLALNLFPQLHFNRAKSEKQFISFLGLSPRIYESGSSVHKSPRINKRGSSAIRRVLFLNAISCARFNDKFKQRYETLISKGKKKKVALVAVMCAIVRYLKSLFPLNESYINESLYHTRTS

SEQ ID NO: 475280 - protein, 363 aa, unidentified
MIVIGTDTRKRTHTCAAVDGATGRPGGELTAAAREPGFRELLAWGRGLDEERIWAIEDCRHVSGSLERFLVASGERVVRVAPRLTGQGRRGGRRAGKSDPIDALAVARAALREGPDTLPAAHLDEEALEIKLLLDHREDLVKARTEDQCRLRWHLHDLWPDLEIPTGALDRTVWLDRLARRLSRVGQGTRALIARELVVEIRRRTRRVRELGREIAALVEARAPALLDLEGCGPLTAAKLIAETAGAGRLASDSKFARLAGVAPIPASSGMSTRHRLDRGGNRRLNCALHRIAVTQGRCHAPAQEFLTRKQAEGKSRLEALRCLKRHLARRVWRLLLDAERERSEDTVHAQRGLPTPRSSATA

SEQ ID NO: 475281 - protein, 474 aa, unidentified
MSRGDGIPLERLIAATYPSRRGIPLLIMEKFVAMRKRELRVMFPNAAGIDVGSASHYVAVPPERCEQSVREFQSFTEDLVALSDWLQSCGVDTVVMESTGVYWIPLYELLEARGFTVYLVNARHVKNVSGKKSDVLDCQWLQQLMSFGLLAGAFRPAGEVCAVRAVVRQRDTLIDAQAQQIQRMQKALTQMNVQLANVISDIAGKTGLDIVRAIVAGERDPHKLAKLRNYRVRANEATIAKSLMGNWREEHLFCLAQSLKLFDTHQVLLEEADAKIEALLARMHRHAGELTPNKNKGRTKNAPRFDARSALYGWAGVDLTRIGGIDVSTALKILAELGTDLSKFKSAKHFASWLGLCPGTRITGGKRLSGATKRIPNRVAQALKLAAHGLHRSQCALGAYYRRMAARLGAGKAITATAHKLARLVYAILTKGEEFVQRSQDHYEDQVRTRTIRYLQKKAASLGFNLQPNPAVCA

SEQ ID NO: 475282 - protein, 403 aa, unidentified
MFKYFTGIDISLEKFNFCIIDNEGKILKKGELPHSYEGFIKLKNTLERITDKEKNIIGIESSGPYHINILSFLVSNSFKTTLFNPIILKNFNKSQTIRRTKTDRIDAKTIAFFMLKNQDIIKVKEIPESLKLLAREREEISKEIAKIKNRIKALVFNIFKELLDKYNIFTRGMLEFLLNIPSARIARIKSEEEIREILSKISEKRGRKISITPEDIKKIANRTISIDDEKREIILKSRIRMLLNLQKELKILTEEFMKRAEEFFRNEIEIISSIKGIGKLSAAIFLAETEGLKNIRNVKKLRAFCGMDPIIFESGKFKGKSRISKRGNRHIRRIIWNMAQGAVFRTNTFKTYFKRKRNQGMKYKKALVATANKLLSVIFALVKNNSTFHDLPPTNFVPVPNYS

SEQ ID NO: 475283 - protein, 351 aa, unidentified
MSMTTIGLDTAKSAFQVHAVDAAGKTAIRRKLSRAELIPFFEKQAACTVVMEACGAAHHWARLLTGLGHTVTLIAPEAVRPFVKKGKKNDAADAAALCVAASRPDMKFVPVKQPEQQGILTLHSARSLLVKQQTMLVNAMRGLTTEFGLTVPQGVGRLAELKTRVDEDEAFPETARRVFTALLDQYSSLAKSIETFESAIVAHARNDETARRLATVPGIGPLTASLLAATVTDISLFKSARHFAAWLGLVPRQYSTGGKTRLGRITKAGNRDIRKLLVLGATSMLYRAPQWNSAVGAWARGVLARRPVRLASVALANKMARIAWALMTRKEVYQAKERGGRDASGMMTFRR

SEQ ID NO: 475284 - protein, 397 aa, unidentified
MQTLAEIRVCMDVGCHQHRVLIGLSNGEILEEFNLPHTSSAIKQFFKKTDDYQSKYSAQVIFAMEGYNGHARPIDKFALMRGYRLLNVNNNKLAKFKEIFPGPAKSDEIDTRKIFELLTLQEHLPMAKKVLNEVTHVPEVNEKLKRLTRRRHALVHEKVRAANRLQSDLNAVAPALSTITKDVCNVWFLNFITARSDLQKLSRLQLSSILKIKGVGKKYASQIIQWQKEAEFSPDLEWVNSMIISDAQRIIELKNEIQALESQLERLFEQSDIAKRIKTINGFGLICSAELAGEIGSLDRFNSESSLSLYLGMTSLTNQSGQYSGTKKTRHINTNCKKAMMIAVARHIDNVAESKAYYNKKRTEGKKHNQAVRALGRHLVRVIWSMIKKERDYQIRK

SEQ ID NO: 475285 - protein, 372 aa, unidentified
MQQKSKVFVGLDTSKLKISVAVAEDGRQGEIRFLGEIDNTPEAMRRLVHKLASRHGELLFCYEAGPTGYGLQRQIAALGHECAVIAPSLIPKRPGERVKTNRRDALTLARLHRAGELTAIWVPDPGHEAVRELVRAREAAMEDLREKRQHLQSFLLRHGRIFPGRRPWTQAHARWLAELVFEHSAQYLVLREYRQAIEEAEARLDRLTQQVAEVVATWSMAPVVEAYQALRGVALLTAVTFVAEIGDVRRFDSPRQLMAYLGLVPCESSTGERVRRGRITKAGNARVRRVLIEGAWTYRFPARMSRLLQERQEGLPAAVRAIAWKAQVRLCARYRRLMAAGKRQTVVTTAIAREMAAFLWAIGREIEPRSAA

SEQ ID NO: 475286 - protein, 405 aa, unidentified
MWYVGIDWANDHHDALVIDEKGRQVGSLRVDHSPQGLSRLNTFLEQIMGDLSSKDQIACIIETTHGLLITHLLEAGWPVYPVNPRTVDRRRAASGAKTDTIDAYLLAKTGRADLTDLHRLTPDSEKITELKLLTRDQDALIRMQTRLVNQLTACLKAYYPVALELFAKLHQKSTLLFLQTYPTPQEAMGASTEQIKEVLRRAKHSNPTLGAVKIFERLHRPHLQADAVTTRTKSRLMLVLVSQLQPLIEQIAQYDKEIDTLFLTHEDHEIFESLPRAGKRLAPRLLAEIGDDRERYQDASSLQALGGTSPVLFQSGMYSKAHRRLGCIKPLRNALHQFAWQSTQSEAWARDYYQRKRAEGKSHTVAVRALSNVWVRIIFAMWMDHRCYESAIFERAQQQHARRAA

SEQ ID NO: 475287 - protein, 352 aa, unidentified
MEQFIGCDAHKMFSVFVAVNEKGNAGEAVRVAHDRQIYREFLAQLPPQSTIAVEASGHYNWLVDEMERLGHHPKLANPLEAKRRMGLTNKTDRLDARGLAILLRNGTLPEVWIPPSELRDQRELVRMRIFLVHLKTRVKNRIHGTLARHNVVVPGADLFGAGARLRLASRLPELPLHSREAIERELSTLDFLETQIESAEKQLKSIMQVSVEADLLKTLPCVGEILSMVLMLEIGRVDRFPSAAHLASYAGLVPRVRSSGGHTRMGQVCANVNKNLKWAFVETGNLVVINQKRLAGAHVVHLYQRLKRAKNHQKAVVAVARHLAEAAWWILTKQEVYRDPRVARQALSSTHG

SEQ ID NO: 475288 - protein, 341 aa, unidentified
MEIKRIGVDTSKHVFTLHGVDASGAAVLRRDLRRSAFEAYMAKLAPTEIALEACGGAHHWARRLTAMGHRVRLLPPQYVKAYVKRNKTDRADAEAICEAAGRPSMRFVPVKSAERQGELIVLRTRELLVRQRTQTVNALRGHATEFGVVVPLGVSRVEELLTKLASDPEVPDIAREMLAILGRQIEQIDQQLAIIDARLLAMHKASEVSRRLAQVPGVGPITAISFTLNVEPAQFESGRHLAAWLGLTPREHSSGGKQRLGGISRAGNERLRQLLVVGATAVIRHASKPGARLASPWLRQLLARKPRKLAAVALANKTARIVWAMMTRGEAYRARPLVGAT

SEQ ID NO: 475289 - protein, 358 aa, unidentified
MNNVKSSRLDFTGQPIYIGLDVHKKSWSVSINTQYGEYKVFSQPPEVDKLVHYLQHHFPGGDYRSVYEAGYCGFWIHDQLREKGIQCLVVNPADIPTKNKERRTKRDRIDCRKLGRSLRNGEIEGIYVPCRPKLEDRTLTRTRQSMVRKQTRCKNQIKGMLLFYGVVIPEVREMGHWSRRFIQWIEGIRMERASGDIALKAHLEELSHLRQLIASLNRAILRLARTEEYRPLVHLLKTVPGISTLTAMILLTELGEITRFPSLDELSCYVGLIPDTRESGDKEYIGSLTQRRHSQLRWLLIEASWVAVRKDPALLMAFEEYCKRMRKTKAIVKIARKLLNRIRYVLRNQAEYVPCVIQ

SEQ ID NO: 475290 - protein, 345 aa, unidentified
MEYHFIGIDVSKEKLDATLIRYESQSDSEQQLAYTTVENNPKGFRSLVSWSKKNAGRGVKTDTMLFCCETTGGYDRALCDWLYGNGLNIWRESALQIKRSMGLRKGKDDKADSEMIAHYALLFRSKATLYKPLDGNMRSLRDLFLYRQSLVAERRAKTVSAKEKRHISSKSKVDNFIYRDAQKAIDLLTKSIKECERRMLEIIREDEEMYRHYLHLISCKGVGLVTSVMLIVFTDNFKGWSAKKMASYCGIAPFYESSGSSVFHKSNTGGYSNRRLKGILTQAARSAITHNPTFKQYYQRMKAQGKPYGVILNNVNNKLLHILFSLVAHDCDFELDHEAKRALRA

SEQ ID NO: 475291 - protein, 320 aa, unidentified
MTILNSPTVIGIDVAKAEIVVYREDLKITQAIDNNRDALGRWLKTLPAQSSIALEATSFYHLDTAELAHGMGFHVYVVDPYRVAHYRESIGLRAKTDPCDARLLARYLTNEQARLRIWSPPPEAYKVLKSLLRKRAALIKARVSIVLSFSNEPRLKDILARQLEVFKESDQAIQKLMREASQAAGITENINRCKAIEGIGELTAIGLATAFMRGHFVSGDAFIAFLGMDLRPKDSGKKHSPRHLSKKGDGELRRLAHNAAMAACRSPAWKPYYEAFLARGLARTQALVILARKLCRVAFALMKNQSEYQPNSGLQGSPAT

SEQ ID NO: 475292 - protein, 419 aa, unidentified
MNYVGFDWASRAHDVTVLDEAGGVLDRWAFPHSETGWVTTLDRLARHGSAVEVPVIIERTSGLIVDRLLAAGHPVVPVHPTAFYAARPRWGASGAKSDPGDSYKLADYLRTDGHRLRRLTPTDPGLHELQALVRLRDDQVRARTAATNQLTAILDNYWPGPKQLFMSLASQIALAFLTDYPTPTSAAHLGEARMAAFCRRHAYRGGKSPAELLSRLRAAPVAPVGLPPATLAAMVTAQVTVLKTLQTVISDVERLIAVRVVAHPRSNLFENLPGVGMINLAQLLAEVGPILDRVDSAEQAATECGAAPVTRSSGQTRGVYFRWAANTRARKAITSFAHNARMHDDWAAALYADARARGKRNPHATRIVARAWLRVIWACWTSGQPYNPDRHHSSRFLHRCHPAGAQARSRWSPPPEERS

SEQ ID NO: 475293 - protein, 314 aa, unidentified
MSAEIFVGMDVSQACVDVAVHPGTAFQIVHDERGIAEAVERLHALQPTLVVLEATGGLEVPLTGALAAAGLPVVVINPRQVRDFARATGQLAKTDRLDAQILARFAEAIRPPVRPVPDEQTQALAALVARRRQLIEMLTAEKNRLRLAAQPIQKRLRAHITWLEKELASTNTDLEATIRLSPVWREKEEVLRSVPGVGPVLVTTLFANLPELGTLTRKEVAALAGVAPFPRDSGTLKGRRAIWGGRAHVRAALYMAALVATRRNPVIRMFYQRLCQAGKAKKLALTACMRKLLTILNAMLKSGTPWRVAASPPT

SEQ ID NO: 475294 - protein, 322 aa, unidentified
MQRFHLGIDVAKAKLDCALRLPDGKLRSKVVENNSQCFKVLTEWLEKHGATTAHVCMEATGVYWEAVAEYLATQGMAVSVVNPAQIKAFGASKMVRTKTDKVDAKLIAEFCFERHPDPWLAPTPGEQALRAMVLRLDALQAMRTQESNRLEVARDAVKTGISQHIEWMDEQIKALARTIRDHIDGDKTMKDKQAILESIPGVGERTIAILLAFYANLDRFKNVRQAVAFAGLDPRQHESGSSVKGKPRLSKIGHAFLRKALYMPAMATLYRTAWGKLFRDRLAAAGKPPKLIIGAMMRKLVHVAYGVLKSGKSFDPALHGLT

SEQ ID NO: 475295 - protein, 439 aa, unidentified
MKKRRDRVCGADVHKDLIVATITGDNVLSIQENFGTTQSELKRFRRWLVTNKCEQVAFEATGVYWMPIYDALSKTIDTIVANPLQIKTIPNDKSDSKDSKRIAILCLNSQIKRSRVFSDYDRELRTLTRARSGYVKTQTQFRNRVHKHLSSSGIKLSSCMNDIFCKSGRYILDGLAKEMPVEEILKGIPSGKIRKKQDQIREALENRLNETNLMLVRDALEFLDNTESKIEKLSFEILKKIQQRSKDLAIVMSIPGIGFISASVILSEIGNYRDFQTPDQLAKWCGLNPGESESAGKKKKCGITKRGSKQIRVVLVQAAKTIGNMKNTRLSRFFQRLVKRKEPNVATIAVARKLVCLIYHLLINQELYQEGECRTRDSSQNKSCHAPSLQDEKLSDKVAAIVDAFYLLKEDNRKNALMRELGAISMAKPGKKRPSGGGE

SEQ ID NO: 475296 - protein, 315 aa, unidentified
MTNNKKSKSVVNVGVDVGKAFLDVYIYEKSLYWQEDNTPEGIKRILKRLSHYQVERLVMEATGRYEFQLAETAHNKHVPVCIVKPLAVRRYAGAISQTAKTDKIDAALIAEFGAVVQPKVTPRKSKNLIAIKDLIARRRQLMGLRTQELNRLKIMGKAFEVSCKRIIKCLDMEIVRIEKRLSRHVEEMADWTMKQTILKSAPGVGDALVYTILADLPEIGRLNNKEISALVGVAPMNRDSGKLRGKRRVQGGRASVRTILYMATLSATQCNPVIRDFYKRLVGQGKHKKVAITACMRKFIIMLNAMVRDQCEWAY

SEQ ID NO: 475297 - protein, 389 aa, unidentified
MPEDAPRPAQAAIRTDLGAIFVSLELSRKAWLVTSLSPGSGEKMSKHSVPASDVSGLLRRFAELRRKAAARTSRDFPIIVIQEAGLDGFWIHRVLQSEGIESHVVDAASILTSRRRRRAKTDRIDGETLVRTLMAFKRGEPRVCSMTRAPTPQEEDRRRICRERRTLVGERVRHVNRIKGLLFAQGVFGYEPLRKGRRERLEALRTGDGRPLPVHLKAQIIRELDRLELLLEQLKRVEAERDALLEPASNEASSPAAMLVRLKGIGPETAAILWSEGLFRQFDNRRQVAAYAGLAPTPWQSGSIDHEQGVSKAGNPRLRTTMVELAWLWLQNQPTSALSLWFHERVRRLGARIRKTAIVALARKLLIALWRYTTAGVVIEGAVIKAATI

SEQ ID NO: 475298 - protein, 393 aa, unidentified
MICVGIDVAKDKHDCFILSSEGEVLADVFTIQNNAEGFDRLLQTIRRCTRPEDKIKVGLEATGHYSYNILGFLLDEGLPTYVINPLHTNLYRKSLSLRKTKTDRVDARTIAAMLMSDVDLKSYTDTAYHNEELKSLTRYRFDKVLERAKLKQSVSRLVTILFPELEKLVPTLHMASVYALLSEFPGARQVAEAHLTHLKAVLYDASKGRYGRDMATTLRDAARCSVGSVMPAKSLELQHTIRLIRELDAEIEDIETAIQSMMDEIQSPITTIPGIGVRMGAMILAEIGDFTRFDSPDKILAYAGMSPSTYQSGQLSLSGAYSHMEKRGSRYLRYALYNATKYVCLWDPAFAAYLAKKRGEGKHYNVAISHAAKKLVRLIYAMEKSKQSYRNAA

SEQ ID NO: 475299 - protein, 339 aa, unidentified
MEGVYCGIDLHANNSVVAVIDAEGKLVYRRRLENDLRRITAALAPYRAQLRGVVVESTFNWYWLVDGLMERGFLVKLANTTAIQQYGGLKHTDDDSDALWLAEMLRLGILPTGYIYPAAERGVRDLLRKRAHLVRQRTANILSIQNLVQRSTGAGLKSDTIKTLTVERLGAIMPHADVAQAMAASLAVVQCLGEQIAVLEKSVRGRVQLRPEFVQLKSIPGVGNILALTIMLETGEIGRFAAVGHFSSYCRCVDSKKLSNGKKKGAGNVKNGNRYLAWAFVEAANFAIRYAPPIQRFYQRKKARTNGVVAIKAVAHKLARASYYILRDQVGFDVSRAFC

SEQ ID NO: 475300 - protein, 425 aa, unidentified
MPTSTLFVGIDVSEKSNQVCAINFNQDIFFNKSFANTPADSELLIQKLIETVKAHGLEKIEVCLESTGVFHFHIANVLANDDRLKTYSCKTYPMNAKSIAKYKDSYIELEKHDPGDAFICADFVRVGRCKNSQVARDYQKFALQRLTRQRRNVAELMVNEKKRCLNNLFLKYSDLIVNSSNESYFNNTFSHTLMHILTDYLTVEDILKADYEELIDKVCEYSRNRFSDPEAVAKAIKKMARDSYRLDKVAADALSITLASQFRLIETYKDEIKVLDKEIERLIKGLKNNYFNILTSVPGFGLICAAGIIAEIEDISLFKNSAHLASYGGYRWKRKQSGNFESEHTKQANASNTYFRYYITEATSHLVKYNSEYNVFFYKKYNEVTKNQYKRALVLTTRKCIRLIFGLLRRNQLFDHNRHLDTFTV

SEQ ID NO: 475301 - protein, 300 aa, unidentified
MMPMTRPIESTAPSAGMLMAFELGQRSWKLGFTVGMGQRPRVRQIPGGAVDALATEITRAKKRLGLSADAPVTSCYEAGRDGFWLHRYLVAMGVTNYVVDSSSIEVNRRARRAKTDSLDLAGLLSLLARYALGDQRAWRVVRVPTVAEEDARHLPRTLEALTQDRTRLVNRLKSLLATQGLSLPINAQFLKRLSAARLWDGAPVPPGLQERLTRTWTQLEEVDGQMRDLKALHLTRPEQLPPATSRALAQLLTVRAIGPIGASVLATEIFGWRRIRNGRELGVLVGLVPAPYQSGETDYD

SEQ ID NO: 475302 - protein, 387 aa, unidentified
MMKNKGRVVGLDVHPDSFAGAVVEGRDPASAVVSSTSTRVELERLEEWALRHTSTEDTLVLEASGNAFAVAARLRAIGREVEILDSHRAGKVGKVYCANDRVDAVKIARIYLSALSPIVWQPDQKTLERREIFSAYQAVVKESTRAKQQLRSMLNEHCVRLEKGFRLCHPYAIGRLLKVREWTPARRMLLQQLHGSLLAARARRTMLRRHMAQEIVAEEALLRLSRLCGINLITLYGVVAAVGDVRRFTHSKKLVAYLGLNPSVSQSGNFQGSGALKRHGRGALRALLIQSGKKLLEVNNPLQKWGLAVAARRGRNKAAVAVARKLCVALWHLMMGHAIGTLERLDTLQTKLSKFATEIGPAALTAFGYNNRADFVQKKLYVLRSYP

SEQ ID NO: 475303 - protein, 406 aa, unidentified
MTAVMIGVDPHKGSHTAVAIGAAEEPLGKLRVRASAGQAQRLVAWAAAWPERTWAVEGAGGLGHLLAQQLVAAGERVLDVQPKLGARVRLLATGASNKNDPNDALSVAVAALRSPARRQVSADDHAAVLRVWSRRHRDLGRAKNQVACRLHAVLCELVPGGVPKEITAAQATRILQSAQPSGVAGQARGELAAELLADMRRLDAQMLPSKKKLAIAVTASGTSLTGLFGVGPVIAATVIGDAADVARFASRDHFAAYNGTAPIEVSSGNRKIYRLSLRGNRRINHAIHMAAITQIRHRHSDGRAYYDKKLAEGKTHKEALRSLKRQISNAIFRCLQADARQAAPAACAKGPGGQPGNDSDSSAAGSHPERRLFGQATPEPSPTLRPDPAKRTSQPTRRSRRTSQNP

SEQ ID NO: 475304 - protein, 350 aa, unidentified
MIILGVDAHKRTHTFVVVDEGGRKLAERTVSATEEGHVEALAWARRWDDRRFAVADCRPVTRRLEADLLAAGETVVRVPTKLMAGARRSGRTPGKSDPIDALAVARAAIREPDLPIAHLDCATRELRLLVDHREDLVAERTRLQSRLRWHVHELFPGLEIAPASLGRHRHIAALEARLVDATGTVAEIARELLKRCRELTLRANELERQIGRLVRVLAPTLLGLPGCGGLSAAKIVGEVAGVLRFRSKATFARWNGTAPIPVWSGNADRHRLNRGGNRQVNAALHRIAITQQRGVGSGRDYVQRRLRAGNTKTEALRVLRRTISDEVFRRLSVDEQRRATTTPNAIPLAA

SEQ ID NO: 475305 - protein, 349 aa, unidentified
MRKLYVGIDLGCKTCAGAVRDSKGKLLETCGFPTSAKNLIDFVGKQKGEVRVLVEECELAGWVMRTLLPHVESVEVSDPRHNAWIAKGKRKSDPVDAAKLAELLRGGFYRAVYHPGDEEMANFKIAVQHYDQMTRTTTRLQNQIKARFRQQGIMTTGKGVYGLAGRKKAISMLKSQAIAEILNQDFRLLDHAQKERTAASRLVTKLSRDLPVIRRLKRIPGVGTVSAARFVAYVQSPYRFNTKGLVNFSRLAVVKKESGDSIVCGEHLSREGNGAMKALSRTVFNGAMKTTSTNGIRDYYLRSLSRTKNETHARLNTQRKILAVMNAVWRDGTEYSDHLVTGNGARRTL

SEQ ID NO: 475306 - protein, 323 aa, unidentified
MAKHITICAGIDTGKRKLDVAVEGSREQLQVENTSEGHAVLLAWLRRHRVKRVGIEASGGYEQPVVAELRRKRFVVVVFQPAQVRAYAKFHLQRAKNDKIDAALIAACTAAVRKIHPAPDPRLQPFAEQLTMIDQIGEDIARLKNRIESCRNTQIKGLWEEDLARLAKREKVELKALIASICKHPDLAKRLDLINSIDGIGLPTAVAILVRMPEIGQITREQAAALAGLAPYDDDSGEQVGTRHIEGGRKRLRHALYAAALAASFRWNKQLMTLYRRLIAAGKEHKRALVACARKMLVFANTIVARGTPWQDRPPENAALTAS

SEQ ID NO: 475307 - protein, 323 aa, unidentified
MSQPNLQCMGIDVAKLSLDIATTDTIEPFTVGNDEDGFAVITDKLKHTKINLILMEATGGLEAAIACKLQSEGYDVVVINPRQARDFARSMGYLAKTDKLDAAMLAQLALVIDRHPDRSRYIRHLPDEARAVLAAMVVRRRQLNHMLVAERNRLYPSHPQSRKSIDNIIDALQNELDRINEQMKQHMTAFIQEQARLIGSVKGVGDITVASLIAELPEQGKLNRREISALTGVAPLNRDSGKMRGKRTTFGGRAGVRATLNMADLVATQFNPAIKLFYQRLLAAGKPKKLALVACMRKLITILNTMLRKGEEWNASFQSQVIS

SEQ ID NO: 475308 - protein, 338 aa, unidentified
MDTYAGIDLHSSNSFVGVINGEDQRLYGKRHPNRLDDVLRALDPFQDSLKGVVVESTFNWYWLVDGLQEHGYPVHLANPSAVKQYEGLKHTDDKWDSFWLAHMYRLGILPEGYIYPKEHRAVRDLLRRRLLFVRHSSAHILSLQSMINRNLGLKMSNNEIKKLKPQDIEGLFDCPNLVFMANNSLAAIKFLKKISLDIEKKVKSQVKMRKEFLMLLTIPGIGNILGLTISLEVGDIGRFPAVGDYSSYCRCVESKRISNGKKKGENNKKNGNKYLAWAYVEAANFARRYCVKAQSFYQSKEAKKNNTVAIKALSNKLSKASFYIMRDQVAFDEEKLFG

SEQ ID NO: 475309 - protein, 370 aa, unidentified
MKKNSTSSQSPKRAVARQEGPITIGMDLGDKTSRYCVLGRNGEMLLEGSVATTRKGMTQKFAGMRRCRVAMEVGTHSPWLSRWLASLGFETIVANARQVELISRNSRKNDRMDAQLLARLARADPQLLRPIRHRSEQAQADLMTIRIRAALVEARTSLVNAARGFAKAQGDRLPACDTDSMGVEKMEALPAEMRASLRPLLEQVESLTEKIQESDAKIEQIARTQYPETELLRQVSGVGTLIALTFVLTVEDRHRFQKSRDVGCYVGLRPKQSESGQSQPQLRITKEGDRYLRQMLVQGAHCILSRRGPDTDLKRWGLKLAERGGKNAKKRAIVAVARKLAVLLHRLWVCGEVYEPLRNSQAARPSKQAA

SEQ ID NO: 475310 - protein, 415 aa, unidentified
MALKIVYKICCGIDVHKTFVVACIASTDKHGVTSYERHRFSTYTKGLKNLLHWLLDRNCKDVCMESTGKYWIPIYNILEKECSIILAHPKYVKAIRGKKTDKKDAKWIADLFKHDLVAGSFMPPADIRQLRDLMRYRFKLTCFKSSEKNRLQNCLTVSNIQLGNVVSDTFGKSAQAILDKLLENPEDTSFDLEPLVFKSLKKKLPELRDAIDGYITPEQAGKLKIIKAHYESLESRKAELEELILALAAPYQQELAILQTAPGISSDFTAIGIISEIGTNMEAFPSAKHLCSWAGLTPTNNESAGKKKSVRVSKAGCYIKPLLVQCANAVVKSSKHPEMRNRYLRLKKRRGHKKAIIAIARMLLTALYHMLKNGENYNAELYRKSDLPPVDREITVEQAILIAKNQGYKIKSATA

SEQ ID NO: 475311 - protein, 350 aa, unidentified
MAIVGGFDVHRKQITFDYVDNDGLVQWGQIRPATRKTLRSWLAKHCPEGAGEFALEGCTGWRYVSEELTAAGVGVHLGDPAEIAALRGPKKRAKTDRADARLLRTLLVEGRLPESWIPPAHVAEIRALGRLYCALMEERRGWQQRIHAQLFHQGCPPVKALLSEPGREVLVAAELSAAGRQYVDTALRRIDELTAEIDPLRMQLVRFARRQSGCRVLQRHYGVGWLCAAIIWAEVGDPRRFSSSDQLVRFAGLDVTVYSSDGKRAPGHLSRQGSPELRWAAFEAAKCAARRGSPDYAYYHNLAAKHEGRNGKNPTLAVERKILRRCYHTLRELGDAVLAMPIAEAEEVAA

SEQ ID NO: 475312 - protein, 418 aa, unidentified
MVHVHGRRVQQQVAAAGGAPAEQCVVVAIDTGKADAVALVADFAGERLCAPVTFTMNRTGITGMVEQVGAAAANRQVRFVRCGVEASGYHLPLLTPGLLPAAWTMVELNPAHVAMQRRVNGQRSVKTDLVDATAMFDLLVAGRGHVVGQADTAIVELAGWVHLRRSRVALKRAIGNHLISQMDRAFPGVSSCFHQLLGTRAGRLVIDEFTDPQRLVRMGVSRFQSFARTRGVRVSANNAEKLVEAARQALPSADAAVARKAVAADLCLMAELQAQIVVAEQQLERLLPVTPYAVLTTTPGWATVRASLYGAGVGDPRRWSSARKIYRASGLTPSVHESAGRRHDGEISREGSVTLRHALLELGQGLRHHEHAARVRAAQLAAQGKHSMIIWTVMANRANRIAFAMVKNQQPYDVQRWR

SEQ ID NO: 475313 - protein, 411 aa, unidentified
MEVVYEHCCGLDIHKKTVVACVVVSGSGKQPHKEIRTFNTMTADLLELADWLTAQRVTHVALESTGVYWKPAWNVLESSFTLLLVNARHIKQVPGRKTDVKDCEWIADLLRHGLLRASFVPDRPQRELRELTRYRTTLVRERSAERSRIQKTLEGAGIKLGDVASDVLGASGRQMLEALVRGVTDASLVADMAKGSLRGKRPQLERALTGEFGAHQRFLVGQQLAHLDGLDVLIDQLSQEIGERLRPVQDKIERLDAITGVGLRTAQVFLAEIGTDVKRFPTAAHLASWAAMCPGNNESAGKRKSGRTGKGNQWLRTALVEAAHAVSHTKDTYLYSQFHHVAARRGKKRALVAVGHSILRIIWHLLEHDCEYVDLGSRYLEERDRQQIQRRLVRRLEDFGYKVKLEPASAA

SEQ ID NO: 475314 - protein, 345 aa, unidentified
MEYFAAIDVSLELSSVCVVDGTGKIVCEKKVASEPEALAAFFRGSGLILTRIGLEAGPLSQWLHAGLTAAGLPAILIETRHVKAALKAMTVKTDRNDARGMAQLMRMGWFRPVHVKTVPAQEIRALLTGRKLLLGKLRDVELGIRGLLRGFGLKVGQVSKGRYEARIRELTGGHPMLEPVAAAMLQARVSLRAEYGKLHRMLLGIVRTDATCRRLMTVPGVGPVVAVNYKTAVDDPARFRKSKDLGPYFGLTPSKYQSGEADWTGRISKVGDAMVRTALFEAANVMLSRVTRFSTLKAWALRVAKLRGMKRAKVALARKLAVVLHRMWVDGTDFRWRKMPAATAA

SEQ ID NO: 475315 - protein, 371 aa, unidentified
MTITTHVGLDVHKNSIFVAVRSQDELKAHSLGQVPHDLTRLLRKLEKLGSPESVQLCYEAGPTGYGLCRVLRDRGYDCQVVAPAKTPSIGANRVKTDRRDALKLADFLATGHLTFIRIPTPEEEALRDLIRAREDLKIKETNSKRQLNSMMLRHGRVFSKQNGGGKAHWTLLHLEWIDRQTFQHEASNVAKETYVTEVRHLTERVAALDRRIAEIAETMERADLIRAFQAFKGIKVLTAATIVAEVGDLRRFPSAKQFASFLGLTPSEQSSGETRNRGSITKAGNRRLRRMLVEAAWAYWRSPHISRELKKRSGGTSEAVRAITWKAQSRLHKRLRALQHRHVPAKKALIAVTRELACAIWAVGQEERLAA

SEQ ID NO: 475316 - protein, 412 aa, unidentified
MEVVYPRCSGLDVHKRFVVGCLSLIQDGQRHKELRQFSTMTSEILALKEWLKAAGCSHIAMESTGVYWKPIFHVLEGEFEIFLVNAQHMKAVPGRKTDVKDAEWIADLLQHGLLKASFIPSSEQQAIRDLTRTRMRLIQERNRLVNRIQKVLEDANIKLASVVSDVMGRTGHAILTALVAGQEDPECLAHLAQGKLVKKQEQLKAALQGKLTSHHRVLLQELLQLIVTLDRSITRLDREIAARLRPLDGLIERIDEITGLSRRSIEVLLGELGWDMSRFPDAAHAASWVGICPGNHETGGKRLSGRIRQGNRWAKTVLIQAAHAAAQTQTYLGEQYRRISARRGAKRAAVAVGHSILVIFYHMVKTGESYLEKGADYFLTADKHKIQQRLVRQLERLGNTVILQPKGVAASA

SEQ ID NO: 475317 - protein, 355 aa, unidentified
MSSEKYIGLDVHQATISAAVTDSQGKVIMESILETKASTLLEFFAGLRGSLFVTFEEGTWAAWLYDLLKPHVTEVLVCNPGKIPLHKQGNKSDQIDARKLAERLRLHDLKPVYHGENGIRMLRELARSYLTVVKDLSRVMNRLKALYRSWAIPCAGRDVYYRRHRSEWLDKIQEPGERCRAERLYQQLDMLQHLRQQARRELLVESRKHTITAKLRQIPSLGPIRSALAVALMQTPNRFRSKRQLWTYSGLGLETRDSGEYYVVKGQVRRRKKQATIRGLNKDHNHDLKGLFKGAATRASVKPGPFQEFYQRSLAKGIKPTMVRLTLARKIAAITLTLWKKGEDFDINKLNSQAA

SEQ ID NO: 475318 - protein, 345 aa, unidentified
MELHTIGIDLGKTVFHLVGVNLRGEVVVRKKFSRKQLLHFTANLQIELIGMEACGGAHFLGRALQEQGHEVRLMPAQYVKPYVKTNKSDYIDAEAIAEAVGRPKMRFVPIKSDDQLDLQSLHRVRERWVMRRTAVINQIRGLLLERGVTLRKGRGHVDAALPGILEDASAKLSGALRGLLAQLKLELDHLQMRIDEADAVIKKTAGENEACRRLVAIPGIGPITATAIIAAIGNGAAFKKGREFAAWLGIVPGEYTTGGKQKLLGISKRGNSYLRRLFVHGARAVLQQSAKQSSGLSAWLAQLTTRTHRNVAAVALANKLARMAWAVLAKNEAYRPPILVAAAPA

SEQ ID NO: 475319 - protein, 335 aa, unidentified
MTSLPVFVGIDYHQDSVQVCVLDSSGRRLTNRSVANDAAAVAAVAVRHGRPARLAVEACCGAADLAEELAAGQGLAVELAHPGYVARLKRSPDKTDLSDAHLLADLARVDYLPKVWLAPESTRQLRRLVRHRGQLVRRRRDVKLRIRGLLRENRLRCSHAAAWRKAWLTWLQHEAPLAESDRWIVDDHLAELAALSARIASLEAKLTAATQSDPIVAKLLALPGIGLVTAVTMRAEIGRFDRFDAGKQLSRFCGVTPKNASSGARQADAGLVKAGNPELRTVLVELAHRLISRIPGRWADLARGMLLRGKPRNVVVAAVANRYVRWLHHELRREG

SEQ ID NO: 475320 - protein, 440 aa, unidentified
MTRRCFGLDVHREFAQVAIWQDGLVRQAGQIAMTPEGLGVFADSLAPTDEVALEATGNTHAIVRLLRGRVARVVVSNPQKTRAIAEAKVKTDRVDAEILAQLLAADYLPAVWVADEDTQARRRQVARRAHIVRQRTRLKNQVQSILHRNLIPRCPAADLFGIKGRRWLAEQELPADERQAVLALLRQLDFHAHELRLIDAELARVALGCQDTKRLMTIPGVDVAVAMSITAAVGDFSRFSSPNKLVRYIGLNPRVKQSGDQPAAHGRIAKQGRAHARGMLVEAAWVAVKTPGPLRAFYERVRARRGMQIAVVATARKLSVLCWHMITRGEDYAFARPSLTAKKLRALELKAGMPSRRGQKGTASGYSLKEVRAREKRMAEQAERAYAQLVADWQAKAPKTGVAAANGARLSRPANGPAARQDKAPDPALRSGVDHAHTAR

SEQ ID NO: 475321 - protein, 328 aa, unidentified
MYIMDKITIYYGIDISKDVFDVMDNFEVHHQFSNSKSGFAKFFKWLKPNSCCVMEATGVYHTQLADYLYEKDVFVSVVNPLVIKRFIQMNLRRIKTDKADADMICRYAQLNELNAYKPEAVYIKESRVISENLSLLLKSRTMFKNRLHALIHKQSKHRNALIKPINDTIKNLCKQIEVLEGELQKLIMENESDLYYNLQTIPGIGKSTAMYMIVISDGFRKFESAKQFICYAGLSPVENRSGSSVRARSHISKQGNGKLRNLLFMCSFNACISNKSCKLMYERITAKGKSKKLALIAVANKLIKQSFAIARSGLVYDSEFVSVKPSLR

SEQ ID NO: 475322 - protein, 480 aa, unidentified
MRPHIKRMEDAMDNSTKQKRKNKKHRKMNTSHLEQLNINAAGIDIGAEFHYVAVPNGRDPEGQDVRHFATFTADLHQLADWLRQCKIDTVAMESTGIYWIPVFEILDSQGFDVRLVNPRNVKNAPGRKTDVVDCQWIQQLHTYGLLQSAFRPEDQICELRAYLRQRAMLVSYASHHIQHMQKALEQMNIKLTEVISDSTGVTGMKIIRAIISGERNPVKLASMRDARCNNSETIIAKALEGNWRSEHIFALQQAVELYDFYKKQIIACESEIQHHLESFDDRSNGRPLEKPRRKSRGSSNQYHFDARRYLHRMTGVDVTRIEGIEAPTALTIISEIGIDMSPWPTEKHFTSWLGLCPGSKITGGKVLSSKTKPSANRAAHAFRLSAYSLQRSKSALGAFLRRKKAQKGAPKAITATAHKIARIFYNMLKYGTEYVDLGQEYYEQRYQDRVIANLKRKAKQFGFELVNIKEHKLLTGLSAT

SEQ ID NO: 475323 - protein, 422 aa, unidentified
MLAESHDEEQIIARVAALDIGKAELVCCVRVPAPAGGRRRLQEVSTHSTMTASLTELANRLVGMGVGRVVMEATSSYWKPVFYLLEAHGLDPWLVNARDVKHLPGRPKTDVLDAVWLCKVAERQMLRPSFVPPWPIRRLRDLTRYRTDLVAARTAEKNRVEKLLEDACIKLSVVASDIFGMSGRAMLAALVAGERDPKVLAQLARSRMRGKIDRLEQAFDGHFGDHHGFLLSRMLSRIEALDADIAAVDAQIEAQLAPFAEAAARLDEIPGIGPVAAAAIIAEIGVDMSRFPTAGHLCSWAKFAPGINSSAGKTKRSASSGHGSPYLARVLGEAAVGTSKTNTFLAARYRRIARRRGQPRAVVAVGRSILVIIWHLLQDPDAHYHDLGVDHYNRHVDSSAKKRGHIRQLEALGYTVTLTPAA

SEQ ID NO: 475324 - protein, 326 aa, unidentified
MNAVGIDVSKGKSMIAVMRPFGEVVISPFEVWHTDSELSELAKLLKNLSGETRVVMEYTGSYHAPIARVLSAAGLYVSAVNAMLVHDYGNNSLRRAKTDKKDALKLANYALDHWLTLPRYAPEEDIRLMLKNSYRQYEQYSKLRTMLKNNLISLLDQVFPGANRLFNSPRRADGSEKWIDFVGAFWHRECVSGLSEKTFTGRYLKWCRKQGYNFSESKAHKIYTFASSCIAVMPSSDATRLLVEQAVSQLRATATALAVIQQKMEALAASLPEHQVVMQMFGVGPALGPQLMAEIGDVRRFHSKKALVAFAGIDAPPYQSGQPQYF

SEQ ID NO: 475325 - protein, 373 aa, unidentified
MVRFKRQFKNTKKEQLMEQSKGISFKGQNIYVGIDVHLKSWSVTILSETSVLKRMSQGADPDALHRFLTSHYPEAEYHSVYEAGFCGFWIHDRLTELGIHNIVVNPADVPTMSSEKLRKTDAVDSKKLAVSLRAKQLKGIYTPDSEALDIRSLIRLKNSITKDMTRQKNRIKSQLRYLGIGIPVEYLEPHSNWSKRFLNWLKQVGMRTPSGRQALDILIMQFEALRKQKAEMTRKLRSLSHTERFEETLDLLMTVPGIGQTTGLALMAEIVDITRFANAEQLAAYVGMIPMCHSSGEHEGVGDITLRKHAILRSNIIEAAWVAIRKDEAMQLCYLNNCKRMVPSKAIVKVARKLVNRIYFVLKRHQPYVNAMA

SEQ ID NO: 475326 - protein, 421 aa, unidentified
MSSIENEITKTRNHSRQRGNMMRTVFGIDVSKASSEVAIVINGEKIHGYTMPNDTIGFTRLLDDLKTVQKPEIIFEARGVYSRRLQAFLEENGYAYTQLNPLEAKKQLDSLRVRKTDKIDAETLAISQFVLNRKPTYIQEEVYQELRDLSRFYQNLTEDIVRTKNRLHKVLQVTFPEMENILSTPTREQYWNLVMTFPYKDFVLELSKDELLEGIRQSTSKRISDKRVAYLAQKLAALANQSYCAVKKNSPILEEIRYYAKELLRLSEQRQAVLEQMVELAQPLPEYEILLSIPGIAETTATSMIGELGDIRRFQSANQINAFIGIDLRHYESGNFLAKEHITKRGNPYARKILFKCIHNIAAASHTNHCHIEDFYEKRKRQSQTTSTKPHTIASIHRLIRTMYYLITHNKLYDYTSTQNR

SEQ ID NO: 475327 - protein, 338 aa, unidentified
MCIVFVGIDLAKNVFAVHGVNDAGRPALVRPSVPRAKLLELIASLPPCTVGMEACSGAHHWARLFAAHGHTVRLMAPKFVAPYRLSGKRGKNDAADAAAICEAVQRPNMRFVPVKSIEQQSRLMLHRARQGFVEQRTATLNRVRGLLSELGIVLPLKAATVRREAASRLEDLPGHANLVIGDLLSEVHRLDERIARYDVQIAQMARDDERARRLTQLAGIGPTTATAVVATVGNGHDFRSARQFCAWLGLVPGQYSSGGKTRLGRITKAGDAYLRSLLVMGARAVLAAAPGKQDSISRWAVQLAERRGYWRAVVAIAAKNARLTWAALTKAERFVVPG

SEQ ID NO: 475328 - protein, 366 aa, unidentified
MPNGMALDAHAARAACVVSGSAGAIGGGAIVMGLDQHRAQITAEWLDTATGEVGRARVAPGDRAGVRRFLARFSGRQLEVALEARTGWRFVAWELAAVGAVAHLAEPAQTSALRGNKKRAKTDRADARHLRELLMAGRLPESWIGPSDLLDLRAQVRLRHTLVNQRGEWQQRIQAVLYHHGLPQRSGLLSGENRAWVEQVPLGAAARGQVTIALALADALDVQIAPIDKQLGAYARRQPGTRALMAHYGIGPLTSVTILAELGDTRRFSSSRQAVRYAGLDITVHQSDKRRAPGHLSRQGPPALRWALFEAAQCARRPGSPDRAYYTQAAERLGGNRACLAVARKLLKRSYHTLRELGDEGLAPAA

SEQ ID NO: 475329 - protein, 492 aa, unidentified
MIPATYPIMAGLDVHRASISATVLIARDPEEPIVHSKDFSALQPGLLELRDWLLSLNCGTVAMESSCIYWKAPFKVLEDAGCTPFVLNPYDVKAKRGKKSDHSDAFRIAHLSMHGIVLPSFVPSPPIRELRLLTRGRTVLLNSLRKIKNQISLTLDEANFKFSVIATDLFGATGREIMNIIAADPNPNPRVLANQAKGVLRNKIDELVPALSGQLTAVQRFLLKNRLKELKQIEDHLQSIEIEIESFIAKNQLESFLAPLLSIPGIKRVAATTILAEIGTSVIETFPSPQQFASWAGLCPGMNESAGKRRKSSICKANRYLKSMLVQVAWCALRAKNSPFRPFFQSVKARRGANRALIAVAHKMLRIIYALYKYNTVFSPAALIKTETSASPGDQQHTDLSPDFIKSLTQNEQDLALQEVVALSTHDALTSYPLAPSVNMEVKKPKVVRTTSRKKTSELSSVPINSLQSDAAPVKKRGKPRKNPMNLISTDT

SEQ ID NO: 475330 - protein, 465 aa, unidentified
MSRSRRTKRQKRKQEIDELEVPKLEALEQINLNAAGLDIGDDEIYVAVPERRDDVSVRVFQTFTRDLYALANWLETCGVETVAMESTGVYWIPTYEILEERGFEVYLVNARHVKNVPGRKTDILDCQWIQQLHTYGLLRASFRPPEDICALRALVRHRDNLIRSCTAEIQRMQKALQLMNVKLTNVISDITGVTGMKIIRDIVAGERDPHKLAQHRNPHCAKSEAEIAKSLEGNYKPEHVFALKQTLEAYDFYQQQIKDCDVEIEKRYAAFAPKVDIAEKPLQPRKRKRNKPEGNEPDFTLRQYLYQMAGVDLTQIDGVNALTVQKVLSETGVDMSPWPTVKHFTSWLSLSPHNDKTGGKIIRSRTKKTQNRAAAALRMAAQSLAHSQSALGGYHRSMKAKLGKPEGVTATAHKLARIIYAMLKNQTEYRDAGEGYYEEQARQRAIRSLKRKAKKLGFGLVPNTT

SEQ ID NO: 475331 - protein, 412 aa, unidentified
MDVIIERCAGLDVHRDSVVATVRVPGKGKSSRRRAQQTRTFGTTIAQLEQLGNWLEGFAVTLVGMEATGVYWKPVFFVLERRFECWLINAEHLHNVPGRKSDVIDSRWLCELLEFGLVRPSFVPPPEIRRLRDLTRLRSTQAEERTRAIQRLEKVLQDAGIKLTSVASGTYSVSARAMLEALLGGVSDPACLAELAKGRLRAKIPQLQEALANRFDIAHHGVLVAGLLAHIDALDQAVAALDARIAAATDAELIERLSTIPGVKRHIAEVLIAECGVDMSVFGSAQRLVSWAAICPGTNQSGHRRRSGKTRRGNPWLRTALTQAARAAARSKNTYLASHYWQIRGRRGEAKAIGATRHDILIAYYHIVHERVPFRELGPDWLARRHSPEHRTRRLVKQLEALGHNVTLEAAA

SEQ ID NO: 475332 - protein, 370 aa, unidentified
MAQSTPLFVGLDVHKDSIAVAHAAGGGTAPPVYVGAIGTRQADLDRLIHRLQSKASTLVFAYEAGPCGYGLYRYLTGKGLTCQVVAPSLIPKKPGAKGKTDRRDAVELARLLRSGDLTAVYVPSVEDEAVRDLCRARDAARVTGKDAKLRLKAFLLRLGLHYVGRATWNDAHRRYLAKVVCPTPTQQIVFQESVRAVDEQVDRRQRLDAELLERAPAWRLSPVVDALQALRGVQFLVAITVVAELGDLTRFDNPRQLAAFVGLIPSEYSSGGSRRQGGITKAGNGRARRALIEAAWAYRHPAKVSLHIQQRIDQLPKALQDLGWKAQVRLCKRFRRLVARGKHPNIAVTAVARELIGFMWAIAKAVPVPA

SEQ ID NO: 475333 - protein, 356 aa, unidentified
MTKVRTNFSQQTIYIGLDVHKRSWNAALYLNDQYLRNVHQPPSPQALYKYLHSQYPGARYVCAYESGKFGYWIQRQLVEKDIECIVVNPADIPSAQKDDLQKTDPRDARGIAKALQSGLLKGIYIPCEQQEADRSLVRQRKKIWSDLVRCKNRIKNFLDYTGIELPDKFNNSNWSRNFIQWLKDLPFKHLGHRSTLNYMIREMELLRKELLNISNDTRKLMRSAFYKKRYYLLRTVTGIGPLTAAGLLTEIWDMKRFASFYELNSFIGLMPMEYSSGERELKGRLTIRKHRQLRSDLIECAWTAKRIDPALQLYYHEQLKKGKEPKLIIVKIARKLLSRIRYVWLTEQPYQTAIVK

SEQ ID NO: 475334 - protein, 468 aa, unidentified
MLWFDNAYSDVVPIENSTIRTAQSQSQRVQQTNKWRWGTLKRQTQQQEYGAYVGIDWADRTHVISVRAGNNAVERYELPHTAEAIAEWVSGWQQRFPGQRIAVALEQSRGALIYALMSYDCLVLYPVNPKALAKYREAFYVSGAKADPTDADLLLELVTVHRDKLRAWVPDDELTRTITLLVEYRRQLVDDQTALTNRLSNRLKLYYPQALAWAGELATVQACDFLQRWPTLAEVQKTSAAQLRQFYVDHGCRRAKVIEQRLEEIERAQPLTRDLAVITATVPMVQATVSQLRPLLAAIQQMDKQIAELFAQHADHDLFDSFPGAGKVLAPRLLVAFGSDRGRFATAREVQQFSGIAPVTERSGKSCLIHRRWACPKFLRQSFHESAAQSIRWSAWARAYYNQQRARGNYHHAAVRSLAFRWIRIIYRCWQTGEAYKEETYQEALRRRGSPLVKWLDAQNATEETLVK

SEQ ID NO: 475335 - protein, 432 aa, unidentified
MNPLSVSSQPSKVAAWVGLDWADQQHVVCLYDVASGQTERSTLEQKPEALQSWLGQLRQRFGGQPVAVVLEQARGAVIYALLSVDFLVLYPVNPQSLASYRKAYVTSGAKSDAADAVLLMEMVRNSPQRFRPWTPDDADTRSLQLLTENRRQLVNQRTAFTNQLTGLLKSYYPQALELAGELGSLQACDFLQKWPTLEALQQARPTQIRKLYRDYGKPRPQLLEQRLEQIRRAQPLTTDPAAVLSGTMMVRALIEQIRPLLATLERFDRQIAVLFQKHPDRLLFESFPGAGAVLAPRLVAAFGTDRDRFESAQEIQQLSGIAPVTVQSGKQRWVHWRWACSKFLRQSFHEFADHSRKWCGWAKALYQRLRRSGQGHHAAVRMLAFKWIRILFHCWKTRTGYDEQIYLKSLEKRNPKLWAETQALPPRKKKAA

SEQ ID NO: 475336 - protein, 375 aa, unidentified
MKEKVRFLGLDVHAETIAVAVAEPDGEVRSLGTIANREESIRKLVKKLGPPEHLRVCYEAGPTGYVLYWQLTQLGVECAVVAPTLVPTKAGDRVKTDRRDALKLARSHRSGDLTAVWVPDGDSEALRDLVRAREAAKQDQLRARHRLSKFLLRMGRRAAVGMKAWTEPYMAWVRQVGFEQPARQATLLDYLHEVDHMAARVKRLEQAITEAVKLASPRVQEVVKGLQALRGIAEISAVTIVAELGQISRFDTARQLMGYSGAVPSEDSSGKRKQRGSITKTGNAHLRRIVVEAAWSYRHRPAIGPRLRKRQEGVPEPIKEIAWKAQVRLSKRYARLAAAGKDQRKITTAVGRELLGFIWAIGVKVEADSKLRMAA

SEQ ID NO: 475337 - protein, 403 aa, unidentified
MRSFGVVVATPLLENDTRLGERAEQRLIQQLVAEPAVDGMDGPRTRQRNAMMEAGEGQPSGDCPMPISVIGFDIAKQFFQVHAIDAEGRVAAQAKLRRAQVLDYFRSLSPCLVGMEACATAHFWARELVALGHEVRLMPPAYVKPYVKRNKTDAADAEAIAEAVTRPTMRFVAVKSADNQAALMLHRVREMLVRQRTMLATGLRAHLAEFGIVAPQGIHRVEKLAAAVHSAAVPPMAREALMLLVDELASVWRRIDTLEGKLMALHRADEVSRRLATIPGVGLITATAIASTLPDPTMFRSGREFAAWLGLTPKSHSSGGKDKLGRISKKGDRYIRHLLYVGAGNVIRFAKARAATGELWIRSLQERRPPKVVIIALANKMARIAWALMMRGEIFRSRGVAAA

SEQ ID NO: 475338 - protein, 348 aa, unidentified
MTVYIGVDFHARQQTISYLTTETGEIRQLELLHEDPAKVRAFYEQFAGQRVIVGFESSGYAAWFEELLEELGCEIWIGHATYIRQFAKRRQKNDRRDADLILELLLSGDFPRIHRYSRSTRQMLQQLRYRQRLVKMRTMVVNMLLFMASSRGHSFRTQLQSKRGQARLGQLPLPEPLAQQRDELLSLLAQLDQKITTIERWLEQQTAEDVTVQRLRTHPGIGLLTSICVRYTLEDVGRFATTRKVSAFAGFDPMEDRSDERRRMGAISKQGSRWLRFYLVEAGQVAMRKDADLARVYQRISRRGGHAKAKVAVARRLLVRAFIMLRDEIDYAEFLRRGVAARSSRGSA

SEQ ID NO: 475339 - protein, 366 aa, unidentified
MKKNSTVVVGRKQIFNQARLTIGLDLGDRSSHYCMLDEAGNVILERSLPTTANGMRQAFGRIARCRIALETGTHSPWVSRQLAQMSHEVIVAHARNVRLIGESSRKDDQLDARTLARLARIDPGLLGPVRHRSAETQIQLTVIRARAVLVSTRTALVNAARGLTKSYGERLNKCGTEQMNRGSSEGLSQELREALDPLLREIESLNERIKEYDQRIEQIAKEVHPEVAWLKQVKGVGTLIALTYVLTLDDPRRFRHSRDVGCFLGLRPGRRNSGKSEPQLHISKEGDRYLRTLMVQGAHYILGPFGQDSDLRRWGLKLAERGGKNAKKRAVVAVARKLAVLLHKLWVSGEGYEPLRNSHKVVRAVA

SEQ ID NO: 475340 - protein, 451 aa, unidentified
MSKQRNKAVSLPVIEPNAAGIDIGATEIFVAVPADRDPEPIRSFPTFTVDLERLADWLQQCQIRTVAMESTGVYWIPLFQILEKRKIDVRLVNAHHVRNVPGRKTDVSDCQWIQHLHAVGLLRGSFRPDDEICAIRSLWRHRDNLIQLATLHLQHMQKALDQMNLQIHHVISDLDGTTGLAIMDAILAGERDPLKLAQLRHPRIRASEETIMKSLVGDYREGHLFTLRQSLKAYRYYQELIQEVDAQVKQMMQRLPSKVAEGEEPPQGSKRRARKTPWRNEPAQLREDLYRAFGVDLTEIPGVNSLTAQMLLTEIGPNLDRFPTATAFCSWLRLRPDPRISGGQVLSSRTRPTKNRAALALRIAAQALHRSDSFLGDYFRRMKARMGVPKAMTATAHKLARIIYHMVTTQQEYDATIFQKQEQRRRLQKSARLHTQAAELGFQLVPINCVP

SEQ ID NO: 475341 - protein, 340 aa, unidentified
MSNISLLAIDIAKINFQLHGVDDKGNVMLRKKLTRNKLVEFIAKLPGCIIVIEACGGANFWARKFAKLGHTVKLISPQFVKPFVKTNKNDRNDAEAISEAAVRPTMRFVNPKTIEQQDVQSLHRIRSLLVQERISLSNQMRGLLTEYGITIALGMHNLTKCLPNILEDEETELSTLSKTVFRDLYEQILLKTKKIKEYENLIEAVFKQNTDCQKIAQIEGVGILTATAVMACIGDIKLFKNGRHLSAYLGLVPKQYSSGCKERLLGISKRGDVYVRSLLVHGARSAIIYAAKKTDRKSNWINSLKERKGYNITAVALANKTARTIWAILTNGTDYKVIAA

SEQ ID NO: 475342 - protein, 346 aa, unidentified
MNQIIRIGMDTSKHFFQLHGVDAAERPVLRRKLRRNQVLAFFAKLPPTVVGMEACGAAHYWARELRKLGHEVKLMAPQHVKAYVKRNKNDGRDAEGLCEAMSRPTMQFVPVKTEEQQAALMLAGVRQQLIARRTQLSNAIRGYAAEFGLTAAKGLDKIEPLLARIAQDETVPESARQLFSFQGKDYAQLQIDLKAIEAKLMAWHRANAASRRLAQIPGVGPIGATALVMKTPDPGAFPSGRHFAAWLGLTPKDHSTAGKTRLGKITRAGDEVLRSLLVAGATAVIQQVRHGRGHPSPWLVALVKRKPPKLAAVALANKIARIAWKLMTTGESYDNARMPGASAAAA

SEQ ID NO: 475343 - protein, 410 aa, unidentified
MEVLYPHCAGLDVHKDMVVACLRHVVDGTIKREVRTVKTTTKALLDLSQWLASEGCTHIVMEATGVYWKPVWHILEDGDFDLALANAAHVKTVPGRKTDVNDATWLADLLAHGLVRGSFVPNAQTQEMRGLLRTRKQLVRERTSHVQRLQKTLEDANIKLDSVISDVMGLSGRTMIEALIAGETDPNTLAALAHRRIRAPAEELCEALRGRVTKHHRFLLRLHLQQIDIFDAAIVAIDQEVDANVEPFRAAITILTTIPGVSDLSARTIVAEIGTDMSRFPTDGHLISWAGLCPRNDESAGKRRSNRMRKGAPWLKTTLIQCAWSATRKKASYLQTQFHRLRARRGAKKAIAAVAASILTAIYHMLTNGTLYQDLGADHFDRRDKTAQTKRLVAKLQNLGYAVQITPLAA

SEQ ID NO: 475344 - protein, 359 aa, unidentified
MSCYYVGLDVHKASICIAVLNADGKLVMESVVETSAATILGFLKGLRGQVEVTFEEGTHAAWLYDVLKRTTAKVIVCDPRKNRLLCDGNKSDRVDARKLAQLLRAGLLSPVYHGEHGVRDLKELVRSYEYLVEDSTRVMNRLKAIFRGRAIVCTGTDVYKQQQREAWLAKLPEAGVRARAARLYCELDHLTGLRREARQEMLAESRRHEACKILRQVPTLGTVRIAQLISAVSTPHRFRSKRQFWSYCGLAVRTRSSADHHFVGGDLRRSAKATTRGLTQDHNRTLKYVFKGAALTASRCEPFKSHYAELLARGLRPELARVTVARKIAAVTLAVWKKGEAFDADKLIKHASSADSTVG

SEQ ID NO: 475345 - protein, 334 aa, unidentified
MGNITAIGLDLAKKVFQVHAVDEAGSVIMRKQLRRGQVLAFFAGLPSCLVGLEACATAHHWARELTALGHVPRLMPPAYVKAYVRRNKNDVADAEAICEAVRRPSMRFVPIKTTEQQSALMIHRARDLLIRQRTMLVNALRGHLAEFGLIEAQGLHKVAKLIAIVLDEEDRRISDIARQVLTVIVSQIEDTQTRIAGLEKQILAWHKNNPVSQRLATVPGIGPIIATAIAATVADPKTFCSGREFAAWLGLVPRQNSTGGKARLGRISKRGDSYLRRLLVNSAHTVLLCSKQARSLLSRKPRLVVAVALANKTARVAWAIMSRQDTYRNAALAA

SEQ ID NO: 475346 - protein, 347 aa, unidentified
MRFYKQQHRYYCGVDLHARKMYVCIIDKKGKVKLHQNIKTDPELFYEMIFPFLVDVVVGVECVFCWYWLADLCAQHKIDFVLGHALYMKAIHGGKTKNDKIDSYKIASLLKGGNFPIAYPYPAKWRATRDLLRRRMYLSRRCSELVAHIINTNTQYNLPAFRKKLSRKYNHDGVAERFEDPAVRKSVEVDLAMINSLNEILKKLEWHIEKTARQHDYHTLYLLRSIPGVGQILALVILYEIHDVKRFARVQDFSSYARLIRPVKESDGKWAGHSNKKIGNHHLKWAIKEAAILMLRDSAEAKYYVSKLERKYNKGKALGIFTHKLGRAIYFMLKNKKAFDMKRFFDQ

SEQ ID NO: 475347 - protein, 287 aa, unidentified
MTEITIGVDVSKDFLDAHRHPDGDGRRFANTAAGHKALIGWIGKTAERIVFEPTGPYHGALERALAKAGLPLAKVNPRQARRFAEATGKLAKTDQLDAALLARMGALLQLEVRPVHSETIAELKQLHIAREALVKDRTAAKNRGKAINLTMLKRQNSERLKHIERQVTAIEAEIDRRIQADAELARRLEILISIPGIARLTAFVLLIEMPELGHMESGQAASLSGLAPIARQSGRWIGKAFIRGGRANVRQALYMPALVAITTIMRKLVVLANALLKAGRPWIPKTA

SEQ ID NO: 475348 - protein, 412 aa, unidentified
MKDLLEISCGLDVHKEKIVACILTGPLGKPTRSEIREFSTLIPDMIALRNWIVSKNCHHVAMESTGIYWMPIYEILEDAFSGDITLLVVNARHMKNVPGKKTDMRDSEWISTLLRAGLLNGSFIPEKRIREFRDLNRYRKSVIRDITSQKNRIEKFLQSSGFRLSSFISDIFGASGRNIILHLIEHGQIDKTALDSCLKTKTRNRIDEILMSVNGTLSEHQKAFLRILMTHYDSLKKHLAEIETSLEKDMAPFALQVEQLNSIYGISTTASCAIIAEIGIDMKPFKTAEHICSWAGLCPGNNESAGKRKSTSVTKGNPYIKSMLCEIAWVIAGKRNTYLSAWYWRIKQKKGAKKAIVALARKLLVIIYTMLKQGTLFDESCFETRRKHCEQKQLSRYIRELEKHGYHVEAQS

SEQ ID NO: 475349 - protein, 359 aa, unidentified
MTSEIKYIGMDVHKEAITIAVRNGSGKLVMESIIETQAATILQFIQSLRGELHVTLEEGTWAAWLYDLLQRHVHELVVCDPRRNALLKEGNKNDKVDARKLSELLRAGLLRPVYHGENGLRTLRELARSYSTLSKDMTRVMNRLKALYRGLGISCGGIQVYDPRYREQWLEKIPEAGVRRRAELFYGHLDGLHALRQQARRELLSESRRHKASKKLREIPCIGPIRAALLVAQMQTPHRFRSKRQLWNYSGLGVRTRDSAQYRYVRGQLQRSKKPQQLRGLNQNHNHQMKEIFKSTATSATRCAGPFQDFYARLLAKGMEPDMAQLTLARKIAAITLTIWKKGDRFDANQLNQLNVQAA

SEQ ID NO: 475350 - protein, 427 aa, unidentified
MARQRKGETHMTNTNRRWFVGVDWASSKHDVTLTDDGGKIIGRRIFAHSGDGLRQMADWLVCESGALAGDIHVAIETPHGAVVEVLLERGFNVYSINPKQLDRFRDRFTVAGAKDDRRDADVLASSLRTDAQAFRALMPADPAIVELREWSRMAEAHGQDLRRYMNRLRDQLQRYFPAFLALGGEDDAAWKLALLELAPAPAMAHSLPRAKVARLIEAHHVRCHDADAVLAILRAPAPTVSQATIAAASAHVRTLLKSIRLAVEQSKEANAMLDRLTKALAEPEESAPGQTVQRDAAILRSSPGIGRIILATLLTEAPQAVRERDYHALRCHGGIAPVTRQSGKRRYVVRRFACNRRLQNALYHWARKAIQEDPRSRAKYEALRARGHSWARALRGVADRLLYVACAMLKAGTLYDVNNGSEAIKPA

SEQ ID NO: 475351 - protein, 373 aa, unidentified
MPRYSTAFGMDVHLRSTTVCALDAETGEAVTRRFRGNPWGEVAEWMSGFPGPSLAAYESGYLGFAPQRELSALGVDCVVAAVSKVPRSAADLSSKNDRNDAARMAKAILSHDVTPVWVPSPEIEGLRDLAGAHDAATARLAAAKQRLLAFLARRGYAYGGTTPAGNPRRYWTYDFLRWLDKVRPADDGGIRALAALRNEVEAADETREAVLAEYRAAVAAGPLSAEVEALQSIKGCGFVLAAAFASEVGDFSRFRSGRQVTAYFGLAPKQRSSADSVRLGGISGAGNALVRRLAVEGSWRYAQAGHQPKLMPKGSGVPLEIRMHGRKGSERLLRRREEMLERGMPQAKANAATAAELVRWLWALGMMCREAGE

SEQ ID NO: 475352 - protein, 342 aa, unidentified
MSNLDSCGIEVSAKQLVIRLRRQGDWEPLRNFTNTPEGHEMVVRYLRQAGRIVRVCLESSGLYGLDLALALSAAEGMEVMVANPRAVRHFAQALMKRSKSDPIDATVLEEFAARMPFQVWKPPSPAALALHALARRLRELVEIQTAEKNRQHAAGLSETIPTPVRRDLARSLRAQQRAIERLTAHARKLIDKDAELKERFALIDTIPGVGETSAVQILGELAPLAPDLDARQWVAYAGLDPREYTSGSSVHKKPRISKSGNNNLRHSLFMPALVAVQHDAYLGGFYQHLLAKGKCKMQALVAVMRKLLHAIHAMFKTHQPYDGSKLYPAIRTQEVLCARVAS

SEQ ID NO: 475353 - protein, 392 aa, unidentified
MVVSVGIDVSKDKHDCFIVSSEGEVLADAFIIPNTMDGFHYLLQRILHCTAPQDKIKVGLEATGHYSYNLLGFLLDNGLPTYVLNPLRTNLYRKSLSLRKTKTDRVDARTIASMLLSDAGLKPYTSTAYHNEELKSLTRYRFDKVKERAKLKSSISRLVCILFPELEKLVPTLHMVSVYALLEEFPGAKQIAGAHLTRLKALLETASKGRYKRDVALQIREAARNSIGSRMPAKSLELQHTIRLIRELDTEISEIENQIQSIMKELHSPITTIPGVGFRMAAMILAEVGDFTRFASPDKLLAYAGMSPSTYQSGQLKNCYPHMEKRGSRYLRYALYNATKYVCHWDPTISAYLAKKLTEGKHYNVALSHASKKLVRLIFAMEKSRQPYRVAP

SEQ ID NO: 475354 - protein, 455 aa, unidentified
MEESYAGVDWASEKHDVLVADAAGEKLLAATFAHDEPGLRALCRQLVRLKVQLVAVERPDGLLVERLLDAGLRVLALHPNQVAAARDRFRVSGGKSDGFDAFVLCELARTDHRRFRVLEPDSDATKAIRALTRGREDLVGARTALVNQLRAELERFWPGPLGLFSDLHSRISLAFLERYPSPADARGVGEARLRAFLARERYCGRQTPAQLLAKLRAAPAGRVGERELATRRQLVCGLVAMIKTLGAQIAELEREIAAAIREHPDGEIFTSLFKGAVLTAAELLAEIGDCRGRYPTRDTLAGDAGQAAVAIESGKRKAACFRWGCNKRLRRAFHTLADSSRHHNPWAQDLYAQAIARGHDHPRALRTLGRAWSRIVWQCWQDSVPYDPARHRALQRHITVTIPTSSGPVPDIAATQRMAGAAVTRRAARRAKREALDRKPASAKPTARPAKPRGG

SEQ ID NO: 475355 - protein, 396 aa, unidentified
MDESGRRLCAARLPEGIAGMARLHAMIGAQLDPDADLDVQAGQVLIGIETDRGPWVQALIAAGYRVYAVNPLQAARYRERFSVSGAKSDPADGHLLADMVRTDHHQLRVVAGDSELAEAVKVVTRAHKTLIWERTRHTLRLRSTLREYFPAALAAFEDLDAPDTLELLGKAPDPASAARLTTTQIIAALKRARRHHRDRRAVEIQAVLRSPQLGQPAVVAGAYGVAVRAQVAILAVLNEQIALVQEQVEAHFGQHPDTEIYTSQPGLGAILGARVLAEFGDDATRYGDAKARKNYAGTSPITRQSGKKKVVLARYVHNDRLLDALGSQAFAAISRSPGARAYYDKQRDRGLGHRAALRQLANRLVGILHGCLKTGTRYDEATAWSHHTQQDQQAAA

SEQ ID NO: 475356 - protein, 337 aa, unidentified
MKYSAIDLHSNNSVVSVTDEEDRVVVEKRLPNDLAKILGLLLPWREELAGVVVESTFNWYWLVDGLQAAGFKVHLANTTAIKKYEGLKHSGDETDARYLAHLLRLGILPTGTILPPEQRAVRDLARKRMQLVRSRTAHILAVENITARQHGTRISSNQVKRLTAEAVDQMPLPDDVALAIKANVAVITTLSAQIDLLEKRLQEKVGARAEYGLLTSVPGIGQALATTILLETGPIERFAAAGNFASYARCVNSVHTSNGKKKGAGNTKNGNKYLAWAFVEAANFALRYCAEAKRFYQRKKAKTNNVVAIKALAHKLARACFHILKERKPFDVTRCFA

SEQ ID NO: 475357 - protein, 393 aa, unidentified
MICVGIDVAKDKHDCVILNSEGKVLAGVFTIPNNADGFDTLLQKIHGCTSPDDKIKVGLEATGHYSYNILGFLLNQGLPTYVINPLHTNLFRKSMSLRKTKTDRVDAKTIAAMLMSNVDLKSYTDTAYHNEELKSLTRYRFDKVQERAQLKQSVSRLVTILFPELEKLVPTLHMSSVYALLIEFPGAKQIAEAHLTHLKSLLKDASKGRYGRDMATEIRDAAKRSIGSVMPAKSLELRHTIRLIRELDSEIKDIEAAIEAIMEELQSPITTIPGMGFRMAAMILAEIGDFSFFDSPDNILAYAGMSPSTYQSGHLSLAGTYSHMEKRGSRYLRYALYNATKYVCHWDPGFAAYLAKKRAEGKHYNVALSHAAKKLVRLIYALEKSRQPYRRAA

SEQ ID NO: 475358 - protein, 432 aa, unidentified
MDSIPPSSETCFGQLTHYAGFDWAKDRHQIAVVDREGRLLLELSFEDTAEGWADLREKLRSFPKLGVAIETCCGPAVERLLEAGLDVYPLNPKAAQRYRDRKAPSGGKSDSLDARSFADALRTDGHGWRILRPQDPQTQELRLLCRDEIGLIQQRTALVNQLQEALHEYYPTALQAFDDWTLPSTWEFIIAFPTPFALVQAGKRKWEKFLHVHKLYRAQTADRRLELFAHAGEFVSPNPAVTRAKSFLAVALAMQLRVLRGQIDAYRERIAKLFDEHPDHDIFGSLPGAGEKLAPRLLAELGRNRAEFDSPEALECYAGTAPVSFQSGKMHKVHLRRACNRWLRATVHLWADESRQLCAWAQAYYQQKKKHGMSHAAALRCLGQRWLKILWRMWQDGTPYNEGLHMRNQVRHGSWVIALIPPKGTVTGSGRG

SEQ ID NO: 475359 - protein, 345 aa, unidentified
MTEAYDGRQVVGMDLHRRRSVLVRMTEDGRKLETARITNSPAALRREIAKAGKHPRVVLEATYGWYWAADVLEAAGAEVHLAHPLGVQAYGCRRVKNDQRDAADLADLLRMGRLPEAWIAPPEIRELRELTRYRHKLVQARTSVKDQVHAVLAKLGIPVTCSDLFGVHGQAWLDELKLPQPYAGKVTSLRQLAGELTAEITLLDAVLGDLLAGHEGYAAIQQLPGIGPVLAAVIVAEIGDIRRFRKPGQLGCWAGLTPRHRESDAKVTRGHISKQGPRIVRWALCEAIQHQPAGTRPRQVKDGIIARRGPQARNIAKTAAARELLTLIFYAMRDGRVRRAISPAA

SEQ ID NO: 475360 - protein, 410 aa, unidentified
MEVMFDRVAGLDVGKDSVTVCVRTPGPRGGRRSETRTFKTMFGSLRVMRDWLVEAGVSVAAMESTSTYWKPPFYCLEEVMVVWLLNAAHMKAVPGRKSDVRDAEWIAQLLEHGLLAPSFVPPPEIRRLRMLTRYRVQLMGDRRRDIVRLELMLEDASIKLSSVASSLKTVSARAILTAMINGESDPLRLADLAKGRMRRKIPDLAQALTGHFDANHARLARSMLRRLDLVEQALAELDAVIAEACQPWRHQIELLQTIPGVGAKVAETIVAETGADMTRFPTAAHLAAWAGVAPAMNESAGRQSPAGKRHGNKWLTAMLVEAAGSVGRMHGKNYLAAQHARLTRRRGMGRAQVAVAHSILVASYWMLKRDEPYHDLGADWHSRRTDEAHTRRLIAQLERLGHTVIIDPAA

SEQ ID NO: 475361 - protein, 359 aa, unidentified
MDATTVAVDLAKSVFEVAVADRHWRVTERARLTRRQFERWFVNRVVDLVVMEACGSAHHWARYLQGLGLRVQLLPPRYVRAYVKRNKTDAADAAALLEAARCADIVPVRIKSIEQQALQSLHRTRSLWMATRTSRINALRGFCREFGLAIGVGSRLGMEQIGRALADPGSSVPQLLRPAMNALIEEIRLLEARVARLEQQLSEAAKQSPACETLLSVPGIGLLTATAMVAATGGGVSHYKSARHFASWFGLVPKEHSSGHTRHLGRISKRGDRYLRMLLTHGARSVLRAATVAQRCGKPLDPLRTWALALQSRSNHNKATCALANKLARICYATLRDQEPFERTRLTHKGERCTFATAH

SEQ ID NO: 475362 - protein, 357 aa, unidentified
MQTQSNHLDFKGQNIYVGFDVHLKSWQVTIMTEKLTHKTFSQPPDPKLLYQYLDRNFPGGTYHSAYEAGFCGYWIHHQLKALGFNSIVVNPADIPTTDKEKVQKEDSRDSRKIAKTLRSGDLVPIHVPSLKTLEDRCLIRTRAMMVKDATRNKNRVKSYLHFHGIAIPEAFKDSRWSNRFIIWLEGLKLGEQSGTYSLQAIVTTTKYLRTSTLEITGKIKSLSQTDNYLEDVKLLKGIPGIGLITAMTILTELETMDRFEKFDNLCGYIGLIPSTHSSGEKDVIGDITRRGHGVLRAALIESAWIAARLDPALSKSYHDYCKRMEANNAIVRIAKKLLSRIRFVLKTKNPYVCSVVK

SEQ ID NO: 475363 - protein, 321 aa, unidentified
MAETIVGIDIAKRKFDVALLRGEKTVSGAFKNSPEGFTMFQRWLERHGVERIHACMEATGTYGENLAMYLHSADHLVSVVNPARIKGFAQSELSRTKTDRVDAALIARFCKAMQPEAWQPLSPDIRELQSLVRRLEALNDMLNQERNRLTITRGIARESIERTIRHIETEIDTTKRLIRDHIDSNPDLRNKRDLLESIPGIGSTTSAMVLAEFGDVTRFHDARCMASFCGLTPRHRQSGTSVRGKSMLSKTGSSRIRKALFMPALAAIKYNPVIAAFRARLIANGKPRMLVVGAIMRKLVHIIYGVLKTGTPFDPSIAAAA

SEQ ID NO: 475364 - protein, 312 aa, unidentified
MNDKKTSVYAGLDIAKASLQLHLQGKSYDLSNTTDGHAQLIKRLAAIPGVHVICEATGGYERAVVAALHAAAIPVSVINPARVRQFARASGELAKTDPIDAAMLTAFGQAFAPEPTPPRTATELKMAALVTRRVQLLELRVAEAQRADTCADLDLRKLFTSWLAQIEKQIAKVEALIAALLKAHAPLADQVQRLDDIMGVGRLTAVMVLATMPELGTLNRQQAAALAGLCPYNRDSGQWAGKRCISGGRAEVRRALYMAALSASRSNHLLKPFYDRLIAAGKPAKVALTAVMRKLIVLMNHVLKNPNFSLAH

SEQ ID NO: 475365 - protein, 389 aa, unidentified
MYYVGIDVSKYKHDCFIVTSDGEIIRDPFSFGNDHDGFQALLSALSSLGDRENIRIGFEATAHYTLNLKLFLENAHYSFMEFNPVLLAKFNKSQTLRRTKTDAIDCAAIARWLMTVEYKPYPIGFYHAYSLKSLTRLRDSLVRQRSFYLVKITNVLDHTFPEFKPFFGNRFSKTALFLLETYGSADKISRMNSQSYENLRRISRGKFSPKKFIELKALATGTVGESNEMFESQLSSLLSLYKLSVKEIDSLEQQITDLICQINPHSLSIPGVGPLSAAVIYAEFGDISRFASPQKMLAFAGLDPGYYQSGISAHAGHMVKRGSSHLRFTLMNLCMPLMQYNVVFAEYYAKKRAEGKPHRVACTHMVKKLIRIIYTLETRDIDFDPEKLR

SEQ ID NO: 475366 - protein, 351 aa, unidentified
MVIIGVDYHPSDQYIAFADLETGESGERRLNHSDGEAEKFYRELTARRISVRVGMEATGYSGWFERLLAELGIEVWVGDAAKIQTKRVRKQKTDRQDAQLLLKLLLENNFPRVWVPSPENRDLRQLLWHRHRLVQMRTRIMNQLQALAMNEGKRRRKSLWSEPGRAQLEKLPLATWASRRRQDLLELLDRMNPTIEALTTAVEQEARKQPEVLRLMTHPGVGPITALAFVTIIGTPDRFPCGKQIGSYVGLIPSENSSAGRQRLGHISKQGNALLRFLLVEAAQAAVRYDPDWRRRYVRLAIRRERRIAKVAMARRLAVRLYWMWRNGWEYARSVEFGSHAGQLVTGHGVH

SEQ ID NO: 475367 - protein, 410 aa, unidentified
MNKTTLFVGIDVSKTSNTVRFMDGNGESLSLFSIPNSLDGAAKLQEKLRYTLLHTDYSKVIVGMESTSIYSDHLAAYLRNDDFLRKWECKVYVINAKNINQFKKSYPELPKTDNIDTFIIADYLRFGRLPKSVCHDEKYLALRNLTRARFQAAQNLSREKTRFLETLFQKFSSLDSSKVFSDTFGATALAAACDFLTVDEIIYTPINHLADFVNQKGKGKFADPQAVAAALQSAARSSYRIGKTVNDSLNQLLAIRLVGIRSIEDQIKSLDKAIESYMAAFQNVLIYIPGIGPVYSAGLMAEIGDITRFAGQASLAKYAGLAWSRYQSGGFEAANTKMIVSGNKYLKYYLLEAANKVRMHDTEFARYYRIKYREVPKHQHKRALALTARKLVRLVYSLLSDNRLYTSPTM

SEQ ID NO: 475368 - protein, 346 aa, unidentified
MMIIGCDYHPSWQQICWVDTATGETGEQKLEHASGEAARFYRQLRAPALIGMESTGNCQWFVEMATETGHDVWIGDAAKIRASDSRQQKHDRRDAALILKLLLEGRFPRIWIPSGEEKDLRQLLIHRYKLVRIRAQVKNELQHLAMNQGVTKKRKLWSKTGEKVLRELPLKPWASQRRKDLFRIREMLNAQIDVLDQAVVEVAEKNEKARLLMTQPGVGPITSMAFVLTMGDVNRFQRGKQVASYLGLIPREYSSGGHQRFGSISKQGNRFMRMLLVEAAQCAVRCDPGMRSEYLHRCHRKAKGVAKVAAARKLAIRLYWMLRTNTGYPGVVRVESSSRVPLVSAS

SEQ ID NO: 475369 - protein, 419 aa, unidentified
MTTCNERTIVSLVNPICCGLDVHKASITACILFNDREGKERTIIQEFSTFTDDIIRFRDWLLSHECPIVAMESTGVYWHPVHNILEDHVDVVLVNARDIKNVPGRKTDIKDSEWLAGLLRHGLLRSSFIPPKEVRVWRTLTRTRRKYVNSQSSYKKRVQKLFESANIKIDSVVSDLFGVTGRNLMSLLASGHTDITMKDIENCVRGSLKSKQYELYRSIKGFFTEDHRYLLQTLLSTIASLEATIASLDQRIDSLMVNHKELLARLKEVPGIADISARDIIAEIGTTLDAFPSDAALASWSGLCPGNNESSGKRKSGKNHTWKNQLKPVMTEVAQSASRTKNTYYKEKFHRLKTRRGHKKAIVAIAHQIIQCIYHIIKDGVRYKELGMDYLDKKTKTSKLYRLQKQAESLGFNLVPVTV

SEQ ID NO: 475370 - protein, 339 aa, unidentified
MPIVGGQDIHRAQITFDYVDLRTGEENRGVIRPATRDEFRRWLGQFGRKQAAFAMEGTTGWRFVVEELEAAKMKAHLAEPAETRARRGPKRRAKTDRADARLLRDLLLANNLPESWIPPSHLADLRTTVRLRKALVDNRSGWNRRIQAQLFHHGLPTAPHLQTLAGRDYVLSVDLPAASRQVVEVGCRMLEVFDDEIEVLDAQLESFAKVQPGCQVLQRQWGIGPILSAAILAELGDTRRFSSSRTSVRFAGLDVTVEESDGKRTRGHLSRQGSPVLRWALYEAAGAAWRKASPDHEYYLEVKDRLGAKRARLSVARRILRRVHHDLANAGDAAFAEAA

SEQ ID NO: 475371 - protein, 337 aa, unidentified
MDNIEACGVEVSARELVVARKGKQGVQLKRFANTPAGHRELLRTLTRGGQRVRVVLEATGLYALDLALLLSAHPEVQLMVANPRAVRHFAQAMMQRSKNDQLDVAVLLEFAVRMPFTPWVRPQENALALWAIARRLQALTRLCTAEKNRAHAMGLSAAIPAIVRRDIARSLQFHQRALKKLRQQALQCIAADQRLQQRYQLLRSIPGLGEISAVQTLAELLLLPEDRDVRQWVAYAGLDPREYSSGTSVRKHTRISKVGNAHLRRALYMPALVASRVEPHLRGFYEHLLARGKSKRQALVAVARKLLHAIYGMFRSQRPYDGTRVYLLPPRLAGESS

SEQ ID NO: 475372 - protein, 330 aa, unidentified
MKKWDYTIGVDVSKNTLDIHCSELNVHIQISNNQDGFKRFHKWCKTNIIDLAKSFMVMEYTGGYEYKLIAFCEANSIQYARISGLEIKRSMGITRGKSDKVDAARIAQYGEEKHKKIQPAKPLNKNIIELKETLGFRKRLVRETAGYKATLKERKHMYPDLKKDIISKTLESKIKENTKQIAKLDAELLKMVEADKAIKTNYELLTSIRGIGMVNALMTIAYTENFVCFRNPRSYAVYVGVVPYEYSSGTSIKGRKKVSSIANKEIKQELNQAARSAIQWDKEMQEYAVKKMNSKCYNIVLNNVKFKLILRMFAVVKRGEKYVDNFKKAA

SEQ ID NO: 475373 - protein, 367 aa, unidentified
MFKVGDKSESVTADRDGSRGQILMPGSFMSKRSIRVQETMYCGIDVSAKSLTVAIQRMHQPAEQNSFPNNSSGHRALIVWLRKAKSPVRVSLEATGIYSLDLAFALDEAEGIDVAVLNPKVANRFAQTIRRSKTDAADAEVLAEYTHRMPFTPWIAPSASSMRLRTIVRHVETLSVQSAQNQNRLHAAHGSSHTPGCVIQDLKRAVAALERRIRRLRREAMTLVREDDLLRKRYELLISIPGIAQVSAMQLLAELSTLPSDLTVREWVAHSGLDPAHEISGSSVRKASRISRAGNRHLRRALYMPALVASRCDPHAKAFFESLLARNKARLQALIAVARKLLHAIYGIFRSGGMYEGAKLFPSITLS

SEQ ID NO: 475374 - protein, 338 aa, unidentified
MTITTIGIDLAKNVFELCGLDAEGNCVMRRRVRREGLLKVVGELPPSVVGIEACCGAYHWQRRFEALGHEVCIIAPQHVKPFARRQKNDRNDAEAICIALRQPSMRFVPKKTVEQQDIQSLHRARRRLVNHRTALVSQMRGILLDRGIAFGKSITRARRLIPGIIADDANDLTEVCREILGDLFAFLQEIDARIRAFDRRIDRVFRENQDCQRLARIRGVGPKIATAIVAAVGDGRDFENGRHMAAWLGLVPRQHSSGDRRTLMAISKRGDQHLRTLLVHGARAVVRTAAAKTDPFSNWVNALRERRGTNRAIVAVANKNARVIWALLNRQEEFRPVA

SEQ ID NO: 475375 - protein, 350 aa, unidentified
MRFYKNHHQFYIGIDLHARNMYVCVINNLGEKVFHKNLPCSVENLEIIINTFGNDIVVGVECIFTWYWIADFCLERNIDFALGHALYMAAIYKGKTKSDKIDSEKIADMLRGGFFPLAYAYPKQTRAVRDLLRRRLYYVRQRAELSVHLQNTNHQYNINEPLTASKIATKKYRDTIGEKFSDPAIADMVDADLYLYDQYHLIISKIERQINDLVKLQLPQELKILQTIPGFGFVIPLTILYEIGDVSRFKDVGHFLSYARLVKCTHDSADKKQSGGHNKIGNVHLKWAFSEAAVMILSGNPEAQKWHERLVSRYGKAKSMSIIAQKLGRTVFYMLKREEPFDEIKFYTGQ

SEQ ID NO: 475376 - protein, 306 aa, unidentified
MTMPACFVGCDVGKNDIAVFFSASATSVMLANRPEALARFARSLDPACLVVCEATGGYEAALLEALHAAGIACHRADARKVKAFIRSLGTLAKTDAIDARALARYGAERHDRLERWRPQPEDQQRLQALVTTRRDIVAARTAWSNRCKAPTAQGIAPLLDPIVATFQTQLRAIDQAIAALVHAGRLAARAARLQAIPGIGAVTAYSLLALMPELGSLSRRQAASLAGLAPHPRQSGARDAYRRVRGGRPAVRQALFMAALAAVRANPQLKSFYQRLIANGKKPIVAITAAMRKLITFANAQLKQLS

SEQ ID NO: 475377 - protein, 344 aa, unidentified
MEAIVTIGLDIAKSVFQVHGVDANGAVVVRRRLTRAKVLSFFERLPPCLVGLEACATAHYWGRELRKLGHDVRLMPPSYVKPYVKRQKNDAADAEAICEAVTRPSMHFVEIKSPEQQSIMSLHRVRQMLMRQRTQISNAIRGHLGEFGRVAPIGRNGLAQLIAIVADENDNTLPDDVRAAVAMLAVQLRIVNDQILELDRRVRASARATDVGRRLLEVPGVGPVLASALVATVPDASAFKSGRNLAAWIGLVPRQNSSGGKDRLGGITKQGNRYLRQMLVVGALAVIRYAQRHGTRRQWLVHLLARRTTKIAAVALANKTARMIWAIMTTGERYREPSAASAAV

SEQ ID NO: 475378 - protein, 352 aa, unidentified
MIIIGVDFHPEFQQIASVDTDTGEFQEKRLAHPEEAEKFYRALTGPKVRVGMEASGHARWFERLLAELHYELWIGDAAEIRAKRVRKQKTDRQDAQLILQLLLEERFPQIWVPSWENRDLRQLLWHRHRMVQARTRIMNQLQAVALNEGLRCKKRLWRERGREQLEAFRLAPWASRRRRDLLELLDRLNPIITELTHAIEQEVEQCPAAQRLMTHPGVGPLTALAFVLIIGKADRFQCGKQVASYLGLVPLEDSSGNRRRLGHITKQGSSMLRFLLVEAAQVTVRSLPEWRSKYFHLAMRRGRKIAKIAMARRLAVRLYWMWRKGWDYEQLTKFGSHAGQPGNRHGVQSNTE

SEQ ID NO: 475379 - protein, 410 aa, unidentified
MSKLYVGIDVSLRKNNVHCMAAGGDTLKKFKVPNTFDGALALVDNIVELSARHSLQEIILGMEATSNYSYHLAELFRNSEKLAPLSPKIHILNAKTVHNFKKSYSDLPKNDDIDAWVIADKLRFGRLPQEVFMDERFLALQRLTRNRFHLVNMIKREKTYFLNNLFLKFSSLRQEKIFSNNFGATAMAVVEEFLSPDEIAAMSLEDLVSFLEQKSKNRLVDAEGIAKALQKAARSSYRLNKSLADPINACLASSISVIKFLQSEVKKLDKLIEEHMKAIPQTLTSIKGIGPVYSAGILAEVGDVKRFKNHKSLAKFAGLVWNEHQSGKWKAEDIKRVRSGNKYLRYYLVEAANLIRVHDQEYAEFYRAKYKEAHTHHHKRALVLTARKLVRLVYALLRTNQLYTPRKRGG

SEQ ID NO: 475380 - protein, 479 aa, unidentified
MSKQKQLEKTEKAKPTKGKRGRRRRKGMCLEDRPIQEPNAAGIDIGAREIFVAVPGDRDEDPVRVFSTFTESLQEMAQWLVQCGITTVAMESTGVYWIPPYDILEQHGLQVCLVNARNMRNVPGRRTDWHECQWLQYLHSVGLLRAAFRPEGEVCAVRSLMRHRNDLASMAHQHVQHMHKALTQMNLQIQHVISDITGLTGLAIVDAILEGERDAAVLAKLRDWRVKASEETVRQSLVGNWRPEHLFTLKQSRQMYRNYQEQIAACDKEIEQLVVKFEPRVDPAEQPLPPDRKQKQRRGKSKLVNPKTGFDVRAESYKLFGVDLTQVPGLAWLVLVLFSEVGRDMSRWKTAAHFVSWLALCPDNDISGGQVLWRGTRRRHNRAGQLFRLAAHGLHHDQTPMGDYLRRMKSKLGPKGATTATAQKIAIIFYTMVKNQAEYDATLWAQRDAQREKRFKEKLQRQAQRLGYKLVPLEEKPAA

SEQ ID NO: 475381 - protein, 453 aa, unidentified
MARQNARVSLKPGKSRAALTITHPNAAGIDVGSASHFVAVPPDRDDTPVREFPSFTVDLNALADWLKACGVDTVAMESTGVYWIPLFELLESRGLTVLLVNARHVKNVSGRKSDVLDCQWLQQLMSYGLLGGAFRPADQVCVLRSLWRQRAMLLNSQGRHVQHMQKALAQMNVQLANVISDVAGETGQKILRAIVAGERDGQVLGSMKNARIRASIDEIAKSLQGNWRAEHLFALKQALDAFDFIGTQLAECDREIEQQMQCLQAHEGEPAKGKQRGRSRNAPKFDLRTQLFKMCGVDLTRIDGIDVTTALAVISETGADMSRFPTVAHYASWLGLCPGTKITGGKLMSGKTKRCANRAAQALRLAAAALRTSQSALGAYFRRMCSRMDKPKAVTATAHKLARLVYTMLTKGQEYTDQGQDYYEQRYRERVLRQLSQRAHKLGMTLVATAQLT

SEQ ID NO: 475382 - protein, 337 aa, unidentified
MTYTLYVGIDIAAQSAAVAWQVPDRGEWQALEIKQQSDYTRLMQQLRRQATPAETLVVMEATGVYWLALADALHRQGFQVGVINPLQARRFAQLHLQHAKTDAIDARLLAAYAQHMQPTPWTPPPAIYYHLQQRLAYRQDLVKIRTQERNHLHALRHHPHADAAIIQRQRQHLAYLTGQIKALEAELKTLLAGDHPWREAARRLQTIKGFGPIVTAWLLVATQCFAFCDTPEQAAAYAGLVPYPRHSGSSLRATRSTGRTGHAQLRTMLSMAALSAARHTPPVKALYDRLLARGKPNKVARVAAARKLVHIAWAVVVKERDFDPYYTPSRQAVPMPT

SEQ ID NO: 475383 - protein, 311 aa, unidentified
MNPQEFFIGIDVSKDTLDVAVRPTGEKMVFANTEDGLVMMTDFIKPFSPRLVVLEATGGWERSAVGALAAKGLPVVVVNPRQVRDFAKAKGILAKTDKIDAQVIAQFAESIRPEVRPLKTEEAQKLEALLSRRRQIVQMLTAEKNRLHSAPVWIRKDIQIHIQWLEKILDKFNKELDRLVKKSPIWQAKDKILQSAKGVGPILSLTLISGLPELGTLNRKKIAALVGVAPLNRDSGKFRGRRTIWGGRSAIRSVLLMATRVGIRFNPVIRAFYERLEKAGKKRKVAETACMRKLLTILNAMMKNRTCWQSV

SEQ ID NO: 475384 - protein, 318 aa, unidentified
MSDVSMVVAGIDIGKARLDVALHGAAGGVAFDNSAAGHRRLIRWLRAAQVVRVGLESTGPYSQEVTGVLREAGFEVAVLQPLQVRAFAQYRLRRAKSDPLDAALIATCAALLDKVHEAPDARLAPLAEHLRLIEQLEEDVVRAKTRLEAAHLAHARQFLRREIERLERREAAERALLLKSIATEADLLARLQLIQSVDGIGERTALSLLLLLPELGQLEREPIASLAGLAPFVRKSGKWTGQSRIGGGRDRVRRALYAASLAAAFRWNPAIKELYQRLKTAGKPHRKIMVACARKLLVQVNAVVARGTPWISVRGAAA

SEQ ID NO: 475385 - protein, 415 aa, unidentified
MALKIVYKICCGIDVHKTFVVACIASTNSKGVTTYESHRFSTYTKGLKDLLQWLLDRNCKDVCMESTGKYWIPVYNILENDCTIVLAHPKYVKAIRGKKTDKKDAKWIADLFKHDLVAGSFMPPADIRQLRDLMRYRFKLTCFKSSEKNRLQNCLTVSNIQLGNVVSDTFGKSAQAILDKLLENPADTSFDLEPLVYKSLKKKLPELRDAIDGFITPGQAGKLKVIKGHFEDLESRKAELEELILALAAPYQQELAILQTAPGISSIFTAIGIISETGTNMEAFPSAKHLCSWAGLTPTNNESAGKKKSVRVSKAGCYIKPLLVQCANAVVTSKKHPEIRNRYLRLKKRRGHKKAIIAIARMLLTALYHMLKNGENYNAELYRKSDLPPADREITIEQAIIIARNQGYKIKSATA

SEQ ID NO: 475386 - protein, 469 aa, unidentified
MRSRPASPPVPGPGTDVTDEPVQVIDRAAAIDVAKGSGMVCLRLPHESRSGRRTQQVWEVTAAFASVITLMDHLACQGVQRLVLESTSDYWRIWYYLAEAAGLEVWLVNARDVKHLPGRSKTDRLDCAWLCKLNERGMLRRSFVPPEPIRDLRALTRLRARLTQDRVRHQNRIEKILEDALLKVSSVISDLMGASGRRFLQALVDGERSPAALAALGDPRLRASRAELKEALTGRFRDIHAFEIGMLLELIDELTAKITRLDGQIAARLETIPGLGGVCTSCGQPGPDGPCTGCGDPVPGVISRLDEIPGVGVEAAQVIVAELGTDMSQFPTPAHAAAWARLTPRAIQSGTTSRAGRTGKGNPYLRGATGAAVMSTARTDTHPGARYRRLSRKRGKQKAIVAGSRVIVETSHRIIADPGFRYTELGSGYHDQLDAGRQTRDKIRQLEKLNPGMTVTLTPGGPAAHASAA

SEQ ID NO: 475387 - protein, 418 aa, unidentified
MKKHNNSRKKSEPTSKRAKSRGPMQRDTKEVLAELMGKLKEKLDPKKVAATSAGEEHQRGELRPNLDRLTVGVDLGDQWSQYCILGLEGETLAEGQLRTMQQDIAEFFQTWNAARVVFEVGTHSAWVQEVICGCGHEVLVANPRLMEGSKRRKRKNDRIDANKLARLGRIDPQSLHPMPHRSREVRQDLVVLRARDGLVAARTELINATRGLVKSIGARLPKCSSPSFAQKVEETVPVEIRDALLPLVHMAAALSDCIQGYDEKIEKLGREKYGHTALLRQVKGVGPITALAYVLTLENPDRFVKSRDVGPYLGLVPKQEDSGESQPQLGISKAGDTMMRRLLVGSAQYSLGPFGPDTDLRRYGLRLCERGGKNAKKRAAVAVARKLAVLLHCLWVSGEVYEPLRQGMSATMTPAAAA

SEQ ID NO: 475388 - protein, 320 aa, unidentified
MDAIIERCAGLDVHRDIVVSCVLQGELDKTPKKEIREFSTTTKGLLELLDYLLESKCTHVAMESTGVYWKPVWNILETGQMELIIANARRIKNVPGRKTDVKDAEWIAKLLRCGLIEKSFVPCEEIRDLRDLTRLRKSLSGELTREINRVHKVLQDANVKLSTVLSDVLGETGRRVLNRIVEGKMLDKNFIMSLYQGRGKGKLKATVDELYEAFNGKIREHHRQMLKIHLDHIFFIEKQISEVENHIEEKMQSKQEEVSLLDSIPGINEKGAAMILAEIGTDMEQFPNSKAISSWSGLSPGNNESAGKKKEVVLHREING

SEQ ID NO: 475389 - protein, 300 aa, unidentified
MTYVGIDVSKATFVVAYSSAKSSKTKTFKNTTKGVHEFIQTLSASEHHCVLEATGNYSSLLVYLLSQVGITVSLENPLKIKNFARVMLSVTKTDETDARLIALYGEKMQPAPYRLRSDAILTLKQKRTVIRQLKKQLIATRNLKGSMEALPFFDPKCKKAIEKTIAFLEKQVKNLEEELAVLAQCEYKKQMDLLISIKGIGVTLAAALIMATGGFTYFDNAKQLTRYLGLSPTYQQSGTSVNVKGHINRNGDSSLRGQLYIAAMASLRCNAECKECFDRLRSNGKPGKVAVVAVANKPLR

SEQ ID NO: 475390 - protein, 396 aa, unidentified
MLQDNEGTISTHDQPTGSDIFVSVEMSRSKWVVGIHTPLADKIGLHTMACGDVEALLALIDRARVKLIASGSNSPAAMICYEAGYEGFWLYRHLVALGIRVVVINPASLLVDRRAKRAKTDRIDARAMVRALMAWARGERQVLSEVRVPTVEQDDARRGLRERQRLVKERTGHGNRIKGLLKTQGIMDFDPRAADAAERLDAIVTRDGRPLAPYLKREIVRELERLALVMRQIDRVEAERDAVVKACDAGAGTDALAAEPEREAAMIGELNRLKGIGMNDATILVREAFWRDFRNRREVGGWSGLAPSPWASGSVLRDQGITKAGPPMLRAQMIQMSWRWLLWQPDSDLAQWFRKRTEGATGRMRRIMVVALARKLLIALWRYATTGMVPHGAIVT

SEQ ID NO: 475391 - protein, 346 aa, unidentified
MKKIFIGIDFSKEKFDATVIKAEGVEERAERQHEVFDNKVSGFRHLLRWVKSVVDEQDTGLWLFCGENTGGYSRALCNYLYGSGYDMWLENALSIKRSSALQRTKSDKADAGIIAEYAMRNYDQMRLYKPLDKNLERLREVFLYRHNLVKLKASMTVRKGEKKQTQEKSDISRFMAMSSKHLISEFNKKIAECDMRIEKIICEDEELRRNFEIITSVPGVGTQNAVCLMVYTDNFSRFDYDSRKIACYYGVAPFGRQSGTSVNTPPHVSPFANKLIKALLTQAALASIQFCTQMAIYYHRLVEAGKKKPVAVNNVKNKLLHTITAMVRKQEMYNPNHDYHAALKAA

SEQ ID NO: 475392 - protein, 338 aa, unidentified
MGLYCGIDLHSTNSYLAVLNEQFQSVLDRRVPNRLEAILGALEPFREEVQAVAVESTFNWYWLVDGLMEAGYSVDLVNTSAVHQYEGLKYVDDRHDARWLARLLCLGILPTGHIYPRQERAQRDLLRRRAFLVRQRTASLLSVKNLYSRNTGSQVAANELKRLTDEQVVAQFSDPHLALAITSNLAVVRVINDEIAGIEKLILQDAKLRPEFELLESIPGIGQILALTIMYETGSIARFADAGHFCSYCRCVPSQHLSNGKVKGTGNVRNGNAYLSWAFTEAAHFAIRFEPLAKRFYERKKTRTHALVALRAISHKLARASFHILRDQVPFRSEQAFG

SEQ ID NO: 475393 - protein, 342 aa, unidentified
MNIKRMGIDLAKQVFQIHGVDSHEHPVLRKKLKREQMLPFFQNLPPCLIGIEACSSAHYWARTLQTLGHTVKLIAPQFVKPYVKANKNDANDAEAICEALSRPTMRFVAVKTVAQQDMQATHRVRSQLVSQRTEKVNQIRGLLAEYGLVVGLRVETLRKALPALLENTDNALSGQFCALLSGLREDLQGLDERIKDMDKHIKQQADSHPDAKRLQQIPGIGPITATALVSSVGNGKQFKRGRDMAAWLGLTPRQHSSGGKDRLLGISKRGDVYLRTLLIHGARAVFKVAANKDDPRSRWLQSLSERRHKNIAVVALANKNARIVWALLTKQTDYQPVEVAGT

SEQ ID NO: 475394 - protein, 469 aa, unidentified
MESAYRRCCGIDVHKRSLSVCVLPAVGSEAVPVKEEKFRTFTRDLKRLRAWLLKCRVTEIVMESTGQYWRPVWNILEEAFPGMVLVNPLHVKALAGRKTDRLDAKWLATRLERDDLRGSFIPPRDIRELRDLTRLRVHWLEDLNRMKNRIGQLCEAGNIKVSSVASDLFGTSGRRMLASLVKGDRDAGWMADYARGTLRGKKAQLELALQGTFTTHQRVLLARMLGQMSALEQQIAELTSEIELRVAPHEELIGRLITIPGIDRISAWTVLAEIGTDMSVFGDAAHLASWAALCPGSRESGGKRISGKTRKGNRYVRRVLCQSAWAASHKKDCYLAALHRRIRSRRGEQKAVMAVAHQLLTTIFHIIRDRSVYKELGATHYDQQNKPKVTRKLVDRLQKLGYVVTLQPVEVPPPVPDPVAVEMTLTEMPRKRGRPCKCAERGIPCPHRRLKELPIESSEIPQNPGVPGM

SEQ ID NO: 475395 - protein, 316 aa, unidentified
MKNYIGIDISKASLDVYDGKKSYKFKNNEEGFNSIVALMKNPKETVLIFEPTGVYSYALTSFCAKRKIEVVLVGPKESRDFARSLKVRSKTDKIDAKILYRYQSHVESNMPKVPQIDHNAIKIQEMLNVYEGIQASKQRFVNQLESTNKEDKDLIRTLNRIIKSLDNEAVKLFNKIEILLLKDKTTKKRYDAISTIPAIGQKSALYLCAFFLKYPSANAKAITALVGLDPVIRDSGKYKGKQKVSKQGGQQLRNMLYLPTLCAIQHNEKIKDFYERLTSNAKTKKLAVVASMRKLILLAFSIFKSMEEYKPLTAKI

SEQ ID NO: 475396 - protein, 343 aa, unidentified
MTHYVGLDVSQKLTAICVVDDTGRRLWRGQCTSDPEQIERTVRRHGGEDARIGIETGPMTPWLVHELRGRGLAVTCLDARHARAALKMQINKTDQNDAEGLAQIMRTGWYRSVHVKSFDSHRARALLGARAQLVGMTTRLSNHIRGVLKTFGMLPGAGRGLPFDRRVEILLADQVEVAPIVRPMLAAWRQLRQQTAAFDKAVRVLVKSSPICRHLMSVPGIGVLSVLAYVSMVEDPARFGRSRSVGAHLGLTPKQYQSGEIDRSGRISKCGDTLVRTLMYEAAVVLMTRVKRALGLKDWAQAIAKRSGAGKARVALARKLAVILHSMWRSGEPFRWPEQPAVV

SEQ ID NO: 475397 - protein, 341 aa, unidentified
MSIVGAFDVHRRQLTFEYLDTVTGELKRGRVVPADRPHLRAWLARFAGVEDVHFALEGCTGWRYVAGELAAAGVTAHLAEPADTAALRGRKRHAKTDKADARHLRAHLLAGDLPECWIPPEHVLEARATVRLYKDLVDERGAWHQRIAATLFHQGVPATVSAAKPAGRAAADEADLSPAGRQAADTGLRQIDRLTAELDPLRRQLDMYSRRQPGCAALRRAHFGIGAVTSVAIWAELGDVRRFTSSDHVVRHTGLDITVHSSDIKRPPGKLSRQGPPLLRWALYEAAKSASRPASPDYGYYTATRDRRDGGLATLSVARKLARRCYHTLRELGEEALAPAA

SEQ ID NO: 475398 - protein, 342 aa, unidentified
MNIPVRIGMDTSKSVFQLHGVDENEVVVVRRQFRRAEMIRYFERLPPVLVAIESCGSSHHWGRLLQSFGHEVKLIPPQYVKAYVKRGKNDAADAEALCEAVTRPSMRFVPVKSKERQAACMLMTVRERLVSVKSQLSNAFRSYAAEFGIVGPAGRQNVAALIKRVLEDDSLPEMARDLFRLQADEYAAVQARLAKIEAKLMKWHREDDISRRIATIPGVGPIGSSMLSMKAPPPETFRSGRDFAAWLGLTPKDHSTGGRQRLGGITKAGDSALRSTLIVGATALLRHIRKGRHKPTPWLASLLERKPPKLVAVALANKFARIAWRLMISGGVYNQPVATMPT

SEQ ID NO: 475399 - protein, 386 aa, unidentified
MQKLNDLNQSLAALEPDGTLIAVIEMSLSSWLVAGIVPGVERQPLKKLAVDESALLKLLHRWREEAEKSGRRIERIAVAFEAGRDGFWLARWLKARGIEAYVIHASSVAVSREHRRAKTDRLDTELLKRSFLGWLRGERDHCKMVEIPTMKDEDAKRPNREHDSLIGERSRIVNRMKAALVRLGIRGFNPKLKRATTRLDNLRTPEGEPIPPNALAELRRDMERRRLVNNQIRQIEEERLERIEKTPCDGPHVMVRLLARVMGVGIETADMLVHEVLSRNLRDRRAIARYAGLTGSPDESGRKRREKGLARSGNVRVRRGMIQLAWRFLLHQKTSALTKWFRSRTENARGTRKPMIVALARKLLIALWRLVREGIVPDGVVLRAAQ

SEQ ID NO: 475400 - protein, 345 aa, unidentified
MPIVGGLDIHRKQITFDYLDTATGQVERGQIAPADREHVRAWLGRFAGRDEAAFAVEGCTGWRYIAEELAAAGLEPHLGEPADTAALRGRKRHAKTDKTDARHLRTLLAEGRLPGCWIPPEHLLEYRALLETYHDLRAEHTAWVQRIHAVFFHQGAPRLGEGALRTEPGLAGLRAAAAADLSPAGQLQVATALDMLAAVEARMGPLRRQLLHAARHLVGAKVLAARLYGAGPVTALALTCWLGGAGRFSSSRKAVRFTGLDVTVWSSDRKGPPGRLSRQGPPVLRWAVYEAGKTHGRTPAPDHGYYAAVKDRKNGKQAALSEARKIVRQACHILTELGDDALTIA

SEQ ID NO: 475401 - protein, 458 aa, unidentified
MSVLRKIKIKSATTKANVQLPTLHPHAAGIDIGATQIQVAVPCDADPRPVRTFTTFTDDLLKLRDWLQASGVRAVAMESTGVYWIPLYQILEAAGIEVCLVNARHCKNLPGRKTDVSDCQWLQYLHSVGLLRASFRPPEQICVVRSFLRQRANLVRYASQQVMQVHKALTQMNVQIHNVISDIVGVTGLAILDAVLAGERDGQKLAKLKDHRIKASDDTIARSLGGDWRAEHLFALRQALATWRHYQQLITECDAATARTLAGFESRVDVAANPPPPSTLRHKKPHANEPRFEARTELYRITGVELTQVPGLQVSTVLVLFGELGPDFVQRFPTAKCFASWLGLCPDNRITGGKIISVKTRNVKSRSAEALRLAAQALWQSKTYLGDCFRRWKARLGTPKAITAMAHKLARILWHLLKYREPYDPNVWAAAEEKMRAKKLKRLHQNATALGYKLVTAS

SEQ ID NO: 475402 - protein, 451 aa, unidentified
MNRPQVIDDQEHERVRERVAAIDVAEDSGMVCTRLPHPSGPGARRSTVWTVKARMGAIRGLGRQLARDGIEVVTLESTSDYWRIWFFVLEAAGLAVQLVNAAQAKNLPGRPKTDKLDAQWLARLTEMGLLRASFVPPQAIRDLRDYTRARTRLTQERTRCFQRLEKLLEGALVKLSSVASKLTTESAQDMIKAMIAGERDPRTLAGLARTRMKARHDDLVEALDGMFDDHHGVLARMLLDQIAFLDQRITQLTTRITGAVAAMPEAGGVDGDGTTGPQAGTGPDAAALPAVARLAEIPGLSEDLARAIIAETGLDMSRFPTAAHLVSGAGLCPSARQSGPRTRAGKKGQGNGYLRGSLGQAATGAARTDTFLGERYWRIARRRGKAKAQVAVARSILVIIWHLLADPAARFTDLGSGYYQARTDKDRKIKNHIRQIEALLGHPITITPKAA

SEQ ID NO: 475403 - protein, 403 aa, unidentified
MNSVGIDISKGRSTIAVMRPFGEVVISPFEVRHTDSELSKLARRLKSLNGETRVVMEATGNYHAPVAKLLHDAGLYVSVVNAKLVHGYGNNDLRRVKTDRKDAVKLANYGLDRWLTLPRYIPEEDTRLLLKNCYRQYRQYSKVQTILKNNLISLLDTVFPNVNRLFSSPARADGSEKWVDFVAEFWHCRCVSEKSEKVFTNKYQRWCRKHGYNFSEEKAHTIYVEASGHIGVMPKSETTKLLVEQAVAQLRATSAALAALKHEMQSLASMLPEYPVVMDMFGVGPTLGPQLIAEIGDVRRFYSKKALVAYAGLDAPPNDSGDVTGRHKSMSKVGASSLRRTLFLVMSVYLQNAPLDEPIFRFMDKKRAEGKPYRVYMMASANKFLRIYYATVKAYLESLEHTA

SEQ ID NO: 475404 - protein, 341 aa, unidentified
MQITTIGLDIAKNVFQVHGIDAAEKVVVRKQLRRGQMMKFFEAVPPCLVGMEACATAHYWARELTKLGHQVRLMPAKDVKAYVKRNKNDAADAEAICEAVRRPTMRFVGIKSAEQQGQLMQHRTRDLLMRQRTQAINALRAHLAELGIVAAQGREGLKKLLAIIADEKDERLPVDARASLIVLAAQFQALHTMIGSIEKRIIVQHRASEESKRVATVPGIGTLGASAITATVTDPSAFRSGRDFAAWIGLVPRQDSTGGKQKLGPISKQGDRYLRRLLVVGAHAVLRRAKQSPQKYPWLTQLLARRPFKVVAIALANKMARVAWALLAKGGTYRAPVLAAA

SEQ ID NO: 475405 - protein, 355 aa, unidentified
MSQEKYIGMDVHQATISVAVMDAAGKLIMECLLETKASTIVEFIQGLQGTLSLTFEEGTSAAWLHDLLKPHVSRLVVCDPRKAALLKEGNKSDRIDARKLAELLRTNQLKPVYHEEHGVRTLKELGRSYLTITKDVTRVMNRIKALYRSWGIPCSGAGVYAPRHRAEWLAKLVEPGVRVRAQRLYQQLDLLQPVRLEARRELLLESHKHAAVKLLRQIPSIGPIRAALLVALLQTPHRFRTKRQLWAYSGFAVETHDSGEYRCVRGKLQRNRERITVRGLNDNHNKDLKNLFKSAAISASTRPGPLHDFYVARVEKGMRPTMARLTLARKIATITLTMWKKGVGFDPQNLPRQAA

SEQ ID NO: 475406 - protein, 416 aa, unidentified
MLGVGIDWAEDANQVALGRVGEGIIEEFSVAHRPESVARLIERISSLESDPAEVRVAIETKHGHLVEALVEAGYAVVPVNPDLVARRRGPARKKDDGEDARILCLLALDRHSVLRPLIPHGETAAELRAIARDDERASRDERRLLNRLRADLIATFPAALAFAGEDLGSPTFLKLLERHPTAEEAEAATDAELESLFRRAKHGWPERTVARLRQALGSSQFVAKPYLVRAKAATIRLTASQLLAIGAQRRAWERRMGELLASLPATGGEDTGQAVPDGEIYLSFDGLGARLAARVAGEIGDHPEQFSSPNSLQCYGGKAPVTRRSGKSEFVVSCRLACNRHLANAVQQWAFCSLRRSAWAREFYDSQRARGKGHHAALRALGNRWLEVLWHCLRKGVRYDEAIHIENRRRATAAAA

SEQ ID NO: 475407 - protein, 392 aa, unidentified
MKTYDVNAGVDVGKSFHHIYAIGHSGEVLADRRINQCEQELTDTFTELLSFGSVLVTVDQPSNIGSLTIACARRAGCDVAYLPGLAMRRAAGIMPGEAKTDRRDAFVIAMTASSLPGALRRVPDRSGIKADLAALASYDDDCRCDMTREINRLRAHLLEVSPLFERTLGDSVTSSFALKLLNRFGGPWGMHKAGKAAVIRWAKKQKRVPRKLFDRLIEAAFSKQEMPAGACLREELAIPACASRILELIAVRKDIERRVIELLSDDPGYIALITIPGVGVRTAMTFLLCVDIAAFPSVDHLASYAGLAPRTHQSGTSIKGESAARTGNKALKNALYQSAFAALRSDPHAKWYYDKKRAEGKTHNAALIALARRRLKIMYAIVRDLRPYQTVA

SEQ ID NO: 475408 - protein, 411 aa, unidentified
MELLVPRCAGLDVAKDEVVACVRVPDGQGGRRQEVRAYPTFTSGLEALAEWLAAEGVVQVVMEATGQYWKPVWYVLEERGVALMLVNARHVKILPGRKTDVADAAWLAELLEHGLLRGSFVPPAAIRELRDLTRYRKRLIQAHTAEVQRVQKTLEDAGIKLDSVAADVLGVSGRAMLAALVGGERDPEVLAELARGRLRNKLPQLRQALRGRFSDHHALLLRLALGHLEHLEGAIAALDTEVDRVIAPFARARDQLDTITGVGKRAAETIIAEIGVDMTVFPTAGHLASWAGRCPGNNLTGGKRRSGKPTKGNRWLGEVLTECAWAAARSRDTYLSAQYWRLARRIGKKKAAIAVGHSILVIAWHLLANDCDYADLGGDYFVGRDTDRARQRAIAQLQALGYRVTLEPLAA

SEQ ID NO: 475409 - protein, 415 aa, unidentified
MVVCRANNTSCRTEKDVAQPTPWAGIDAGKAAHHCVAINTGGQRVLSERVINDEGALLDLIRAVKELADGGSVQWAIDLNSGGAALLITLLLDDDQDLLYIPGRTVHHASRAYRGDGKSDAKDAAIIADQARMRRDLLPFRHRDKTAVDLRILCARRTDLASDRNRAINRLRAQLLEYFPALERAFDYAHRKAALILLTGYQTPDGLRRMGAPRLERWLRDRQAYNAGDLAARAIEAANLQRTTVIGQHVAAAVVARLAQTILDLNTELADVDTMIEETFQQHRLAAIIVSMPGFGSLLGAELLAATNGDLASFNTADRLAGISGLAPVPRDSGRISGNLKRPRRYDRRLLRVFYLAANNSIKTSPESRDYYDRKRSQGKRHSQAILCLARRRLNVLWAMQRDQTSYQPGMPRAA

SEQ ID NO: 475410 - protein, 310 aa, unidentified
MNDTIGIDISKDTLDIHRLSDGTRSQFGNDSSGLGTLRRWIGKVPVRVVYEATGRYHRDLEAALEPGGHALVKVNPARARRFAQAIGQGAKTDRVDAAMLARMGAVLDLEAKPVRSCSMHEIRELHVARIGLVKDRTACRNRLHGARNKVVLGQLRARLKQVERQIEQIDAELLRLIAGDPQLARRLEILTSVPGIGRVAAAAMIVEMPELGSMDGKEAASLAGLAPIPRESGVWKGKSRIGGGRHQLRRALYMPALVAIRHNRQLGQVYQTLCDAGKPAKVAITAVMRKLIILANALIRDDRKWAETAP

SEQ ID NO: 475411 - protein, 373 aa, unidentified
MDHFAGLDVSVKDTSVCIVDSTGKIVREVKVASEPDALLAVLRNPAHHFKRIGLEAGPLSQWLFSALAEADLPVICVETRHMRAVLKAQINKTDRNDARGIAQMMRVGLYRPVHVKTLRSQKLRMLLTHRKLSQSKAIAIENDLRATLRNFGLKVGVVGRVKFEARIKELIESFPDLVALVEPLLIVRRVLREQIAILHRRVLAAVRDDEVCRRLMTVPGVGPVVALTYRATVDVPARFRKSKSVGAVFGLTPARDQSGERDRPGAISRCGDEMMRTTLYEAAQVMLLRSAKWSWLKAWAMKIAKHRGMKKAIVALARRLAVIMHRIWTDGSEFRWTREAAAVCRPFRIKCDRRILRAPPGGGMTSLAGRRMR

SEQ ID NO: 475412 - protein, 345 aa, unidentified
MVVLGADLHKRSHTVVVIDGTGRKLAEKTVSATDAGHLELRRWAAKWPERTWGLEDCRHLSRRLDAELVRLGEAVVRVPPKLMAGARQSSREPGKSDPIDALAVARAVLREPDLPVATLDGADRQVRLLIDHREDLIGERTRHEQRLRWFLVELAIAEPAPRSLGRAVVQATLGAALAGRAEPVARFARDLLVRIIDLSATIGALEHEIEGLVRTSAPTLLALPGCGALTAAKIIGEAAGISRFRSKEAFARHNGSAPVPVWSGNAVRHRLNRGGNRQLNVALHRIAITQIRLAGPGRAYLDHRPAAGDSRTEAIRALRRRISDEVFRRLRADEAAGSAGLAVAA

SEQ ID NO: 475413 - protein, 468 aa, unidentified
MSRAKKQRDDKKKQCDDKMMSLDVVHSNAAGIDIGNAAHYVAVPPDRDQESVRTFECFTEDLHKMVDWLDQCGIVTVAMQSTGVYWLPVYEILVQRGFEVFLVNARHTKNLPGRKTDVQECQWLMKLHTYGLLNNSFRPTEEVCVLRTYWRQRDEHVKSASASIQRMQKVLTEMNVQIANVITDISGLTGMAILNAMLKGERDRNKLAELADPRIKASQEEIAKSLEGNWRAELLFVLRQQMRIYEGYQKRIQECDEAIEAHLKTMEDKAAAGSQPQPPKRGKKAGSNAPQFNLRGELHRISGIDLTRIDGINVMIAQTIVAEVGLDMSKWPTEGNFASWLGLCPDNKITGGKVYHRGSRKVENRAATALRMAATSLWRSKTYLGAKLKRLRSSLGEPKAITAMAHNLARLVYRLLKYGQDYVDKGMEFYQQRYQQQQIKWMRKKAKELGLVITLAAAPDSNPLPSLP

SEQ ID NO: 475414 - protein, 326 aa, unidentified
MNLSVAVLGVDIAKLKFDVCLIKENGKSKHKVFTNTTHGFEQLVVWLASHQAGSLHICLEATGSYGEALALYLFDAGFIVSVVNPAQVKAFAASRLTRTKTDKVDAELIARFCLAHEPQTWQPPAPAVRELQALVRRLESLIEMRVAEENRLSSGVSIETVRHSLEEHIAYLVAEIKHTELMIREHIGNHPDLKQKSNLLGSIPGIGATTAARLLAEITDFKQYQSARQVAAYAGLVPRERRSGSSVRGRVQLSKIGNARLRKALYFPAITALRCSDFFKVWADGLQARGKCKMAIIGAAMRKLIHLAFGVLKTGKPFDPNWAKTA

SEQ ID NO: 475415 - protein, 351 aa, unidentified
MEHTTIAVDLAKSVFQVAVSHRAGRVDAERRLSRDRFLAYLAQQPPATVLLEACGSSHHWARQLEQFGHVVRLLPAHDVHRYVRRNKTDRTDAKALLEAARNEEIHPVPVKTVEHQAITSLHRLRSTWVATRTARLNTLRGLLREFGIFIPVGAQHVVPRVRELLGDPTGALPVAVRSTLANACAEIDVLETNRRDVERQLAAIARQLPDVALLQTVPGVGLMTATALIAFVGDIGRFGSGRHFASFLGLTPKEDASASRRRLGAISKQGDVYLRMLLIHGARSVLWHAKSCAHPSGFQTWARCIEQRRGHNVAAVAVANKLARIVWAVWTQQRPFAANHRHAETTSVSSN

SEQ ID NO: 475416 - protein, 335 aa, unidentified
MKKTVIGIDVSKEKLDVSILKETKIQEEAIIENQTKKITAYLKEVQKKNTPEDILICAEYTGQYTYPLSIVCEELGISLWIENPAQIKYRSGVQRGKNDKLDARKIAQYAERFQEEAKLFSMPEKSMVSLKQLISERDMYVSDRAKYQGQLTDQERFMDKADYKKKGKRLHALIQELDEMIKQIEKEIQKIIDSDETLSNQHKLLCSIEGVGERTAVKMIVETNAFKDFTNPRKFCCHAGVAPFSYTSGSSQHSRNKVSNRADKSIKALLHMAALIAATRMHGELHDYYLRKVGEGKNKMSVLNAVRAKLVYRMFAVIKNNQLYQKNYLNPLLKS

SEQ ID NO: 475417 - protein, 372 aa, unidentified
MSLRGVRDLEPLARRTAPVPPLATTAGELWDRRRSHARPNSRQTSIARTRQVTVAKMICGVDVSSFSLEACIGPQGPARSFPNTPEGSAELLAFCRQHGVELVAMEATGGYEKQSFSLLWAHGLPVALLNPRAVRRFAEGMGLLEKTDRIDAGVIAWFAAVKRIPACAPVSAEQQRLKALVTRLRQLTELQAAQRNQRLLVRETTVLASFRELLALVASQIRTLETAIAALIAADPLWQKLDQAFRSIKGVADRTVARLMAEMPEIGSASNKAVSKLAGLAPLARDSGKSQGQRTVRGGRRDVRAILFVVAGVVRRYDADFAAFHQRLSAAGKPKKVIRIALAHKLLVRLNAKAREVRNEFARRTSPPVALS

SEQ ID NO: 475418 - protein, 311 aa, unidentified
MSEIIVGIDISKAELQGAERPSGTHWTSPNAAPALPALVERLQAQAPALIVLEATGGLEGPVATALALAGLPVVIVNPRQVRDFARAVGQLAKTDRIDADVLALFGERLRPMPRPLRDADTRRLEALVVRRRQVVDMLTAEHNRLAGAPTPAVRQRIAAHVHWLQGELRSVDQDLDGAIRQSPLWRAKESLLRSVPGVGRVLTLSVLTQLPELGTLNRKQIAALAGVAPLNRDSGRFRGRRTIWGGRAPLRAVLYMAALVATRRNPVLAAFYRRLLAAGKPKKLALVACMRKLLTILNAMLATNTAWQAAH

SEQ ID NO: 475419 - protein, 361 aa, unidentified
MTPEEKRHTMFVGIDVHKDTHTAVGVSPFGEKLFEMTVGNYDTDFLSLSKRIREVGTTSILSPFVGLEDCSGFGERLALYLHEDGYQLVHVPPVLVDRDRKRQTHPEKSDSLDALGVAKVMLASSDTLPVYTVSENSKNAKILKELSHDRDFLVSERTRLKNQVHILLHRIYNTEYRTYFKDPFSLKALRHWSKVRPQCDEHVLRTLKRKVRRLLDIRTEIQELEKDMEAVMEKRGYTLDTASGCGTVLAASIIGEIGDIDRFKSPAALAKYAGCAPRSHSSGKTERYRKTRSGNRLLNRSLHRMALSQISRSGNDAAKRYFEKKISEGKSKSQALVCLRRHMVNVVYMMLKHNVEYRQPA

SEQ ID NO: 475420 - protein, 392 aa, unidentified
MLLEHPINEPTAIRTQIGAIFVSLELSRSTWLITSLSPGNGEKMSKQGVEGGDMAALLARFAELKRKATTRTGQSYPIIVIQEAGLDGFSIHRVLQGQGIESHVVDAASIAAPRRRRRAKTDKIDGEALVRALLAYKRGEPRVCSMVVVPSPEEEDRRRICREREVLIGERIAHANRIKGLLYSQGISGYAPLRRDRRARLEALRTSDGRALPERMKTQISRELDRLELLLEQIKAVEAARDAMLVSLTTNEKAEAPHPLAMLLGVKGIGVEFAAGLWTEAFYRSFANRRKLASFAGLAATPWQSGAIAHEQGVSKAGNPRLRTKMVQLAWLWLRHQPQSALARWFHEQGKRERKGWRKSAIVALARKLLVALWKYVSAGVLIEGAVLKRAA

SEQ ID NO: 475421 - protein, 420 aa, unidentified
MKVVYQTCCGVDIHKSFLVAAIIKTTSGVQPSYQKKRFSTFNNSILEFKKWLLDNSCRDICMESTEKYWIPVFNLLEDEINVTIANPKWVKAVKGNKDDAKDSKWIGDLFRLGLVPESYIPCKEIRILREFTRYRYKLTSCKSSEKNRFQNALTVCNVALDSVVSDIFGKSATSVIDYLLEQSNNSINHEEISSRLLRSLKKKSENVIESIEGYQMTDSQKYRMRLVHAHMDYIRSTIVDIDSMIDLLVEPYDNAVKLLCTIPGVDRNSAITIISEIGTDMTQFSNSKRLCCWVGLTPGNNESAGKKKSVRITRAGVYLKPALVQVSHAAVKSDKSPYYKAKYERIMKRREKKRAIIAIVRMILTATYHMLSTGEAWNSSDLYKIDMPEPLKEKPKEKAIKQAMKLLIAERIIEEPLLVT

SEQ ID NO: 475422 - protein, 343 aa, unidentified
MSVIIGVDPHKATHTVVAIDRAEVELARARVRATCKQISQLLRWAEPLGERTWAIESAGGLGYLLSQQLVAAGETVLDVPATLASRIRVLGTGRSDKNDPNDALSVAIAALRAPALRQVVVADHAEVLRLLAKRNIDIGQQRTRVVCRLHNLMMELSPGGIAKELNASDAVAFLEHVQPTTPAEAARRDLAVEVLADVQRLDDQLKVSHRRIRTAVAASGTSLTELFGVGPIIACYLIGFTGDVSRFANRDAYAAYNGTAPVERSSGGRVVHRVSQRGNRRLNHALHLAAICQIRQTHSEGRVYFERKLAEGKTKKDAVRSLKRQISNAAYRQLLIDAGRSKK

SEQ ID NO: 475423 - protein, 358 aa, unidentified
MQSNTLNFNGQKIFIGIDVHLKSWNVSIFTSNVKMKPFSQSPDAVALRTHLDRNFPGGDYFSAYESGFCGFSVHYDLLRCGIKNIVFNAADITDSHKERARKADSVDSAKIARNLRDGNLTPIYVPSQEDLSDRQLLRTRRSLVKNQSQTKIRIKSFLNFYGIKCPLSLECNGTHWSQRFINWVKYEFGNMADSQRKSGMFLLRTLEFQHAEVLSATRELRDLMRSPKYEKSMRLLTSVPGVGLIAAATFLLEIGDISRFSNSDHLASFIGLVPDTRSSGEKDAKIGITNRSNRYVREALIEGAWRAIRKDPALTLAYEELRKRMEPNKAIIRIARKLANRIMCVLRTQEPYVPAVIK

SEQ ID NO: 475424 - protein, 463 aa, unidentified
MDDGLRARAFSVAAPATCPIALRARIRLCRLPAVLPLVVIYLKEGVVVALMGRAIGLDVHLEFCEIAICEEGKVRSAGRVNSKPADLQALADSLLPTDRVVLEVTGSAWEIVRILEPRVKEVVVVSPGDTGIAQARAKTDRLDARTLAKLLWAGELEGVWRPDEHTRVLRRRISRREQLVRSRSRSKNEVHAVLMRRLVGRCPFSDLFGKAGREWLRDLELPVEECETIEAAMRHIEFLDAEIAEVERLVAKQALNSPDARHLLTVPGVNVICAGTFLAAIGDIRRFATSRQLVGYLGLDPRVRQSGSAPAKSGRISKQGSPQARWALVEAAWSVVQQPGPLRAFYQRIRAKRGFGVAIVATARKLAVLFWCLLTRGENYAHQQPSLTAKKFRRLELKAGADKYSRAASGGVWSANQKMREFERQLAQQAEASYVRMVRDWQASAPKKPKPEEAGASVTPERA

SEQ ID NO: 475425 - protein, 408 aa, unidentified
MDLTPMHKRVIALDVHQAKITACAVIEHDDGRVEVTKRDFGAFKRDRRALAQWALEMAPEVVVMESTGVYWKSPFAALEAVGLIAWVVNARHVKAVPGRKTDMADAQWLATLARAGLLRASFIPPVQMRQLRLVARQRQKLVGMCSAEKNRLHKVLVDAGIRINVLVADIHGQSARAMVKALIEGQPMHEVLNHKGRLRASRQELCEALSTEQFSAVHRFVAQEIVQHIEQIEQRIARMDQYLLQGLQPWQPQLRLLQTLPGIDEQGAAMLLVEIGADMSVFGSAERLASWVGICPGNNESAGKRKTGRIRKGNAWVRRLLCEFAQAAARTRCALKAKFDALTIRKGHKKSVVALAHKMLRTIYAMLSNGSHYQDKEVDYEALNVQRNAPRWIKMLRKHGFIATPAAA

SEQ ID NO: 475426 - protein, 330 aa, unidentified
MSTFAGIDVSAKKLDVACLSGEKKPIFAQFEQSPAGHDKLATYLKKHRVEAIVMEATGIYYLDAAMVLVRAGLPVSVINPRSAHHFAKAVLEHSKTDRIDARLLADYARRMDLTPWQPPREDWLALRDIARRINQLTGMCTAEKNRLHALKAQRHTRRSLIEEVEAHIELLDASIERLTTSALELIERDTELAHYRSCMKAAKGIADASSVALLGELCLLPLELRSAQVSRQAGMDVRQTESGSSVDQPGRLSKAGNAYLRAALHMPALSLITHDPWAKAHYQALVARGKKRMQALCAIQRKMLTGLWASMKTGQPFDSSKLFAIEPQKA

SEQ ID NO: 475427 - protein, 338 aa, unidentified
MGLYVGIDLHSSNSVLAVQDEEDHVISQKRLSNDLPTVLSWLQPYRDSIVGIVVESTYNWYWLVDGLRDAGYEVHLANTTAIQQYTGLKYADDKSDARWLAKLLRLGQLPEGYIYPKEQRPVRDLVRKRSHHVRHCTSHILSIENLITRNTGQRINSNRVKRLTDEEVEALFLEPDLGLAVRSSLAVVRCLQEQIHLIEKAVKQRVRLRQEFKRLLTVNGIGVILGLTIMLETGDIRRFASVGDYVSYCRCVKSVWLSNGKKKGKGNAKNGNKYLAWAFVEAANFAIRFNEQIRRFYQRKSAKTKRVVALNATAHKLARACYHIMNDGVSFDVTRAFG

SEQ ID NO: 475428 - protein, 338 aa, unidentified
MTISIIGLDLGKSVFQVHGVDAHGKVVVTKQLRRAAVLRFFANLPPCLVGLEACATAHHWARAIGGLGHQVRLMPPQYVKAYVKRSKTDRADAAAICEAVQRPTMRFVAVKTQEQQGMLVIHRVRETLVAQRTQLINALRGHLAEFGLIAPQGAGNVRELIARLADAEEVPPMAHGVLQTLIDQLRHTEARITELDGQLAEQSRQNETVQRLMSVPGVGPIVATALVATIGDARTFKSGRHLAAWIGLVPGQRSTGGKERLVGITKAGDGYLRRLLVNGARALTRWWRTRSPWLAGLLARRPVNVAAVALANKLARIVWAVMVRGEVYRTGAIAHGTA

SEQ ID NO: 475429 - protein, 350 aa, unidentified
MSNHMFAAADVHAATTTFAVLDSSGKFVMETVVETKAESLLSVVKSITGAVHLTFEEGTHAAWLYDLLKPHVAELLVCNPRKNRNDSGNKSDRIDARQLARWLRSGDLSPVYHGHDSTRALKELVRGYENLVSDSVRTKNRLKAVYRSQGESTSGGDVYKLEQREEWLSKIQSSGLRSRAGWLYSQMESLGELRREAEKAVLREAKKHRPCSLLRTVPGIGPIRSATIVAHAATPFRFRTKRQFWSYCGLAVVTRGSSDWVIDGEKLIRKRQPVATRGLNRNYNRRLKDVFKGAVRDAGLFRPHFDSLVASGTRPEMARLTVARKIAATTLAIWKKGEKFIPSKAVIRSE

SEQ ID NO: 475430 - protein, 462 aa, unidentified
MPGREERETADKSRRQLEGLPVIRASVAGIDLGSERHWVCAPTQDRSGREVASFGATTAELLRMAEWLKGRQVESVAMESTGVYWIAPHEVLEGQGLQLLLVDTRQLAQVPGRDKKSDPTDCEWIQRLHSCGLLRGSFRPEEAVCMLRTLVRDKANLVAESGDWLRRMQKSLDQMNVRVHRAVSDIDGVTGMAILRAIAGGERDAQKLAKLRDRRCSKTEQEIAEQLSGHWREDHVFSLQQALKMYDAVQERIAAYEQEILRKLGEMEREESHEPTAPPLQNAHKARKIKDRGQEAKRQALYRMSGVDMTQIDAIGVETVEVVVSEYGSDLSRFPTEKQFVSHVTLAPRVPKTGGKPVKKKKRNSASTRVAAALRMAALSLRHSQTALGAYYRRIAQRRGGDIAVFAAARKLATLIYRLLRWGQPYVDEGAAAFENRHRQHRIGRLAATAKELGYQLTPVAT

SEQ ID NO: 475431 - protein, 339 aa, unidentified
MVQYIGMDAHMSSCSFCVMDEEGREVDNVKLPTNGRLIIDYLRNIGGTKKLTFEECELSNWLYGILKDEVDELIVCNPAANKEYKKKKTDKFDARQLANLLRGNFLTPVFHDGSKREKFRGLMSGYQDLVNDNVRLKNRYKSLFRKSGIRVEGEAIYKDRGLLEKIARPDFRFIGIQIHYLLERMDESLDIYQKQISRSKKHFEEINNLMSIPGIGYIQAAKIVSQVVTPKRFPNKYKYFSYCGLIRHKKESGQRRYGTEKVWGNRTLKCVYKMAGHSAIKGTSALRKYYDHLRSKGLDDNKAYNAVCRKIAAISLSIWRNNRKYDDSLVSNDLIKQAG

SEQ ID NO: 475432 - protein, 407 aa, unidentified
MRITCGIDWAEIHHDIALADETGHIVARARIDTGAAGFTDLLRLIAESGGTPDDTPIAIETDKNLIVVALAEAGFTVYPINPRAVARYRERHGQAGGKSDPGDAAILANILRTDPDVHRVLPAISEHGRAVKALARQHQEAIWARHRTISRLRSVLLEFYPQALQAFPNLKLRSALTVLTAAPTPGAGQKLTSRRLVTLLHRCGRRNDPGLVEQILTDLKTPALRQPPQVEAALGHAVTGLLGIIAAMHEAVDALEAELGRCFDAHPQAPILRSVPGLGPILAARVLAEIGDDRERFPTPAALRAFAGTAPITRASGRSHYVKARKVRNKRLGDACHWWAFAAITKSPGARAHYDKRRAAGDHHNAALRNLANKLLGRLWWCLQHDEPWDEHAAWPDLDPGQQPAAA

SEQ ID NO: 475433 - protein, 463 aa, unidentified
MARNRKGKMSKKSIHALKVIKPDAAGIDLGSREHWVAGPPLEDDTPNVQRFGTTTPELLRLADWLKEQKVTTVAMESTGVYWIPLFEILDSRSFEVNLVNARQISHVPGRKTDMLDCQWLQLLHACGLLRGSFRPSDDICRLRALIRERNTMVDQRSDWVRRMQKSLDQMNVCVHHAVSDITGATGMAIIRAIVAGERDPRILAKMRDRRCQKSEQQIAEELTGNWRTEHLFNLRQALKMYDQFCQTVGEYDAEILAYIKTLQPDIDDDQSVLPPISPSKSREIAKKGQAPLRQALYQLTGFDLTTIDGIGVDTAAVVVSELGPDFSAFPDEGHFVAYLRLAPNLSISAGKKVPSKLKGTTTSRVAASLRMAALALRNSKTALGAFYRRISRRKGASVAVFATARKLAQIIYRLVCYGQSYVDIGAKAYENRFNARRLKYFTEALKDMGYKVKPLTAEVACWA

SEQ ID NO: 475434 - protein, 337 aa, unidentified
MTYYIGLDVSVESTAVCVIDADGCVKREFSARSHPEDLANALDPFSDQIAGIGLEAGPMSGFLVEGLKQRGLHSVLMETRRVHAALSAIPVKTDRRDARGIAELLRMGWFQPVHLKTPAARDLRVMLSARDSLGRRVRELDNSVRGLLRGFGLRVPTGARGRFCELVRDLIAGNLLLEAAISPLLSARDAMAAEFAKLDKLVRDQSRNDDVCRRLMTIPGVGAVVAMTFRAAIDDPKRFRSSKSVGACFGLTPRRYQSGETDRVTSITKAGDASVRTALYEAAHVMLVRTTRWTPLRAWAMRVAARRGAKRAKIALARKLAVIMHRMWIDGTEFKTA

SEQ ID NO: 475435 - protein, 422 aa, unidentified
MKKGIYRAKKVNQVNVENLAAKVKGKQISVGNDVGKEICYGALRDEQGEVLIILKWKNPSEARDYVELIKGLPAERLEAVMEPSGTYGDPLRKLLWEAGIEVYRVSAKRSHDAREVYDGVPSSHDAKSAAIVAKLHQDGASELWPFRREYERDLTAAISMMTMLKEQKQENLNRLEALLSRHWPEAGEYLRLGSATLLELLIQVGGPEQVRENETKARKLMRKVGRIFLKGEKIEAVIDSARSTIGVEMTTVEECALKYLAQQTRDFDQAETKATRKVEELSQENLTVQAMSETAGKATAAVLVSKGGDPRDYASVGHWAKSLGMNLKERSSGKHQGQLKITKRGSGMARYWLYFAALRLIQNEEIVRAWYDRKVARDGGIKNKAIVAVMRKLCGALWHIAQGEVFDPNRMYDARRLGIVTV

SEQ ID NO: 475436 - protein, 493 aa, unidentified
MYVTAHRPTRLSSELEEVGAVLAHGARAMISARARALRRPPAGAASPSSPAREECMPRYIGLDLHKRILEVCVLNEAGAIESRHRLVVSREALRAFAQSQLRPDDRLAVEATTNTWPVVEVLRPFVSEIVVSNPLRTKAIAEAKVKTDKVDAHTLAQLLRVDYLPAVWQPDAATARLRQLTNQRAGLVADCTAIKNRMHAIFHQRLISVPEGGLFKVAGRKWLERVELEADDRAALARDLHLLAELETAVADLEERLLVVGGTDPRLKLLVTMPGVNVVCAQTLLAALGELGRFRDGDHAASYLGLVPHTKQSAARTYHGPITKAGNGHARWVLVQAAQHLATHPGPLGVFFRRLAHKKNRNVAVVATARKLVVIAYELLRRGEPYRYAQPAPTAEKLRRLRLRTGGPRRTTGCPKGTQAKAKLPGGSRTHKALQTLYAEEGLPVFAPLRPGERRLQQQPAIAAFVASLAEPQTRPRRHRAVSAPARQELAGA

SEQ ID NO: 475437 - protein, 386 aa, unidentified
MMLIGVDPHKSTHTATAVEPGTNCEVASIRIEATLGEYRRMLTWAARWPQRRWAIENAEGLGRHVASWLLARGEEVVDVPSTATSRVRQLSRGGGRKNDRIDAAAAACAAAAQGDYRIMVAEGATDALAVLDEHRVNLAQGRVRAVNQLHALLRALLAGGAPTDLTAATASTLLSSVRPKGEAERARKAVARDLITEIRSLDARLKASCKAIAEQVENSGSSLTEIVGVGPIIAGRLIARTGTPSRFPNSGAFANYAGAAPVEVASGDHARHRLSRTGDRQLNSALHTMAVTQIRKTGSRGNLYYLTKTAEGKTPREARRCLKRRLADHVWRTMTADEQRLAANPRGHSGATVQSSATGITPCTSPSEKSLLKPATQQPTTPRPAS

SEQ ID NO: 475438 - protein, 470 aa, unidentified
MNEYFLGIDASKGYADFVLLDSQKVTVEENFQLDDTFDGHGKLFEIMSLFVKEYPESIVCAGIESTGGYENNWYHSLRKFQKYIPIQVVRLNPVGVNHTGKSEMNRNITDKISARNIAVHLINHQDKINYEKESLYSSFKRTWTYLRLLKKQKTQLLNQLDPLMYSAHPQLQQYCRKGTPQWILKLMRRYPTAKHLSRARVNGVAQIPYISDERAYELIEGAKYTTASATDNIMARLIKSIVKKILDLDKEINRQKKYLEQICDMPEVELLKTIKGVGIYSAVGLMIEIGAIERFPSKKHLASFFGLHPEFKISGDGIKYIGMSKKGRRVPRELLFNVAKSAINTDPYVNRVYNDYVEKGKNKMTAIGIIMHKILRMIYGMLKTNTPYNFEIDSSNRIKTHVMKKDLSFNDSNRRYQTFDPKAPTSRRQDKRRKEREEAHNVFTLNSGSSSALGGVSTPLSRRKVKSIAV

SEQ ID NO: 475439 - protein, 385 aa, unidentified
MALTGLSGNEGAAMSEGSEAFVGLDTFKTKISVAVADGGRCGEVRFYGDIDSSPDAVNRLVKKLSARYQRLHFCYEAGPCGYGLYRQLTALGHQCDVVAPSMIPIRPGDRIKTNRRDAITLARLHRAGELTPVWVPDEAHEAVRDLVRAREGAMLDLRMKRQQLTAFLLRHDRIFPGRKTWSRAHVRWLCEQRFEHPAHQIVMQEYRHTIDDAETRLDRLEGQLAEVVPQWSMAPVVEAFQAMRGVGFLAAVIFVAEVGDVRRFESPSQLMGYLGLVPSERSTGDRVRRGGITKAGNRRARWVLIEGAWTYRLPARVGRTLQARLDGLPKAVRDIAWKAQTRLCGRYRRLTAAGKKPCLVTTAVAREMAAFLWAIGQQVAPRLAG

SEQ ID NO: 475440 - protein, 321 aa, unidentified
MNTNTVHIGVDMAEDSFDAALPAGILHLSNTAAGFRALLRDVRKLDRNVCVCVEATGGCEQQMCDFLLTHGIAVAKVNPKRVRDFAHGLGKLAKTDPIDAAVIGEYGRQARPRCLAPEPAYQRSLAAMVRRRDQITDLITAESNRLGRCHDSWVKKSLTSSCRHLKRLQKCMEKAIHALVAEHADLMQRQKCLTQVDGVGETTACAVLAFAPELGTLSRNEAAALVGVAPYNRDSGKFKGHRMIAGGRPEARRHLYMASLSASRRNHVLAPFYQRLVKAGKPKKLALTGVMRKLVVYLNHLLRKLNDQIASLSACSPAATA

SEQ ID NO: 475441 - protein, 410 aa, unidentified
MDVVYERCCGLDVHKKSVVACLIVPGERGKPRKELRTFGTMTDDLLALADWLAAAGCTHVAMESTGVYWQPIWNLLEERFDLLLANARHIKAVPGRKTDVRDAEWIADLLRHGLLRGSVVPDREQRELRELTRYRTALTRERAAEVNRLHKVLEGANIKLAGVASDVLGVSGRQMLAGLVAGTTDAAVLAGLALGQLQKKRPELERALTGRFGPHQRYLVARMLAHIDDLDASLAELSARIQEQMRPFEPAVERLDTIPGVGRRIAEILVAELGTDLRRFPTPGHLASWAGLCPGNDESAGKRRSGKTRKGNGWLRWALIEAAQAASRTKGTYLAAQFRRLAARRGKKRAIVALAHTILVGVYYLLTRSTIYTELGGDYFDLRDREALERRLVYRLERLGYEVSLQPRPA

SEQ ID NO: 475442 - protein, 344 aa, unidentified
MQIAILGIDLGKNSCSVVGLDNSGHVVVRRRMHRTSVIKFAGGLVPCVVAMEACCGAHHLGRLLRAQGHEVRLMSPEYVRPYVKAQKNDERDAEAIAEAATRPTMRFVELKAEEQLDMQTLHRVRDRLVGERTALLNQLRAVLLERGIAIPQGRRKLEQHLDAMLGGPESADVAPRMRRLLRDMRTEWQALDRRIEAFDEEFAVKVRTDPVACRLATIPGIGVLNATALVAAIGNGENFARGRDLAAWLGLVPRQATTGGKPRLLGISKRGNKYLRKLLIHGARAAMPSLARSGTALGAWLRGLLARAHPNIVVVALANKLARIVWAVLRHGREFERTDVVALA

SEQ ID NO: 475443 - protein, 338 aa, unidentified
MSAIKVIGIDLGKSTFHLVGHDYSGREQYRHKLSRSKLLQFISVHELTLIAMEACCGAHWLARKCQEYGHQVKLIPPQYVKPYVKAHKNDFIDAAAIAEASTRPNMRFVSPKSEQAQVGVVIRRVRTGYIRERTATMNRIGSMLIEFGISFPRGHANMKKLFQWLADNKEPIPPLLVQELQNQLDYYNQLNERIKEQDRKIEKLSSEDELYTLLQTIPGVGPMTASCCLSCVGKPSDFSNGRNFAAWIGLVPFQYSTGGKQRMLGISKRGNKELRELFVHAARAVMWREETAERYFGSWLLDLKRRKPFNVDLVALANKLARIAWSVMTSHKPFELRV

SEQ ID NO: 475444 - protein, 354 aa, unidentified
MGDNSKGICFEGKHFYVGIDVHKRHWVVTIRQEGMELRTFSQDPRPEVLKKHLEKTYPGGTYHVVYEAGFSGFWACRWFREQGIDCVVVNPADVPTGQKEKDRKRDSVDSRKLARELYKGELEGIYVPDEEAQHLRSLCRLYSATVKDSTRMMNRIKGHLHFNGVFLSRSSSNWSKGFISSLRELPLDGGPGREYLHLCLDDLDRIRQRKVVILKQLREYVRDHAAGRIIGYLKTIPGIAFRTAITLFTEIISMDRFSNADQLKAYFGLVPSSGDSGEKTPEKGMTARKNGFLRHLIIEAAWVAVRKDPAMLAAYNALRSRMKTQDAIIRIAVKLLRRIRYVWQHQCPYVTSMA

SEQ ID NO: 475445 - protein, 312 aa, unidentified
MERIFVGIDIAKDQVDVHVHPTDERFQLSRDDAGLAGLVARLQPLGPRLVVLEATGGYEIPVAAVLASAGVPVAVVNPRQIRDYARATGQLAKTDALDARLMALFAEAVQPEVRPLPTPEAQALGDLVTRRRQLVDMLGAERNRHHQARDLRLQRCIATHIRWLTKALAEIEADLATRIRSSPIWRERDNLLHSVPGVGDITAYTLIADLPELGHLDRRKIAALVGLAPFNRESGHWRGRRMIAGGRPAVRSVLYMATLTAVRFNPAIAHFYQRLTAAGRPKKVALTAAMRKLLTILNAMLRDQRPWQPESA

SEQ ID NO: 475446 - protein, 405 aa, unidentified
MFCGIDWASERHAVCVLDDAGHQATAFEIAHTAEGFDQLLARLRRYRDPATLPVAIERPDGRLVDRLLEAGHPVVAVQPNAIKAWRDAEVLSGAKNDPGDAALIADYLRLRQHRLRVLQPFSAETRALRAVVRTRDDLVDQRTTASNQLGACLDAFWPGAKGVFADLASPITLDFLARYPTPESAASLGERRMAAFLTKHGYCGRRPAAELLARLRAAPPGLCGTVEVEARRDAVLAMVRVLRALVAAIKDLDRAVVAHLGEHPDAEIFTSLPRSGRINAAQVLAEWGDCRPAYVDAEAVACLAGATPVTKQSGKHTAVSFRWACNKRFRQAICTFADNSRHGSPWAAKVYAEALARGHDHPHAIRVLARAWIRVIWRCWIDQVPYDPAKHGAAHKLTEMATTAA

SEQ ID NO: 475447 - protein, 341 aa, unidentified
MRYIGLDVHKDNITACVLTSTGKPKFEKDFLKESGNWILDELLDFGDKEGFCVMMESGTYAYAPFRFFSDRGIEVHVVHAKALKVITDSDKKTDSKDALTIAKMLRLWKRDDIDLQMAYMPTREQCELKDICRYREEISKKIGDETRRIKSHMSRNCEYLPEEFDNFQTEKAREFVKKTYPEDRTLMRRMDCLIDLFRERDLVKEDVGSRLPGSREVGLLCGIPGIGRQTAVQIMSMIVDVNRFADAEKLCAYFGMVPRVRDSGGKEHHGRMTKNGDRMMRMIMERVTESHVRNCNSSLTQYYKRKRDEMGTKKALITASRKMLSVIYAVLKSGRDFRPAA

SEQ ID NO: 475448 - protein, 376 aa, unidentified
MRTVALDLGSRKIVFCEVAEGRVSQRGSVSTVESLQSLLGPEMPPSRVAIEACREAWHVHDVLSSWGNEVVLVDTTRSRRLGIGQHGRKTDRIDAEVLARALERGGIPVAHVLSPHRRELRRWLNVRRALVESRAQLVTTARGLARERGTNLPRCATERFADNVTSENLDAELAELLSPLLTLLSSITVELKTLEDKLAKLCATEPVVELLATTPGVGPIVAASFVSVVDDANRFRSAHHVESYLGLVPSEDSSGGKRKIGSISKKGNSYLRALLVQSAWSIMRSPVASPLRLWADAVAERRGKKVAVVALARRLVGILWAIWRDGSVYDANLVARASSRGTRRNAQSLELRSEALRQSGKKLHKPRLSSTEVTVS

SEQ ID NO: 475449 - protein, 368 aa, unidentified
MKKIAYVGIDYHMNVVAIAVIIEGEKEFYDTIRLKNTDTLIAKYMQKLSHQFTIKACYEASSSGYCFQRKMRAWGYHCDVIAPSLVPKKPGSRRKNDFRDARELAQHYANGLLTIVHPPSEQDEALRGLNRCRQSLKEAEKRAKNQINSLLLSQGLHWQKSKWTLRHRQWLATLHLPHTYLQQVLDEHLALLHYLEARVLHFDRQIEALAQSELYAESVKKLCTIRGIRTLAAMILIAEITDFRRFASPRALMAFLGLIPAEHSSGDKQTGCAITKTGNKRCRTQLIEAALHYVKKPTIRGRLKSALSQVDASTATIALTCMQRLHKRYWALVMKGKEPKVARTAIARELAGFIWALMNQQPAPVTTV

SEQ ID NO: 475450 - protein, 415 aa, unidentified
MALKIVYKICCGIDVHKTFVVACIASTNSKGITTYERHRFSTYTSGLKDLLQWLLKRNCKDVCMESTGKYWIPIYNILENDCSIVLAHPKYVKAIRGKKTDKKDAKWIADLFKHDLVAGSFMPPADIRQLRDLMRYRFKLTCFQSSEKNRLQNCLTVSNIQLGNVVSDTFGKSAQAILDKILENPEDTSFDLEPFVYRSLKKKLPELRDAIDGYITPEQAGKLKVIKAHYESLESRKAELEELILALAAPYQQELAILQTAPGISSDFTAIGIISEIGTNMEAFPSAKHLCSWAGLTPTSNESAGKKKSVRVSKAGCYIKPLLVQCANAVVKSKKHPEIRNRYLRLKKRRGHKKAIIAVARMLLTALYHMLKNGENYNAELYRKSDLPPIDCEITVEQALIIARNQGYRIKSATA

SEQ ID NO: 475451 - protein, 296 aa, unidentified
MSNIATIGLDLAKNVFQVHGIDETDGVVMRRPLRRGQVLRFFAGLPPCLVGMEACATAHHWARELRALGHEVRLMPPQYVKAYVKRNKNDAADAEAICEAVGRPSMHFVPVKTAEQQSALLMHRGRELLVRQRTMLANALRGHLAEFGLIAAQGLHKVAGLIAIVRDNKDARVPDMARQVLRMLAEQVDALETRIAAIEAQIMAWHKSNPVSQRLATIPGIGPIIATVIVATVPDASVFRRGRDFAAWLGLVPRQNSTGGKERLGGISKRGASYGEAASNGAHAVLLCSKAAKADP

SEQ ID NO: 475452 - protein, 394 aa, unidentified
MKLVGIDVGKNSHHFCVMDKETGEFNVTPTSFSNNKEGFDFLINSLKPYSKKSILIGMEDTGHYHVALLKFLLSNGYTVALINPKTTDLARKMEGGITKNDKLDTITICDVLDTPERKKQYRITKVDRFDLYEQRQLTRHHHNLKEELNVYCNRLQKSIDLVFPEFNTLFSSKYGIVYMNLLKTFGSAEAIASTDIRTIRKCFEIKGKGNRISLTPEKLKECAKNSIGISSEVETIQIKHLVSQITLIKEQIAEIDKKIEEFSISNNSPILSIPGISHFSGTSILAELGDIGNYSKPSQIIKFAGVAPYHYESSQYNAQHTGITKKGSKYLRKTLYQIILPVINNNPVFKKYYRLKISQGKGHRCAQGHCIRKLLRIIYHLLETGQSFDPALLR

SEQ ID NO: 475453 - protein, 342 aa, unidentified
MKQYVGLDVSQRETSVCVVNETGHILFEGKAKSDPGALTALLRERAPHAERIGFETGAMASWLWHELRRVDLPVVCIDARHAHAALSVRMNKSDQNDARGLAELVRVGWYREVKVKSEESQKIRAILVARSRLVAIRRDIENQIRSLIKEYGLLFPRAIGKQFRNQVSELLGEDHQLLGVIAPLLSIHEHICDQQSKFDDEVRRLAKSDETTRRLMTVPGVGVVTALTFRHTIDDPSRFRSASTVGAYLGLTPRRNQSGETDTSGKISRWGDRLLRSYLFEAATVLLYRTKKWSSLKAWGMKLAKRIGVKKAKVAIARKIAVILHCLWVDGTSFDWGQAKPA

SEQ ID NO: 475454 - protein, 338 aa, unidentified
MPLYGGIDLHANNSVIVLLNEQDQVIYQRRLANHLPTILEQLVPYHTDIQGVVVESTYNWYWLVDGLMEADYRVHLANPAAIQQYSGLKHTDDHSDARWLAHLLRLGVLPEGYIYPKAERAVRDVLRKRSHLVRQHTSNVLSLQNIIVRHTGARLSVKQMQELSLAALTKLLPESDQALAVRSGLAVVHTLSQQIKTLEKTVTKHLQHTPAYEQWLTVDGIGSILAQTITLETGDLRRFPAVGNYASYCRCVQSTKVSNGKRKGQGNVKNGNKYLGWAYMEAAQFAIRYNPRVQRFYQRKQAKAHFMVARKAVAHKLSRACFYIMRDLVPFDANKAFG

SEQ ID NO: 475455 - protein, 403 aa, unidentified
MPDRFATGASATRPTSDRQLSRFHWDRLANSGVGVDGPRRHRLCQNEVVADLKQRGPSVEQISRIGMDTSKHFFQLHGVNAAEKVVLRKKLRRKDVVAFFEALAPTVIAIEACGASHHWARILWSFGHEVKLIAPQLVKPYVKRGKNDTADAEALCEAMSRPTMRFVPVKTAEQQAALMMVGLRDRLIRNRTQLSNAIRGYAAEFGFTAARGMVHIDPLLDRIQADESVPVLARELFAAQAEEYAQLQAQIAEVDAKLMAWHKTNECSRRLANIPGIGPIGATLLLMKTPAPEMFRSGRQFAAWIGLTPKDHSTAGKVRLGVITRAGDEALRSVLVVGATAVIQHVRRGGRGSPWIVGLLKRKPPKLAAVALANKMARIAWKLMVTGNSYAAKSAPAALMGAA

SEQ ID NO: 475456 - protein, 315 aa, unidentified
MTKQRPSVNVGVDVGKAKLDVYLLERDRMFSVPNEESAIATLVSRLSRYRLERIVLEATGRLEQPFVRAALAKGLPVVVVSPLKIRRFAGAVGQLAKTDAIDARLIAQFAATLKPIAHPTPDPKAQLIKDLVVRRRQLTSLRTMEKNRRQVMPEALKPSIDRIIETLDRELESLEQLIQDTVEQHAAWRHKRDLLTSMPGIGRSVASTLIGDLPELGSLSRRQIAALTGVAPFNRDSGTFRGKRRIRGGRAHSRTALFLSAMVATRYNPDIKRFYERLLQAGKHKKVALIACIRKIVTALNAMLRDNQPWQSSIA

SEQ ID NO: 475457 - protein, 338 aa, unidentified
MLYIGLDVHSRQSSLCILNAQGGKINQIQVNGPRSAVVERLRKLDEPFSVCYEASIGYGQLYESLRPIAAHVAVAHPGKLRLIYGDKRKNDRVDANKLAKLLLLDMVPRVHVPHIDVRAWRSLIVLRQRVLQQLVRAKNQIRGVLRENDLAGPKWLWSRKQLAWLESLELHPVAKLRLELAVEELKSVTAKIKRIEKELQNYADRQPAVKFLMTIPGVGIRTAETFVAWVDDITRFRRTRQLGAYFGLVPCQDQSANKNRLGHITRDGPPVMRKLICEAAWTAVKKCPAFKAYFERLMAGKPERKKIAIVAASHRLIRVMGAMMRSGTAYDANYRNNG

SEQ ID NO: 475458 - protein, 407 aa, unidentified
MPEQVVTTHVVGIDIGMESCTMSCLTRDKRQIIKSTPFANAVQGFDWLFERLEGLGVAPKQILVGLEATSRYGENLVQALLKRGYQVCLLHPAQMHAFAQQRGLRAKTDQLDAVTIARALLSGEARFGYVPNEQVATYRELMRLQHQLSDDVVRYKNEIHALLVVLFPEFTQVFVDPTRPTALAVLKRYPSAQAIAQTEVETLSTCLHELAPRHYGRPPAQELVRLAKASISSGVAVAARSSSLRILCDQLEHTQTNLEHLQCEIDQLLDQDPKAKGMLSVPEFGPTTVAVLRAELGDLTRITRIDQVVAYVGLDLQVKQSGKWKGQTKLSKHGSGRVRRILYLAALRSIHLETSPFGAYYQRLVARGMKKGMAVVAVMRKMLIVTVHLIQTEESYDPGKVAVQAGS

SEQ ID NO: 475459 - protein, 288 aa, unidentified
MIKNIKYFGIDISYLVFDVTDSNGNYYQFKNNASGFKKFTKLLDINSHCVMEATGYYHYQLAYHLLEFGIKVSVENPLSVKRFIQMKLSKIKTDKSDSKLICEYAQKVDLKLWKGNTKDEMECLQITRALSVYTKQSTMLKNKLHGEAVLGAPSKAVVRSLKRSLTQLKKEMKALEDKLLVLVKRAHQDLLTRLKTIPGIGPKTSIMLVVLTGGFDRFTSAAELCSYAGLTPVIRQSGSSVKGRPRISKIGNQKLRNLLFMCPFNACKYNKACRDLYERIVAKGKPKK

SEQ ID NO: 475460 - protein, 346 aa, unidentified
MNKITRIGLDIAKNIFVLHAVNEHGKLVKRQTLDRSKVLAFFAQTEPCLVGIESCASSQHWAREIAKLGHHVKLMNPQFVVPYRKSGKNDANDAEAICEAVGRPNMRFVPVKSVEQQAVCALHTSRQFLVVQRTALINHCRGLLTEFGIVMPVGADKVRRLLAERLHHEADTVPSLLHTLMQDHLRDLARVEERIEIIDKQLAQWAKHNQQVLTLQQMRGIGMITATAFASGVCDATLFKNGRQFAAWLGLVPRQYSSGGKNKLGSITKAGDAYLRTMLTQGARSLVFHSKDKEDNFSLWIQRLIARIGMNKTVIAVAAKQARVMWAMMTKNTHYQPEKICSPLSA

SEQ ID NO: 475461 - protein, 406 aa, unidentified
MNYLGIDVSKSNARYVLLDNDGEQTTKGFTLTNDQKSFTQIIERFKELKLTAETLLIGIEATGIWWENLYCFLTEQQFKVIVLNPHQTNKFREALRYKAKTDDIDACVIAGLLRSGKYAASYIPEETIQILREIVKLRHQLVTNRQNFERQAHALLGLLFPEYAKTAIKNPFTVASLAILKAYPTAKHLAEAKPKNIEKIVRSIVGNNFNIAEIKTLIETAQNSIYSGRAKDARGLNLNILLTHVETLHNSINQLDKRIDEILSPQNSDDAMSFPGANLLSIPGVGPKTLAAILSVVGSDGSAYPEGKNFIGYIGFFPQIYESGETRRDNIISKRGPSYIRRALYIAAVACLKHNDEFKALYDRKVSQGKTAKQALIHVAKKLAHLCLSMLKSGESYDPSRVFMPV

SEQ ID NO: 475462 - protein, 416 aa, unidentified
MKKHNNSGKKSEPTSKRTKSPGPVRRDTKEVLAELVAKLKEKLDSKKVAATSAGEKHQRGELRPNLDRLTVGVDLGEQWSHYCILGLEGETLAEGQLRTTQEDLATFFQGLNGARVVVEVGTHSAWVQEVISGCGHEVLVANPRLMDGSKRRKRKNDRIDANKLARLGRLDPESLYPIQHRSREVRQDLVMLRARDALVAARTEIINTTRGLVKSMGTRLPKCSSRSFAQKGEEAVAVEMREALLPLVRLAATLSADIKEYDQKIEELGREKYGHTALLRQVKGVGPITALAYVLTLENPQRFAKSRDVGPYLGLVPKQEDSGESQPQLGISKAGDTMVRKLLVGSAQYILGPFGPDTNLRRYGLRLCERGGKNAKKRAAVAVARKLAVLLHRLWVSGEVYEPLHYAMSAPIAAAA

SEQ ID NO: 475463 - protein, 476 aa, unidentified
MAGSKKAISNMALIPMLPHETLYVGVDVGKSRHVAGILSRTLLQRHERFEGCPTFVFEQSREGFRALVDRIREYVPLEQATVLLEHTGHYHKNLEQYLLEWDITVYRIHVQERPNGMTKTDKRDALSLANRLYTQLELGAQVEEKMQLVRRTAHPTQAAMQLRGFMQHRYELSHQRTRLRNKLTAICDELFPEFTQIFHDPNLGVALAFREKFPIPHDIASASLSALRETRVKYFPSEANLLRLQQLAEKTIGITNVDRLRGMKVEQELLIKELRLVQEHLERLDTEIADIVRASREGQILLSMPPIGPVQAATIIATIGHIDNFEKASELKSYFGWAPTRHQTGVTFDRTKLSHRGVRPVKQMLFLMAARATTLDGEWARIYHRLLPRMATYDERVKEYRGKKKVLGRIAGQMVSMIFALLKTDQETLSKVPPGEDPPPPMLYDPEVHRKHQEGSYRSLKPGTQPRKILHLPSKS

SEQ ID NO: 475464 - protein, 416 aa, unidentified
MDVIVSRCAGLDVHKNTVMACVRAPGPDGGRTSTVRRFRTFTDSLRQLRAWLVAEGVTQVAMEATGVYWRPVWHVLEAVPEFELLLANAHAVKNMPGRKTDVADAEWLALLCECGLLRASFVPPPVIAELRDLTRYRKKLIEERSRETQRVQKLLEDAGIKLDSVVSDILGVSARRMLEALIAGVRDVEALAELARTRMRPKIPQLRRALEGRFGAHHALMLRMHLDHIDQLSAAIERLDVEVDRVIRPFSAQLQRLITIPGVGRRTAEVIIAEVGVDMRRFATAGHLASWAGMCPGNHESGGKRRSGRARKGNRALRAALCEAAWSAARTNSGYLPAQYRHLLRTFGKKGQTRAVFAVGHSILVIAWHLLANDCDYADLGSEHFTRNADPEARTRYLVRQLEALGHKVSVEPAAA

SEQ ID NO: 475465 - protein, 311 aa, unidentified
MDDVFIGIDVSKEYCDVAVIPDGTRKRFTNDEEGQEAVAAFMLPLKPGRIVIEATGGYEMGVVRVLADNLLPIVAVNPRQVRDFAKATGRLAKTDTIDADVLAQFAKAIQPDIRPLPEKEAQVFRALVARRRQLVQMLTMEKSRLEKSPPAGSKDIRNHIYYLTEALKKIDRDISRTIRKSPLWKEKETILTSTPGIGPVISCTLIAALPELGMLNRKEIAALVGVAPFNRDSGKHRGKRTIWGGRSHVRAVLYMGTLSAIRFNPVIRAFYKRLVDAGKVKKLAVTACMRKLLTILNTMMKNKATWAEARS

SEQ ID NO: 475466 - protein, 386 aa, unidentified
MHDGTNLPVPERTGIPGDCATLFVSLELSRSTWVATSLAPGSKKMSKHTLVGGNGRELLDLLARLKTRAEQRIAASVKVVAIHEVGLDGFWVHRLLDANGVESHVVDPASVAVPRRHRRAKTDAIDGETLLRTLMAWRRGEPRVCAMTVPPSPREEDCRRISSERAVLLRERIRHTNRIRDLLFGQGIANYNPLHKNRRECLEELRTGDGHSVPARLKAEILREIDRLELVLRQISEVEAERDAMLQPAEASSPAALLMQLKGIGAEFAAVLYLEGLFRHFENRRQLAAYAGLAPSPWKSGSIDHEQGISKAGNPRLRTTMIELAWMWVRYQPDSALSCWFRQRVGSERGRTRRISIVALARKLLIALSRYVTHGEIPAGAVAKPV

SEQ ID NO: 475467 - protein, 468 aa, unidentified
MFRKVEAMDEQRESEGREVKSIEGLPLVRGDVGAIDIGSEEHWACAPALSGEGREVSRFGGTTGELVEMAGWFKARGVKSVAIESTGVYWIAPQEVLEAEGLEVLLVDTRQLKRVPGRDKKSDPYDCQWNQRLHSCGLLRGAYRPAETICMLRTLVRDKSNLVAERSDWVRRMQKSLDQMNVRVHRAVSDVDGVTGLAIVRAIVKGEREAKKLAELRDPRCKKSEEEIAEQLRGHWREDHLFSLKQALKMYEAIEERIGAYEEEIRRKLKEMTPPERTEQKPPALKNRYKAKAIKSRGQEPKREAFYQMSGVDGTQIDGVGVETIEVVLSEYGSDLSRFPSENEWISHTTLAPHVPTSGGKPVKKKKKKHSASTRTAEALRMAAVATRNSDSALGAEYRALARRLSKDVAVFAMARKIGKLIYRLLRWGQAYVDEGAEAYEKRYEERQFKALAAKAKKRGYQLVPATA

SEQ ID NO: 475468 - protein, 356 aa, unidentified
MSIVAERYKFVIGVDTHAATHSLALVTAATGAHLDEAVFPNTVSGWDRAWNWIARRIDGQSALVVIEGIGSYGAGLAERVSSAGLPVAEPPAIPAAQRRGVGKTDALDAVRIARSVLAVDTARLRQPRATGRRAALRILVVAREQMVAERTRVINALTALLRTVNLGLDTRKALSHRQFKVIAQWRERKEDAVLSTCRHEAIRLAKRIVALDAELADNRKGLDVLVEDLAPQLCELPGIGSVVAASVLTAWSHPGRVRSESAFAALAGTCPIPASSGNTLRHRLNRGGDRRLNRALTTVVIVRMRTHAPTRAYVARRRAEGRTTKEIMRSLKRYVTRQLYRTLAAAHPVPTPLDTI

SEQ ID NO: 475469 - protein, 369 aa, unidentified
MNATQFYVGLDVHKDSIAIAYAEAASRKEAPRFLGTTRYSVISLSKALTSLAPPEALDLCYEAGPCGFGLVRALHERGFACDVVAPSRVARHPADRIKTDRRDAMLLARLHRAGELTAIQIPEPADEAIRDLVRTRSDMVDEQRRARQRLRSFLLRQGHAYTGRRWGPTHERFLSKIQFSDPAHHTVFTEYRLAVRFAAERVARIEEALRQQAATWRWRPVMDALMTLRGISFLAALTLVAEIGDLHRFPHPSDLMSFLGLVPSEHSSGNTKQRGKLTKTGNTHARRILIEAAWNYRFPARIGESLQPRLEGQPQTIIDLAWKAQLRLCHRFRRLRARGLHQNKVCAAIARELAGFVWDIGRRVAPRGN

SEQ ID NO: 475470 - protein, 387 aa, unidentified
MAQVNDLSRSLTAFDPISTLVVVVEMSKASWLVSGVVPGVERQPLKKLEPDATALLRLIERWRNEAVRAGRPISRVALAYEAGRDGFWLARWLIARGIEAHVIHSASVAVSRERKRAKTDRLDAAMLMRVFLGWLRGERGHCGMVAIPTIEEEDARRPSRERESLVDERSRITNRMKSALARLGIRGFKPHLRKAPERLAGLRTAEGTGLPANIIEEFRRDMARLALVREQISSIEKTRAERLERAPDTGPHAMVRLLARVIGIGIETADMLVREILSRKLRDRRAVARYAGLTGSPDESGLKRREKGLAKAGNARVRRGLIQLAWRFLMFQKDSALAQWYRTRTEGPSGARKTTMIVALARKLLIALWRLVTTGEVPDGVELRPAA

SEQ ID NO: 475471 - protein, 373 aa, unidentified
MNTIYIGVDFHARQQTICYLTTETGELVTAALKHEPKTAVRTFYEQFSGQVIVGLEASGYSPWFERLLEELGHQVWLGDATEIRRRARWRQKNDRRDAELILDLMLHDEFPRLHRPSLQSREVMRMLRYRQKLIKMRTMSKNSLQSLALQSGIARRGRLFTREGKAELDAAVMSPAMEWQRAHWWQLLEPLNQQVLETMTWLKAASQNDVSIARLRTHPGIGLLTSLCLVHTLQPVARFGNTRKVAAYAGFDPLERSSAERKHFLGISKAGSRVLRYLLVEAANTAVRKDEDLKRFYQRLAQRRGRPKAKVAAARKLLIRAYIMMRDEIDYAEFRRRAVAARLARLRQGPQIPAALIGQPASTERQEPLPRRK

SEQ ID NO: 475472 - protein, 460 aa, unidentified
MCLAGLAVIDAPWGVCAGCVFFPSASTGIGEDCGGSCGRTGEEGVTNDKRWYAGVDWASESHHVFLTDDDGRKIGERVFRHGGEGLAEMAAWLMATSGAAEGPQIQIAIEVPHGPVVETLIEREFKVHAINPKQMDRFRDRFTLAGAKDDSRDAEVMASALRTDPRCFRLLAVADPIVIELREWSRIADDLAAERNRLTNRMREQLWRYFPAMLELEHDLGAEWFLDLWETVPTPDKAARIRRTTIAKLLKRNRIRRFDVAHVLAVLRKLPVKVAAGATEAASAHIATLVVRIRLVNRQLKQAHHQLDTLTARLIPTEEAGPGQRKQHDVEILASLPGVGRVVLATLLAEAFDALQRHDYAALRSLTGVAPVTKRSGKSCIVVRRQACHDRLANAMYHWARVAIQHDSRSRSKYSALRSRGHSHGRALRSVADRLLNVACAMLKSRTLFNPSLAAPKTTC

SEQ ID NO: 475473 - protein, 338 aa, unidentified
MKAVARIGLDIAKNTFQVHGVNAHGAVVMRKQLSRGEVLRFFANVPACVVGIEACAGSHYWARELKRLGHDARLMAGQFVAAYRKSGKNDANDAEAICEAVGRPNMRFVPIKNEEAQAVLTVHRARQLLVSERTALANQIRGLLGEFGIVIATGLARLRRRLAQIGAGQQALPVLARETVGELHDRLRLLDACISQYDRKIEAIARASEPARRLMRVEGIGPVTSTALVASVGDARAFTNGRQFAAWLGLTPSQHSSGGRSHLGHISKRGNVDLRTLLIHGARSVLQFTSKKTDRKSVWVEALKARSGSNVAAVALAAKQARIIWALLARGTEYQPAT

SEQ ID NO: 475474 - protein, 332 aa, unidentified
MERNYIGVDLHKAFLQACAVSADGVRLWEGRFPRTTDGIAAFAARGVRGAHLAVEATGPTWKFVDAMQALEAAVCVVDPRKTKLKAGFAAKTDKLDARRLADALRRDSVVSIYIPPLAIRDLRELCRGRHHLVRVRAKLVQAIRALLLRQDAGEPPVVCLYSPRAVRWLQEQSLPGAAGESLRRLTAALIAIDTQARAAQAAVMACAQGDPIAQALTTLVGIGPVLAATLRAEIGTIERFARWPQLASYAGLVTRVEASAGRARHGRITREGSPWLRWALVEAAIHAMHRPDRTGRWARQLAMRISICPARVALARVRCRDVFRAWHAALSV

SEQ ID NO: 475475 - protein, 341 aa, unidentified
MKLFVGLDVSLAKTAVCVLTEHGKIIEEVEVISEPEPLISLLEGLEGTVEAVGLEAGPLSQWLHRAMKEIGLPAVLMETRQVKGALKAMPIKTDRRDAEGIARLLHLGWFRPVHCKSVSAQEVRAVLAARKAIQGNMIALEMSLRGLLRNFGLKVGAISRGRFEARIWELVEGNTMLEAAAAPMLRVRAALRQELAGLEKLVRQKAAEDPVCLRLMTMPGVGAVVALTFRSAVDDPSRFRSSKNVGPWVGLTPSRSQSGERDVSGGITKAGDVNLRRALCQAATVMLNRGRGNALRTWASHVAKRRGRKRAMVALARRIAVVLHRMWIDGSTFRMEVAPTN

SEQ ID NO: 475476 - protein, 310 aa, unidentified
MSENRSWVGIDVCQAWLDIHVLAVGAWERQPNHHCGITRLITQLRELPEPFVVVEATGGLERLLVSALQQAAIPVAVVNPRQVKALAVVLGGAKTDVLDAAVLAQFGQIKQPRPQAPVSAAAQSLSDLVRRRHQLVAMQVMEKNRLSRAPIALVSRIQAHIDQMQQWIEALNEEIQQLTQQAAWQRRRQILCSFKGIGPVTAALCLAELPELGALGAKQIARLVGVAPINHDSGKHRGRRVIQGGRTAVRCGLYMATLVATRHNPVIAAFYHRLLEHGKPKKVALVACMRKLLVILNAMLHHDQLWQPQT

SEQ ID NO: 475477 - protein, 384 aa, unidentified
MNKHSILFIGLDTHKEFNEVAYIEEHRGAQPVHLGRVSSSKVAVQKLVRQFESKYPGATLHFVYEAGPCGYWIYRLITSLGHCCYVVAPSLIPKKPGEKIKTDKRDALKLAKLLKSEDLTPIYVPEPEDEAVRDLSRAREIAMKDLKDAKYQLKALLLRNNINYKGTANWSQKHLRWLTELVLPHPAQHIVLQEFLQTITERISRLERLDNELTHHVHQWRYYPVVKAIQAMRGVRLLVATGVVAELGDLSRFDHPRKLMSYLGLVPSEHSSGGKRHIGAITKCGNGRARRLLVEGAHTYRYAANISTDMQKRQEGLPKDIIDIAWKAQLRLCKRYKKMIAKGKHYNLVVTAIAREMIAYIWAIAKEVVLTPVNAKLRLARVPA

SEQ ID NO: 475478 - protein, 352 aa, unidentified
MEMVSGLDLHRSQITFRTVDLRTGEVQRGKIHPGARDRFREWLGRVEPGTDAHFALEGTTGWRFVVEEIERRGFTAHLADPAELSERRGPKRRAKTDHADCELMVNLLLEGRLPESWIPPAHILELRALVRLRKTLVDQRIEWQQRLQAQLFHQGVVPGLHLCNPEDRRRLAEMQMSPAGRQTMGTGLIMLDDFDAQLNPLSAQLVALAKSQPGCRALEHELFGVGWLTAVAIVAELGDCRRFTSADQAVRSSGLDITVYESNGKRPGGHLARQGPQVLRWALFEAAQCAARKSSPDHAYYLKVRDRIDHNRACLSVARKICRRACHILKDLGDAAMAPPKAPSARRDPQAA

SEQ ID NO: 475479 - protein, 342 aa, unidentified
MYYIGLDVPKKTISYCVKDASGRVHQEGKLGATRRELDIWMRTLPQPWTVAMEATIFTGWIYDHLHPHATQIKVAHPLMLRAIAAAKKKNDRVDASKIADCLRCDFLPECYMAPTEIRDRRRTLRYRYLLVRQMVQTKNRISGLLMETGVSHNKQRLHKVGYFRELLASNEEVSESIRPLLRLSRDTIARLQKTERALVSSLQRDPLLTERIKHLRTVPGVGPITALTWALEMGEISRFRSIRQAISYCGLCGDERSSAEKSLRTPISKQRNKNIQFVLIEAAKLAPRQDHDLALLYEREKQKGNANRATLAVARKMVAYLLAVDRGQRDFVPAEDCRGAAA

SEQ ID NO: 475480 - protein, 391 aa, unidentified
MVCVGIDVAKDKHDCCILDSDGMVRADCFTIPNNMDGFKQLLQTIRNCTKKSDKIKVGLEATGHYSYNILGFLLDNDLAVYVMNPLHTNLYRKSLSLRKTKTDRVDARTIATMLLSDVDLKSYTDTAYHNEELKSLTRYRFDKVRERAKLKQSVSRLVTILFPELEKLVPSLHIASVYALLSEYPGAKQISEIHLTKLTNLLATASKGRYGKDKAIQIRDAARTSIGSVMPAKFLELKHTIKLIRELTSEIDEIEVSIQKIMDELNPPILSIPGVGIQSAAMILAEIGDFSNFESPDKILAYAGCSPSTYQSGKLTNCYAHMEKRGSRYLRYALYNATKYVCHWNPVFAEYLAKKRAEGKHYNVALSHATKKLVRLIYALQKSGKAYLVAA

SEQ ID NO: 475481 - protein, 412 aa, unidentified
MKMAGIDVHKKVLMVVVVDASAPEEKPARRRFVTMPSELHRLLMWLREQGVEEAVMESTAQYWRSVWLELEPHMRLHLAQAFSNRAPRGRKHDFKDAERLVRRLIANELILSFVPNGEQRIWRSMTRMKLQLTRDRVRLQNQIECLLEEMRIKLSIVVSNLLGASGLRILHALAEGETDPKKLAQLGDERLQCTEEQLIDALTGRVQPVHGEMLALQLQRLQVIDQQMARLNRMIAEAMRPHQEAVIRLAEVPGLGVDSAQQIIAEVGAQASTFPSAAELTSWVGTCPGKEESAEQNHSSRSAKGNKYLRRVLNQAAHAAVAKKGSHFQVVFRRLLPRLGYQSAIWAVAHRLCRVVWKILHEGVRFIEQGHEVGPREKKKRAQMLARALRKLGYEVTITPINQLAVSAAVQV

SEQ ID NO: 475482 - protein, 430 aa, unidentified
MKSNTQNAKIEAITEKTLVLGIDVGSEMHYARAFDYRGIEYSKKPFKFSNTEAGFVTFKEWILDLKERHEKDKVVPGMEPTGHYWFNLGKFLQDNEMKPVLVNPHHVKKSKELDDNNPTKNDRKDPKVIAGLVREGRYMIPYLPDGVYADLRTASNIRFQLQAELTRIQNRISRWFNIYFPEYKTVYGKPDAKSGILILKEAPLPEDILTLGIDGVNQIWRDAKLRAVGKARAKTLIEAAEHSVGSKEGAVSARMEIRMLLEDYESRNTRLQEVMVLIEELIRKIPMAEKLLEIKGVGIRTVSGFLAEVGDISRFNNPKELQKLAGLALVENSLGKHKGETTISRRGRKRLRYLLFEVAMSLVAKNPEFRELHNYYTTRRLNPLKKMQSLMAIAAKLIRVFYAMLTKGVDYDPKKMVSDIKRPAVYLQAA

SEQ ID NO: 475483 - protein, 429 aa, unidentified
MKYNTQNAKIASITEKTLIVGIDVGSETHYARAFDWRNYEYSKKPIAFNNDEAGFAAFKAWMEDMADKHGKEVVIPGMEPTGHYWLNLGAYLQGQGMKPVHVNPHHVKKSKELDDNNPNKNDRKDPKTIAGLVNEGRFSYPYIPTGIYAEIRNLSNLRIQTQEELTRIKNRIARWFSIYFPEIKDVYKNPDAVSGMMVIKKAPLPCDIKELGVDGVNQVWRNAKLKGAGLKRARTLVSAGEHSIGSTEAPGSARIEIRNLLNDYEVYKNRMDDLMREIEAKLSEIPYIDKLMEINGIGLKTVSCFIAEVGDIRRFDNPKQLQKLAGYAIVADSSGKHNGESRISHRGRKRLRYALYEAAISVIGKNKEFREIHDYYRTRKQNPLKKMQSVIAIACKLIRIFYTILTKGVDYDGQKMLSDIVRPETIMAA

SEQ ID NO: 475484 - protein, 344 aa, unidentified
MIYYAGIDVSLRTVNICVINDDGKLVAETKLASDVQDIIAYLDDLEFDVGSIGLEAGTLTQYLTYGLQAAGFDVVVMEARQVKGALSAMRNKTDKHDARGIAQILRSGWYSRVHVKSMASHHIRMLLSSRKAVLSKCVDLENEVRGLFKIFGIKLPPKLGHGAFDPAVRDIIEADETLSHALLPLLDARLVLYHTFRELDNRTRKMAHADPVCVRLMSVPGVGFITALTFKAGVDDPHRFKRSRTVGAYFGLTARRFQSGEMDIDGHISKCGDANVRGALYTAANALLTRSSRWSPLKAWGMKLAKTRGHRRAVIAVARKLAVILHRVWIDDTQFRWGTEGARS

SEQ ID NO: 475485 - protein, 349 aa, unidentified
MGEVSTIGVDIAKSVFQIHGVDADGAVVIRKRVGRAKVVEFFAGLPPCLVGMEACATAHQWARELKKFGHDTRLMPPTYVKAYVKRGKNDATDAAAICEAVTRPSMRFVPIKSVEQQSALMLHRTRDLLIRQRTQLINALRAHLAELGLVAAKGHEGLHQLVTAVAESSDERLPGNARFACQAIVAQLSAVQTQINGIDTRITQAHRANADSKRLDAIPGFGVILSTAVVATMTDPKAFKTGREFAAWIGLVPRQNSTGGKERLGSISKQGDRYLRRLLVLGAISIVGTARTRPDKYPWVTELLGRRPAKVVAVALANKMARTAWAVLARGETYRAPTRSSSAAIAAAA

SEQ ID NO: 475486 - protein, 370 aa, unidentified
MTKRSMFVGLDVHKESIDVSLAEEGRAGEVRHYGVIPGDLEALAKVVRAVQAPERQLRFVYEAGPCGFGIHRYLTTQGEDCVVVNPSSMPKRSGDRIKTDRRDSQALARLHRAGELTAIYIPTADDEALRDLVRAREDAVGLSTQAKHRLKAFLLRQGRRYPGRAGWTQPYRRWLADLSFPLAPQHIALQEYRDTIDETERRVERLTDQLRQLTPAWRWAPVVDAVQALRGVSFVTAVGLVAEIGDIRRFDHPRQLMAFLGLVPSEYSSGPSVRRGGITKAGNPHARRLLAEAAWAYQGVPRLGRQMLYRQEALPKKICDIAWKAQLRLTSRFRRLVARGKAKPKVATAIARELTGFIWAIAREVPAPPA

SEQ ID NO: 475487 - protein, 367 aa, unidentified
MKKLTTTMMQRTLNQQDGHLTIGLDLGDRSSFYCVLDETGDVLLEQRVSTTPKAIQEIFGAMPRCRIALETGTHSPWVSRLLSELGHEPIVAHASSVRLIGESRRKDDRIDARTLARLVRIDPELLRPVKHRSAEAQADLTVIRARAALVRTRTMLVNATRGLTKSYGERLRGCNARGMKPKAAQDLSPELKSALEPMMREIESVSERICEYDHMLESMARNRYPEAERLKQIKGVGTLIALTYMLTLEDPHRFHKSRDAACYVGLQPGRRNSGQSEPQMHISKEGDPYLRTLLVQAAHHVLGPWGVDSELRRWGMRLAEHGGKRGKKRAVIAVARKLAVLLHRLWVSGDVYVPLRPDGRPTLPAVA

SEQ ID NO: 475488 - protein, 340 aa, unidentified
MEKRFIGIDLHRNRFTCCIRLENERTYVTDWELEDLGKFVKKLRPNDEIAVEITGNTRLFFDAVVPHVARVVVVNTSQFKVIRQSVKKTDPHDARALALYLSKNMLPEVRMKDKEHGQLASLTQTRDTLVKLRTALKNKINNILSARGLNLAKEALGSEKKLNEVLELPFDEIVRIELRVIVEQIRSLNKSIAELEKTIGEAGSKLEGHKGLSSIKGIGKITGAILLSVIGDVNDFADEGRLASYFGIVPRVSNSNETEHSGRIHKRGTKLGRTALVQSALIAANYSPYLKRFYEQVKARRGAGKAIIALARKFLGIIYRTLKNKWVFEDFPNFVLAEAS

SEQ ID NO: 475489 - protein, 423 aa, unidentified
MSKFFYSPVVGIDVSADFSYVAILAPNGDVYRKSFKIKHDAKGFDHLVNEIKKVEKEFNMKTGIFMESTGVYHLSLFHYLNKNFDNTFVINPLITKCNKNMNIRKVKNDKKDALSIATIGKFQNIKLSQSLDLDIFLLKNLVREYYKLTDSCSTFKKKLSADLRVIFPNYNTIFSKPTSNTSIEILRNYQTPKSILDAPKEDIIKILIKNSRRSLYWCENIYSKLINAAKEANIIGVPLNGLAVKISSSLTLIKTFESERNTLLSEINTLLESSEFPESIKENIELIDSIPGIGRLTAITLIAEIGDINDFIKHKHLVAFFGVDSSVNQSGKFQGDQNRISKRGTRIGRRALYAVALASIRRNRSGNLTNAVLLDYYQNNLKGKKPKIALVAIMRKIINYIFAVLRNQTPLSKEILKYINKCF

SEQ ID NO: 475490 - protein, 311 aa, unidentified
MTLPHRYVGCDVSKHWLDIFDPAEDGPRRIANTPEATAALADRLAATQGFLVFEATGTYDSALRAALHQAGVPNARLNPTLVRRYAQARGRKAKTDALDAAVLADLGERLRPSPDPVPCPHRARLALLATRRDQLVAMRAMEKTRIAEASDPLVRQDMAAAIAYLDDAISRLEAEIQRHIQSHQSLRRQARLLASAPGIGPVAAQILLALMPEIGHTRPKRLAALAGLAPFNHDSGQLKGKRCISGGRARVRRALYMAALVAARTCPDLKAFADRITQSAKARKVALIAVARKLLVRLNAMLRDQAPYRAC

SEQ ID NO: 475491 - protein, 390 aa, unidentified
MILVGIDVAKDKHDCCIINSDGNFPEEVFSILNNREGYETLYKRICSLAVDFTKVKVGLESTGHYSSNLLAFLLDKHLTAYVINPLRVNLFHKGQSLRRTKTDKIDSRNIAHLLMTDSSLKPYSLSSYHMEELKSLTRYRGTKVRERTKLKTSIARLVTILFPELEQLVSSIHIHSIYAMLEKFPGSAYIAATHLIRLTALLLKASRGRFGRETAIRIRDTARQSIGAVSPAKSMELQHTIAHLRVYDQEIGEIESEIEKIMDDVNSPITSVPGIGMQMGAVILPEIGSFRRFDSPDKILAYAGMSPSMYQSGKLTGSYSRMEKRGSRYLRYALFNVTRYVCHYDPGFTAYLSKKRKEGKHYYVAISHAVKRLVRVLYAMEISGNRYKTA

SEQ ID NO: 475492 - protein, 433 aa, unidentified
MKVLYEHVAGIDVHKDMIKVAIRSPGDKPWTRTTEVLEFRTFYGVLQEVARLLRRRGVTHVVMEASGIYTEPVYHALCEQDFDQVMVVNPAHVRALKGHKTDARDCARMAELLECGLLRGSFVPSAEQKEVRDLTRYRMKTVQARTSEIQRLGKALESAGIKLGSVASDITGDSATAMIKALIDGERRGAVLADLARGRMRTAGKLADLSMALSGRFTGHHALLCGLHQDRIAVLDEAVAGLDERIAARAARWAREQDLLTSVPGFGEVVSQAWLAEIGPAPHRWFASGGKLASWVTLCPGNNISARKRKHGRTGDAGAYIKPMLIQAAWSAIRTRGRLQARYSRLVRRFGGEKNPAAKKKAITAIAHTLLKIAYQVLQSGQPYTDLGADFYTRRQSPQHRQAYLEQQLQKLHPGRTITIIIGPPEAALPPAA

SEQ ID NO: 475493 - protein, 422 aa, unidentified
MNKICPVVGVDVAKEFCYYCGLAPTGKVYLDSFKAFNDEKGILLALKKIEEMEKAFNRKPVIVLESTGHYSNRLVHFFSKKEFEVYLVNPLQSHSIKNSTIRKVKTDKMDAEELARLFFIKDLHRFKLSNEAIENLKILTRTASHLSEQRVAIVNQLVAAVEQVMPGYTKIFKNIASVTSLALLSHYSCPENFLNASKEDLVTLIKSTSRNSKEYAEKKYLLILKAAKEAMNIGVPLEAYYETIKIYTGNLLHINEQISRIDQKIKQLAIIIPELELLSSIPGIGPKLAPIILSEIGDISRFKNAKQLVAYCGIDPSVRQSGKFCATQNKFTKRGSPYIRKALYIASTVNIRKDKQGNLVNPVIHKYYQAKVETKSRKQALGAVMNKLVRIIFSCLKNNSSFKLITPEEQVAKFRSNFEVAA

SEQ ID NO: 475494 - protein, 362 aa, unidentified
MDINLKESRKKSMVGKTAFVGIDVHAKTYKVSVVVDGEVFKGWTCPAVSKVLIESLKRVCDGAESIKVVYEAGFAGFVLYRDLERAGFWTIVVNPSSIEVAANDRVKTDKKDAKKLALHLSQGRLKGIKIPSESEELGRQAHRARSQLVSARKRVMNQIRARLRLFGLLGCKDQAVLRESKVNECLENCPEELKVVIEAELCVWRTLNEQIVNLNAEMKKQSKAPTALDELYQSIPGIGPIGSRILSSELGDMSQFKNERALASFVGLTPTEQSSGESTRKGHISRQGSSRLRGMLVEAAWTAIQRDPILRQYYSQLSVRTGAKRAIVAVARKLLLRARALAKTGEVYRLPVIQSEQLGVAA

SEQ ID NO: 475495 - protein, 355 aa, unidentified
MTSTKYIGMDVHKESISIAVMNSAGKVVMECVIETKASVVLQFFNGLSGDLHVTFEEGTAAAWLYDLLKPHVARLLVCNPRRNALLKVGNKSDRIDARKLAELLRGNQLHPVYHGEHGLRALKELVRSYLTISKDLARVMTRVKALYRSWGIPCSGTQVYSRLYRVSWLSKITEPGVRLRAAFYFQQLDALRQLRQEVRQELLAESKKHQAWKQLCQIPSIGPIRASVVLGILQTPHRFRTKRQLWSISGFAIETRSSADHRQVKGQLRKVKKRVSIRGLNQNHNHELKNLFKGAAVVAATKPGPFQQFYAALLAKGMRPEMARLTLARKIATIVLIVWKRGVSFDPQYLKPQTV

SEQ ID NO: 475496 - protein, 411 aa, unidentified
MQVIYERCCGLDVHKRTITACGLKWLGSDWQKEIRQFGTMTKDLLALSDWLMREGCTHVAMESTGVYWKPVYNILEGQLELLVVNAQHLKAVPGRKTDVRDAEWIAELLAHGLLRGSFVPPPSVRELRDLTRYRTSLVRDRARTINRLQKVLEAANIKLASVVSDIDGVSARLMLEALVAGERDTEQLARLAKGRLKEKHAQLVEALSCRLQPHQSFLIAEHLAQIDYLEGAIERLSGEIEERLRPFEPEIGWLDTIPGVNRRTAEVLWAETGGDMSRFASARHLASWAGMCPGNNESAGKRRTGRTRKGSPWLRHCLVEAAHGAAHTKNKYLSSQYHRLAARRGKKKAQVAVGHSILVIAYHLLTRKQAYSDLGANYFDERDRQAVTKRCLNRLQKLGYQVTLEKLPMAA

SEQ ID NO: 475497 - protein, 406 aa, unidentified
MELRAIYKRVIGLDIHQGQITACAMTEQESGSIQVEHRQFGTFKRDRRALAEWAQSITPDEVVMESTGIYWKSPYAALEHVGIYAKVVNACHVKNVPGRKTDIGDAQWLAMLSRAGLLRGSFVPPEKMRQLRLVSRQRQKLVGTLASEKNRLHKVLTDGGIRLGVVVSDVHGQSARAMVKSLIAGKQPHEVLQFASKRLKASREEIFDALQGDLSDSHTFVLAELMQHIEELESRIVRFDQYLLASLDDEYNVLQLLLTIPGIDRIGAAMLLVEIGTDMAVFGSADRLASWVGLCPGNNESAGKRKSGRTRKGNPYVRRLLCECAHAASRTACVFQSKYTSLAIRRGHKRAIVALAHKLLRTCYFMISRGEHYRDSTVDYEAMAVKRNAPRWIKALIKFGYMPQRA

SEQ ID NO: 475498 - protein, 366 aa, unidentified
MEKSSTAFVGMDVHKDSIDVGIADATEARHYGRVGGDAASVDRVVRKLRSAHRHLVFVYEAGPCGFWLYRRLKARGLQCMVVSPSKTPRNAADRVKTDRRDSLKLARLARAGELEPIYVPDAKDEAVRDLVRAREDAVCMQRQARQRLAALLLRNEIRYSGKTAWTQAHRRWIAHLKLPNPAQQIAFEEYVQAVHEAGERLERLTKAIGAELEHWRWRPVVEALQALRGVSAIHAVRIVAELGDLSRFESPRGLMGYLGLIPSEDSSGPRRRQGSITKAGNSSARRALVEAAHAYAHPARVSWLIARRHTGLPKSVCDIAWKAQLRLCTRFRRLRARGVLKNKVVVAVARELSGFVWAIAREVKPE

SEQ ID NO: 475499 - protein, 352 aa, unidentified
MRKKCSTVSFKSQVIHCGIDVHKKSWKVCTRHCGMQLDNFSMDPDPQKLAEYLKRNYPEAEYRSVYEAGFSGFEAHRTLCKLGVNNIVINPADVPTSGRERNYKNDSIDSRKLARELENGSLEGIYIPEPENLVLRNLTRRKEQLTGNITRTKKRIRSHLFFLGLKFRSWSGSSLKIMESDAEKRFDHALSSDLRELRFLREERLRVIRCEHACLKHLKREEIQKNLESIPGIGFDTAVVLQAELWDMKRFKGKDQINSYVGLAPHLVGSGEHEEVKSSGNRKKKQLHYRLIESAWRAVRFNREYGAKYGAMIGKGICPQKAISIIAKKLLLSIRAVWLQNREYQVLLPKTK

SEQ ID NO: 475500 - protein, 392 aa, unidentified
MIYVGIDVAKDKHDCFAMNSDGEILIEKLTITNNLDGFETLYNSLMNFSDSLDNIKVGLEATGHYSNNILNFLTEKGFNIYLINPLQTNLYVKGQSLRKTKTDKLDAHVIATMLVSENLKPYIPVSYHISELKSLTRHRFRLVKENSKFKTSLVRLVDIVFPELPKIVSSVAQKSCLALLYELPSAKDIAESNLTHLTHLLSDNSNKKFDREKALQIRDLARKSIGLNSNSVSFELKQTISIIQFIQEQLDDVEKRIKEILKEINSPILTIPGISFKTAGSILAEIGDISRFDSPAKLLAFAGLEPSMYQSGKFFSTHSVMVKRGSKYLRFALMTAARMVCLNDSTFNAFKDRKMTEGKHYMVAMGHVAKKLVRVIYYLLKTNNVYQASKVA

SEQ ID NO: 475501 - protein, 315 aa, unidentified
MAMPVSAIKPIVGVDVAKSELVIYQAELDLLETLPNNKPAIKKWLKALPAPVDVAIESTNIYHLEFADLAHEAGCTIYMVGGYELSHYRKGVKVRAKTDALDAKLLARYLKNEYEELHPWIPPSPLYRCLLSLFRRRAALVQARVGLVQSWTNEPLLKVAFAEQVASMQRLEGLVEKMINDRLKEAGLLAQLKRCMKVEGIGFLTGARLIAAFQRGDFRNADAFIAFLGMDLRVSQSGQKDGRRSLTKRGDPEARRLLHNAAMSASRTAAWKGFYQEQRAKGFSTTQALVILARKLARIVFALLKGQGEYQPKAG

SEQ ID NO: 475502 - protein, 339 aa, unidentified
MKCRTIGIDLAKSVFQACGVNQHLKPVFNQRLARRDFYAFMAEQPPTQVVMEACYSSHYWGRELTQLGHTVCLIPAQHVTPFVRGNKNDRNDALAIVEASQRPNIRFVPIKSEAQQEVMALHRIRERLIKNKTALTNQAHGLLSDFGIIFSQGERCFSVMAHIVAASSHVSENIKSLVAMLHEEFLGLKAKLKVIEAKLKQNLTQFPQADILLSVPGIGYIIASALIACIDKGQAFKSAKDFAVWLGITPRQYSSGSHSYMGKISKRGHRYLRKQLIHGARAVLNRYKNENDALKVWGEAVAHRRGFNKAVVAIAHKLARIVWHLLQKDVMYQPQHIKA

SEQ ID NO: 475503 - protein, 388 aa, unidentified
MQVIGDRPEAASAIRTNLGAIFVSLELSQSTWLITSLSPGSGEKMSKHVVHGGDIAGLLERFARLQEKARARTGRNFPIIVIHEAGLDGFWIDRVLKNEGIESHVVDPASVATSRRRRRAKTDKIDGEALVRTLLAYKRGEPRVCAMVKAPTPEEEDRRRLCRERKVLITERVKHVNRLKGLLFSQGVCGYEPLRRNRRRRLDELRTGDGRPLPKHLKAQISRELDRLELLLEQIKVVETERDALLAAQQIAAPTSAAMLLAIKGIGPDFAAILWSEGLFRHFDNRRQIASYAGLAPTPWKSGSIDREQGVSKAGNPRLRTTLIQLAWLWLRHQPQSALALWFEERVVRNGGRLKKVTIVALARKLLVALWKYVTAGVVIEGAVMKVA

SEQ ID NO: 475504 - protein, 406 aa, unidentified
MAIIIGVDPHKASHTAVAIDDKERPLGELRVRSSADQVQRLLSWAAKWPKRTWAVEGAGGLGYLLAQQLVSAGETVLDVQPKLGSRVRLLATGNVNKNDPNDARSVAIAAPRSKDLRPVAAEDHAAVLKLWSKRRRDLGSLRTQAVCRLHSVLCDLVPGGHPRKEITAAQAAGILASLEPSGAVAQARYELAQDFLADVRRIDAQMAEAKKRLEVAVKASGTTVTEVFGVGPYVAATVIGYVVDVGRFADRDRFASYNGTAPIEVSSGGHKVFRLSRRGNRRLNHAIHMAAVTQVSHRHSEGRAYYDRKVKEGKTTKEALRCLKRRISDAIFAHLVADAKRRAQAAKAGPGGQKGNGSVSSVAGSHPERQLFGQATPRPVPTLRRTATSRGRNTQEPVGKKSRKAS

SEQ ID NO: 475505 - protein, 345 aa, unidentified
MQTMYYIGLDVHKRTISYCVKDASGRVYAEGSVPATRCDLDRWMKTLPQPWTAAMEATMFTGWIYDYLQPHAAALKVAHPLMLRAIAAAKKKNDRIDANKICDCLRCDFLPECYMASTAIRERRRTLRYRNLLVRQMVQRKNKTGMLLMEAGVSYNKQRLHQAGYFRELLATNPDINEGLSSLLRLCRETMVRLQKTESALVRSLERDSLLMDRVERLMTIRAVGPITSLTWALEIGDVQRFPSIKKAISYCGLCGAEKSSANTVPRTPLSKQRNKHLQTTLIEAAKMAPRFSPALAMLYDKEKQKGNANRATLAVARKLVAYLMAVDRGQRNFQATETMNCVAA

SEQ ID NO: 475506 - protein, 424 aa, unidentified
MKRTQNEKILQIKNETLVVGIDIAKRIHFARAFDNRGIELGKLLRFENSAQGFAAFDAWLQEIKQRNEMTEAIVGFEPTGHYWFNLADHLVTCGHRLAIVNPFHVKCARELDDNSPSKSDRKDPKTIAMLVKDGRYRDVYIPVGVYQELRELVCERERLQERLGSLKNQIIRWLDIYFPEFTTVFKDLSKQAAWLALRHFSTPQKVVDAGAQEILRTWRAEMKRPSLKRAERLCLVASQSVGRVEGTRASISSLQFQMTEFELITIRLESVKEQMAECLSQIPNAQHLLAIKGMGVVAAAVIVSEIGDISRFTDPRQLIKYAGLNLRENSSGKHKGETTISKRGRRRLRHGLFQAMIPILATSSEFRALHKRNTTRSQNPLTKMQSLTALCGKLLRVTFALLTKGLPYDPEKLVIELPEMAQAA

SEQ ID NO: 475507 - protein, 326 aa, unidentified
MQIAVSFFGADVGKAEIVVADHGRAKPVTKILKNTPSSLSKWLQTLPPGSVLAMESTGGYERMLADLAHERGLKVYVLNPKALHHYAKSQGQRGKTDRLDAIMIARFIASEHERLHPYQPCAQYIERLRQMLRLRRMAVITRTQLRLSSERHHQVHDAQAQVQKALDALTELANSLEDQMLAEIQAEPALAQDFKLLTSIVGVGNLTATALVTTFARIPFTSSDAVVAYAGLDPRPKESGAYKGMRKLSKQGDAILRSLAYNAATAAARSITFKPMYQALLAKGWATTQALNIIARKLLRIAFGVWKSRKPFERELFLANQACVKP

SEQ ID NO: 475508 - protein, 401 aa, unidentified
MKSATNTQSSELSTAPISLPEFPVNDVTAGIDWARDDHAACIVDGRGRQVAATMVEHTTAGLRDMVAFLGRHGVGEIAIERPDGPVVDTLLAADLTVVVISPNQVKNLRSRYGSAGNKDDRFDAYVLADTLRTDRARLRPLVPDTDATIALRRACRARKDLVKHRGAAANQLRAHLRNVFPGAVGLFKDLDSAISLAFLSRFDTQDRADWLTPKRLADWLGKQGYSGKVDPTVLHRRLLAAPRGATGDHATSQAHITASYVALLRTLVDQIKTLADQIDRQLDAHADAHIFTSLPRSGRVRAARLLAEIGDCRARFPTPESLTCLAGAAPSTRQSGKLRAVGFRWSCDKQLRDAVVDFAADTRHANPWAADLYDRARARGHDHADAARILARAWLHISWHG

SEQ ID NO: 475509 - protein, 359 aa, unidentified
MQTKVNEKLFDGQSIYIGIDCHKKNWTVTILGEQYEHKTMSQNPDPDTLASYLKRNFPGADYSAVYEAGFNGFYPCRKLRQLGIHCNVIHAADVPTRQKDKLQKMDPVDSRKLARSLRSREFEPIHIPDQSLESDRALVRQRFRVMRDVTRTKARIRSLLFQFSINVPDQFTLGQSRSWSKLYINWLKGLHTEHESLKQTLDNYIRIGELQRKELLAVNRQVRSLSQTDAYRGNYNLLISIPGIGFLTAMTFLVQIGDIRRFERLDDLCDYVGLVPMMHGSGERMYTGKLINRGRKELKTMIIEAAWESVRLDPALMSKFNELTRRMNKNKAIIRISRKLVSRMRYVLMNQEPYRLGII

SEQ ID NO: 475510 - protein, 361 aa, unidentified
MCTERTTVGLDVHARSVVAEAVDWATGQVFSQRLVPANDVVLGWVAQLPGPVAVAYEAGPTGFGLARAFAAVGVRCEVVAPSKLQRPPGDRVKTDRRDARRLARLLHIGEIVGIGIPSVIQEDARDLIRAREDARADLMRARHRLSKLLLRHGIVYYGGKAWTGIHERWLRAQHFQLPGTRAAFDDAFDAVLAVTARRERLDEAITATAATPQWAPVVSRLCAVRGIATLTGLGLAVEIGDWDRFTGASIGAYLGLVPSESSSGASRSQGPITKTGNTHARRLLVEAAWHHQKPLRAPGKALAARRAALPPAVRARGQAADRRLHHRWSTLAARHKRPTVIAVAVARELAGWCWSLATLTD

SEQ ID NO: 475511 - protein, 408 aa, unidentified
MADKLAGIDVHKKVVMVVVIDPHNREEKPERRRFLTMPGDLRLLSNWLRDRGVKEAVMESTAQYWRSVWLELEPHMRLHLAQAYSNRAPRGRKHDFRDAERLVRRLFAEELILSFVPGEEQRIWRNLSRMKLQMVRDRVRLQGQVECLLEDMRIKLSVVVTDLFGLSGLRILHALAQGETDAGRLAELGDERLRCTREQLTEALTGRWHPAHCRMLALQLERLRLIDEQVASLNALLAQAMNAHQDTVLRLAQVPGFGIDSAQQVIAEVGATAASFASAAEFTSWVGTCPGKEESAEQNHSSRSAKGNKYMRRLLNQAAHAAARSKGTHFQVVFRRLLPRLGYQSAIWAIAHRLCRLVWKILHQGVTYIEQAAGPDPRALISRARYLAKQLRKFGYELRVTSANPSPA

SEQ ID NO: 475512 - protein, 404 aa, unidentified
MSETEPVPTRFVGLDIHKEYIVAVGVDAAQAVVLGPLRFSVNELADWSARHLTPQDAVVLEMTTNTYAVYDILVPLVHSVTVVHPPHVALIVRAQVKTDRKAALALAQLHAAGLLVGIWIPPQPIRDLRALIAQRWKMVRLATVAKNRLHSALHRHHLDAPDSSLPFSPKHKAFWLSLPVSVTERAIIACDWETIEFAERQKAALEASLAQAAAGDERIPLLVQLPGIGLIGALTLLAAIGDITRFASVKHLVGYAGLGARVHDSGTLHQTGRITKAGRKDIRHIMVEAAQSAARTHAHWKAELARLEPRIGRRKAIVAIARKLLVAVWHVLTDQEADRFANPQQVACSLLAHAYKMGVKNLPDGQSALQFTRQQLDRLKLGRDLTHIPWGSNQYKSPPSTLSG

SEQ ID NO: 475513 - protein, 356 aa, unidentified
MQNDHQSSESVILGVDTHLDIHVGAVISQAGKQLGTHIIQTNQTGYLELLDWDRSFGILERAGIEGTGTYGAALTRYLIKNGIYVVEVNRPDRSKRRLEGKSDPLDAENAARTVLSGSSKAIPKMQSGACEALRIISVARRSAIKARTQAINQLRALLVSAPQDVRDKLWKSKPHECVTACINSEVSEYSPLRIALCSTLRSLAKRWMALTEELNKLDESLDKLTRKYASNLRSQFGVGPQTAATLLAVAGDNPERLKNKAALASFCGVNPLPASSGKTVRHRLNRGGSREANNALWTIALVRMRSDPRTRIYVDRRTGEGLSTKEILRCLKRYIVRELYPLILSDLAYANRPLLT

SEQ ID NO: 475514 - protein, 364 aa, unidentified
MDVHLRSTTVCALDAETGEAVTRRFRGNPWGEVAEWMSGFPGPSLAAYESGYLGFAPQRELSGLGVDCVVAAVSKVPRSAADSASKNDRNDAARMAKAILAHDISPAWVPSPEVEGIRDLAGAYDGATARLATAKQRLLAFLAKRGFVYGGTTPAGNPRKYWTYDFLRWLDKVRPEDDGGVRTLAALRNEVEAAAEARADLLSEYRAAVDASPIAAEVAALQSIKGCAFALAAAFSAEVGDFTRFRSGRQVTAYFGLAPSQRSSGDSVRLGGISGAGNALVRKLAVEGSWCYAAARHQPKLMPRDTGVPLEIRMHGRKGSERLLRRREEMLARGMPAAKANAATAAELVRWLWALGMMCREGAE

SEQ ID NO: 475515 - protein, 318 aa, unidentified
MMQPILNVGVDVAKDAVVVACAEHSFPVKSVMNQRAPLRAWLKSLPAGSRIGLESTGAYHELLADLAQAQGYTVFLLNPLETRHYAKAMGTRAKTDRVDAELIARLIAQEHTRLRAYTPPTANQRKLDRLIRRRAKIVGLKGTLKLTMRHLGGFAAELKAVVGKLDALLAKIDATMAAIAAGSPQHQEAQHRVETIVGVGPLVGISLTNTLERVPFRKADAFVAFIGLDPRANDSGHKAGRRRLSKRGPAELRRLLFNAAMSAIKTTAWKPIYESYRTQGWSTTASLVIIARKIARAAWSIHHYRTTFNPERITKCLT

SEQ ID NO: 475516 - protein, 365 aa, unidentified
MSKDIKKADGASRRYVGIDLGDKKSRVCIVNEQGDVVAQEWVATTPEALVKRFQGQPAMQIAMEVGTHSRWASELLGKCGHQVRVADARQVALITNSNAKSDKRDARTLAQLLRADPRLLSPIEHRAETLQMDLTVIRMRDNLIETRTRLISSVRGVVKATGARLPDCETTRFPQEVTEILAEPLRPALAPMLEVIEELNEEIYGYDCLLQHWARTRYPESSRLTQVKGVGTLTALTFMLTVGDKERFSRNRDIGSFLGLRPRLDQSGDSQPQLRITKAGDGLLRKTLVECAQYLLGPFGQDSDLRRWGLKMIEAGNGSKRARQRAVVGVARRLAVLLMSLWKSGQSYDPLHHSRARENAPEVAA

SEQ ID NO: 475517 - protein, 420 aa, unidentified
MTPDQKAAFARTFPVHVGVDTGKRFHVLVARGPDGLRRKPMKVVVNREGFERADAELQALFPDLERSRMLIGLEFAGHHGFTFAHFLATRGYPIVNVLPAHTKRTKELEDNSPLKTDAKDAGVICKLVGDGTFVRFPFLESPYAELRVLVSYRHRLAVEATRFKNRLQGLLDLAWPEFVAQFSTLAKHTPIGLLERWPLPPDLLAAHKATVRAYARKISKGKFVAERFEHLYASARQTIALPQATTERRMEIQGTLARWRLVRKQMVEAEARIAELMGRLPSAQALLTVPEVSAVCAATILAELGTPGDYEHPRQVLKLAGMNLIEKSSGSSQGRRRQSKRGRPMLRRQLFLLAGRWCQRRGLYRSYYEALLARNGGLKTKAVCAIARKLVPLLLAVLQRGEPFDQARGQAARHQPALVH

SEQ ID NO: 475518 - protein, 369 aa, unidentified
MRKNSTVQQSPKRATVRKGGPITIGMDLGDKTSRYCVLDERGEIVQEGSVGTSQKALAQKFGSMRSSRVALEVGTHSPWVSRVLKNLGHPVIVAHARQVKLISHSRRKDDRLDAQTLARLARVDPQLLRPIQHRSEEAQAHLLVIRVRAALVEARSSLVNTARGLAKSVGERLPKCDADQLGVERREGLPVQLQQILRPLLEQIESVTEKIKESDGRIEQIARTMYPETALLKQVRGVGTLIALTFILTIDDRDRFQKSRDVGCYVGLRPKRSESGESQPQLRITKEGDVYLRKMLVQGAHYILGYRGPDTDLKRWGLGLASHGGKNAKKRAIVAVARKLGILLHRLWVTGEVYDPLRNSQAHARTVAA

SEQ ID NO: 475519 - protein, 407 aa, unidentified
MRTLFERCAAGDVHKQRIVVCRRYPSAQGERVSEIRTFGTTTQELESLAEWLMEVGCTHFAMESTGVYWRPVFNVVESVCEVVLVNAYHVKVVPGRKTDVKDCEWLADLLEHGLLKSSFIPPQPFRELRELTRYRKTLIRERASEANRIQKVLETANIKLASVARDVLGASSRAMLKALIAGERDAGVLAELARGTLRNKREQLGSALSGRFSEHHGFLIGQILSHVEELDRHIAECDARIEACLRPFVAELTLTRTITGVGERNGQVLLAEAGVNMARFPTASHLASWVGICPGNNESAGKHKSGRIRKGNVWCKAALVEAAWCAASRRDTYLGALFRRLSRRRGPKRAIVAVAHAIAVALWHVLSKKQPYRDLGPDHFDRIDRERLIRLHTHALRRLGVPVPIAA

SEQ ID NO: 475520 - protein, 364 aa, unidentified
MRDSSITVGLDVHKETIVVGVLPPASERVTERVTIENYPKAIEKLVKRLALNGALQFVYEAGPCGYEVQRQVSQMGYPCSVIAPSLTPVRPGDRVKTDRRDAEKLARLFRAGELTEIRVPTREQEAARDLVRVREDALGDRLRARHRLSKLLLRQGRVYRETRAWGVAHRLWLKGQRFEWLPLQQSFESYLRTVEEVEARLQVLEQQILDLSQQDPYRIPVQYLRTQGVDTLAALTLAVEAQEFRRFQGAAAFMGFTGLVGSERSSGEKVRRGGITKAGNAHLRRVLVEAAWSYRRRNVSSTALQERRAGCPEAVVSIAKKAQDRLQRKFWRMISRNKPHQVVVSAVARELAGFVWSIAQHFPE

SEQ ID NO: 475521 - protein, 338 aa, unidentified
MIVIGVDVHKQSVTAVAVDEGGRPLDEKTVLVGSDELLGWAAGLGVERLWAVEDCRQLTRWLERQLLGLGEELVRVPPKLTVPERRAGRARGKSDPIDALAIARAALREPDLARPRPGERIYVEIKLLVDHRDDLVEECRRAQQRLRWHLYQLDPTFAVPLRLLARPSHLERVSRWLARHDQELEVRLARELVARVRALTRAIRDLDRELEQRTVQTAPALLELPGCGAVTAAKLLAEIGPIDRFKNDAQLARHSGVAPLEASSGRIRRHRLDRGGNRQLNAALYRIAITQARYHPAARAYLERKCAEGKSRREAIRCLKRLLIRVVFNTLKTSPALT

SEQ ID NO: 475522 - protein, 402 aa, unidentified
MRAVFGIDVSKASSEVAILVNGEKVHGYTMSNDAIGFARLLGDLRTVHKPEIIFEATGVYSRRLQTFLEDNGYAYTRLNSLEAKKQLDSLRVRKTDQIDAGKLAQSQFVLNCKPTYVQEEVYQNLRDLSRFYQNLTEDIVRAKNRLHKVLQVTFPELETILSTPSGEQYWNLVIAFPCKDFVLDLSKDELSESIRQSTSKRISDKHVAYLAEKLIVLANQSYCAVKKTSPMLEEVRYYTKELLRLSEQRQAVLDEMVELAQPLPEYDILLSMPGIAETTVTSIIGELGDIDIRRFQSANQINAFIGIDLRHYESGNFLAKEHITKRGNPYARKILFKCIHNIASASHTNPCPIADFYEKRKRQSQTTSTKPHRIASIHRLIPTMYYLIMHNKLYDYASTQNR

SEQ ID NO: 475523 - protein, 409 aa, unidentified
MVLVGVDWAEAQHAACLVHPDGTVIRRLTIPHSAAGLARLREAITAAEAEPTAVLVAVERPDGLLVEALLGAGYGVYALNPKAVDRYRERTRLAGGKTDPADAELLARILVTDRDRHQPLRPSSPEAEEIRVLARQDERASRDQRRLFNRLRHDLLAVFPAALEAFPDLTTISALAFLERWPTAAAARDQSRSEIELFLRQQFHSQARAAADRIHTAVQADALTAPPHLAAARAGAIQLAARQLLLLHRQRAAWEKRLRELLEGDGAHPDGEVLLSLPGLDARLAARVLGEIGDRRERFPTPAALQCYAGTAPTTKASGRSRVVVARWACNRFLRQALLRWAFCSLPRSAWARSFYDEQRAAGKGHFKAIRALANRWLEILHHLLATGQHYDEAVHQRNRARATRPAAA

SEQ ID NO: 475524 - protein, 363 aa, unidentified
MDTDTEKSAPGKQKCVYLGDVSMSYLGVDLHTNSFTVCRRTKQEKESIRTFQIARIADFRKTLRKRDLLAIEATGNTAWFVSQVRDRIRKVTVVNPFQFEVIRRSVKKTDKNDAKTLAFYLSKGMLPEVRMKTKENAQLHSLATTRDKLVKQRTALINTIHNVLNSYGIKFKKESLGSEKGLKSIWAYEWDVVVKIELEVLVEQIRSLNKSIKTLDKEMSEHGQKLKGHENLTSIKGIAARSATVLLTVIGDVNDFADENKLAAYFGIVPRVSDSNETVRHGRITKHGSKLGRTTLVQCTLVAKRYSPYLRQYYERIKSHRGSGKAIIATARKFLGIIYNTLKNGWVFEDFPNFVLASSCVKK

SEQ ID NO: 475525 - protein, 438 aa, unidentified
MSNLDQAAVNREFAAHIGIDWADQKHFWTMRTADGKTQRGELDNTPEAVQVWAAELEQRFGGRPVAVALEQARGAVIAMLCKYAHLVLFPIHPNTLANYRKAFRPSGAKSDPRDADLALELLVSHADKLRRLEPDTVETRKLQFLTEERRRLVNQQTSETQRLIGWLKQVFPQILPWFEDPACAMVGELLLRWPTLPALQKATPKTLRTFFHRQNCRSAERIEERIAQIRQAVAATHDAALLETGILCIQNSVHVLEQMREGIARFDHQIAETYRQHPDRAIMESFPGAGPALEPRLIAAVGSRRERFESAQSVACFVGIAPVKEASGQQRWVHWRWACPKFFRQTFHEWAGCSIRTCQWAREHYDQQRDKGKGHHAAIRSVAFKWIRIFYRCWRDRVPYSEQTYLKAKAARAPKPHPAVSMQWESCGGFAKLSELPS

SEQ ID NO: 475526 - protein, 344 aa, unidentified
MTNIQPNKTDTESKVSHFAGIDVGAEELVLVILKNGKPFDPQKFSNTPADRARLVKKLVKLPGIVVCLEATGIYHFDLAIALHDAGVLLMVVNPKASHNFAKVLMKNSKTDAVDAHTLAEYAARMDFVAWTRPTDETLNLRSFSRRINALTGQKAAAKNHLHALTSTQETPKAVLRDAKLAITQLEKRIDRLTADALILIGKYSELTRILALLIGIKGIGETSAIALMGELLLLPPGLSHREWVKFAGLDPRSFDSGKSVHKKTRISKAGNAHIRSALYMPALSAKQHDPHVKAYFQHLVDNGKKPLQAVCAIMRKLLHAIHGMLKHNKPYDNTRFYAIPVSAR

SEQ ID NO: 475527 - protein, 394 aa, unidentified
MYKLFVGIDVAKGSSVGHGLDGTGETLFSLAFPMDGEGFSKLFDAIKGNCGDLSEVLVAMESTACYHINLFSFLTSKGIIAVVLNPLLVSNFAKLSLRKTKTDKKDARTIAQFVMIHKDSISQLSVSQDLQDLRDLARESESLCKLISISKTEIKRLLQTLFPELETICDPSTKVMLDFLQEFSSARMVRVANPKAIAKVLKRRGVGTRLTYTAADLIQAAQNSVATVSPAKELILRGKVATLRYLYEQRHELMTALTDYCKASMIEDLEIVTSIRGISNNTATAFLAEIGNVRHYPTSKNLIAFAGIDPAVYQSGKYEGSGRISKRGNRHLRRVIWLMTTCVIQHNETFRSHFARKRQTGQPYKKAVLSTAHKLVRVIYSMLSQRTHFREDCI

SEQ ID NO: 475528 - protein, 380 aa, unidentified
MSDIIRIGVDTSKSVFQLHGVDAAELPVLRKKRRDMLAFFRRLPATKVGMEACGGTHYWARELTALGHEVKLLPPQHVKPYVRRGKNDRNDADAICEAMSRPRMSFVAIKSADQQAAQMLMTTRERLIASRTQLINTIRGHAAEFGLTAAKGPAHVAPLLLRIAEDKTVPELAKELFALHGQELNRLKIELREIEAKLKVWHRQNELSRRLAEVDAIGPIGGCLLAIKAPDPQVFRGGRDFAAWMGLTPKDHSTAGKMRFGAITRAGDEALRRTLVVGATSVIKQVSKGKGDPSPWLRDLVARKPPKLAAVALANKVARIAWKLMVGGERYDAARAGVALPDRKLSTVLAPSRPLRAASGGGLRPALTPLRAVLKARRHR

SEQ ID NO: 475529 - protein, 310 aa, unidentified
MEQSFVGIDVAKDRLDVHVRPSGDTFALARDGQGVAALVERLRAAIPQLIVLEATGGFEQVVAAQLAAARLPLVVVNPRQIRDFARATGRLAKTDRIDAAVIAHFAEAVRPPVRPLPDKQAHVLDELVTRRRQVIEMMTAEGNRARQIDNKRLKKRIERLRSILQAELTAIDADLDEIIRGTPIWRESEELLKSVPGVGNVVARTLIAELPELGTLDRRKIAALVGVAPFSRDSGTMHGRRRVCGGRAPVRTALYMAALVASRRNPVIAAFYRRLVAAGKCKKLALTACMRKLLVILNAILREHAPWQAA

SEQ ID NO: 475530 - protein, 453 aa, unidentified
MNRKQKHLQGRRGEVFLELTRDVPPDQVICTAVDVHKYYHRVMLVNGRQEVLVPSFNVDTFQSGYDQLCAVIDETIARTQAKVLFIGMEPTGHYFENLARHLLDRYPNVRLVNSYAVSKNRDQKMLRNQKDDDIDLCSIADLILRNNCFPFQPLCQEYLRLQNWVRFHKAKVKARTALMNQIIGHLDRIFPGLVATQEDQPKLFADFWTNQTAQHLIRLCPNPRLLASMHPQELIQMFHAHQCRMGMVTACRIIDFAQRVLLPPADVIDARLPLLTLDLTLMDILEQVISQTQEQIASLLAKTPGQVLTQIKGIGVLWAASYIAGIGNPLCYEHAGQTFKRSGLISGRNDSGVHQRKGAGRHVTKVGDPHLRAALMQITHSLCQWQPYFGNYKTRLESRGKHPGVAAVATARKVNGVLFALMQTQSQFDPKDKRGQPVPPRKSVRNGKKQQPT

SEQ ID NO: 475531 - protein, 317 aa, unidentified
MTQTSMTTAGIDTSKGKLDIAVHGRAEQWQVANTLPGWRILTNKLTKAGVSRVGIEATGGYECGVVQYLRAAGFAVQVLQPVQVKAFGRIHLRRAKNDALDAVMIAACTAALDQVRDAPDPRLAGLTEQLTFLEQIEEDIKRFKTRLEHTSEPRLRRMVLGEIARMTSRRLTQLRYIAKQLRAHRDLAARLDLVLSIPGIGERTALAILIRMPELGRISREEAAALAGLAPFDNDSGQQKGQRRIAGGRARLCRSLYAAALPAAFRWNRALIALYQRLTAAGKAHNAALIACARKLLIYANTVVQRGTPWTERPLGA

SEQ ID NO: 475532 - protein, 436 aa, unidentified
MRGCRCSMIMGFTKPIEHFNLQRKKVITMNTLYVGIDVSSKSNVVYLMLPNGDKHNNFSVANSHEGSTQLVKRILSALTSHSLDTVLIGLEATSVYGDNLVYFLREDATLAPFNRKIHVLNPKQVKKFHDAYNDLPKNDYVDSFVIADCLRFGRINKEVYMGDYRYKALQNLTRARFFAVQNLVKEKQRFMNVLFKKYSTMTQEKVFSDAFSTTALAVYDEFESAEALANMDLHELTDFIIEKGKNRFPDPDAVAKAIQKAARNSYRLPKTVNDSVNQVLSISITSMKALESQIKEFDKAIKAQMELLPNVLISIPGIGPVYSAGIMAEIGDINRFNSQAALAKYAGLAWKQHQSGGFESEVTRLIPSGNRFLKYYLCEAAFSLVRCDKEYSDFYHLKYKEVNRCQHKRALALTARKFVRLVFRLLKDNRLYCPAK

SEQ ID NO: 475533 - protein, 314 aa, unidentified
MEHVTAEASGIAGIDVSKDRLDVHVLPAGQAWSVPRDDAGIAELCRRLEGVGLVAVEATGGYETIVAAALSSHGLPVVVVNPAQVRAFARALGKRAKTDPIDAEVIARFALATRPQIRPLPDAAARLLGDLVGRRRQIVEMIASERQRLKRSEPPRVRKSITRLLAALEKELASVDHDIDDSVRGSPIWRAQEDLLASVPGIGPIIARTLLAELPELGQLDHKQIAALAGLAPFTRQSGAWKGKARIGGGRAVVRTALFIGAQVAKRWNPTLKAFYERLIAAGKPKMVATIAVARKLLTILNAILRDQKPWQTA

SEQ ID NO: 475534 - protein, 336 aa, unidentified
METVCAVVGIDVSKKKLDIALLVNGKTKAKVVENSADGYKSLLEWLSKAKVAKETLHVCMEATGIYYEPVALALHDAGVSVSVVNPACIKGFGHSENIRNKNDTADAGLIARYCAAMKPAPWTPPPLEQRQLRAWSLRVQALKDIRQQEENRLEANTFTGMTDVADHVKQHIAWLSAEINKLEDDIDDHIDRHPGLKHDAELITSIPGIGTTTVARILGQLGDIRRFDSAKAFAAFLGVTPKQRSSGTSIKGRTMISRAGSMSMRAALYMPSLVACRHNPLLRCFAERLLATGMAKKAVIGAVMHKMTHLIYGVIRTGKPFDPNYLTNGLAIQDGI

SEQ ID NO: 475535 - protein, 308 aa, unidentified
MLIIGCDYHPSVQQIAFVDLETGETGERQLLHKDGEAERFYRELKLRGISVRVGIEATGHARWFERLLAELGFELWIGDPAQIKAARVRKQKTDRQDAQLLLKLLVEERFPRIWIPSPENRDVRQLLWHRHRLVQMRTRVMNQLQAVAMNEGVRRKKALWSKSGRAQLESFVLSPWASRRRQDLLEVLDRLNPTIDELSTAVEQEAKKRPEVLRLMTHPGVGALTGLAFVLIIGSAERFACGKQIGSYLGLIPCEDSSANRQRYASLIFDAAGNLYGTTEAGGTYTYGTAFELTPVYPCTKGTHDGPR

SEQ ID NO: 475536 - protein, 316 aa, unidentified
MVPSPLFVGLDVAKATLDIAVRPTAETWSASNDATGIDALVLRLGALAPTLIVLEATGGYQGPLVAALVAAALPVVVVNPRHIRAFAQAVGILAKTDRIDARVIAHFAEAVKPAPRPLPDAETQELRALLVRRRQLVEMVSAERARLDTAPASIQDAIQAHIAWLTTQIAGLDDALTHASQTHPVWQAKDDVLQSIPGVGPVLARTMLGQVPELGTLGPKPLAALIGVAPFNRDSGTLRGRRTVYGGRAEVRAVLYMGALVATRHNPVIKTFYERLLAAGKAKKVALTACMHKLLTIMNAMVRDLKPWQPQEVPSA

SEQ ID NO: 475537 - protein, 413 aa, unidentified
MKDILTCAMGLDIHRDIIVACLITGALGTDPVVEIRSFSTLIPEMKKLRDWVVESECRNVAMESTGIYWQPIYEMLEPCLAGEINILVVNARHMKNVPGRKTDMRDAQWIATLLRAGLLKGSFIPDKAFRELRHLTRYRKSIVHDITSQKNRIDKFLQSSGFRFTAFLSDAFGVSGRNIIRHLIQNGSIDRAALDKCLKAKTRNRMDQILIALNGGLSLHQRKFLSMAFGHLEQLEAHRKAIEDEISKEILKHSEALSLLCSIPGIDVTAAAAIIAEIGTDMDAFQDSQHICSWAGLSPGNNESAGKRKSAHINKGNPYLKSMLCEVGWVISGKRTLYLSGWYWRIKQRKGAKRATIALARKLLTLIYTMLKTGHPYNEDCFEQRRKRCERKRANRMVNELQKLGYHVIAPNA

SEQ ID NO: 475538 - protein, 396 aa, unidentified
MYYAGIDVSKHHHDATVIDATGRVVIAPLRFLNTRQGLTIFLTRLQTLDGSVDIAMEATGHYWLPLYEALVAEGYTVSVFNPFQIKAYRQIGLRKTKTDAVDSLWIADFLRIGRARPTVVPSPAVRQMRELARFRFSLLQRQADIRRRALTILDRVFPEYRTLFPRPFSPSSRALLRRAVAAETFAAWPLEDLAQTLRQASRGHFGLEQARQLLHLAQDSLGIRSLGPVANQEMQLLLDQLALLDDQIATLDEELDRLLRQTGTYLTTIPGLSSTLAATILGEIGDIRRFATLKQLVAYAGLDPTVHQSGQFQATHSRLSKRGSVYLRRALWMAASVARQYDPDLKAFYQRKRLQRKHHSVVIGAVCHRLLARIYVVLKEQRPYEIRTPDTNHSTT

SEQ ID NO: 475539 - protein, 369 aa, unidentified
MPHVTSIGLDVHARSVAAAAFNPFTGEVVHRDFGTDAAEIAEWALGFEGPRACYESGPTGFHMARELRALGLDCAVAAVSKMQRPAADARRKNDRRDAEFIARMLATHNIVEVPLPDAAVEAARDLDRALDDATAEYRRARQRLNMFLIRLGHVWDERNSDGTRKGSWTRAHWRWISGIRLEGPQRDVLEYYVTAARCAESDRRQLEKKVLALARTDRWRPAVEALSCIKGIDTLTAFRLAAEAGSFTRFRTAPAFASWCGLVPSERSSGETERCGGITKTGNRLARTALVESAWHCLTCTPRPKPPTPGADVPAAIRARADACTARLCRRREALAAAGKSSCKANAAVARELACWVWEIGRRAEGTLS

SEQ ID NO: 475540 - protein, 391 aa, unidentified
MIFVGIDVAKDKHDCFITNTDGEVLFKSFTITNNLDGFDELYQKIESVMEDVSKVKVGLEATGHYSYNLLGYLLDKGLPTYVINPLHTNLYRKSLSLRQTKTDKVDARTIASMLMSDVNLKSYSDTSYHNEELKSLTRYRFDKVKERAQLKQSISRLVCILFPELEKLVPTLHQNSVYELLYEFPGAKHVANAHLTRLSNLVETASKGHYTKDTAITFREAARTSIGSNMPAKSLELKHTIKLIRELDAEIEEIENEIKTIMDEINSPILSIPGISYRMGAMIIAEIGDFSQFDSPDKILAYAGMSPSTYQSGQLDNCHSRMEKRGSRYLRYALYNATAYVCLWDPTFKAYLAKKRSEGKHYYVALSHATKKLIRVIYQLETSGQQYIKAN

SEQ ID NO: 475541 - protein, 348 aa, unidentified
MHPTTVAVDVAKNVFELAIADAQWRVAGSARLTRTQFERWFDNRQVELVIMEACGSAHHWARTLAARGIEVRLLPAQYVRAYVKRNKTDAADARALLEAARASDIKPVRVKSVEQQALQALHRTRSAWKATRTARINALRGFCREFGLIVPEGAATGIAQMARYLADEHSGSPALLRGSMRLLLEEIRLLEARIGQLECELAEVASTSAACQALISVPGIGLLTSTAMIAAVGEPRSFDSARRYASFLGLTPREHSSGDKRVLGGISKRGDRYLRMLLTHGARSVLRAAIVAKRAGRSVDRLKTWALEVQARTNHNKATCALANKLARIAWAVWTKHEKYQSAAAAAA

SEQ ID NO: 475542 - protein, 508 aa, unidentified
MAALPFGAFRFGIARLKDWFRSSAHVLFGDAAWAVFPLGRLVLQDDDRAHGGWQKNTVNHAIPLTMKALPVLDPTAAAIDVGSEQLHVSIGGDVPKVFGTFTSDLEGLRAWLTQHAVRSVAMEATGVYWLYLYEVLEAAGLKIVVVNGRHVQNVPGRKTDMADCQWLATLHAHGLLRGGFVPTADIRRLQDYQRLRADHIIGAASQVQKMQQALERMNIKFHDVISDLTGVSGLKVVRAILNGERQPEALLALCDEQIQKKKSRQVKESLRGCWKKEQLFALRQALELREAYQQKISDCDQEMQAVLNQLAEPQEGQGGSMFGPVKLAPVKVGGKNAPAIERCQELLARLCGGCDATQIPGMGTYLALQLISEVGTDMTRWQTEKHFASWLGLGGGRKQSGKRKGSIKVHRNRPGRMFCAAARSLAQSVDKGLGGFYRRLRGRVGGLAANVALARKLALLFYRLLRYGAAYVEKGLKEYEAKVLDTERRLLLKLAKKQGFMLMPDLKR

SEQ ID NO: 475543 - protein, 396 aa, unidentified
MPLLAGDFLARIVPGRIDPHPPCILPLPATKQSASLSVDGSPQPPRVSEPEKKQGAPSTGSIENPNSRLGRKPSPHSQGRVMERHPASPSFVGIDVSKDRLDVYVRPSGQVFVVARDGQALAQFVADLVALAPALIVLEATGGFEITVAAALASAGLPLAVVNPRQIRDFARATGRLAKTDALDAQIVALFAERIRPEPRPLADADSQSLAELIARRRQVVEMIGMETNRLHQARNLRVQRMLRATLKTLKAQLAELDHDIDDTIKQSPVWRVADDLLTSVPGVGDVTAHTLIADLPELGQLDRRRVAALVGVAPVNRDSGQMRGKRTIAGGRADVRNALYMATLAAIRWNPVISRHYKSLVERGRPKKVALVACMRRLLGILNAIIRTNTPWQCA

SEQ ID NO: 475544 - protein, 430 aa, unidentified
MSSIVQTSHRRQAVPDPIQGVVVGIDVSKGRIDWRACCLGEWGSPHRVAQGEAGFLHMEQHLLSAAEGSQEVWVALESTGPYGQCLQEWLLDRGWRVVLVNPYHVKRSRELRDGNPRKDDVKDPGVIADLVWQGSYRSVRRLYGPYAELRVGFGEWCSLAKARTARRNEAQALLELWFPEVVRLFANPLGKSVQALIGRYDSPSALLLAGRRSLHATLKRETHGRGVRYGEGIWKAAQGSVAVRQGQESRARALRDLLGRLACVEAQQVRLRGELERWLAQTEEGAYLRSVPGLGLLTAAGVLGECGPLAEFHSVRALEKFVGMNLYRISSGKREGQVHLAKRGRQAVRALLVQLAVGQMRTGRLGGAWAHQRKAQGHPSRQTQVALARKLLALCYALARNRVCFEATRWFAEAETADGGAALQGTPTKT

SEQ ID NO: 475545 - protein, 405 aa, unidentified
MTKFSVYIGIDWANDKHDVCVQVANSSTRKFEVIKHSPKSINEWISSLHKQYKGQIAVAIELSKGPIVYALQKFDFVTIHPVNTSMLAQYRKAFSPSGAKDDPTDAELALDLMLRYPNKIKALKMESESVRKLTYLVEKRRKLVDDKRRFSNRLIITLKEYYPHLLDWFSHRGSGIFCDFITRWPNLQKLKRARPDTLKKFFCSYPGRTAAYSVKRIQSISEAEPLTLDNAVIESHQLLVAVKVIKVFDREISELFNALPDAELYNSLPGTGPCLAPRLLVAIGENRSRFNSASEIQMYAGIAPVTVRSGQKSWIHWRYQCSKFTRQSFIEWATKSIRQSYWAKIYYQQQREKGNTHQAAVRSLAFKWIRIVFRCWKTKEPYNEAKYLKALSDRNSPLLFKEKAC

SEQ ID NO: 475546 - protein, 343 aa, unidentified
MKTTTVGIDLAKNVFQVCALNRAGKMVSNRSVKRASLTETVAQLHPARIAMESCAGAHHWGRTFQKLGHDVILVPPQHVKPFVRGGKSDPRDALAICEAAKRPGLHPVPIKSLTRQDLQSLHRVRQQHVEHSTGIANQIRGIAHEYGVCFPIGLKRLCRELPYALEDAENGLTTTARELLAQRLADLLAVREEIKRTSQRIVLLAEELPAWPRLLDLPGFGVMVTSSYLSSIGDGRQFKCGRQVSAWLGLVPRQHGTGGKVRLYGMTKSGDRYLRTMMLHGARAAIRWNRGKETPLGHWIDPIIERRGFNKAVVALANKNARIAWHIVANGAHYDPGKAFGSA

SEQ ID NO: 475547 - protein, 346 aa, unidentified
MISAMIERCAGIDAGKKFIAVCVTTGPVSGDARHEIRTFGTTVEPLRQLLGWLEENGCTHAVMESTGTYWKPVFNILEERIHVILINPHEVKARKGHKTDHKDAWRLAHLLRHGTITPSFIPPRPQRELRDPTRRRRKPIQIASGEKNRIDKVLQDANVKLSDVLSDIFGVSGQLMLEALLEGKADAEAMAAFAKGSAKKKIPEIVASLEGPQMREHHCTMIRYSLGHLKFLEEQLLQLDDQIRNRICEAGYQKQWELLQTLPGVQASTAAVIVAEVGPDTKAFESEKKLSSWAGVCPGNNRSAGKSKSSGTTKGNRWLRGALTESAWAASKKRSGHLREKIPQDR

SEQ ID NO: 475548 - protein, 321 aa, unidentified
MQPVTVTVYAGVDVAKASLQLHLQGRQAEFPNQPAGLVQLCRQLQAIPHVHVVCEATGGYERPLVQAMHQAQIPVSVTNPAQVRAAAQAQGQRAKTDRIDAALLTDYGQRYQPKPAPPTTPSQDQLVALTQWLTQLVQALALAKTQAEHHEAAFVCKQHAKLMAHYQSQIVAVEKQIRALLAQDAVLQQRVECLDQIKGVGPRTAWLVLAHLPELGQVNRQEVAALAGLAPWTRESGKMKGMRCIGGGRPEVRLALYMAALSATRCNPVLQPFYQRLRAKEKPAKVALTAVMRRLLVYMNHRTKELAAKAATAKTEKGEKT

SEQ ID NO: 475549 - protein, 421 aa, unidentified
MTPPNEVVWAGIDTHTDTHTIALLDERGRPLGAETFTADPDGYDRLIGMLPGPGRVAAVGVEGTNSFGAALARRLTAAGYEVREVLRPRRSVRRRDGKSDPLDAVAAARSVMAGDGTSLPKSSDGWVEALRHLNAQRSQLVSAMTAISNSTNGLLVTAPEPIRERYRGLRSETRMNRLAECRPAGGLVEHSVLAALKSAAKAWKALKRQAGLLEERMRLILEEHARPLLDMYCAGTVIAATLAIVAGDNPERIRSEAAFAKLCGVCPIPASSGRTNRHRLNKGGNRQGNMALHRIAIVRLRYHKPTRDYMAKKTREGKGKLEIIRCVKRFIAREAYRALISIRNGEVGRGTPTERGAKLRELRVSRNITQQQIGEALCVPSSRISEIERGARDLPELEQRAIQWIHSITDPKQHTQTLDNV

SEQ ID NO: 475550 - protein, 370 aa, unidentified
MGKYSEVFVGIDTAKKKHAVAIADAGRDGELRYLGEIDSAPATVERVIKKLASKYEKVRICYEAGPTGYGLYRQIITLGHECTVVAPSLIPKKAGDRIKTNRRDAVTLARLFRAGELTSVWVPDAVHEAVRDLVRARDTAAADVRKKRQQLLSFLLRHGRIYSGSKHWTRAHSRWLAAQAFEHPAQQIVFQDAVDAIEDCVSRLHRLEEQLYAIVPNWSIAPVVDAYQAMRGVSFIVAVTFVSEIGDVRRFENPSQLMAFLGLVPSERSTGDNVRRAGLTLAGNRRARRALVEGAWTYRYQARVSAKLQKRLEDIPKPVRDIAWKAQVRLCGRFRRLAAIGKKRPVIVAAIAREMAAFLWAIGQHIVPAS

SEQ ID NO: 475551 - protein, 408 aa, unidentified
MDVVYSHVCGLDVHKKTVVACILTPNEKEIRTFSTMTDDLLMMVDWIKSKGCTHAAMESTGSYWKPVYNLLETEEIQTLVVNAQHIKHVPGRKTDVKDAEWIASLLRHGLLRGSFIPPRDQRELRELIRYRRSLIDERAREVNRIQKVLEGANIKLSSVAGDILGKSARSMLEALIAGNDDPQALSELALRRLKNKKQDLQRALKGLIGPHQRLMLQTQLRHIDELDRLIQQLDEEIKRRMLPFEEALERLDTIPGVARRTAEQIVAETGTDMSRYPSAAHLCSWAGLAPGNHESAGKRKSGRTTKGNPKLRRALVEAARAAARTKNTYLSSLYHRIAARRGANRAAVAVAHRILVIVYHLLKDKQIYNELGPQYYEERRREQIAKQALRKLQSLGYNVMLEPVNHTA

SEQ ID NO: 475552 - protein, 345 aa, unidentified
MTNRPLNTTAESVHRLFAGVDVGADELVLVIRKNGKPFDPQKYANTRSDRTRLVNKLIKLSGIKVCLEATGIYHFDLAIALHDAGIPVMVVNPKASHNFAKVLMKNSKTDAVDANTLAEYVERMDFVAWTRPSNQTLTLRGYARRIDALTGQKAAAKNHLHALSATQETPKALLRDAKLAVSQLEKRIDTLTDEAMDLIDQHPELQRIFELLTGIKGIAQTSAIALMGELLLLPPNLSHREWVKFAGLDPKAFESGKSVHKKMRLSKAGNRHIRSALYMPALSAKQHDPHVRAYFQHLIDNGKKPLQAVCAVMRKLLHAIHGMLKHDQPFDNTRFYAIPESIIAE

SEQ ID NO: 475553 - protein, 429 aa, unidentified
MNSTQNKKIEQVKETTMIVGIDVGSEKHYFRAFNWRGIELTRKPVAFSNSMEGFNSFYNSVVELMQKNELKDALVGIEPTGHYWFDLGQFMGEKNIKFVMVNPHHVHKTKELDDNSPSKNDRKDPRVIAGLVRDGRYFYSYMPTGVYAELRNASNRRFVLVEEQTRAKNRLQKWVAVYFLEYKGIYTHIDAKGGLLVLKQAPTLEEIVRLGVEGIIKIWKDAKLRGNGHKKAMLILNAAMKSIGLKAGLTEARMEIQDLIEDYELQTKRLERVNDLIKELCQQVRYADKLLEIKGIGITTVAGFIAEVGDITRFDSTKELQKLAGLELVADSSGKHDGKTKISKRGRKRLRYLLFEAAISVVGKNEEFKEIHRYYTTREKNPLKKMQSLIAVACKLIRVFHVILTKGISYDASKMLKDIRRPGEQLKAA

SEQ ID NO: 475554 - protein, 347 aa, unidentified
MRFYNQQHKFYCGIDLHARKMYVCIIDQKGKTRVHENLKTDPEALFDIIFPFLEDVVICVECMFSWYWIADFCAEHKIPFVLGHALYMKAIHGGKTKNDKIDSYKIAKLLKGGTLPIAYPYPAKMRATRDLLRRRNYMVRQCALLVSHIKNTNTQYNLPLFEKNISRKFNHEGVAERFDDPSVRAAIEADLAMIEAFNNLIKPLEWQIEKIACQHDHNSLYLLRTIPGVGRILALVILYEVQDIKRFSKVQRFCSYARLIRPEKESNGKWAGKSNKKIGNAHLKWAIRTAAMVSLRESDQAKKYVDRLSRKYNKGKALGIYTHKLGRAVYFMLKNKKAFDMNHFFSH

SEQ ID NO: 475555 - protein, 358 aa, unidentified
MAATEGTRGIVGGVDTHKDLHVAAVVDEQDRLIDTRCFATTRQGYRQMLAWMRSFGELQRVGIESTGSYGAGLLRFMQQAGITVLEVTTPDKQDRRRRGKNDDLDAQNAAHAAFAGQRTVTPRSRDGMVESLRVLMACRKTAVSARRVALQMIHNTIVCAPDGLRDQLRSLTRMQLVRTLAAWRPDLTAYRDLDSAYRIGLKSLARRYLELHDEIADLDAMIAAIVDELAPNLVARNSIGHIGAAQLLLTAGDNPERLRSEASFASLCGVSPVPASSGKTVRHRLNRGGDRAANSALHIIAIGRLRTDHRTKDYVARRIAEGHSKLDAIRALKRYLAREVYTLITQRRREINATRIAA

SEQ ID NO: 475556 - protein, 341 aa, unidentified
MQVATIGLDLAKHVFQIHGIDAAENVVVRKQLRRSQVMGFFEALPPCLIGMEACATAHYWARELTKLGHEVRLMPAKDVKAYVKRNKNDAADAEAICEAVRRPTMRFVGVKSAEQQGQLMQHRTRDLLMRQRTQVINALRAHMAELGIVAAQGREGTKALLAIIADDGDERLPVDARASLIVLAAQLQALQTLIGSIEKRIIAQHRASEASKRLATVPGIGILGASAITTMVTDPKAFRSGRDFAAWVGLVPRQDSTGGKHKLGPISKQGDRYLRRILVVGAHAVLRRARQHPEKYPWLTQLLARRPFKVVAVALANKMARIAWALLAKGGSYRVPRLAAA

SEQ ID NO: 475557 - protein, 362 aa, unidentified
MDEYDGRQFVGIDLHRQRSVIVRQSESGEQLSAVRIVNEPVALELQLEQAGADPEVVLEATYGWYWAVDVLQACGARVHLAHPLGVKGFRYRRVKNDVRDAADLADLLRMGRLPEAWIAPPQTRELRELVRYRAKLVAIRSGLKAQIHGVLAKAGVLIAVSDLFGVTGRQRLAKVPLGPAYAQRIRSLLELINILDSHEARFAVMIAERLATHRGYQAIQQVPGIGPTLAAVFVAEIGDVHRFTDAAHLCSWAGLTPRHRRAPRTHHQTRLQSGPLGGDRGGAAPPDDGQDRGRQAPHRGSPRQEHRQGRRGTQTAHADLLRAARRPDPRARPCQTGVSTPDATRARPLVCLTPFRRGRPLD

SEQ ID NO: 475558 - protein, 319 aa, unidentified
MQMIHFLGVDVSQDWFDVAIFGAAKPAQFQNNEAGFDAFAQHCVDLDWSKCFVVVEATGGYETRLLRYLIAQGAHVHRATPLHAKHFIRSLGLKAKTDKIDALALARYAVERHTELPVFVFPDEEQSAFNDLMMRRGDLVAFAAAEKARASQPRYKDAASSVMQSVEAMLGFIATQIADLEAQLDALVEASPTLSRRIETLRTVKGVGRLSAYTLQAFMPELGTLTRRTAASLAGCAPHPRDSGIKNRKRSVFGGRGTVKRMLFLAAMTAGRYEPALKAFFEKLVESGKPKMVALTALMRKIIVIANARLKELNLQSTW

SEQ ID NO: 475559 - protein, 355 aa, unidentified
MNDAKYIGLDVHQATISAAVLDSAGKLVMEAILETKAETILQFLRGLRGSLHVTLEEGTWAAWLHDLLQPHVTRVLVCDPRKNALLKAGNKSDRIDAHKLAELLYMNKLNPVYHGEQGIRTLKELARSYLTITRDLTRVMSRLKAIYRSWAIPCAGQQVYAPRFRAEWLAKISEAGVRRRAELYYQQFDSIAALRQGARRELLTEGRKHLNTRLLQQISSIGPIRAVLLLALMQTPNRFRTKRQLWAYCGLALRTYTSGEYRIVGGQLKRSKKVLAIRGLNRNHNHDLKNIFKGAATRAASTAGPFQDFYEACVARGMKPHLARLTLARKIAAITVLVWKKGVRFDAEHLKQQAA

SEQ ID NO: 475560 - protein, 345 aa, unidentified
MNITAVGIDLAKNVVQVHGVDARGKIALRRQLRRDQVVPFFANLPRCLIGMEACASAHHWGRTLERLGHTVRLMAPQFVKPYVKTNKNDVADAEAICEAVSRPNMRFVPIKSIEQQAVLSLHRVRQGFVKARTAQANQIRGLLGEFGLVIPKGICHVAERVPEILEDANNELPLALRHLIDRLRCHLKELDQQVRELEREILIWHRSSDLSRKLERIPGIGPLAATALVASIADARSFDNGRQVSAWLGLVPRQNSSGGKSTLLGISKRGDVYLRTLLIHGARSAILAARRRNDSRNGWLANLLTRRHANIAAVALANKNVRTVWALLAHGREFKPDYVPVRATA

SEQ ID NO: 475561 - protein, 426 aa, unidentified
MKLEEKELGKPIRAWIGIDWADEKHDVSLYDVGTGKQEALTIRQSPEALQEWLGQLRSRYEGGYVAVVLEQGRGGLLNALMGCEFLVLYIINPKSLSSFREAFYGSGATSDPVDAELMRDMVRQNASRFRAWRPDDVMTRSLRLLTEGRRNLVNHSTALTNQLTALLKGYYPQALAWVGTLDTAWACDFLEQWPTLQSLQASSRRQILRFYEKHPRVSLDLNEQLKQIQDARVLTKDEAVLESSALMVQALVSQLRPLLASIAEFDRKIAMIFRKHPDRPIFESFPGAGAALAPRLTAAFGTDRDRFQAAIEMQELAGIAPVTEKSGKKSFVHWRYACPKFMRQTFQEFADHSRRWCKWAKAHYELLRRRGKSHNAAVRALAYKWIRILFRCWKDRQPYQDEVYTKALLKHGSPLSSLLAESVENP

SEQ ID NO: 475562 - protein, 315 aa, unidentified
MTKLVIGIDVGKEKLDVGRHDEKRVRTWPNDEAGRAKLSDWVNEQEPELVVVEASGGYEAAMVSELVERGLAVALVNPSRVRAFARAEGLLAKTDKIDARLIARFGATMKPQAQARREQAQLELNQWVTRRRQLVVMLTAEKNRLQTAPKAIQAQIRSHLEWLQTQIAELEQLINQAIASNPTWRETARRVETVPGIGAITASTLLADLPELGQLNRQKIAALVGVAPFNHDSGKHRGKRRIFGGRTSVRSVLYMATLSAIRHNPVIKSFYQHLLAKGKVKKVALTACMRKLLVIVNAMVKSGQDWNPPIASPAI

SEQ ID NO: 475563 - protein, 347 aa, unidentified
MQMIGCDLHARQQTLAILDTETGVLEERVLEHTGNNVRDFYRSLPRPARVGIEATGSMHWFLELMEELGIECRVGHPAKIRACEPRKQKHDRRDALLLLTLLSEDRFPSIWMPSLDQRDVRALLTYRHQWVRIRVRVQNALQSIALSHGLRRGRAMWSKAGLAAIRSLPLPPYSTERRDALVDLYLQLQEEIDELDKTVAECAAERERARLLMTHPGVGPITALATESILGDPARFADGKAVASYVGLIPSEFSSGGRRQILGRLTKQGSPMLRFLWCEAVGHAVRKDEQLKRFYRRKLAQKGFAKAKCAAGRKLGIRLWIMLRDNISYQEFCRRARQQTDVPCGDA

SEQ ID NO: 475564 - protein, 460 aa, unidentified
MEQALAQRNPSISLKSGKSRAALTITHPNAAGIDIGSGSHFVAVPPDRDDEPVREFPSFTVDLNALADWLKACGVDTVAMESTGVYWIPLFELLESRGFTVLLINARHVKNVSGRKSDVLDCQWIQQLMTYGLLRGAFRPADQVCVLRSLWRQRGMLLRNQSRHVQHMQKALTQMNVQLANVISDVAGETGQKILRALVAGERDGHVLAKMKNARIRASGDEIAKSLQGNWRAEHLFALKQALDGFDFIGTQLAECDREIEQQLQRLQTHEGEPAKGKQRGRARNAPKFDLRTQLFKMCGVDLTRIDGIDVTTALAVISETGVDMSRFPSAGHFASWLGLCPGTRITGGKVMSGKTKRCANHAAQALRLAAAALRASQSALGAYFRRMCSRMDKPKAVTATAHKLARLIYSMLTKGEEYTDQGQDYYEERYRERVLRQLAQRATKMGMKLVAAEEPETVL

SEQ ID NO: 475565 - protein, 355 aa, unidentified
MDSVKYIGMDVHKDTISIAVLNSSGKLVIECVIETKASTILQFFQGLSGSLHVTFEEGTWAAWLYDLLKPHITELVVCNPRRNALLKEGSKSDRIDARKLAELLRSNLIRPVYHGEHGLRTLKELGRSYLTISKDLGRVMSRLKAIYRSWGIPCTGKQVYAPRYRSEWLSKIDEAGVRRRAEFYYQQLDALRPLRQQVRQELLAEAHRHEVWKLLRRIPFIGPIRAALIIAILQTPHRFRTKRQLWAYSGFGIETHSSADHSCAHGKLQRSKKKISVRGLNRNHHHDLKNLFKSAAAVAAAKPGPFQEFYDALVAKGIKPEMARLTLARKIAAITLTVWKKGVRFDAKYLNPQTA

SEQ ID NO: 475566 - protein, 346 aa, unidentified
MEHYVGLDVSLKLTAICIVDRTGKIQREGVVPSDPEAIAAFIESHAPHVTRIGLETGATSTWLWTELNRLGLPVICIDARHAKAALKMQINKSDRNDAVGIARIMQCGWYKEVRVKALDSHAVKALLVSRALLVKIKRDLENQIRGLLKNLGLVIGPAKMNVFALRAAELTADRPELAAAVTPLLNARVGIAQQIADLDRKVMKLARNNAQVRQFMTAPGIGPVTALCFLATIDDPRRFRRSRSVGAYVGLTTRRFASGEIDWTGRISKCGDKMLRSYLYEAANVLLTRVAKWSALKAWGIRLAKRSGLRKAKVAVARKLAVILHRMWIDGTEFKWSSKEVADQPA

SEQ ID NO: 475567 - protein, 365 aa, unidentified
MRAEEFGTRVMIAVDPHKASWTAAAVDASLQPIGTVRVPVGRDGYRALQQFARRWRTVDWAIEGATGLGATLTKLLNDDGVDVVDVPAKLAARVRLLSTGHGRKSDDADAISVGIAALTAHALSTARMDATVNALRAIVEHRDDLVKMRTQTVNRLHVVLTHLVPAGAARGLTADRAAQLLRSVRPRDVAGRTLRSLAADLVAELRQLDKRIAKAASDIEAAVTASGTTLTELCGIGTLTAGKILARVGSIHRFRSAAAFASYTGTAPIEVSSGEVLRHRLSRAGDRQLNCCLHVMAITQISRDTPGRAYYLRKRAAGKSHKEALRCLKRRLSDTVYRQLVRHATAVGAGPEGHPGATLMSCAAS

SEQ ID NO: 475568 - protein, 407 aa, unidentified
METVIERGCGLDVHKKSVAACVRVPGPKGTRQSHVRTFGTMAAELAALREWLESQGVTHVAMESTGVYWKPVWAVLEEAFTCLLVNAAHVKQVPGRKSDLLDGAWIAQLREHGLVRGSFVPPAPIRELRDLTRYRKRLIEERTREANRRPKRLEDTGIKLASVAPDMLGVSGRAMLEALGQGTTDPARLADWARGKLRAKLPALRQALAGRFRPHHAFLVSQRLAHLDYLDEAIDTLSARLTEVMAPFTAELGRLDTIPGVAQRTAEVLIAELGVDMTQFPSAGHAASWVGLCPGNHESAGKHKSGRTRKGNRWLRAALTEAAHAATRTDSALAAQYRRLMHRGHKKAVVAVAHSILVIAYHLLSRQTTYREFGADYFDRRHAERATRRAVRQLERLGYRVTLQPAA

SEQ ID NO: 475569 - protein, 343 aa, unidentified
MEHFAGLDVSVKETSVCIVDDTGRIVREVKIASEPDALLQELTSLAYHFKRIGLEAGPLSQWLFSALVEAGLPVICVETRHMRAVLKAQINKTDRNDARGIAQMMRAGLYRPVHVKTLRSQKLRMLLTHRKLLQSNAVAIENDLRATLRNFGLKVGVAGKVKFEARIKELVENLPDLAVLVEPLLIVRRTLREQIGVLQRRLLAIVRDDDVCRRLMTVPGVGPVVALTYRVTVDVPARFRKSKAVGAVFGLTPSKHQSGESSRTGGISRCGDEMMRVMLYEAAQVMLVRSVKWSWLKAWAMQLARRRGMKKAIVALARRLAVILHRIWVDGTEFRWTQETAAA

SEQ ID NO: 475570 - protein, 323 aa, unidentified
MVVVAGIDVSKATLEISVSEGPVLSFENSTAGIRRLLRHLERAGVTKAVCESTGGYERLAVGKLREKSVTVQVAHPVRVRAFARACGYEAKTDPLDAQVLSRYGVVFSESDTAQPEVDPDREELRQLLSRRRQLVDQRVRERNRLDKGLSGGVGKSTRRHIRWLDGEIERLDEEYKKLLKHNASLGETVELYQTVPGVGQLTAATLVAYLPELGRWDGRALTSLVGLAPWSRDSGKKRGNRSIRGGRGTVRRALYICAWAVLRIDGDLRDFYRRLRERGKPGKVATIAVARKLLMQINAVARRGTPWVKQHGSGCPSYQADPA

SEQ ID NO: 475571 - protein, 391 aa, unidentified
MIYIGIDVAKDKHDCFITNSDSEVLFKAFTIFNNLDGFNDLYQKIESVMDDVTKVKVGLEATGHYSYNLLGYLIDKGLPTYVINPLHTNLYRKSLSLRQTKTDKVDARTIASMLMSDVSLKSYSDTSYHNEELKSLTRYRFDKVKERAKLKTSVSRLVCILFPELEKLVPTLHMASVYALLSEFPSAKHVATAHLTRLTNLLSKSSKGRYGKDTAITFRDSARASIGSNMPAKSLELKHTIKLIQELDSEIDEIENEIKIIMDEINSPILSIPGINYRMGAMIIAEIGDFNRFDSPDKILAYAGFSPSTYQSGQLDGAYAHMEKRGSRYLRYALYNATKYVCHWDPTFAAYLAKKRAEGKHYNVAISHAVKKLVRVIYHLEKTKQQYIKAA

SEQ ID NO: 475572 - protein, 381 aa, unidentified
MIGDSRQCGCIDTEASLAGPASTLTSRQEATLIVGIDVHKHNHAAALIDDRGGEIATLEIPNTPKGYRSLIDWLVDHDAATAVIGVESPGSYGRCLVTALAGAGFEVLQVPAWRTHRERHRRGPGKTDPGDAISIAQVVRTKRDDLGPAEEPELVRALGMLELQRRRFVHDRTQAIQRLRADWTQHDPVAEASVIRCDRQRELNKLRRLQLGSSLAARTAARCIRELARDITDLNARIAELDREIAQLLNEHDNPLADLHGAGANLSATIIAQAGDVRRFRNASAFARFCGAAPIPCGSGQTANRHRLHRGGNRQLNAALYRIAVVQQRHYPDARKYLARKIAEGKTPREARRALKRHLANVLYRRLYAWANTAPSMNPLT

SEQ ID NO: 475573 - protein, 368 aa, unidentified
MDSEYYTTIGMDVSDRTTKVCVMAKERGTRRILEETTIPTTRDGLRAYLSGKCTGWPVVFETGTHCRWMKREVESLGMKAIVANPSKLRMVTGSNTKNDRNDARELARFALADVGLLHPVRLRSERCQQMLRLMKARDLLVKVRTMHVNELRGFAKSMGFRLPSCPANKAHRQGKAGWPEDFESLAWPLMDMLETIDLKIRAYESQIKSLAESGELKDKIGRVREVYGIGLLSGAALVASIDADPGRFRKARDAGAYFGLVPKQRQSGEMDVQCHITRAGSGFVRRLMIEAAQIAMRETARDTDVKLKGHRICARGGKIAKKRALVAVARCLVVTAVALLKKPDAEYVPLSERARREFEAMRSAEMVA

SEQ ID NO: 475574 - protein, 366 aa, unidentified
MKKTSTVRVNGNMIFKGHKLTIGLDLGDRWSNYCVLDEAGEVLLEQKLATTPEAMKQTFERMPRSLMALETGTHSPWLSRLLKELGHEVLVAHAQKVELITKSNRKDDRHDARTLARLARIDPELLGPVRHRSAKAQIHLTVIRARAELVSARTALVNAARGLTKSYGERLPKCGTEQVSRELAAKLSAELREVLEPLLREIESLNERIKEYDARMEKIARESYPQVALLKQVKGVGTQIALTYVLTLDDPHRFAKSREVGCFLGLKPGRRDSGESQPQMHISKEGDRYLRTMMVQGAHYILGPFGEDSDLRRWGLRLAEHGGKNAKKRAVVAVARKLAVLLHRLWVSGEVYEPLRNNRKAMRAVA

SEQ ID NO: 475575 - protein, 360 aa, unidentified
MTATMTWVGLDVHARSTHAAAIDRESGELTRARFGVGTGEVIAWLRELPQPVHGCYEAGPTGYALYRAAEAVGLRVDVVAPSKTPRAAADRVKTDRKDAELLVRLLLAGSLAPVAVPSPEAEAARDLARAREQVRADLARQRHRVSKLLLRYGRVYDGGGTWTQAHRRWLAAQRLDHVPTELAYLDALAAIDGLLARRAALDERLSLLAGEPEHWPTVARLRCFRGIETLSALVLHLEIGDFARFQRPGQLAGWLGLVPSLHQSGESEMRGPITKTGSGFARRILVEAAWHYLREPRIGTNLRQRHAGQPDHILQIAWRAQHRLYRLQRRLRERGKPGNVAVVAAARELACFLWAAAVAD

SEQ ID NO: 475576 - protein, 366 aa, unidentified
MATNISKNKEEKNNNSSLKNSYVGKKVFVGIDVHKRTYSVVTVVEGVVVKKWRTVANPEKLAQQLTRYFPGASIETAYESGFSGFVLHRVLEKAGIHNIVVNPGSIEVAVHNRVKTDKRDALKIATLLEAGRLRGIRVPSPQQEQQRLLTRTRQQLVEERSAIKNKIRMKCHQMGLIDPDDTREMSHKLVVEILSRTPSTEFSLVIEAYWQVWKSIETQIKKIEQKLKEQAAIDPNETIYRSAPGIGSLSARILSNELGDMSQFANERQLFSYTGLTPSEFSSGDKVRKGHITRQGNRRVRYILNQAAWRAIKKDRDLKEFFDRLAPRTGKKRAIVAVARKLIGRLRAAFKTRKPYQMNSISLQSA

SEQ ID NO: 475577 - protein, 315 aa, unidentified
MPDQNASYVGIDVSQDFLDVHVVPEEQSCRVENNEGGFVALTDFLKPFGVSCVVLEATGKLEAPVAAALSSAEIPVAVINPRQVRDFAKATGQLAKTDAIDARIIALFGRAVAVEPRPIKDAEARQISDLLARSRQLTRMIAEEKNRLARATGRARTDIKAHIQWLEKRAKRIDGELDAEIKKSPVWRAQDALFQSIKGVGPVLSRTLIAGLPEIQWISRGGLAKLVGIAPLNFDSGRVRGQRHIWGGRAHVRTVLYMATITAARWNPVIKAYYEKLTAAGKPRKVALVACMRKLLNIIRAVVRSGVPWEARPVS

SEQ ID NO: 475578 - protein, 369 aa, unidentified
MDHHSVAYVGFDTSKTKHAVAVAEGGREGEVRYLGEIEAAPAAVERLLRKLARQYKSLHVCYEAGPTGYGLYRHIRALGQVCDVIAPSLVPIRPGDRVKTNRRDAVTLARLLRAGELTAVWVPDEVHEAVRDLVRAREAAARDLRHKRQQVLSFLLRHGRIFTGHRHWSRAHLRWLAGQAFRHPAQQVVFQDQVDAVADAQARLERLDRHLAELVPTWSMAPVVAACQAMRGVSFLVAVTFVAEIGDVRRFESPRQLMAFLGLVPSERSTGDTVRRGGLTLAGNRRVRRALVEGAWSYRHPARVTETIRVRLEGLPKAVREIAWKAQVRLSARYRRLVAAGKRAPVAVAAIAREMAAFLWAIGRVVEPA

SEQ ID NO: 475579 - protein, 341 aa, unidentified
MDIAVLGIDLGKNSCSVVGLDASGRVVLRRRLQRKTIVALAAKLSPCTVAMEACCGAHHLGRVLAAQGHTLRLMSPEYVRPYVKAQKNDDRDAEAIAEAATRPTMRFIALKSEDQLDMQTLHRVRDRIVAERTSLMNQLRAILLERGIIVPKGRAKLRLRISELILQPCEELSPRIRLLIEDMLTRWQALDDRIAAFDAEFAAEARQNEAARRLTAIPGIGALNATALVAAVGDAQTFGRGRDLAAWLGLVPRQATTGGKPRLLGISKRGNRYLRKMLIQGARSALPTLSRGQTSLGQWLRGLLARAHVNTVVVALAAKMARTAWALLRHGRTFEPRVITG

SEQ ID NO: 475580 - protein, 339 aa, unidentified
MNLYAGLDLHSSNTYIGVLDQQFNRIFKKRVSNDLDLILKTLEPFRARLKGLVVESTYNWYWLVDGLMDAGYACVHLANPCAIKQYEGLKHSDDQHDAFFLAQLLILGILPQGYIYPKETRPVRDLVRKRLFLVQQKTAHILSLQSLLARCCCQRVSSNQLRKMTSHDLRQWLKEEHLVLSAQANLDNIVFLKQQIGRLEAAIQKQVKLSDAFNCLLTVPGIGKILAMTIMLEAGDIRRFATVGNFASYCRCVSTQRLSDGKSKGSGNRKNGNRYLSWAFTEAAQMARRFNSRFRSYYDRKAAQTNSILATRALSNKLARVCYYIMRDRVAFREESVSH

SEQ ID NO: 475581 - protein, 433 aa, unidentified
MDEVTDEPLHRDRVCGIDIGKSGMAVTIRVPSDRDPARRAQETREFGTTRREVLALADWLRCWQVPAVVMEATGDYWKPVLYRLEAEGFECVLADAKQVKNLPGRPKRDKSDSRWLAVCFERGSVAGCFVATPEFRVIREHTRYRRDLAGERTREKQRAEKLLESAALKLSSVLSDVHGMTGRDIMGRLIAGERDPRALAELARGRARVKIPQLAQALEGAEFFTPDLAALLEVMLARIDRIEADIAAVTTVIERLLAPWEEQLQQAESMPGWGRLAAQDVLAETGPDMTRFPTPGHLASWAGRTPAGRQSGARTGKAKAKKGNRYVGAVTGETAVSAGKTQTREGARYRRLSRRRGKAKAQVAVGNTQMRVYHVLLSHPGMRYQDLGWDYYERERNTARQVSHHIGKLAALGYEVTLARLPGNGDGEDTQAA

SEQ ID NO: 475582 - protein, 387 aa, unidentified
MRQTVDRTPATAALDYDSTMIGALELSSKKWIFAVQLPGSRKHTRHAVDPSGPALAALIERLKARSATAGKEIARVILTYEAGRDGFWPARYLQRRGAEVLVMQPSSLPVDRRARRAKTDVIDVEMLLRTLLAYLRGEPRVCSMVPIPSEADEEARRAHRERADLVRERGALVNRIGSILATLGVTGYRALRRDRRRQLEELRQPDGAPIPAMARARIERQLDRLELVMKQIAQVEAARDAVVKKAQPDDAAERMIRDLSLLCGIGAELATRLTREAFVRGFRDRRALAGYVGLCGSPFSSGGSHRDQGIAKDGNKRVRAAMVELAWLWLRWQEDSALAQWYRGRVGQAKGRIKKILIVGLARKLLIALWRYATDGVVPEGAKMKTA

SEQ ID NO: 475583 - protein, 340 aa, unidentified
MPLYGGIDLHANNSVVVLLNEQDQVIYQKRLPNHLPTILEPLSLHHGEIEGLVVESTYNWYWLVDGLMEAGYRVHLANPAAIQQYSGLKYSDDHSDARWLAHLLRLAVLPEGYFYPKAERAVRDLLRKRAHLVRQHTANVLSVQNIMARNTGARFSVKRIQELTKQELQSLLTEEPQVLAVTSSRAVLDCLKHQIKTLEQTVHKRLNHTPSYEQLLTVAGIGTILAQTIALETGDIRRFPSVGNYASYCRCVDSNKISNGKRKGTGNVKNGNPYLAWAYMEAAQFALRFQPAAQRFYQRKLAKSRNNTVLARKAVAHKLSRACYYLMRDLVPFEETKAFG

SEQ ID NO: 475584 - protein, 339 aa, unidentified
MQVSTMGIDLAKNLFVLHGVDHNGKTVLRKKLSRSQFVPFIIQLPACLIGMEACSSSHHFARLFSNAGHRVKLIPPQYVKPYVKTNKTDAADAEAICEAVTRPNMRFVQIKTAEQQGVLALHTERSFLVRERNGCANSLRAMLAEFGCVMATGFSALYKAVPEILEDEENELPHFVRVSVQRQLEHLKALETRIRQTEHELSDWARTQPACQRVEKVPGVGLMTATYLVASVGNGRQFDTAKQFASWLGLTPREHSSGGKQKFGGISKRGDSYFRCLLVHGARAVLRHISKNEKTMPWLAALVRRKHRNVAAVAQACKTARILWSMLFHETEYRPLTGA

SEQ ID NO: 475585 - protein, 350 aa, unidentified
MLYTGLDLHKSFSYITIMNDRGEVIGQKKLPSNGEILNFLKGFEGSMEVAIEATPSWYWLYDCLEDEGFEVKLSHPLRTKAIAYAKVKTDKVDSATLAHLLRSNLLPLSYVPEKPVRLNRELLRYRASLVKIQTGIKNKIHTILAKNNLSHDYTDLFGKAGMVFLHSLPLPENYKIALEGYLFVLETVRYEIGGASKRVQQLAEDDQDSMLLMTIPGVGYYSALLIKSEIGDVKRFPSAKQLCSYAGLVPSTHASGNVCYHGHITKQGSRWLRWILIEAAIHAVKRPGALRRFYFKVERKKGGQIAKVATARKLLEWIYHILKDGKSFQEVEKVAEAMGKGEPVNSSGNA

SEQ ID NO: 475586 - protein, 294 aa, unidentified
MSHDVKYIGMDVHKEAIVIAVLNESGKLGMESVIETKASSILQFLHGLRGELHVTWEEGTWAAWLYDLLQPQVQHIVVCNPRRNALLKEGSKSDKVDAHKLANLLRTGMLRPVYHGENGLRTLRELGRSYQTISKDLTRVMNRLKALYRGWGIPCAGTRVYAARYREEWLSKLPQAGVRRRAELLYQQLDGLQALRREVRPEFLAESRKHKAAKLLRQIPCIGPIRAARLIALMQTPHRFRSKRQLWTYSGLGIETHDSAQYRFVRGRLQLSKKPQQLRGLNDPATLCCTSITL

SEQ ID NO: 475587 - protein, 366 aa, unidentified
MDKRTTVGIDLAKEIFAICVLDAQGAVLERKVLRRAAFERWVESLAAPCTVAMEACGSAHHWGRVFAARGHAVRLMAAEFVVPLRQGGKNDGNDALAIAIAARQPTMRFVPVKTVEQQAILAWHRMRQGWIEERTALLNRVRGLLAEFGLVPGRSPAVLIAAMARLVDEGTAPAPLRAIVQQAREQLHQLDARLGACDVQIQAHARQSPQAERLRALLGVGPITASAVVATVPDARLFRHGRLFGAWLGLTPSQHSTGGKTRLGASSKRGDAYLRGLLVNGARSALQAALRAAPDKATRLQQWMVGLAGRCGYQKALVAIANKHARMIWAMLARDEAYDPQAWQRHPRARTTAVTTMPSATALGNA

SEQ ID NO: 475588 - protein, 355 aa, unidentified
MNDTKYIGLDVHQATISAAVRDATGELVMEAILETKAETILQFFRGLRGSLQVIFEEGTWSAWLHDLLQPHVARVVVSDPRKNALLKDGNKNDRIDARKLSELLYLNKFNPVYHGEHGLRTLKELARSYLTITKDITRVMARIKAIYRSWGIPCAGQQVYAPGHRREWVAKLSEAGVRARAEFYYQQFDGLAPLRQQARRELLSESRKHAAVKLLRQIPSIGPIRAALLVALLQTPNRFRTKRQLWAYVGLALRTYTSGEYRFEHGQLKRSKKVLAIRGLNRNHNHDLKNIFKGAAIWAAGNTGPFQNFYEACLARGLKPHLARLTLARKIAAITLLVWKKGVCFDAKHLTQQAA

SEQ ID NO: 475589 - protein, 331 aa, unidentified
MSKSKAMQNHIIGADLSKRTIDLFCNSHLQIENSKVGFKQMIGWMKEQHINPSEAMIVMEHTGLYSYCFEAFLHQQHIAFCKVNAYLVKRSVGLARGKSDKIDARRLASYGQEKRETLTIEPVAGKELQRLQLLYTTRERLVRHKAALLNAVDEYLNIGLSANDVLITAQKRVIRSFENEIEKLQAQMDQIIATNPSIQQNQHLLQSIKGVGKVLSIATIIKTKNFTRFSTARKFACFCGTAPFEHTSGTSIRGKTKVSPLADKTMKTLLDLSAKSAIQYDKELREYYLRRTGNGKSKMSTINIVRNKILYRMFAVIKRQTPFVENFLQAA

SEQ ID NO: 475590 - protein, 407 aa, unidentified
MTQNINPPARVIGLDAHPDSFTAAVLRGATPAAATLEKMFDHLPMHQLSSWAKKHTTPEDLILLEASGNSFQIVRTLAAIDRQALVLESAHLGRLKEAHANNDKLSAVRIAKAYLAGTAKTVWVPDLKTQERRDWFHAHRKAVKRTTQIRNRLLSYLSDNDVRLPKGTPLAQGPAAHTQLRQLRDWPPRQWLVIEGMLMELHHAEIQRQHWRSLIAQEVLADPQLLSLVRLCGIRDLVAFALGALIGDIKRFANPRKLVKYIGLNPAFDDSGENTWSGGIAGHGRKDLRGLLIESAQAILRSKHPLAKWGAKLLRRKSSRNLTAGAVARKLTVAVWYLLMGRYTPLEEIDDRLSFKVGKIITNVGPQPLKLLGKTRKTLRQETVATLKQGIVYALKPDQPLAPARTI

SEQ ID NO: 475591 - protein, 412 aa, unidentified
MEVLYPCCCGLDVHKKSITACVLWAEAKGKTHKQKRQFGAFTRELLELADWLRQCGVSHVAMEATGVYWKPVWNVLEGAFEILLVNAQHIKAVPGRKSDQKDSEWIADLLQHGLLHGSFVPPRETRELRDLTRYRVSLAEECNRIANRIQKVLEDANIKLASVATDALGASGRAMLQGIVAGEEDQHLLADKAKGLLRNKLAELEKALEGRVRDHHRFLLRELLDDLKRAEGKMATVEAEINRRMLPSEEEVARLCTIPGVNRVTVWGVLAEIGLNMEQFPSAAHLASWAGLCPGSFESAGKRLSGRTRKGSAALRRCLCQAGWAISRTKGNYLSALFHRLAARRGNKRAIIAVAHAVLVIMYTMLKRQQAYQELGADYFDKLHANDLKRSLVRRLERLGHKVTLEPLPLSA

SEQ ID NO: 475592 - protein, 591 aa, unidentified
MMPEKQPITDRKGNVTTKTCSEETTLMNTFAPSSVQVPGTSSAPELANYSLRIISPLTSPEFPFLSSDTISKVIHPAARKPTAAPQSTVNNFAESTMNVSEKLLRRRQNPSGGIAPGASRSSFLDPVRIEKSSPARPAAPVPTSERTKACEAPVSDRRMTAPRCKATKGTHMKSWTEITHYAGFDWAKDHHGVVIVDAQGRIVADFEFNHSLEGWKSFGEKTSAFPNLAVAIETSQGAAVDQLLQRGFTVYPVHPVAAQSYRERKSPTGNKTDHLDAWGLADALRVDGHGWRVLQPTDPMTQQLRLLCRDEVTLIEQRTALVNQLQQALAEYYPAALEAFDDWTKDFTWEFVIAFPTPQSLVKAGKRRWENFLHAHKLWRPQTSEKRLQIFARADQFKASAPIVAAKSQLAVSLCKLLRTLGLQLELYREQIEALFKKHPDHHLFGSLPGAKDFLAPRLLAAIGVNPDRYGSHEVLQCIAGTAPVSYQSGKLHKVRVRWACDKFLRHTVHLWANCFCKASAWGRAYYQQKRDEGMSHACALRCLGQRLLKILFRMLKDKKPYDAELHARNQQKHGSWVLKLANAPVAKPSA

SEQ ID NO: 475593 - protein, 404 aa, unidentified
MKGPIVSIDVSKGKSDYQAFKNLNVKYTGSRSIKHTKEGFDEIVNLVREMETKLETEVCVVYEATGVYHRVLKKVLEDNNIKQFIINPLLSAKTRKNDSLRSPKTDKLDPKSIAKTYYSHSLHNSHKQETIYHELRELSRYYEDILVHIRKDKVAFRAQLDIVFPGYDTLFDDLYGPVALAVIEKYPHPEMLQKKKINTVSKVIQSKTCHRQAASDTMADKAIEYSKTIYSGCDKDDIEVLILQRFIKKLKEDMAEAERTIGEMIKLAQELPDFSIIKSIPGIGDNLAARIIAELGDMTRFKKKNELVAFAGLDPRISESGKNDGDHMHITKKGNKRLRCLLYLAVTCSIRLKRDDNSIKDFYIKKKQQSNPMCSKAAKTACASKLVRIIYSMCKTGELYQYNK

SEQ ID NO: 475594 - protein, 355 aa, unidentified
MGSNNISEAEVIGIDLGDRTSQHVGLNENGEVVATGRVPTTAAAMTKEFGSIGAKVIAIETGTHSPWVSRLLQQLGHRVVVANSRKLRLIYENRRKNDRVDAEYLARLVRMDPKLLEPIIHRSERDQQHLSLLRSRDKLVRTRSGLITHVRGTVKSIGLRVPACSAEAFVKRAKPVIPKELKAAVDPVLGTIEHLNKQIAGYDRRVEQLAKDEYPAAQLLMQVTGVGPVTSVAYVVTLGDPGRFARSRTAGAWVGLTPGQCASGQQDPQMRITKEGDSYLRRLLVSCAQYILAPNRPDSDLRRHGLALAARGGKNAKKRAVVAVARKLAVLLHMLWRTGVVYEPLYNANAMRVAA

SEQ ID NO: 475595 - protein, 369 aa, unidentified
MRKGSKDVKPGVAVAVGIDLGDRVSHWCALDVEGEVVGRGKVVTDVDKIAEQAARWQGVRVAIENGTHSSWVSRALAGAGCAVTVANPSRWRGTAHASKNDTNDAEMLARVVRVDPKLLFPIAHRSVEHQQDLALVRVRAQLVRARTQLINTARGVVKSLGARLPRADAEYFTAKSWTAVPTELRVALTPLYRALAAITVQIRSLDKKVQQLSHARYPETARLRSVPGVGPVTALTYVLTVGHRQRFTHSREVGAYLGLRPRQRQSGERDPQLGIAKNGDGYLRSLLVECAHHVLSRGPDSALKRWGLALAAGGKRRALVAVARKLAVLLHKLWTTGQSWRPFHEQNREETMDAARRAHRSLAAAAATA

SEQ ID NO: 475596 - protein, 427 aa, unidentified
MKHIPIAGIDVGKRFSGMAVLSPDNIVVSRLKIFHDASSNIDKVVDLLLKAEKDFAIRSVVVMEFTGHYHKIFFHSLCKAGFDVCVISPLQTDFIKNLGIRKVKNDKVDARRIALLYCFQELKSTSIPNEDLECLRSLCRQYFNLCDELTAYKNRLIGVIDQIMLNFTDVFKDICSQTALAILESYPTPKHILKAKESNLIELIQKASRKNVKWASKKYNLLISKAKDFEPLSLDSAANLAMLDVNISMIKSLSKSLEKVITAILQLLDEDATKDMPILSITISLLCSIQGIGLITVATVFAEIGDFSAFSKPDKLVAFFGIDPSVKQSGQFEGTRNKMSKRGSRLLRRVLFTATLANVRKKRNGNELNLVLYDFYQKKSTNKAKKVALGAVMHKLVFIIFAVLRDKKLFELREPEEHAKMLNKKAS

SEQ ID NO: 475597 - protein, 339 aa, unidentified
MSEVYAGLDVSDKMTHVCVMDGAGAVVWAGACATDPEVIARTLKARAPGHVRVVLETGPLSAFLYHGLAERGVAVVCVCARHAKGVLSARVNKSDPHDAEGLAQMARTGWFKAVRIKGEATHMDRARLKIREQLIAARQAMAGQLRGLLKLFGLRLGKVTTPGKRRERLVALFARKPELEPILAPLIESLEALEVQIARASKALAAQAAADPVAARLMTAPGVGPITALVFKTSIEDPGRFARGEDAGAFAGLAPRRNQSGERNIRGRITKAGDPMLRGALYESANSLLARVKRPCALQAWGKRLAETKGAKRARVAVARKLAILLHRLWQSETEFRWA

SEQ ID NO: 475598 - protein, 410 aa, unidentified
MNLDEGSVVVGIDWADRTHVCCLVNPKATARQMVQVGASAEAFGTWLDTIEQQYPEGKIVVAVERSEGALVEMLLARSRLVVVPVNPVVLHRFRQAFVPSGAKDDPGDAALLADIVRTHPERFAALRPAAALLAELAALVRERRHWVDTRTKLVEQLIAVLKKYYPQGLQLVGQIVGSPMTLEFLQRWPDLPAAQRAKWSTLERFYRQHHSGRDEVLQERHERLRTARCVSENEAYLRPCRLHMLAIVHQLEAVNESIAQFEAAITELYAQAPGHEVIDSLPGAGEALAPRLWVACASEGNDLSAETMQLRSGIAPVQKQSGNSKAVCFRWARPRFLHQTWTEFAHHSIKTCSWAGAYYHARKAKGHGDGAILRALAFKWIRIVARLWKDQAPYNEAFYLAHCSARLATA

SEQ ID NO: 475599 - protein, 351 aa, unidentified
MSNPTRWVGIDLHRRRSQIAIIDEHGELSLSRRIVNDRDTFRELLGDPDATHVALEATYGWEWLADLLEDAGYDVHLAHPLRTQAIAAARVKTDAVDAKTLAHLLRCGLLPEAYIAPPELRDLRELLRHRAVLTRMRTAVKNRVHALLARQGILPEHADLFGKGGREFLASLELPEGSRGRLDSLMSLIGDFDREITATTREIDARAKTDERVPVLCQLPGVGRYTAMLIIAEVGDVKRFPTARHLCAWAGLAPTVRSSDGKARLGHISRQGSPALRWALTEAAQKIPTGGGPLRAMFERIAKRRGRKIAKVAVARQILTLCYYGLRDGEIRCLKHQPIDDHDDQELAEAA

SEQ ID NO: 475600 - protein, 373 aa, unidentified
MPKYSTAFGMDVHLRSTTVCALDADTGEAVTRRFPGNPWGEIAGWMDGFPGPSLAAYESGYLGFAPQRELAGLGVECVVAAVSKIPRSAADSASKNDRNDAARMAKAILAHDISPAWVPSPEVEGVRDLAGAYDGATARLATAKQRLLAFLAKRGFVYGGTTPAGNPRKYWTYDFLRWLDKARPEDDGGVRTLAALRNEVEAAAEARADLLSEYRAAADASPIAAEAAALQSIKGCAFALAAAFSAEVGDFTRFRSGRQVTAYFGLAPSQRSSGDSVRLGGISGAGNALVRKLAVEGSWCYAAARHQPKLMPRDTGVPLEIRMHGRKGSERLLRRREEMLARGVPAAKANAATAAELVRWLWALGMMCREGAE

SEQ ID NO: 475601 - protein, 337 aa, unidentified
MKLMIIGMDIAKQVFQLHAVDPQSGQVERFKLKRAQVLEFFAKRAPSTVVMEACGSAHDWARRLQALGHEVKLISARSVRPFVLRNKTDAADARAICTATQQPEARFVAVKSEAQQTVLAIHRVRAQLMKFRIMQTNALRGLLYEFGEVLPEGYRAFSKVFPAALARAAERLPAMLIDSLREQWARAQDTDREMAVLERSLNHLFRHNLDCQKIADIPGVGLLTATATVAAIGDVRTFKSGREFAAWLGLVPRQSGTGGRVRQMGLSKRGDTYLRTLLMHGARSVIIQGERTDWVDGLLKRRPFNVAVATVANKLARTIWAVLARPEKYQASPTARA

SEQ ID NO: 475602 - protein, 398 aa, unidentified
MEAAHGVVVGFDVGRYSHHMTAIDAHTGEVTVSKPVGQDESEIRSALEPYAGTDAIAVVDQPGDLSSLLFAVAREMGLDVGFITPKAMAKGIDLYGGEAKTDRRDSFVIADLALRIPSLVHGVSARRGDAEELAALMSYDRELTDDARRAAARIHGLLLATCPALNGVFAGQRVKRRLPLALLARYGGANGLASAGKGRVRRWVGAQRGFGHRGLLFVEEVFSAIASQSVEIVSSAFYDELIKIEAASLRSALDARERVGRRVDELLASMPDARVLLSMPGLGRVTAATFIAEVGDISRFSSAAKLAAYAGLAPRVRQSGRSLNSVTKPRAGNKRLKRAWVLSAARSIDFCEESRAYYDRKRAEGRCHYSAVIALARRRINVAYAMLRDGQRFESRLG

SEQ ID NO: 475603 - protein, 348 aa, unidentified
MRFYNRQHRHYCGIDLHVKTMYVCILDATGQVLVHRNVKSTPEAFLETIAPYRDDLVVAAECMFTWYWLADLCAAEGIAFVLGHALAMKAIHGGKAKNDKIDSHKIASLLRGGLLPQAYVYPAAMRSTRDLLRRRLHLVRKRGQLLAHIQNTRAQYNLPEFKRRLAYPANRDGVPEQFADPSVRKSVDVDLVLIDQYDRLINDLEMTLVRDAKRHDADAFHRLRSVPGIGKILAMTILYEIHDVTRFERVQEFASYARLVKCGKESGGKKLGTSGAKMGNVHLKWAFSEAAVLFLCHNAEGKKLLAQIQKKHGKGKALSILAHKIGRAVYYMLVRGTVFSMEKFLHAS

SEQ ID NO: 475604 - protein, 405 aa, unidentified
MRYYLGVDWADQTHAVWVVDESGTKIAARAVSHTAEGLGEWGRELDEWRAQGIDLWAAIERPDGRVVDLLLDHGVVVYPVNPKALDRARDRFRQSGAKSDPFDARVLADFLRTDQAHLRALQPSSEAAQELKLLTEDCQRHIRQQTRLVNQLTATLKAYYPRALEVAEVTSALAREFLPAYPTPEALTALTERQWQRWARAHRLPEARAGELWAALRQPQLPVPAHVVRAKARLMQTLMEQLRPVVAAVAQYRKAIDDFFARMPAAQWARTLPIGKHGITAPTLWARLGDAPGRWESFRHLQAHAGTVPVTKRSGKQQRVVQFRFACDKALRSVVDQVAYLSLLSSAWARPYYDQQRARGHSHRQALRALGAKWLKIIFIMWQRQVPYDEQYHLATMTRQQLGRR

SEQ ID NO: 475605 - protein, 326 aa, unidentified
MKKNNMVCAGIDTGKHKLDVAITGQGEQLRVDNTASGHEVLTAWLRQHRVERVGIEATGGHEQGIVCHLRKQSFVVVVFQPIQVRAYATFHRQLAKNDKIDAALIAECAADVKEIHDPADPRLEPFAQRMTLIEQIVEDIARFKTRHESCRDKQIQQSWKEEIKRLEKRKRAELKTLAAAIRKHEDLGKRLDLILSIDGIGLKTAIAILVRLPEIGTVTREKIAALAGVAPYDDESSDQVRERHIRGGRGRLRKSLFCAALPASFRWNRQLIEIYRRLTAAGKSHKVALIACVRKLLIFVNTVVERGTPWQKQQPRAKADLGLQGT

SEQ ID NO: 475606 - protein, 375 aa, unidentified
MSNSIIWIGMDVHASSINLAYAVDDGPIEHFGKICNSIESIRKTIKKLHKLGTDLHACYEAGPTGYVLHRQLKQLGVDCIVVAPSLIPKKPGDRVKTDKRDAKKLTQLYRAGLLTAVWIPDEAHEAFRELLRTRERAVKDRTRARNRLTKFLLVIGRRQPSNIKSWGSRHFLWLNKQQFEHKAHQSVFVDYLSEVTHQNERVLWLESELSSLLPSLDKKVQAVIHALQALRGIAVLSAATIVAEVGDLMRFPTASELMGYSGTVPSEHTTGQRQRKGRITKTGNAHLRRVIGEAAKQYSRRPGIGAPLKRRQKGLSKEVRDIAWKAQKRLHQRYRSLRNKGKEANKASIAVGRELLGFIWAIGRQVEAEKELQVA

SEQ ID NO: 475607 - protein, 359 aa, unidentified
MRQRMFIGLDVHARSVKAGLLDGESGEVTVRSAPPRTEELVPWLREQGESLSVAYEAGPTGFGLARALAEAGVACIVAAPSRIERAPADRVKTDRRDAIRLARLLRLGELTAVRVPDEDEEAARDLVRAREDARTDLMRARHRLSKLLLRQGLVWEGKAWTQAHERWLATQHFARRPLQITYEEAMATVQGVRARREALDAAIAVEAGGPRWAETTGRLACLRGVSTLTAFGLAVEVGEWERFTGRSIGAYLGLVPSESSSGTRRRQGAITKTGNSHARRLLVEAAWQQRRSSWQGGRELARRREGQPAAVRARAELASRRLYRRWAALDARGKRPTVSAVAVARELAGWCWSLAVMEV

SEQ ID NO: 475608 - protein, 376 aa, unidentified
MSLQEDGRNPSQRKEYVHHPDLLLGGVDVRKAKHQACMGTQSTMRCRKFEFIHTREGFQRFEQTLRNHLVNTRGQRLLIALEPSGSSWQALYERLQGCGYEVCLVHCQAVRNNRKTMQAGTSKTDATDAYSVFALLRQGKCFLPVARDPELKAAYRLMQRHMALKKRVRQRRNQLRAALHLAFPELHPLIQDLTQPTALRFLQTPPTPATVLHNGRTGFLEQCQRRRRCGQWRSDTFNTIYDLAPASIGRTDPYHLDAFEITALAQDLADALAKHQMYLDKVLERLAHRPAFQLLLTLPRIGRPTAAAILTAIGDIGTYTNGTQLVKLAGLAIRLFERGSSMRQLPPISHVGSAYLRYWLYHYAKRLVAHEPHCRA

SEQ ID NO: 475609 - protein, 340 aa, unidentified
MKKFSRKKHFVGIDISQEVLDIALINEDSYGSFEDKQVGNSFNGFEQMYDWLIKRKVKIEECMFCMEHTGTYGLLLFAWLSQMGLDYCVEPGLKIKRSLGLARGKNDKIDARRIADYAYTNKAKLEHFELPSTLIIQIKQFLTYREQLVKIRTSLKNSLKSHKICQKVSGVSLISNEITVQIKDYEKRVKDIESQIIKLIKTDPEIKKNFDLTTSVKGIGLVIGTFILVTTNNFTGFENGRKYACYSGISPFGYSSGSSIKGRTQVSQIGNKKMKSLLSNGANSACKYDPEIKFYYKRKKAEGKDHKLIINAISCKLVNRVFATVKRQTPYVNIYQQNFV

SEQ ID NO: 475610 - protein, 456 aa, unidentified
MSDRSRRGLSRGDRRRNERLTALREIVTRETAVISFDLAADKQAVAVCAPDSRVLTQRTVAAKAWRRGQAVAWGIERACEAGFSSVVVACEPTGHRWRVLDQLAAEQGVRLVCVQPLLVRRARQGEDFTRNKNDDTDAVIIARLVGELRCYLPERAEPVWARLRHLGARRARLVVDAGAARQQVRDLLECAWPVVLEAAAHPLVTKSWLAAVTVALERVGEGGDLSVIRRWGWPRFAAAVRRELGATRCYSAIVRAVFDAAVAPAAAGLGVAAQRAGALERARFALADLAHARREITVVEAGMLTVLDHLGVSELAASIPGVSPVQVAAILAESGDPHRFTSARALVKHAGLCPRANESGTYAGHTGISGRGRPGLRLAAWRAVFTALQHNPVLAARYQLLTGRAQHPLTDTQARVAVAASLLRQLHAMILTGSPWDAATAAGLDRGDPTTGAAAA

SEQ ID NO: 475611 - protein, 311 aa, unidentified
MTETNIGIDISKDHLDVHRLPGDERRRFDNSKAGHKALIRWIGDTPARVVYEPTGYYHRALERALAAAGMPIAKVNPRQARRFAEATGNLAKTDALDAAMLTRMGAVLSLEARPVPSAIINDLRDLRTARNALIKDQVAALTRAKAITLPLLKRQSAARLKQIEAQREAVDAEINALIQGDPDLAQRFAILCSIPGIAEVSAAMLLIEMPELGSLDEKQVAALAGLAPIARQSGNWKGKSFIRGGRQQVRQGLYMPALVAIRFNADLKTKYEQLIKAGKAPKQAITAVMRKLIILANALIKKDRKWQTRVA

SEQ ID NO: 475612 - protein, 320 aa, unidentified
MNPVFIGIDVSKDYLDAVVRNSDEPRRRFSNDTAGIEALVEWAKRISPERIAFESTGHYQKSAVGALLTAMLPAVVVNARQVRDYAKGIGQLAKTDAIDAAVLARFAEAVETRVRPLPAPEIIQFQQLHDRRSQLVGMLAAEKNHRHAGGPPQVLQSIDALISHLENQIADLEQRMDKIIEESEAFQARNEILRSITGIGPQISRTLLAHLPELGQGTRQQITALVGLAPFNDDSGKKQGVRHIVGGRRKVRLGLYQAAVVAVRRCPTMKAFYANLKSREKASKVALVAVARKILVMAHAMIREMKKYEPRANSDCPKTA

SEQ ID NO: 475613 - protein, 343 aa, unidentified
MGEISMIGLDLAKNVFQVHGVDASGAVVVRRQLRRGQVEKFFAQLPACTVGLEACGSAHHWARVIGRYGHQVRLMPPAYVKPYVKRNKNDGRDAEAICEAVNRPTMRFVPVKSVEQQATLAVHTARALLVRQRTMLANSLRAALSELGIVAAQGIKGLRELMVKLEAPNQEIPEMMRGALLMLAQHWQALDVDERALEKQIAKAARSDREARRLMEVPCVGPIIASTVLAKVPDATVFRSGRDFAAWIGLTGRDHGTGGRHRPGRISKQGDRTLRALLINGASAYLRHQRVRGVSNPWLRGLLARRPYKVVMVALAAKTARILWAMLVKGEPYRDRASAPAAA

SEQ ID NO: 475614 - protein, 388 aa, unidentified
MIGMDPHKRSVTIEVMAADERVFGGGRFGTDVAGYRSMLEYLKQWPDRVWAIEGCNGIGRHIAMRLLADGQEVIDVPPKLSARARVFSTGQGRKTDATDAHSVALVGTRMSGLRPVINDEQLAVMRVLVDRRRALGEDHTRMISQVHHLLLELIPGGAKKDLSAAQAKALLAKVRPRDAAGKIRRRVAAELIGDLERIYQRSKAADKELKELVAASGSSLMDLHGIGPSGAARLLVEVGDITRFPDRDHFGSWTGTAPVDASSGDQVRHRLSRGGNRQINRVLHIMATVQLRHPTEGRAYYDRRKADGKTSMEALRALKRRLSNIVYKTMVDDAITHTVAGSRTGPGGQTGHDSDSSATGSHPSAGSSDKPLPGPARPQPRTPLPAAS

SEQ ID NO: 475615 - protein, 420 aa, unidentified
MSVTDAVGPVDPTHDPSRPTAGVDWATADHAVAVVAPDGEQTLRFSITHNAAGLRTLVKRLLAADVAEVGIERPDGPVVDALRQAGLTVFVIPPGQLRNLRSRYGSAGNKDDRFDAYVLADVVRTDRRRLRPLLVDTPATTSLRQTVRARRDLVAHRVAVANQLRAHLQICFPGAVGLFADIDSDISLRFLERFPTLEKAAWLSPKRWTAWLSSVGYSGRTLPDTLHQRLTAAPPGTTGPAGDTAATVTAAFVAVPRSITTQIETLAAQIAEQLQLHPDQAIFTSLPRSGRVRAARLLAEIGDARGRFPTADALACLAGVAPSTRQSGKVEVVCFRWGADKQLRDALCDFAGDSRRANPWAADLYQRARNRGHDHPHSVRILARAWVDVIWSCWTTHTPYDPDRHGALQRILNQDQPTAA

SEQ ID NO: 475616 - protein, 432 aa, unidentified
MNESIPAASLEGVAAYIGIDWADQKHDVVLRSAAEPNKVEHRVIKHQPGALMEWIGQLQQRFGGHGQILVCLEQSRGALIYHLMGYEFLELYPVNPLQLARYRETFSPGGAKDDRPDAELLCELLYCHRDRLRAWKADSELTRKLAFFNEGRREAVDQRTRLSNAIKSQLKVYFPLALELLNQDTSTALAADLLLRWPSLEALQKQIPHQLRKFFYAHNCRGESTMLERLELVKQAQALTRDSAVIEPAAFRVQMLARQLKNLLPDIARYDQKIAELFAAHPDRFLFENLPGAGRVLAPRLLSALGSDPNRWESAQEIATLYGVAPVRRASGKKSGKKGEKRASVHFRQACPKFLRQSFHEFAGCSIRYCCWARAHYEAQRAQGKGHHAALRAVAFKWIRILFACWKQRIPYDPQRYLQALQQRASPYANAC

SEQ ID NO: 475617 - protein, 345 aa, unidentified
MEPMYYIGLDVHKRKISYCVKDGSGKVFAEGSLSATRLDLDHWMRSLPQPWSAAMEATMFTGWIYDHLMPHAAALKVAHPLMLRAIAAAKKKNDRIDAGKICDCLRCDFLPESYMASTAIRERRRTLRYRNLLVRQMVQMKNKIGMLLMEAGASYNKQRLHKAGYFRELLASNPDIDEGLGSLLRLCRETVVRLGKTESALVRSLERDSLLVERVERLMTIPAVGPITALTWALEVGDVQRFSSIKKAISYCGLCGAEKRSANTVQRTPLSKQRNKHLQTTLIEAAKMAPRNSPELAMLYDKEKQKGNANRATLAVARKLVAYLMAVDRGQRNFQIAERNSNIAA

SEQ ID NO: 475618 - protein, 386 aa, unidentified
MFITSATVVATTARANDTTLFASLELSKSKWVVTINSPGSEKYSRHAVEGGDGAGLLDLLSRSRAKAEQRCGAPVKAVVIQEAGLDGFWIHRLLIANGIESHVVDAASIAFPRRHRRAKTDAIDGETLLRTLMAWARGERRVCSMVRAPSPEEEDRRRLTRERGTLLKERIQHTNRVKGLLSGQGIRGYNPLRRDRLERLEALRTGDGRELPPLLKAEIRRELERLALATAQLATVERARDALVRTEAEEGNNPAALLLKLKGIGPEFASLLWLESLFRSFANRRQVAAYGGLAPSPWQSGGVERDQGISKSGNRRLRKTMIELAWMWLRHQPDSALSRWFRARVGAAKGRVRRIGIVALARKLLVALWRYVTQGVVPEGAVFKAA

SEQ ID NO: 475619 - protein, 411 aa, unidentified
MRVHHNVCCGIDVHKKSVTACLMWGPADKEPEFEIRRFGTMTRDLQKLAEWLKQAGCEAATMESTGSYWKPVWNVLEGQIPRLILANAQHVRALPGEKTDRKDGKRLAELTRHGQVRPSYVPPRAILELRDLTRYRSKLLSAGSSERNRIQKVLEDANIKLGSVLSDVFGLSGQKMLQQLVKKDTVDIANVMQLAHWKLKPKMEAIEQSLEGKLTDHHRFMVKASLEHMRFIEQQLKRLDEEIQRRLQPYQEEYALLQTIPGIKETGAARILAEIGADMSPFPDGDHLSSWGGVCPGNNESAGKKFQSKIRKGNVHLLSALTQCAWAATKKKDCHFRNKYYRLKSRRGSQRAIVAVDHAMLKCVYVVLSQRKPYEEPKPVSLTEAQKQRKASSLCRQLRALGYDVKIQKTA

SEQ ID NO: 475620 - protein, 360 aa, unidentified
MVGQRTSVGLDVHARSVVACGLDRETGEVVERRLTPDHHDILSWINGLPGPVSVTYEAGPTGFCLARALAVAGIECQVAAPSKLIRPAGDRVKTDARDAAHLARLLHLGQITAVAVPTADQEAARDLVRAREDCRGDLMAARHRLSKLLLRQGIVYYDGAAWTSRHELWLRKQRFDNRALQLTYDAAFDAMSACIDRRERLEAAIEAMAADSEFTPVVRRLGCIRGIATLTAFGLATEIGDWHRLTGRTIGAYLGLVPSEFSSGGSRAQGEVTKTGNKHVRRLLVEAAWHHRSPYRPGQVLRRRWDLASPAARARGQAANRRLHYRWTGFDQRRKRSVVANIAVARELAGWCWSLAVLDE

SEQ ID NO: 475621 - protein, 427 aa, unidentified
MRVLYDRVAAIDVHKDMIKVAVRVPGKKRGTRTTDVLEYRTFYGVLQAMARELRGRGVTHVVMEASGVYTEPVYYALTELDFEEVMVASPAHVKALKGHKTDARDAVRLLDLYECGAVMRGSYIPSPDLKEVRDLVRYRVKTVQARTSEIQRLQKTLESAGIKLDSVVSDITGMSSTAMIEALISGERRGQVLADLALGRMRTAGKLADLSMALTGRFTDHHALMCRLHLDRISMFDGAVGGLDAKISPLVARYAAEAELLRTLPGFGDVVVSGWLGAIGPAPHQHFATAERLASWVTLCPGNYISARKSRSGRTGDGGNYIKPLLVQAAWAAIRTPGRLQARFHRLVRKFGGPKNKGAQKRAIIAIAHTLLKIAYAILKTGKPYQEPGADFYTRRDSAQARQDYLLRQLRKLRPGCVITITPAEAA

SEQ ID NO: 475622 - protein, 402 aa, unidentified
MPMLSIGIDVSKGKSTVCGMKPGGEIVYTPFEVQHTREGMSELVSLLRSSGEEVRAVLESTGSYHCPVVAALLENGIFVSVVNSLRMKRFCSQSIRKVKTDRIDAMQIALYGLAYWQELQPTRLPEDTYRELQLLARQYYQMTSMLIKAKVDFNALCDQVLPGMQELMSDHAGRHKLSDFVLRYHHTTHILEMGETRFRKDYCKWAEKKGYRNCERMAAHIFATAQNGIPVLPNAPSTQIVITEAIRVLHTVEASRDAILTQMQALAKTLPEYSLVREMPCIGDTLAPRLIAEIGDVRRFHSKRALIAYAGIDAPPYQSGKFCANNRHISKRGNRYLRKTGYEVMQSYVMHKPANDPIFTFIEKKRSEGKCGKLAMVAGLNKFLRVYYGKVTELCRSLSAIE

SEQ ID NO: 475623 - protein, 490 aa, unidentified
MARLLEHSPRPESTYRPTWAVVFGKAEKMQDSDQRKDNADSSKQIAGLPVVRHKVAGIDLGSERHWVCAATVEGSGREVADFGATTCELIRMAQWLNARKVESVAMESTGVYWIAPHEVLEAEGLEVMLVDTRQLARVPGRDKKSDPFDCEWIQRLHSCGLLMGSFRPKEAVCMLRTLVRDKGNLVAEAGDWLRRMQKSLDQMNVRVHRAVSDIDGVTGMAILRAIVDGERDARQLAKLRNPRCHKSEEEIAEQLSGHWREDHLFSLRQGLKMYDAIQERITDYEKEILQKLAKMEREECRGQEVPKSKKPQKGRAIQSRGAEPMRQALYRMSGVDLTGIDAIGVETVQVVLSEYGPDLSRFPTEKQFVSHVTLAPHKPTSAGKPVKKKKRNSASTRVAAALRMAASSLRHSETALGAYYRHIARRIGGDVAVFATARKLATIIYRLLRWGQPYVDEGAQTYEQRYRENRIKSLTARAKELGYQLTPTTA

SEQ ID NO: 475624 - protein, 395 aa, unidentified
MFIVGIDIAKRSHEAIIIAEDGQVVRKAFSFRNNCTGYNLLLEQVRRLTLVKSQIVFAMESTAHYWLALYARLLKDGYTVMVLNPIQSHSLRELYIRKAKTDARDSLIIADLVRFGRCKASNVPQDKILALRELCRSRAYLVDMAADLKRKLIALLDRIFPEYESLFDSVFSKASIAVLSKYSTPQKVKNANLRKLTDILMESSNGHFGEWKAHQLKEAACSSFGIDDSGGVYSTLLGMFLEQILSLTAQADSLEKQISVFFQEFNNPLTSIPGVGTVLAATSLSEIGDITRFSSADKLLAYAGLDPSVKQSGEFKSNQNRMSKRGSPYLRRAIWLASTVAVHRDPMFQTYNEKKLSEGLHYMNVIGHVSRKMTAVIFAVLRDGQPYQPILQSAG

SEQ ID NO: 475625 - protein, 369 aa, unidentified
MADRITYVGLDVHKESVVVAMAAGGLRGEVREYGRIANTPAALDRLLRKLGGDGVRLRFCYEAGPCGYGIQRQLSARGHECVVVAPSLIPKRAGDRVKTDRRDAASLAKLHRAGELTAVWVPDRRHEAMRDLVRARLDAVHSLRRARQQLSGFLLRQGCHYGRPAWTKLHRRWLAGLNFGQAVHHIVLEDYIAAVEVAAARRDRLTAQIEAMLPDWTLAPVVAALQTLRGMALVNAATLIAEMGDLSRFANPRQLMAYLGLVPSEHSSGTSVKRGGITKAGNRAARRLLIEAAWSYRFPARLSRELLLRQESQPKPIRDIAWKGQLRLCARYRRLARSSKPANVVTTAIARELSGFVWAIAQQVTVTTG

SEQ ID NO: 475626 - protein, 368 aa, unidentified
MGKSSKLFVGMDVHKDSIDVATGEDAAGEVRHYGAIGGDLGAVARLARKLESQGNALVFVYEAGPCGFGIYRLLRARGHQCWVVSPGMTPRSNADRVKTDRRDALKLCRLARAGELVPVPVPDARDEAMRDLVRTREDGVIMQRQARQRLAALLLRNDIRYAGKTAWTAAHRRWIAELKLPHEPQRIAFEEYVQAIDEAGGRIERLETAIRAELEHWRWAPGVEALEAFRGIQTIHAVRIVAELGDLARFAGARQLMAYLGLVPSEHSSGERRRQGRITKAGNSSARRALVEAAWAYRHGARVSVIIARRQTGLPKPVTDLAWKAQLRLCRRFRRLSARGLPKNKIVVAVARELAGFVWALGQTVRPI

SEQ ID NO: 475627 - protein, 349 aa, unidentified
MRFYTKTHNHYCGIDLHAKTMYLCILDKHGQILLHQDMKSRPEDFLAATQPYRDDLVVAAECMFTWYWLADLCQQEGIEFVLGHALYMKAIHGGKAKNDKVDAFKIATLLRGGSLPKAYVYPPAMRATRDLLRRRLHLVRRRGNLLAHIQNTHHQYNLAPPKAKIAYKANREGVAEAFSEPDARKSMEVDFLLIEHYDTLIRDLERHLERRAKQHDPQAYHRLRTIPGIGKILALTILYEIHDIGRFDRVQDFLSYTRLVKCDHSSAGKKLGTGGAKIGNVHLKWAFSEAAALFLRNNPRGQKHLRRVAGRHGKAKALSILAAKLGRAVYFILSKERAFDMERFLARKN

SEQ ID NO: 475628 - protein, 423 aa, unidentified
MMKLKYSICCGLDVHKNVIVATIVTTNKDGISEYLQKSFSTINSDIQRFHNWLIENNCYHVCMESTGKYWIPIFNYLENDIDVCLTHPKYVKAIKGKKTDKKDSKWIADLYKFDLVRCSFIPPKDFRQLRELARYRFKLVCMKSSEKNRIQNCMTISNVGIASVLSDPFGKTATEIISYLLEHTADSMDEKAVRKLIKKGAKSKSDEIIEAIKGYTIETDQAKKLELAQGHLEYLDDMITQTEVELYVRIKPYYEFVEFVSTMPGMTELSSTIVLAETGVDMDIFDDAKHLCSWCGLSPANNESAGKKKSVRIAKAGDYLKPMMVQCALAAIKSKKQPYFAIKYGRIKKRRGHKKAIIAIARMMMVCIYHMVSEKKPFTPTDYEELMNPQNHVERVVLNENNVFAYLESLGYDSSKLVKRNDN

SEQ ID NO: 475629 - protein, 490 aa, unidentified
MTPRLETPPPPPKTRHARAKARAHAKAQQRRDDEQRRLEALPVTRPHAAGIDIGGRSHWVCVGFTDGGPSDLVREFPAHTQGLHEIAAYLREHGVTSVALEATGIYWVALFELLEQQQFEVILVDPSYTRQLRGRPKTDRRDAQWIYRLHSVGLLPAAFRPAGAIATLRSYVRHRSLVVHQAGECIQRMQKSLEQMNLKLTTVLDDITGETGRRIIRAILCGTRDPAKLAKHRHPQCHHSEEEIARALEGTWREEHLFTLRAAYEAWQFHQGQLSKVDAQIAAQLRLLAPARELPPLPAKRCASGRRANDPRFDVRGALYAVLGFDLTELEGISESTALTLISEVGTDVGRFPSVKHFCSWLGLCPQVRKTGGRVKSSRTRTGAGRAATALRLAAGSLHRSRSALGAYLRRMKSRLGKAAGITAAAHKLARLVYWSLSQGVAYARQAQESYEEAQRQRERQSLEKRARRLGLDLVPRGSGGAVPAVAGVS

SEQ ID NO: 475630 - protein, 351 aa, unidentified
MNYVGIDIHKRYSVCAAQDEQGRELGITRIEGDCGSGFAQFLGRLGGRSTVAIEACWNWGKVFDALEGLPEVAEVVVANPLKTRLIGEAQIKTDKIDARALATLLRGHFIARVHVPPKAARQRKDQLRQRLYWARLRTRIRNRIHALLDRQPPLALPQCSDLFGVKGRTHLRRLELPEPDGTLLREDLALLDLLHAQIKAQEQRIAASNIADAATQHVQSIPGFGPILACLIATEIDDITRFVDAEHLCAYAGLVPMTRASGGHTRHGPLLRAANHWLRWAFIEGAWVAIGCSAYFGALYTRHRARSKTANTAITIVARRMCRIVFHLLTEQRDYTAEPPPKLSPAAPHKD

SEQ ID NO: 475631 - protein, 503 aa, unidentified
MNRGQLIGLMENSKIRSIYKSQNARIQAIFEKAQSPRKVLCVAIDYAKAKHVALICDGNGDILKNPFTVLNSPEGVAFLLEEIAATARYRKIPKTQIILGGEDIPSYVDNFILALKKSGIFVARVNAAEAKLNRENSLASTDQLDLLGIAKTLLSRRARSAGDPLDDGENLYLRIRDLSRTRRHLVKQKTACGNRIHTLSDRLFPGYLSSSSSVLNPFSPPCLDLMKERFSAPQIASRKPESLAKFLRKYSVHHPDEKAAKLITLARNALPPGADRVFALQQSLAASAELYLCLDRNAQHLKREAANALLQTPYAMLTSIAGVGPTLAAGLAGELGDPKRLGDIDSLCGYAGIVPRSNQTGGPDKPARQGGTSPKCNRILKDWLVQASQKVALYGPDEWKQRHARWQVGGQHAAFAGAKRLLRLTRTMTRQQIPWISPAARARNATRETRARDAEATFEILVHKWRTLPDWQELVFAPDRPLGFWRKLSMEMHGARLPLRGDE

SEQ ID NO: 475632 - protein, 347 aa, unidentified
MVADEVDYVIGVDTHRDEHVLAAVTAPAGTIVAGEAVRTDARGYRAAARFAARFAAGRRVWAIEGSGSYGVGLARYLAGRGETVLELSRTPRGERRLRGKDDALDAARTARAALASDRLALPRAGERREALRLLLVARRSAVDVRREALSQLRAVIVTAPDPLREQLRGLPTGALLDRCRRLRRSRSTADELATRLVLRSLARRIQAATVEADELERELLTHVCALAPALLEEPGVGPIVAAQLIVAWSHHGRLRSEACFARLAGAAPVPASSGQTQRHRLSRGGDRQLNRALHTIALHRRQHDARTRDYIAKRIAEGKTAREATRLLKRYLARHLYRLLEQQPQMT

SEQ ID NO: 475633 - protein, 344 aa, unidentified
MNKLSRVGIDLAKNIFQLHGVDRHGEGAWRRRLRRNNWLKVLLDKVEPGCTIGMEACTGAHHWARELQAKGFTVKLIAPQFVKPYVKSNKNDANDAEAVCEAMSRPNMRFVAVKTVEQQDIQATHRIRSELLGQRTAKANQIRGLVAEYGLVAPQHLARLRAAVPDWLEDAENGLTSRFRGLLNGLWDDLNRLDQRIAELDREITSMAQNDPVAKRLKQLRGVGPLIATALVAAVGNAQQFANGRQMAASLGLTPKQHSSGGKDRLLGISKRGDAYLRTILIHGARSVIRTAKHKDDRLSQWVTSLAARRHANVAAAALANKTVRIAWAMLRHGTDYQPDRIAA

SEQ ID NO: 475634 - protein, 432 aa, unidentified
MKLPKHLEHINRYAAGIDIGSKSHFVAVPEGTDEQPVREFSTFTADLERLAGWLISCGVTTVAMESTGVYWIPVFEILESHGLEVKLVNARHVKNVPGRKSDVLDCQWLQQLHTYGLLHGAFRPTDEVCTLRAYVRQRGTLVRSAASYIQRMQKALAQMNLQLHNVVADITGTTGMRIIKAILHGERNPDVLAAMRDARCKNSVATIARSLKGNYRPEHLFSLQQAVELYEIYQTKIADCDQQILDQLKSLDDSPNNTPPINVGDALIHMSGVDLTSINGIDTNTALKVLAEIGTDMSRWKSSKHFASWLGLSPGTKISGGKILSSVTKPVANKAAAALRMAAFTLFNSKSALGAYLRRQRARLGAPKAITATAHKLARLIYAMLTHGTAYVDAGQEYYEERYRVRVIQSLKRRAQELGFELVTVQKETAAV

SEQ ID NO: 475635 - protein, 379 aa, unidentified
MPDVSPNADQAAITTYVALDVHKRSIVAAVLPALGGEAELHEIPNTERAIRRLIERLGDPDRLSVCYEAGPCGYAPYRLLSRIGVATDVVAPSLIPTRAGDRVKTDRRDARKLARLYRAGELSFVRPPSPEQEGLRDLMRCLDDLTAARRAARHRIAKQLLRYDRIHPGKKSWTKEHREWVTAQRLDDPLADEALAQMRVHLGSLDAQIEALELRLEEIARTDRWVEPVRWLTSFRGIATKTALGLIAEIGDFRRFCSARELMSFLGLVPSEYSSGEQRHRGHITKSGNRHARRLVVEAAWHYQHRPNLSKRQRELAPLLPAEVAARAWRAQVRLNHRHLALQRQGKRSTVANVAVARELTGFVWAAMTDQPLREEVSA

SEQ ID NO: 475636 - protein, 343 aa, unidentified
MQTVTTIGLDIAKSVFQVHGIDAKGNVVIRRQIKRRQVLAFFQKLPRCLIGIEACATAHHWSRELQAIGHSVRLMPPAYVKPYVKRHKNDATDAEAICEAVTRPNMRFVATKTAEQQSCLSLHRTRHLFIRQQTSVINVIRALFAEFGIVAPVGRRGVEQLLRVAADLSDKRLPDIARACVAALGAQLRMLKAQILQFDRMIMAWHRSSEASRRLDDIPGVGPALATALVASVADPNVFRSGRDFSAWIGLVPKQNSSGGKDRFGSISKRGDRYLRSLFTTGALAVIRYAKIHGTRHRPWLTALLTRRPTKVAAIALANKIARMAWAIMAKGEHYKEPAALAA

SEQ ID NO: 475637 - protein, 432 aa, unidentified
MPNFIGLDISKHTAEVAMLRGAARTLRRSRFPARPADIRTFARSLGANDQVVLESCTNAVAFHRLLCQHAGRVVLSNPLKTRVIAEAKVKTDKVDAEVLARLLAADFLPTVWVPDPLTDELRHMVFHRQGLVTQRTQAKNRVHAILHRNLIAPAMTDLFGKSGRAFLADVALPPAERQLLHSDLRTIDFLTTEIASSERSMAQAVGQDPHVRRLLSIPGIALASAVALRAAIGDVTRFASPTKLVSYFGLNPSVYQTGMKAYTGHISRRGRSHARTVCIEAAHQLSQAPGPLHAFFVRLRRRKPYNVAITAVARKLVTLVWHMLTHEEDYHYAPAALTSRKRNRLERLATGRPAHRSRTPAPAPAQDRESARRAETHYVEFLQERFGPDGPAGVEHPNRTNSEPRKTSRTAGPESKSAGSHRSILRKPKKKS

SEQ ID NO: 475638 - protein, 315 aa, unidentified
MKYVGVDISKQTFDAFNDELGSRQFNNDSTGFKLFKKWIGTSVHVVMEASGPYYLRLAHDLYSADIPVSVINPLVIRRFCQMNLQRAKTDKKDAASIAQFAQLTNPSQWSPAPEYLQQLLQMQSVMEQLSKQQTSTLNAMEALKQHPLIDKKALHALSKVAQIQKEQIVQLEKEIMELTKQHYQTEYVSLTSIPGIGKKTAMLLILATDGFTRFENIKQLVAYTGIAPRIFQSGKTINKKPKISKLGMADLRRSLYMCTLRAIEQNEACKNLYERLRQKGKAAKVALMAVCHKLLRQAFAVVKNKTQYKTELSFA

SEQ ID NO: 475639 - protein, 377 aa, unidentified
MQITVVGLDIAKHVFQAHAADADGRAVAQVKLRRAQVLDYFRGLPPCLVGLEACATAHHWARELIALGHTVRLMPPAYVKAYVKRNKTDAADAEAIAEALTRPTMRFVPVKSVDQQSMLMLHRVRELLVRQRTMLATALRAHLAEFGIIAPQGIHRIEKLAAQVHDPAVPPPARDALKLLVAQLASTWRQIDEIEKKLVALHRTEAVSRRLASIPGVGPITAMAIASTVPDPTMFRSGREFAAWLGLTPKSHSSGGKDKLGRISKRGDRYIRHLLYIGAGNAIRFAKARAATGEAWIRALQARRPPKVVIIALANKMARIAWALMMRGGTFRSPTAAVAARRTAHSPPAARSTLPGGDRHRPAARCRVGARAGSPDR

SEQ ID NO: 475640 - protein, 321 aa, unidentified
MIANTTTTSTRPVIAGDVGKIEVIVCDSRTGRTETLANSFDVLLEAARQWPEDCLVVCEATGGYETALLAAAVAAGRAAHRADARKVKHFIRSLGRLGKSDRIDAAALARYGEERGDRLPLWQPNEADQDALASLVRLRDSLVEQCSGLKRQLKAPNAAATKPHLALLLADLKRHVAAVMADIEAILARNAALAERVAIIDAIPGCGRVIAATLVALMPELGSLDRKQAAALAGVAPHPRQSGGRDGYRSVRGGRPEIKRCLFMAALVARRCNPELRAFDERLRASGKKPLVALTAVMRKLITIVNARLRDAARAASLQPA

SEQ ID NO: 475641 - protein, 350 aa, unidentified
MIIIGCDFHSRFQQIAMLDPQTGEVIEHRLEHENGEARKFYAGLATPARVGMEATGYAQWFERMLAEQGHQLWVGDAAEIRAAMVRKQKTDSRDACHILDLLLKDKFPRIWIPSTEERDVRQLLRHRYKLVCWRTSLKNQLHAMAMGHGICRKKKLWTAVGRKELQGLSLGPWASRRRQHLLGMLDQLEPVLEELDRAVIQEVEKRPAAMRLMTQPGVGPVTALAYVLTIGPVSRFQRSKQVVSYLGFNPSEESSGGRQRLGSISKQGNSMLRFLLVEAAQTASIYDPELRRDYRRLKFRRGSGVAKVAIARKLAVRLYWKLREQPRPVPPAPMQGSPAVSVVGESLSSS

SEQ ID NO: 475642 - protein, 401 aa, unidentified
MAAGQVWAGVDVGKEHHWVCVVDDSGKVVLSRRLVNDEQPIRELVAEIDELAERVLWAVDLTTVYAALLLTVLADAGKTVRYLAGRAVWQASATYRGGEAKTDAKDARVIADQSRMRGQDLPVLHPNDDLISELRMLTGHRADLVADRTRTINRLRQQLVAVCPALERAAQLSQDRGWVVLLARYQRPKAIRQSGVSRLTKVLTDAGVRNAASIAGAAVAAVKTQTVRLPGEEVAAGLVADLAREVIALDDRIKTTDADIEGRFRRHPLAEVITSMPGMGFRLGAELLAAVGDPALIGSADQLAAWAGLAPVSRDSGKRTGRLHTPKRYSRRLRRVMYMSALTAIRCDPDSKAYYQRKRDEGKRPIPATICLARRRTNVLYALIRDNRTWQPESPPIIAAA

SEQ ID NO: 475643 - protein, 423 aa, unidentified
MKKHTYKTVKINAVDREQLAAAVRGAAVVVGIDVAKDEHRAAIVASAGQSRRVLTLSYESPGQLREFVALLHGLPASSLAVALEPTGTYGDPLRFQLSQAGIAVYRVSPKRAHDACEVFDGVPSSHDAKMAGLVAKLHEEHVSEPWPLDDETRRELKAATGTMARYGEAAQELRNQLAAKMARHWPEADSLVEFDSASLLALLARFGGPAEVARDEAAARQLLVRSSHGWLKPAKVEALLASARTTAGLPPTAGERAALRDLATELARQIQRQREADGEVKRLAAAEPALAAMGEVVGLSTAAVLFCEVGDPRCFPRAGAYAKADGLNIKERSSGKYQGQKKITKRGSGRARQWLYLAVLRLLQKEPLFAAWYERKVARDAGVKMKAIVALMRKLIVGLWHVGHGEAFDPAKLFDVRRLQREP

SEQ ID NO: 475644 - protein, 455 aa, unidentified
MNQHQLDQKRSWITGKFIVGIDPAKDKHQAAIIDSNGNAVGKSFSFNHNAWGFHEQLWFKLKRYLGPEFMHPDQLIFAVEAAIDFWQPLVDYLHRQGYSIVIVSPLTTKNSRALPGHDFTKTDPKDARLVAESAFRGHYHHYVDHPDQIKAMKTLSLTYNKLRKDLSRNQQRLRSIVNRVFPEFLSIVPLDTDTAHFLLSNYLHPHDFLNLDVSGTVVSMLKVSNQQHGMETLSDLQQAAPTSIGVPRDTLEIISDRLTVNSWLTLITMLKQQLKIISGQLIELAKQTPWFDSLVSIKGISDVSASLFIAEVKDLNIYRHYKQIQKLAGLNLRLNDSGKTRGRYKINKIGNRRLRWIIYLMTKETAKYIPEVRIKYLKRQIKRYNYTKNLIACSSQLLQLIMALIKDNRLYEYCPENQSLVWELEYHYDKIKKRSESEKETPGRCSNDSLILRAL

SEQ ID NO: 475645 - protein, 333 aa, unidentified
MSNVTTVGIDLAKNVFSLHGVDERGQVVLRKTVNRARLLALVAQVPACTIGLEACSGAHEWARQFERFGHTVRLMAPKFVAPYRKSGKNDGNDAEAICEAVSRPSMRFVPLKTLEQQSALCLHRVRQGFVEERTATINRLRGLLAEFGHVLPQRAIEVRRGVPGLIEQLPSRAARCARDLLEHAHVLETKMREYEREIETHAKHSDLARRAQARRGIGPITASAIVATVGTAREFRNGRQFAAWLGLVPRQYSTGGKVRLGHITKRGDPYVRTLLVMGARSVLQRAARERDPLSRWALALKERRGYHRACVAVAAKNARIVWALLAKESPLAA

SEQ ID NO: 475646 - protein, 310 aa, unidentified
MDSDLVFVGIDISKATLDVDSYPVNEARRFLNDDASRENLCEWLKSRKPTLIVMEATGGLEMPVAALLAAAGLPVAVVNPRQARDFARAIGVLAKTDAVDAIVLARFAQAVRPAIRELKSDEAQELEAVLTRRRQIVEMITAERNRQLKAQARIAKQIKGHIAWLEKRLDEANGDLERLIKNSPIWLHKSELLTSVPGVGRVVATTLLAELPELGTLNRRQIGALVGVCPFNRDSGARRGKRLISGGRSSVRAALYMAALAATRFNPAIKVFYKHLVDAGKHKKVAIVACMRKLLITLNVMIKTDTAWKY

SEQ ID NO: 475647 - protein, 335 aa, unidentified
MNHVAIDLGSKQSQICIRRPGGTVVVERRIATCTVPDYLQNQPPSRIIVETCAEAFFVADAARAAGHDVRVVPASLAKSLGVGARRTKRDRTDAQNLSEASCRMDLPSVHVPSQASRARKTLCGMREQLVGCRTALINSVRGWLRMQARAPRRGDSVTFARRVRELGDRPSYVERQLSAIEELNEHITEADQELAEIAKKDSICQRLMTVPGVGPVTAVRFCAALDERERFASAHLVESYLGLVPGEYSSGERQQRLSLTKAGPAALRWVLVQAAWCARVWRKNDPMVRWSYEVERRRGKRIAVVALARKRAGILYAVWRDGSTYDPLRGAKAEL

SEQ ID NO: 475648 - protein, 381 aa, unidentified
MQNTIVHHEGAASLEAARTKVKVSRAIIKIGLDVHARLYVAVVQYGHLLPKPARRLASSEFVPWVEQFLRAGHTVHVVYEACGFGFGLYRELRAAGAQCYVIAPRKLDEQGTRVKTDPRDATTLCQRLSRYLDGNTRELAVIRVPTEAEEQARHVSRQREQLVRLRQKLEAQGRSLLVSHSLPAPAHWWKNQTWSRLAKQLPAWICARLEVHRPALLTLQQQINALSAELEATAPADVPAGVGKLTTVVMTREICSWERFTNRRAISSYTGLCPGERTSGSKRVAGSVTKRGNPRLRAALVECAWRMVRFQPNYPPVQKRLAILAKGARATGAQRKKAIVAVARHLAVDLWRIHTSRCSAAQLGLNSAETLVVRGEHKAEP

SEQ ID NO: 475649 - protein, 377 aa, unidentified
MGDYNEAFVGLDTSKLRNAVAIADASRGGEVRFLGEIENTPAATAKLVRKLSARYKRLTFCYEAGPTGYGLHRQIKDLGFECVVVAPSLIPKRPGDKVKTNRRDALSLAKLLRADELTAVWVPDGRHEAMRDLTRARETAMLDLRTKRQHVSAFLLRLGRPYPESRKTWTKAHASWIASQKLEHPQQRLVLEEMMLAIRQAQERLQRLEQAVAAAVPEWSLAPVVTALMAMRGMDLVSATTLLAEIGDLSRFRTPTELMAYLGLVPSENSTGDTVKRGPITKAGNRRARRMLVECSWSYQHPPRVGQAKQPKVDAAPPAVREIAWKAQCRLYRRYRALIRKGKRKTVAIVAIARELAGFIWAVARAVTTGRVAAATA

SEQ ID NO: 475650 - protein, 384 aa, unidentified
MQASTVDTPTGGHCGTIFVAIELSQKSWLVTLHSPDRDRISRHKIEGGDHAGLLTLIERMRERAARTLGAVPAVVSCYEAGYDGFWLHRLLLAAGITNYVFDPSSIAVDQRARRVKTDRIDGERMLRTLMAYLRGEPRVVRIVRVPSVEQEDARRASRERGRLTKEQTAHTTRIKALLRLLGMAVGNPRRRDWLTWLVKQRDWQGQAVPPQIMAEIKREHARLMLVREQLDALAQAAADLTPAAAQMAQRSELLLRLKSLGPAFATTLTSEVFYKDFRNRREVASYFGLTPSPWQSGGIDRDQGISKAGNPRARCAAIEMAWLWLRHQPDSNLTQEYRRRTLNASKRIKRVAIVALARKLIVALWRYLTTGLVPEGAMLKTAEV

SEQ ID NO: 475651 - protein, 420 aa, unidentified
MDKGTDGWSQWTAFVGFDWASDHHDVVLVDQRGKIVEDFRFDDTAEGWQRLIRKLDKYPDVAVAIETSSGATVERLLEAGCAVYPVNPKAAKRYRERKAPSGTKTDRLDAWSLADALRLDGHTWRALRVDDPLTVELRALCRDEVVLIEQRTALICQLRAALHEYYPVALEAFDEWTLSSAWAFIETFPTPAALVAAGKRKWEKFLHTHKLYSRTTYQKRLKLFAQAETFCGSRATTNAKSMLAIALASQLRVLQGHLDKFRDQIEKLFAKHPDHDLFGSLPGAGDKLAPRLLVELGDNRDRFDSPQALQCHAGTAPVADHTGKRKKARFRQACQKALRHTVHLWAHLSRAQCPWAEAYYQKKREEGQSHACALRCLGQRWLKILWKMWQTRKPYDPELHQRNQLKHGSWVIGLMSAPNA

SEQ ID NO: 475652 - protein, 344 aa, unidentified
MDSMYYVGLDIHKKSISYCIKDAAGLVRGEGMIAATRDALDDWMKPLPQPWTAAMEATMFSGWIYDHLVPHAAAVKMAHPLMLRAIAAAKKKNDRIDARKLADCLRCDFLPECYMAPQEVRERRRVLRYRNLLVRQAVQLKNKTACLLMETGVTYNKQKLHQPGYFGELLATNGEVDERLRALLRLNREMLVRVEKTERALLRALEHDRLLRERVQRLMSIPGVGPVTALSWVLEIGEVKRFSSLDKAVSYCGLCGSEKNSAGVAQRTPLSKQRNRHLQTVLVEAAKLAPRWNPRLAEIYAREKAKSDHNCATLEVARRLVAYLLAVDRRQLPFVVARKEAGAA

SEQ ID NO: 475653 - protein, 416 aa, unidentified
MKSPPKSTTKRYLALDLHKHYLVVGGVNRRQEIVLNPRRISLQKWPAWAKTNLLHTDVVVLEATTNAWEIYDQVDPLVSRVVVAHPPKVKWIAEARVKTDRHDVLRLAHLLAADLIPEVWVPPVEVRELRSLMAHRRRLVQMGTRARNHLHSLLHRYNIKPPQGKIFSKKHRDWWHQLDISPTQQMRVRHDLATIDQLDELLAEIEKELYRLSTSEPWADQVPFLLQLPGFGLIVTMTVLAAIGDIYRFPHHKKLVGYAGLGASVHDSGKKHRTGRITKTGRKELRWILVEAAWRAADTHPYWKAQYEQLERRIGSTKAAVAVARKMLVAVWYILTERTSDRHADPDKVAFKYIMWSWKLDDVKRNGMSTRQWARYHLMRLQLGEDLTHIMRGGNRYPIAPGDEIIELLPEFQTAD

SEQ ID NO: 475654 - protein, 394 aa, unidentified
MIYAGVDIAKTDHVIGAVDERGAEMCPPMPFKNTEAGLEGAVAWLEGLAGSPSDVVVGMEATGHYWMACYSFLVARGYSVAVINPMQVKAVRKLKGLDKVKNDRVDAGLIAEALRIGQYDETRLATDEMASLRSLSRYLQSLRGMVAELKTQCICLMDAHFPEYAGIFSDMFGAGSRAVLSKSPLPFELARRRADSLSRDIAEASRRGGKSSGYAAKIKAAAKSSIGVRLGQEAASFQVKSLIRQIEFADSECAGVEARLRSLLDEVEPLVLTIPGVSYVTGAQIVSEIGDVSRFRNAPALVSYAGLNSSVSQSGQFDSGGGPITKHGSPYLRRALWLAANRARQYDPGLRAFYDRKRAEGKPHRVAVTAVARKLCHIVFAVMRDQVPYDPGRE

SEQ ID NO: 475655 - protein, 409 aa, unidentified
MERQLERCGGLDVHKETVAACVRVGGRTGNAEQHVQTFGTTVGDLLVLRDWLAAHGVTHVAMESTGVYWKPVYYALEGDFTCLLVNAAHIKQVPGRKTDVKDCVWIAQLLEHGLLRGSFVPPAPIRDLRDLTRYRKALIQDRTRVANRLHKALEEAGIKLAAVASDILGVSGRAMLAALVQGTTDPALLADLARGRLRGKLPALRQALANRFRPHHAFVLGQLLTHLDYLDEAIATLCTEIERVMAPFAEPLHRLDTIPGINQRTAEVILAEIGPDMRVFPSARHLASWAALCPGHHESGGKHKSGKTRKGNRWLRTALIEAAAGASRAKHSALQARFRRVLRHRGPKKAIVAVAHALLRMVYHVLAEETVYREAGADYYDRHYSQRVTRRALQTLERQGYRVTLEPAA

SEQ ID NO: 475656 - protein, 357 aa, unidentified
MSQHTASLSRPVLALDLGDRRTVLARREGDAIVHEELATSRETLRDRLQDLAPCRVVFEAGSQSHWVAWLLEALGHEPIVVHPRRLRMITESSRKTDRADAEWLLRLGEVDLGILSPVKLRSRRRQADLALLRVRKSLTHMRTQAVQAVRSHAKLFGCALPAGSPQAFPKRARAGLDPELRSVCEPLLRQVERLSRELRAIDARLEQLAARRYPETALLCQVPSVGPLTALSYVLTLQAPERFARSRDAGSATGLVPRKHASGARDPELGITKAGDGELRRLLVLAAHRSLRKIAPDSDLKRAGLRLAARGGKNAKKRAVVATARKLAVLLMALWKSGEVYEPLRQAAIAEPLDCAA

SEQ ID NO: 475657 - protein, 427 aa, unidentified
MYRIAGIDVHKKKLAVVVSDVEVHGEYQFERCWFGANPEQLRFLSQWLAEHQVEEVVMESTALYWKPVWGALERYWQPICQKREGAGATSGILHLAQAQSNRGPRGRKKDFRDAERLVKRLVADELKLSFVPDWEQRLWRTLTRRRYQLTRARVQLQNQLEALLEEAHLKLSSLVSDLLGVSARRMLQAIADGETNPEALAGLADRRLRATPAQLSDALGACTELHAVYRRLIKMMLGELKVIEEHTAELNQELATLLRPHQDAVERLAEVPGLGVDSAQQILAEVGANAVVFASDKNLCSWVGVCPGDEESAGESSSHRSPQGNRQMRRLLNQAANAAVKTKGSIFEIVYRRLVPRLGHNQTIGAVAHRLCRLIWLILRKGVRYEERGPAVSQRSRQNRTSKMIRELRTLGYRVEFLNAVPSNPMP

SEQ ID NO: 475658 - protein, 360 aa, unidentified
MRNAVAIAEGVRGGEVRFLGEFENSAAATAKLVKKLAAKYQRLTFCYEAGPTGYGLYRQIRNLGAECIVVAPSLIPKKPGDRVKTNRRDALNLAKLLRAGELTAVWVPDRGHEAMRDLTRARETAMMDLRSKRQQVSAFLLRQGLHYSERKKTWTKTHMNWLASQKLEYAEQRLVFEEMMLAVSQAQDRLERLEQAIRVAVPDWSLAEVVTALMAMRGIDLISAATFLAEIGDLSRFQHPSELMGYLGLVPSENSTGDKIKRGPISKAGNRRARRMLVECAWSYQHPPRVGQEKQEKVAAAPRAVREIAWKAQCRLHGRYRALVRRGKLKTVAVTAVARELAGFIWAVSRAITAARVVAK

SEQ ID NO: 475659 - protein, 339 aa, unidentified
MQYKRIAIDTAKSVFTVHAIDAADKVVLRRNIRRGDLVKFFEKTEATEVVLEACAASHYWGRTLMGLGHRVRLLPPHYIKPFVRRHKTDRNDAEAICTAASVPDIPSVPIKSAQQQADAMILSVRSLLIRQRTQVVNAVRGHAAEFGTIIAKGIHHVSALLEQLEQDPTIPASARTMFEYLGKQIEQLDAQMAALNTDLAERHKNNPLSQLLETIPGVGRINALTLALRVDPRAFKDGRHFASWLGLTPRQHSSGGKAKMGGISRAGNEEMRQLLVVGAMSVIAGATRSGVTKSPWLKKLLERKPRKLAACALANKMARIAWAMMTTGETFRVAQPKAV

SEQ ID NO: 475660 - protein, 331 aa, unidentified
MNYSHFVGLDVGKKTFDASLMSADEKELSHKSFDNTPTGIQSLLDWIAGYHLSLSKLLFCAENMGSYVTELSVSSVSMGFSLALVCPLTIKKSIGLQRGKNDRIDAKRIANYAVLHYRKLELDKLPDKDLVRLRGWIIIRDNLVKQKVSSIKLLETFSWMAKLADVTESISFLEEQLKSIKERILEVEEDMEQLIAASTSLYTNYLLLRSIKGIGIINAIVLLCVTDNFQRFDNPRKFACYCGVAPFEHTSGISIRGKTQTSSLANKEVKVYLTRAAITAISWDPQMKAYYKRKIAEGKHKASVINAVRAKIIARSFAVIRRQTPFVTLAV

SEQ ID NO: 475661 - protein, 306 aa, unidentified
MNYNTVYVGMDVHKESFTLCAYTIDAEKGSHFQRTEADYKNVLKYLEFLRTVYGNDANFICGYEAGCLGYTLYHQLTEHDVNCVILAPTTMLEQRSKRRIKTDRRDAEIIGKCLAQHNYSPVHIPTATDEETKEFLRMRDDHKLALKKVKQQILAFCLRHNYRYDGNSHWTAAHIKWLKSLNPEALYKEILDEYLLTYTTLSDKVERLDKRIEELASKDEYRESVKKLCCFIGIKTHTALSVLVEVGDFQRFASAQNFASYLGLVPGEDSSGDGQTRLGITKAGNRHVRMLLTEASQCYALSLIHI

SEQ ID NO: 475662 - protein, 366 aa, unidentified
MLRKAELSREADSENDLGGSSETMYYIGLDVHKKAISFCVKDAAGRVHQEGKIGASRRELDSWIRTLPQPRTIAMEATIFTGWIYDHLLPHAEKVKVAHPLMLRATAAAKKKNDGIDAGKIADCLRCDFLPECHMASTEIRDRRRTLRYRNLVMRQMVQMKNRVSGLLLEGGVSYNKQRLHKMGYFTDLLSTNEEISQSLRLLLRLSREHIQRGQRLDRALISSLERDPLLSERLRRLRTIPGVGPITALTWALEIGDYTRFQSVKAAISYCGLCSAEKSSADKVMRMPISKQSNKHIQHVLVEAAKMAPRYSPELALVREKAIQRGNKNRATLAVARKMVAYMLAVERRQQDFVPAEEMAGRAVA

SEQ ID NO: 475663 - protein, 406 aa, unidentified
MQVVYERCCGMDIHKKSITACAITPEGKDTETFGTMTHDILELVKWLNDHQCSVVAMESTGVYWKPIYNLLELSGIEAMVVNAQHIKAVPGRKTDVKDAEWIADLLRHGLLKGSYIPSREQRELRELVRYRKSLIDERAREVNRLQKVLEGCNIKLSSVVSDIMGVSSRSMIEAVINNISDPKLLSKLAKGRLKSNRENLEQALNGLVGPHQRRMLAIQLKHIDFLDAEIQGLDREVEERLRPFEEELELLDTIPGVGRRSAECILAEIGTNMDRFPSDAHLSSWAGMSPGSNESAGKRKSGKTRKGNKKLRSTLVQCARAAARNRSTYLSAQYHRIAARRGGNRAAVAVGHSILVIAYHILKDHQPYKELGANYFDERKSQAVLKNAIKRIESLGYSVIVEEKVA

SEQ ID NO: 475664 - protein, 330 aa, unidentified
MNLYYLGIDVAKKTLDLALCEGGAKKPKALSKQVNNDVKGYQSALAWVEQRGIPRDQVHVCLEATGHYGDGVAHFLQQAGVAVSVVNPAHIKAYGKASGQRENTDKADARLIAAYAQTFQPTLWQPLPAHILELRTQVRHLASLEKHIQQVKNRLQAQLPSAPVQASLHRMLDFLTAELKACKKAVQAYLKQHPELHTLARLLTSIKGIGDLTAARLIAEIGDITRFNTPEQLVAFIGLDPRRHESGTSVRKPSQISRQGNARARAALYFPAIVAKKHNPIIRAFCLRLQERHKKPKEQVIAAMRKLLHLVYGVWKSGKPFDPTLLAQKA

SEQ ID NO: 475665 - protein, 354 aa, unidentified
MSKTSGKISYQGKKVFVGIDVHKRNYSVVAVVEGMVVKKWRTLASPEKLAEQLKRYFPGASLQTAYESGFSGFVLHRVLSAAGIHNIVVNPGSIEVAIHNRVKTDKRDAVKIATLLETGRLTGIRVPSPEQEQQRLLTRTRQQLVEERSAIKNKIRMKAHQMGLINPEDRREMTHKIVEEILAKTPSTEFTLTIEAHWEIWKSIDTQIQRIEEKLKEQAQSDPNETIYRSAPGIGSLSARILSNELGDLSQFENERQLFSYTGLTPSEFSSGETVRKGHITRQGNTRVRHVLNQAAWRAIKKDQDLKAFFERIAPRTGKKRAIVAVARKLIGRIRAAFKTHQPYKMNPINLEVA

SEQ ID NO: 475666 - protein, 360 aa, unidentified
MQYYIGLDVSQRQTAVCIIDDKGIKVREGKALTLPSDICAWITKQVDVRSIVKIGHEAGAMSFWLHTELTKLGLPMVCLEAFQAAALLETQRNKTDKNDARGLAQIVRMGGDFIREVVLRSQSNQEARTLLTIRQYLVDQKVGLENNITGSLKPFGLVTPRGQACPKTFRKNVLATILTAEERGIMVREMVMPSLDLYDNLCKQVAALTKRVTGLAKANPVCRRLMTVPGVGPIVSLSFVTAVDDPKRFKNLSDVGAYLGLTPRQEQSGEMDISGNMSRRGNIMTRSHLVQAATVLLTSTKKWCSLKAWGMKIAKRRGFRNARIAVARKLATVLCSMWLNEKDFCWTTGSTGQTLAVISA

SEQ ID NO: 475667 - protein, 386 aa, unidentified
MMLIGVDPHKSTHTATAVEPGTNSEVASIRIEATLGEYRRMLTWAARWSQRRWAIENAEGLGRHLASWLLARGEEVVDVPSTATARVRQLSRGGGRKNDRIDAAAAACVAAAQGDYRAMVAEGTADALAVLDEHRVNLAQARVRAVNQLHALLRALLAGGAPTDLTAATASALLGSIRPKGEAERARKAVARDLIAEIRSLDARLKSSCKAIAEQVENSGSRLTDVVGIGPIIAGRLIARTGAPSRFPNSGAYANYVGAAPIEVASADHARHRLSRTGDRQLNSALHTVAVTQIRMTGSRGNLYYLTKLAEGKTPREAKRCLKRRLADHIWRTMTADEHRPAASPGRHPGATLQSSAAAATPSTSTSDKSPPGPATNQSTRPRLAP

SEQ ID NO: 475668 - protein, 339 aa, unidentified
MKLYAAIDLHSNNSVLVILDENDQIMYERRLPNDLTCILPQLAPYREKIQAIAVESTFNWYWLVDGLMEAGYTVKLVNTVAVKIYDGLKHVEDEDEARHLAHLLRLGLLPTGYIYPKRERAVRDLLRKRAQLVRNRTVHILSIQNLVIRNSGKGMPGDAIRKLDDETLMRISAGNNVLIMAIKSSLAVLCCLDEQINVLERAVLVQARLKPEFKRLLSVDGIGEILGMTIMYEAGSMERFEKVGNFASYARCVESSRWSNGKKKGENNRKNGNKYLSWAFIEAAHHAMRHNERIRRFYQRKKAKVNGVVAVKAVAHKLARACYHVIRDQVSFDEGKAFA

SEQ ID NO: 475669 - protein, 358 aa, unidentified
MQTQFKELDFTGQNIYTGIDVHKKSWQVSVFSEALFHKTFNQPPKPEVLHGYLTKHFPKGTYYSVYEAGFCGFWIHDKLQSLGINNIVVNPADVPTTDKEKKRKTDKVDSNKLAKHLRNGDLEPIYTHKRVVLENRNLLRMRRTLVKDLTRNKNRVKSDLYFFGIEIPEQFTKNPSYWSKRFISWLEELEFQQWTGTASFRILMDQVKSLRAQLLEVNKKVRALSQEDYYKKRVELLGSIFGVGLITSMTILTEIDDIHRFANLEKLRSYVGLTPTSHASGDKDLHGEMIHRGNKFLKSAIFESAWIAARLDPVLHMDYINFCKRMKPNKAIVRIACKLLDRVHYVLKNEEPYKSGIP

SEQ ID NO: 475670 - protein, 409 aa, unidentified
MKVFCGVDWAESHHDIALVDQDGRLLAKRRIKDSAEGFTELLQMLADAGDDPATAIPVAIETPRGLLVAALRGTGRKVYSINPMAVARYRERHTVARKISDHVDAMTLANILRTDAHAHRPLPDDTELARAISVLARAHQDATWRRTKASNELRSLLREYFPTFLDAFAGNTTNLGSRDARAMLAIAPTPAAAAKLSRTRIAAALRRAGRQRGIEQLAEKLYHALRRPQLHHPPLVEKAMGEQACALLAVLDTECTNVDRLGQAVAEAFVQHPDYEIITSFPGLGDHLGARVLAEVGDDPTRFADARGLKAYAGSAPVTRASGRSVSITHRVIKNDRLAAAGFIWAFTASTNHPPARAHYQRRRDSGSRHPAALRHLFNRMLGQLYHCLQTRQLYDPIKAFAPPVTAAT

SEQ ID NO: 475671 - protein, 348 aa, unidentified
MLHAGLDLSRRKLDVCLLSQDAEIVEEFAAPPDVDGLRGLARRVIVHGEPVRGVIESMTGARFVHDQLEELGWDVLIADAAKVKGLAPLACKTDKIDARVLALLSQRDLVPEIWLPDPAVRRERELARFRLHLVKHRSMLKHRVHATMITFGHPCPVTDLFGVAGRQLLDRLEIAQPWRATVDASLALMDDLDAQIQSINKQLRQLSPEHRYMPLLMTVPGIGFVLGYTVAAEIGDITRFSAPQKLVGYTGLCPRVNQSGDRDRRGPLTKQGPKYLRWAMLEATMHACRHEAYRERYQRTKRRLGKQRGAKVAQIDIARKLTEAIWHMLTRNQPFNPAAGGSTLRLAA

SEQ ID NO: 475672 - protein, 400 aa, unidentified
MDFDQNSAVPRIFQNVDSGVLMDDAASEVCKPSMPRPATDRVSLGTSGAVVEQDRRRPRGIDPNSRLSVPLARDGSHSRGRDFSMSTHSSPILVGIDVSKHRLDVFVLPANSSLAFDNTSQGIEQLIRHLTPMGVGRVVIEATGGYQRRVAVELTAAGIPVMTVNPRQARDFARCMGKLAKTDKIDAAVLAEFAQVVQFRPDPASSQPQQQLQERVARRRQLTDMLVREANRLYMVQDKFTAKSIRRVILTMQKQRDALDAKIAELIESDDEWRNKLQILQSVPGVGANTAAQLIAEMPELGKINRQQAAALVGVAPLNRDSGLMRGQRRIFGGRAAVRSALYMATVASIKWNELIRSFYQRLKAAGKPAKVALVACMRKLLALLNTLLRENRSWRDAMA

SEQ ID NO: 475673 - protein, 384 aa, unidentified
MNNDSIIFIGLDTHKSFIQVAVLQEQRGATPEHLGRIKSNKSALIKLTQQLQSKYPKATLHFVYEAGPCGYWTYRLLTSLGHCCCVIAPSLIPKKSGDRVKTDKRDAAKLAKLFKAEELTPIYVPESEDEAISDLSRARETAMKDLKDAKFQLKGFLLRNNVQATVNDNWSKKHLRWLTDLILPHHSQQIVLQEMIITISERMQRLQRLDNELLHQVKNWRYYPVVKAIQAMRGVRLLVALGTIAELGDLRRFDHPRKLMAYVGLVPTESSSGGKTKRGSLTKCGNSRARRLLIEGAHTYKHKANISVELQLRQEGLPKEIVDIAWHAQQRLCRRYQRLLQKGKHRNVVVAAIAREMIAYIWAIAREVVVSAVEPKTRIARLPV

SEQ ID NO: 475674 - protein, 350 aa, unidentified
MVVVGADVHKRTHTFVAVDEVGKELGHKTVDATTAGHQAAVRWAWDRFGRQLRWAIEDCRHLSARLERDLLTSGESVVRVPPKMMAEQRRIARTRGKSDPIDALAVARAALRDPDLPVATHDQASRELKLLVDRRDDLVKYRTATINRLLWRVHELDPAWAPPARSLDVAKQQQILAERLAGIDGIVAELARDELADIIGLTDRVNGLERRISALSAAAAPTLLAMPGVGALTAAKLVGETAGVTRFKSEAAFARHAGIAPIPVWSGNTAGRVRLTRSGNRQLNAAIHRIAITQIRMDSLGKTYYDKKKAQGMSTPEALRCLKRRLARIVFHHLTTDQTTAPANRLAHAA

SEQ ID NO: 475675 - protein, 347 aa, unidentified
MRFYTQQHPHYCGIDLHARTMYLCILNQLGGIVLHRNMKADPESFLKAIDPFRQDIVVAVECIFTWYWLADLCAREGIAFVLGHALYMKAIHGGKAKNDRIDAHKIAVLLRGGMIPEAYVYPEGMRSTRDRLRRRMHLMRQRAELLGHIQITNHQYNLPEIGKKISYRVNRDGVAERFADPSVRSNVIFDLKRIGFYDDLLNQIELEILRHAKQHDANTFHLLDSVPGVGKILALVLLYEIHDISRFPSVQDFVSYCRLVKSKKESAGKLYGTSGHKIGNAHLKWAFSEAAVGFLRHNPEGQAYLARLEKKHGKAKALTALAHKLARAVYHMLRRKEAFDMKRFVNR

SEQ ID NO: 475676 - protein, 367 aa, unidentified
MAPRERGRSQRSGSGVMKTVGQLGSSRSSGHQPEQLRGPRARIVQERETRRCTMSGACFVGMDVSQDTVDVAVQPGTAFQIANDDHGIAEAVARVQAIQPTLIVLEATGGLEVPLAGALAAVGLPVVVVNPRQVRDFARATGQLAKTDRLDAQVLAHFAEAIRPPIRPVPDEQTQTLAALVARRRQLIEMLTAEKNRLRLAARLIQERVHAHITWLETELERTNTDLTATMRESPVWREKEEVLRSVPGVGPVLTTTLFANLPELGTLTRKEVAALAGGAPFPRDSGTLKGRRTIWGGRAHVRAALYMAALVATRRNPVIRAFYQRLCQAGKAKKLALTACMRKLLTILNAMVKSRTLWRVAMTQPV

SEQ ID NO: 475677 - protein, 391 aa, unidentified
MERAWVGVDIGKDFHWALAIDETGRELLSRRVENEQTDIEGLIEQALGLGCELVWGVDMSHGPVVLLLASLLAAGQEAVFVPGLMVNRCRGAFVGANKTDALDARVIAENARMRHDLASFTVKEDLLVSLRMLVERRKDLVADRTRSITRLRSVLITVFPGIERALKLNNKGPLVLLTHYQTPESIRRAGERRMTEWLANRGVHGAAKLARTALAAAKAQTIILPGTETAAALIARMAEEVLDLDVRLATATKELESCFFSHPQARIVTSLPGMGPSLGAEFLAAVGDIGRFASADRLAAYAGLAPVSRDSGKTQGRLVSTRAGNHALKRVFFQAAFASLHEPRSRAYYDRKRAEGKRHNQAVLALARRKVDVLWAMLRDNTHYESPIKAA

SEQ ID NO: 475678 - protein, 338 aa, unidentified
MTYYAGIDVSLEYASVCVIDAEGKTVREGKVLSEPEALVSWLTSVGVSLTRIGLEAGPLSQWLYAGLRQAGQPAELLETRHVRRAFEIMPVKTDRKDARGIADLMRLGWFRPVHCKSIDAQETRAVLTARKLVQKQVLEVESSLRGILRGFGLKVGKTTPVRFEARVKELVAGHATLEGIASSLLATRAALRREFNGFERQVRAMARNDTRARLLMSTPGVGTIVALTYAAAIDDPSRFKSSKTVGAHFGLTPRRYQSGETDYTGRISKLGDGSVRAALYEAAHVILTKPLKDCTALKSWAMKIARRAGMNKAKVALARKLAIIMHRMLANGTTFKSA

SEQ ID NO: 475679 - protein, 309 aa, unidentified
MSNQSRYLGVDVSKDTLVVAFERQRWQFANSKEGHRKFIAQLKKLAGTVHVACEATGPYHLAMCLALQEAGLAVTICNAARIRYFGLSEGILAKNDPIDAELIERFANSKRPAATPALSREHLALNEMVVHRSQIVESIKVFRTHRQQVSDAALVEEIDKTIAALEKRLEIIDRKLRQKIQANAAWNRTYDELIKTKGVGFVTALTLLVKMPELGSLNRGQCGALGGLAPYDDDSGQHNGRRSICGGRFEVRSALYMSALTAVRYDSILKTFYQRLLAQKKPFKVAITAVMRKLLIYLNTRLKPLRTAT

SEQ ID NO: 475680 - protein, 436 aa, unidentified
MAEEVEWFVGIDWASQSHQVCLVDAHGECLGERAFAHGGLGIEELCDWLIARTGATPEVIGGSNRNDAGPRRRSPVGTRFVRLWINPKQLDRFRDRFTVAGAKDDRRDAHVLGDSLRTDRHAFRRLSNDEPVIVKLREWSRMTDDLQQERTRLASRMREQLWRYYPQMLELADDLAADWFLDLWNQAPTPAKAARLRQTTIERFVKAHRLRRWPAPEVLRILKQKPLSVAPGVVEAASDHIRTLTVRIRLVNQQLKTAHRKLDELCAQLIPSEENEPGQRCEQRDVVILRSMPGLGRIILAVLLAEVWQPLRRRDYHALRSLSGVAPVTRRSGKTSVVVRRYACNKRLANALYHWARLATQRDALSRRRYAALRQRGHSHGRALRTVADRLLSVACTPTRTAGSVRPHLQGSGGRRRVSIRLPFLVRSKTTNPFVL

SEQ ID NO: 475681 - protein, 360 aa, unidentified
MTMLAEQVDGVIGVDTHRDTLAAAAVSPIGAVLSTTDAPANARGYRRLLDFARQHIPGRRCWALEGIGSYGAGLAAFLDQAGERVVEVCRPKRPAVRGGRKTDMIDAIRAAKEALASEHLIQPRLRGEREALRVLLATRHGAVLASTAAINQLKALIVSAPDDLRAELRKLKRPAQVTRCAQLRDRPAQSVEHRMTARALRSTAQRIQTLQTEAKELENEILSLVRQLAPELLDLLGVGPITAAQVLVSWSHPGRFRSEAAFASFAGVSPIPASSGLTNRHRINRSGDRQLNRALHTITLIRMRLDPATKTYVARRVAEGKTSRDAQRCLKRAICRQLFKILERASRDSGADREDLPQAA

SEQ ID NO: 475682 - protein, 343 aa, unidentified
MQAVTTIGLDIAKSVFQVHGVDAQGEVVVRRQLRRRQVLPFFAKLPPCVVGMEACATSHHWSRQLQALGHTVRLMPPAYVKPYLKRQKNDAADAEAICEAVMRPTMRFVETKTAEQQSCLMLHRTRHLFVRQQTAVINAIRAHLAELGIVAPVGRNGVVELLDVVADPNDDRVPEIARACPVALGMQLRALKAQILEFDRRMMAWHRSNATSRRLDEIPGVGPALATALVASIANPRAFRSGRDFSAWVGLVPKQNSSGGREKLGSITKRGDRYLRSLFTAGALAVIRYAKIHGTKHRPWLTALLARRPTKVAAIALANKIARMVWAMMAKGERYKEPVALAA

SEQ ID NO: 475683 - protein, 362 aa, unidentified
MSDGICFAGLDVHARKTAAAAVVLGSGEVFRAQIPGPPVSAIDWLRTLPGPVRAVYEAGPTGFGLARAARAAGIEVMVCSPGAIPRQPGDRVKTDMRDALKLARLHAAGQLRPVVVPEPELEALRDLVRAREDLRGDLMGARHRISKLPLRRGLVFAGPGDPWSQRHLAWLGRVRFDEPLADTVFGEYLACHEVLLARRDRLDALIGQQAELEPWASTVGRLRCLRGIDTLTAVGLIAEIGDLHAFTHPRLLASYLGLVPSEHSTGEKRRQGAITKAGSGHARRLLVEAAWHYRRPPRVSLTLRRRQQAQPPATVDAAWRAQLRLHKRWAHLDAARGKRRTTVAVAVARELSHYVWEIARQA

SEQ ID NO: 475684 - protein, 415 aa, unidentified
MEYSKLQKNLEGYDLSKVLIGAIDISKGDHHGYCFTMDGREGKVIKFSNNQHGAELYWSYLEEQRKAIGLEHIVISAESTGSYGVGLLNWYREKGAKVLLVNCKHTKRLKELTGNSPNKTDQKDPRVIGPVLKWGGGYRPLIMEGAIAELRNLSHHREREKVSLGRLYNQLESQVVKIFPEFMEVMKGLKTKTAKGILKAYPSPKQIKELGKVRLIEKMQRLSRGRLNKERASELYAAAQNSIGISCGLRSICLEIKMLVEGITAIEDRIKAIEKRMHEELQEIEWSKYLLSIPGISTISGAILIGEIGDFKKFRNAKAVEKLSGLNLYEMSSGKHKGSKRISKRGRVLLRKILYMISLGMVRKNGILRASYERHKAKGMQSPKALVAISRKLIRIIYAVVTKEEKYERKNQQVV

SEQ ID NO: 475685 - protein, 342 aa, unidentified
MGRKIGVDLHKNSFRVCYYQSDKKYDFETYQVSVKGLEHFKKGLKKTDELAVESTGNTGHFFRAVEGTVKRIRVVNPMQFKVISESVKKTDDEDALKIAKFLSKDMIPEVRMKSKAESQLGSLIGTRDKFVKLRTALKNKVHNILNANGIVTKTELLTSEKSLDKVLKQKLDETCLFELEIIIKEIRNLNEAIVKIDEQIKDKGSKLEGHKNITSITGIGDTSAAIFLNTIGDIKYFKDDKALASYFGIVPRMRISNETCHMGRITKMGNKIARTALVQCTFVAIRYSPYLRAFYDRLKAKKGSGKAIIATARKLLGIIYNTLKNKWIFEDFANYKLAPQCA

SEQ ID NO: 475686 - protein, 340 aa, unidentified
MPLYGGIDLHANNSVVVLLNEQDQVVYEKRLPNHLPTVLDLLDPYRAEIMGFVVASTYNWYWLVDGLMEAGYRVHLAHPAAMQQYSGLKDTDDHSDARWLAHLLRLGVLPEGYIYPKAERAVRDLLRKRAHLVRQHTANVLSVQNIIVRNTGTRLSIKRIRELTKQELEGLLPEVAQVLAVTSSLAVLACLSHQIKTLEQTVHKRLKHTPSYEQLLTVDGIGTILAQTIALETGTIGRFPTVGNYASYCRCVDRSKIRNGKRKGQGNVKNGNRYLGWASMEAAQFALRFHPSAQRFYQRKLAKSNNNTTLARKAVAHKLSRACYDSMRDRVPFDALKAFG

SEQ ID NO: 475687 - protein, 334 aa, unidentified
MEQITTVGIDLAKNVFSLHGVDAAGRTVLRRTVRRDRLVDTVASLSPCLIGMEACSGAHEWGRRFEQHGHTVKLMAPKFVAPYRKSDKNDGNDAEAVCEAVTRPNMRFVPVKSTEQQALLALHRVRQGFVVERTAIINRLRGLLSEFGVVLPLRSVTVRRQAAQAAEGLPELARRAICDLLGQLRLLDERIDAYDSEIEAQARLSEPARRLMKIRGIGATTALAIVATVGNAREFKNGRQFAAWIGLVPGQYSTGGKSRLGHISKRGDAYLRNLLVQGARSVLQTAAAHQDHRSRWALELQQRRAYYRTLVAIANKNARIAWALLAKNEELKTL

SEQ ID NO: 475688 - protein, 454 aa, unidentified
MVQRKRRINLASTKCRAALSITHPNAAGIDIGSASHFVAVPPDRDEQAVREFLSFTDDLGKLADWLDACNVDTVAMESTGVYWIPLYELLEARGFKVMLVNARHVKNVSGRKSDVLDCQWLQQLMTYGLLSGAFRPAEAVCVLRALVRQRTMLLRSQARSVQHMQKALAQMNIQLANVIADVAGETGQKILRAIVGGERDGHVLAAMRNVRIRAGADEIAKSLQGNWRAEHLFTLKQALAAFDFIGTQLTECDREIELQLQSLQLHDGEPAKGKKRSRARNAPKFDLRTQLYKMCGVDLTRIDGIDVSTALAVLSETGADMSRFASVGHFSSWLNVCPGTKISGGKVLSGSSAKRTANRAAQALRMAAASLRTSKSALGAYYRRLCARMDKAKAVKAAAHKLARLIYTMLTKGEQYTDKGQDYYEQRYRERVLKNLSQRAAKLGMKMVAIKQPA

SEQ ID NO: 475689 - protein, 445 aa, unidentified
MTNATPVAKSEPEWAAYVAIDWADQKHYWKLVPAGSQRQEQGELQNTPEAVETWAAGLQQRFGGRPIAVCLEQARGALIYMLTKYAHLVLFPVHPTTAARYRETFCTSGAKDDPNDTALLLDLLLRHRERLRPLQPDTVETRLLQFLVEERRRTVNERTRQSNRLTDCLKQYFPQILLWFDGVDSPLVGDLLERWPSLDTLRRAHPGTLRQFFQKHNCRSAERNQERIDAIYAAVPATNDAAVLEAGTLTARGLVALLRTLRDHIAELDRRIEQLVMAHPDGALFASLPGAGPVLVPRLIVALGTHRERYDSAFEVQCYSGIAPVKESSGKTSWVHFRRTCPTFLRQTFHEFALHSIGQSEWAKAYYQHLREDENKTHQAAVRSLAYKWIRIIFRCWKDNKPYDEEVYLQSLRRRGSLIVGALGLPTGVGWRTVAGFQKLSENNA

SEQ ID NO: 475690 - protein, 352 aa, unidentified
MPLRYIGIDVHTSSCTIAVMGPSGKRLRHWQVETDRQVLVEAVRSVPSPRHICFEEGTLSDWVFELLEPLAAELQVIQPLRTRGVKSDAHDAWAAADTMRLQPADVTRVFKAPGTFTALRKAVRSHGLIQRDMVRAKNRIHACYRARGVQGLDSSIYDPLQRDKWLKKLPPPQRKMTQCFCVELDGLVAACHQAELWMLEEAQRVPIVGLISTAPGISTIRASQIVATVVSPHRFRTSRQFWAYCGLGIVMRSSSDWAMEEKRWVRTNLTHTRGLNHNHQPLLKNVFKGAAFTISSPMMAAHPLHQSYQRLLAAGTKPNLARLTIARRIAAAVLAMWKNKETYNPTKQTIAA

SEQ ID NO: 475691 - protein, 408 aa, unidentified
MMLHPKMQHVYIGCDIHKHQHTAVIINCFSEKLGELTFPNKKQDFPKLLSLVKKHTPQGITPVFALEDVLGNGRELAMFLLEKNQKVKYVNPSLSQSERKNQATINKSDSIDAQCVANVLLNKLDTLPDAAPNDLHWALNELVTKRNTLVKNNVILKNQLHTYLNHNYPSYSKFFFSLDSKTALEFFKEYPSPSKLKAVSIHDLTAFLIKKSHHNCSEKKALQILEYVEKDGDTTNEFQELRDFIITSSIKQINDNLNIIASIEENLKSLIPKFSYKLESMKGINTVTAARIIAEIGDISRFPNANALAAYAGISPMQYATGQTNKNFSNKLGNRNLYQIFFLISVSLLSDPKGKPTNSYFFQYYKKKLSEGKTKKQSIKCMMRKLVNIIYKMMRDKSEYREPVMITE

SEQ ID NO: 475692 - protein, 384 aa, unidentified
MPMRQVCGLDVHKDSVFVCILNENGIVFQEKYGVLTTELEQMLEVMMQHGVTEVCMESTSVYWMPIWRVLENYIPKLMLVNPYFIKQLPGKKSDVKDAEWIATCLLKDLIKGSYVPEDRIQQLRQYDRRIFDLNKEITYKLTKLDMALQRCNIRISNYVATTDGKSYQEVVRLISEGKTSPEELAKVIHGRTVNKHGLKTIIGALTGVISGTDMDIIRQLREEILLDQKHKDECQSKMDELCQKWFPTQLKNLQTIPGVKTRSATAIIAELGTDMSSFEDAAHLVSWCGLKPRNEESAGKIKSRSITHGNKYLRKTLIECSWASSKTQGCFYNKFSYIQTVVRRKNKMKVQVAIARKMLSAIWFILHDNVAYRDYTPDIASADE

SEQ ID NO: 475693 - protein, 442 aa, unidentified
MLSPLCERRDFMDTQQFEVIRPKCAGLDVHKKSVVAAVCTSDPVTLTASYKTKVFNTTNSDISALRDWLLAQDCRDVCMESTGKYWIPVFNILEPHMHVILTHPKYVKAIKGKKTDKRDAKWIANLFRFDIVKASFIPPADIRALRELSRYRLKLSYMRTAEKNRYQNSMTISRIRIDCVLTDPFGLSATRIMDYLLSGEPFDEEKCRSLIDRRVKASKDEVMDTIHGYHILEEQKFKMTHAKAHMDFINKSIDEIEAELFLRSRQYDVQVKRIATVTGITELSALFILSEIGADMSVFESDRHLCSWAGLTPANNESANKKKSTRCSKAGQYLKPLLIQCALAAVKSKKEPYFAIKYQRLSRRRGKKKAILAIARMMLTSIYHMLSDNEDFHPDDYEATINPPKQKPVVLTLDNTLQFLREQGADPETLKLIQQQCVAQVG

SEQ ID NO: 475694 - protein, 400 aa, unidentified
MQCVFGIDVSKDSISVAIAIDKTLFNEIKLPLNRDGFTKLEKALVSFNNPEIVFEATGVYSRRLQRFFDDLGRDYTCLNPLVAKKQLDSLRPYKTDRNDARHLAVTQFIMKRAITYKISPTYRKLMDYSRFYQEVCKDVATNKNRLHRALQLVFPEIEDVLSNTNNELYWSIVSQFARTKRVTQEYTFNELIDAIQSGTNKRISRARAEQIAHSLYSAASISYSAVDDDSPVYQQVKYLVNQIQEETKLKNRIIEQMTQLAKKLPEYDKLLSIPGLGVRTVVSLLGELGDIRRFRNSNALNAFIGIDLRHYESGEYVATDHISKRGNTVARKILFKAIQNIASAAHYHPNHINDYYQRRKKENGQHGTKKIAIAAIHRLLRTIYHLVINNQFYDYTLAKG

SEQ ID NO: 475695 - protein, 355 aa, unidentified
MTIISHLYAFVVGVDTHAKNHVYSVLTHTGEHVDTATFPTTKAGIKRALTWVGRRTRGDLNTLWVIEGIGTYGAILADHVADAGYTVAEAASMNARDRHATGKDDRIDARRIAGTVLPLDESRLRFPRQADGPRQGLRILVKARESMTGEKTRTINALTALLRTHDLGMDARRKLSVVTIQTVAKWRLRNESVALTEARREAIRLAKRVVDLDVEISDYAMRIEALVKDSPGAVLLAEPGIGPISAAVFYLAWSHHGRVRSEAAFAKLAGVCPIPASSGNVVRFRLNRSGDRRLNSALYMVAITRLSHHQRSQEYMAKRLGEGKTKKETIRCMKRHVARSVYRILEATKPIGQAA

SEQ ID NO: 475696 - protein, 449 aa, unidentified
MSRPQVIDDEEHERVHDRVAAIDVAKDTGMVCTRTPHPSRPGAQRASVWTVRARMNAIRVLGRQLRKDGIEIVTLESTSDYWRIWFFVLEACGLAVQLVSAAQAKNLPGRPKTDKLDAMWLARLTEMGLLRASFVPPKAIRDLRDYTRARTRLIHERSRCWQRLEKLLEGALVKLSSVASKLTTLSAQDMIKAMIAGQRDPEILAGLARRTMKAKHDALVEALDGMFDDHHGELAALLLDQIAALDAKVAQLGARAAELAAAIPGGWGIDPDGTTGPGAGTGPDAPALNAVARLAEIPGLSPDLARTIIAETGLDMTRFPDAAHLVSWAGLCPSARQSGPRTRSGRKGRGDTWLRGALGQAAVNASRTATFLGERYGRIARRRGKAKAQVAIARSILVIIWHLLANPEARFTDLGPGYYQTRLDTDRKLRNHLRQIQALGFTVTLTKAG

SEQ ID NO: 475697 - protein, 438 aa, unidentified
MAKPNERYEPDFAAFIGIDWADQSHAWALQTTIKGAIEHGDLDHTPETVDAWATELGRRFGGRPVAIALEQSRGALLFMLTKYAHFVLYPIHPTTLANYRLGFRPSGAKSDPSDAGLLLDLLVRHREKLRRLNPDTVETRTLQFLVEGRRKLVNDKTRYSNRLTACLKMYFPQVLDWFAEVSSKIAGDFLERWPTLPKLQKARLDTLRTFFIEHHSCRPENIQRRLEEIRRGVPATHDQAVIESCIAVVTALVPLLRELRRAIQSYDEQIETTARQHPDFVIFDSLPGAGAALVPRLIAALGTQRDRYSSASELQCYSGIAPVLASSGKQSWVHWRWACPKFVRQTFHEWAAHSIGSSAWASAYYTQQRAKGKSRNTAVRALAFKWIRILFRCWKDHTPYQEELYGQALARRAARINGAVNVQWKTGEGLSKISGFIS

SEQ ID NO: 475698 - protein, 356 aa, unidentified
MTTQHTKPDFTGQHLFVGIDVSKNSWKVCILTQHIEHKTFTQPPKPEVLVGYLQRHFPGATYHSAYEAGYCGFWIHDQLKALGVDCIVVNPADVPTIHKERTFKTDRIDARKLARALRNGELTPVYVPNRTALEDRSLVRTRYSLVRKQTRCKNQIKGLLSFYGIPLPQEPSTVNWSKRFIVWLEQLTMHSPNGTLALKALIQELKYLRQMIAESTKQIRALANEPPYRSYTVFLITIPGISTLAAMILLTELITLSRFRTLDQLSSYVGLVPGEYSSGERQITTGISQRRNPFLRGLIIECAWVAVRKDPALVLAFNKLCTRMPKHQAIIRIAHKLLNRIRFVLKHQTSYVHAVV

SEQ ID NO: 475699 - protein, 417 aa, unidentified
MKAWTELTHFAALDWADDHHDLVVVDAQGQVALELTFTHNAEGWQQAQQALAAWPGLPVAIETSAGPAVDQLLQRGFVVYPIMPKAAARYRERKRPTGSKDDRHDAWSLADALRTDGHGWSALSPLDPLTGELRALCRDEITLIEQRTALVNQLQAALKEYYPAAVEAFEDWTAPCSWAFVLAFPTPKALAAAGKRKWEKFLHTHKLWRPQTSSQRMEIFARATAFSGGEAITAAKSLLAQSLARLLQTLEQQLANYRARIQALFDQHPDHDLFGSLPGARAKLAPRLLAELAGADWSQLSQVQARVGTAPVTYESGKIKRVKIRRACTHPLRATLHLWADLSRHYSAWAAAFYRAHRDKGQSHACALRCLAHRWLEIIGAMSRTHSTYNPEHHLRQIQKHGSYVLKLISSPDPKPL

SEQ ID NO: 475700 - protein, 400 aa, unidentified
MISVGIDISKGKSTVCLLKPYGEIICKPFEVQHTEEDLEELANLLQKLDGEIKIVMEATGIYHLPILTFLLEKGFFISVINPFMMKKFSRNNSLRGAKNDRLDSVMIASYGIEKWYKLKKYEVNARIYTELRLLGRQYHRFMQTHVKHVQELTHLLDYTAPGLKTMFNSWTEHSNRDKLSDFVEKFWHFDLITSLSREEFVEQYLLWAKEKKYHQSQSKAEKVYDLASNGIPTLSSHTPSTQMMIQGAINVLRIVNNSLYHILSRMKELAKSLPEYATVRSMGGVGDSLAPRLIAEIGDVRRLHNGHALIALAGIDPPPYESGQFVGTHRKISKRGSPILRKIGFEVMRVLKSHKEPEDNAVYNYILKKEAEGKNKKLSKIAGLNKFLRIYYARVMEVYQ

SEQ ID NO: 475701 - protein, 331 aa, unidentified
MKFKSFIGIDVSKSTIDAYLKFNQLHAIFENNEEGHQDLVEWVMENSGLVLAKDLLFGFESTGLYSSQLALFLEKHALPFYIMSGLELKRSLGIRRGKSDKADSKDIAEYLYEKQEKIKPTVLPSQTIQDLKKLFNYRERLVSDRAGFMARLKEYETMVTKNRLKIYQKSHTIVIACLDKQIETIEGEIDKLLHKDELLLNQYKLMNSIKGIGPQTALALIVLTEGFTLFSTWRKFASYAGIAPFPNQSGTYKGKTKTSKLANKRIKTLLTLCASTAIQYSTEMKNYYQKRIGEGKSKMSTLNIIRNKLLSRAFSVINRNSKYVDTLKYAA

SEQ ID NO: 475702 - protein, 323 aa, unidentified
MNKYNEIFGVDISKDVFDVYGSKSGHNQFKNAASGFMFFLKNLPKKSLVVMEATGYYHYRLAQFLFKQGVLVSVVNPLSVKRFIQMKLAKVKTDKSDAKAICEYGQINQVPLYSALSDVQSECLQLFRLLDSYLKKRTMTKNKLHGEDVLGIPSKHVYRSLKRNRKHLDTEIESIETKLLSLVKQDQQAQLTLLKSIPGLGVKTALFLIVITDGFTKFETAAQLCSYVGITPTIRQSGSSVRGRSRISKVGNKKLRNLLFLCSFSACKHNKSCREIYERIVNKGKSKKLALIAVSNKLLKQAFAIAKSGNPYDETFVSVLMAK

SEQ ID NO: 475703 - protein, 442 aa, unidentified
MEVINPKAAGIDVGSRSHFVAIGQAAEQVKEFGVYNEDLHALTQWLLHNKIISVAMESTGTYWQTLFSTLQQAGLQVILCNGKFTKNIKGKKSDVQDCQWIQKLHTLGLLSGSFLPDTATEHLRTYCRHRTNLIDNSADTTRKMQKYLRLLNLRLDVVVNDITGLTGLSIIEAVCKGETNPQKLASLRNGNCRKSEEEIAKALQNNGRTDYLFALQQEYDIYKSLQQKIKQCDVAIEKLINQHINQDEHKKNLKAEDKPHKRVNKNAPKNMDINQIAYQYFNGVDLMAVEGLSHSTIITLMSEVGYEGIKKFDSGKRFASWLRLSPNNKISGGKVLSNKIPKGSNRLKIALRNAANAIGNLKDTHLSNFFKRISFRRGRAAAVSATARKLAIIIWNMIVKAMPYLPPSTYEFLDQKRKRKVLEMKRLIHKFEITSTDLGLQL

SEQ ID NO: 475704 - protein, 343 aa, unidentified
MNKFAVAGVEVSADVLVVALDNGQLRSSEFPNTAAGHQQLLRWLGKQAAQVRLCMESTGLYGLDVALVLQQQSGVEIMVANPRSVRHFGCAMMQRSKTDPIDARLLAEYAQRMPFQAWQPPSRAGRQLCALARAIHQLTEINSMQKNQLHAAGSTATTPKIVLRELERSLANHQRSIQRLTRQALQLIASDPQLQQRFHLLLSFPGIAETSALQLLGELVLLSADCNVRQWVAYAGLDPRQYTSGKSVEKKVRISKVGNRHLRRALFMPVLVAVRRNPQFRAYYKHLLAQGKLKMVALVAAMRKLLHGIYGVFQSLQPFDADKLFSLPILTSAQTAFAEKRAC

SEQ ID NO: 475705 - protein, 339 aa, unidentified
MSVQFKHTDQKSNTFFAGIDVGAEELFLVIRKNGTPYKAQKFSNSSADRARLVKKLTMLEGIIVCLEATGVYHFDLAIALHDAGVALMVVNPKASHNFAKALMKNSKTDVVDAETLALYAERMDFVVWTRPSNEKIALRGFARRIDTLTRQKAASKNHLHALSASQENPTAVLRDVKLSITQLEKRINSLTKDALALVNEHPEIERVFKLLVTVKGIAQTSAIALMGEILLLPPGLSHRQWVKSAGLDPRVFESGKSVHKQARLAKAGNYHIRSALYMPALSAKQHDPHVKAYSLHLVENGKKPLQVVCAVMRKLLHAIHGMLKYDKPFDSSRFYAIPI

SEQ ID NO: 475706 - protein, 454 aa, unidentified
MCLEDRPVLEPNAAGIDIGAREIFVAVPPGRDEHPVRACATFTEDLEQLADWLVACGVTTVAMESTGVYWIPLYDILESRNLKVCLVNARHMKNVPGRRTDWHECQWLQYLHSVGLLRGAFRPEAEVTAVRTIMRHRTELVQMSSQHVLHMHKALTQMNLQIHHVIDDITGLTGLAIVDAILAGQRDPVELAKLRNWRIKADPETIRKSLVGNWRDEHLFTLRQSRELYRTYQQQMVKCDQEIEKLVGGLEPRVDPEEKPLPPDRKRYRGAKKRAKKNGQPDTGFNLRTEAYKLFGVDVTQIPGLETMALPLFGEVGRDMSKWPTADHFASWQGLCPDNDISGGRVLWKGTRRVRNRAGQMFRQAAYSLHHNLTPMGDYLRRMKTRLGPAAATTATAHKIAVIFYTMVKNQVEYDETIWATRDVKRQQRIEARLKRQANQLGYQLVPLEEKPAA

SEQ ID NO: 475707 - protein, 362 aa, unidentified
MKIIGVDLHTRQQTIAMLDQETGELVEKELSHEGQEVRDFYAALPKPVLVGMEATGAMQWFLRLLEELKIDFRVGHPAKIRAAEPRKQKNDRRDARLLLRLLVENRFPAIWMPSREQRDLQVLLRHRDQFVRMRTRVQLSLQALALSHGLRRGHALWSGRGQHALRALPLAGHAGEQRDALLALHPQLGAPIDELDREVEKEAQQRPQSQRLMTHPGVGPITALATEVFLGNPQRFADGKCVASYVGMIPSERSSGGRQRFGRLSKQGNALLRFLWGEAAIHAVRGDPELQRFYRRKLIQKGMGKARMAAARKLGIRLWIMLRDEIDYTEFCRRGALRRQSSGHLCGNACRGTVVSTDRPSD

SEQ ID NO: 475708 - protein, 422 aa, unidentified
MLEETHDRDQIIQRVAALDVGKAELTCCVRVPGQGSSGRRRQEVTAYQTMTRWLLVMADRLAELGVTRVVMEATSDYWKGVYYLLEAHGFEVWLVNARDVKHLPGRPKTDTLDAVWLCKLAERQMLRPSFVPPPAIRELRHLTRYRADLVAARTAEKQRVEKLLEDAQIKLSVVASDIFGVSGRAMLAALVAGERAPKVLAQLARARLRAKLSLLEEAFTGFFTDQHAFLLGKMLARVDALDADLAELDAKLAELIAPFADAVDRLDEIPGLGQTAAHLLLAELGVDMTRFPTAGHLVSWAKFAPGVSESAGKRKGSGSTGHGNPYLARVLGEAAVAASKTDTFLGERYRRIARRRGKQRAIVAVGRSILVIVWHLLSDPTVRFHDLGAGFYDTRLGPERAKRNHIRHLEALGYKVTLEPAA

SEQ ID NO: 475709 - protein, 389 aa, unidentified
MDVHKDLIVATIQGKDIKMQTKSFNAFTSSLIKLKEWLLKNGVTHVAMESTGIYWKPVFNVLGDYFKILLVNARHVKNVPGHKTDKKDSRWLAKLLLSGLLKGSFIPERPIRELRDLTRYKTKLTNQVTAEKNRFQKILEDANIKLSSVLNDVFGATGTKIINHILEHESYRPEDILQYVHGKVKSSREDIKEALTGYVTPHHRFMLKTIMRNILRIENTIAEVDTQIEVCIEPYKVERELLESIPGVSKVGSTCIIAEVGVDMGQFPDQNHLASWAGICPGSNETAGKNNSGRITHGDKYLRSLLVECGWAASRTKNTYLSAKYKSLVGRRGKKKAIIAGGHKILIATYFIIRDKIEFKELGTDHLNNFKRDRLIAYYRQQLEKLIAA

SEQ ID NO: 475710 - protein, 391 aa, unidentified
MQRHKNHRRRALSSPSRRGMETTADTYVGLDVHRKIVVATALDGAGRELAQEKFGPEPSELIDFLTRLPGRKHVALEACSMWAPYYDTAASTGAEVTLTNPYKTRLIAEASLKSDKVDSEALARLLRVDSLPTSFAPPPEVRQLRTLVQDRVFYRRYWTALANHTYHFLIARGIPYEDGLLRFRRKREVLRKLHLPEVDRGLETLLAFEERGKELNREIHSAWLESEEGQLLATIPGIGELTAMALVAYLCPIERFPTSRHVASYVGLVPRSYQSADRQYHGKLKRDSNAFVRWLLVEASWSHRHRERRGDVARTARRITRRRGSGKGTIAGAHKLLRIVFAILKERRPYLLHAPEPTAPMQVLRRPRTAASQCVGRAALGSSATDRLPAL

SEQ ID NO: 475711 - protein, 438 aa, unidentified
MRAKCNDDLSTVNFSTIGLDVHKNRLVACAVHVQHDAKGREVHEKEYFESTGTYSGRQRLTEWCSSQNADLILMESTGIFWKAPFRDLEKADLHPVLINPRIFNRGSDKRKTDKSDATWLANLARLGLYRASFIPAEPYRSLRLVQSQIKSLVAERQRLKNRLVKVLDDSGFRFTVAFADIGGASSQSLIAGILEDAPREELALMIDPLCKKSIEEILDAVSGELSQINKDIVQSILRLIETHTKEIKTLEQTVIRELKKCEKVKQNIRLMTTIPGVSEKSAQLLMSMIGPDFVENFSSPHAFARWLGVCPGNNESAGQIKSGRTPHGQRLIKKVLTECAQAACHTKGSHLAVLFGGWKHKGFCKAVMAVAHKLALLIHWVVVNQKPYIDKEFDYTGVFKQDGQRRPRWIRALRRYGLMTLADVEKEKAARGWIIAKA

SEQ ID NO: 475712 - protein, 349 aa, unidentified
MTVYVAVDFHAREQTISYCDLADGEIHRCKLRHQHDDVRKFYEQFSGEVIVALEASGYSAWFEQMLAELGHTIWLGNPAEIRRKAPRRQKNDRRDADLILDLLLKGDFPRVYSFSEESRTVMRQLRYRHKLVKVRTLAKNSLQAIGINAGLPLKRKLLTQKGIEQLQALSLSPVLSEQRDEWLELIALLNRRIARVEQALQQYAQDDEAVALLQSHPGIGLLTALALRYTLMPVARFSTTRRVTAYLGFDCVEDQSSERRRMGSISKEGSRLVRFLLNEAGQTAARRDPQLQSFYKRLVHRRDKPKAKVAVARKLLVRSFIMLRDQIDYAEFVRRGVAARVARETHSLP

SEQ ID NO: 475713 - protein, 378 aa, unidentified
MHKDSVYLCIMRENGEKIERVYDVLTPELDSMRDFMTENDVSEAAMESTSVYWIPIWRVLVDSFDLKLVNPYFIKQLPGRKSDVKDAQWIAECVLKELIRDSYIPAPKVQKLRLYDRRIFELNAELGRKKSKIDAILQRCNIRLSNYVSNTDCKSYKNVVTQISEGVTSPKELLKSVHKRIINKHGEKKILASLTGIISDAEIDMLSQYVAESTLLEDNKNKCIEKMREICNKEFEEQMKNLQTIPGVSERSALAILAEIGPNVNAFPSARHLVSWCGFNPRNDESNKNIKSNKITHGNRFIRVASIQCAWAASRTKECYFSKFYAFHTQVRKKFKLKVVVAVARKVLVCIWHILKFNVSYKDFEPQKSVTKDCTQFA

SEQ ID NO: 475714 - protein, 309 aa, unidentified
MATSSYVGIDVSKDRLDIAVLGEKQAWQVENTCKGIDGLVQWMQELQPELVVVEATGGYQRSVVDALFQAGLSVTVVNPARVRQFARACGLLAKTDKLDAQVLAVFGQRVQPKRYEGKSEAEKQLSALLVRRKQLEEMLKAEQNRLRTVAPNLRGSVERIIAILKEEKKRLEEQIEQFLNEQKAWQEQREILSSAPGVGKVTTATLLADLPELGRLDRKKIAALVGMAPMNYDSGRKRGYRKTKGGRTDVRSVLYMSTLVATRHNPVIQAQYQQLLKRGKLKKVALTACMRKFLTILNAMLRDQQPFRG

SEQ ID NO: 475715 - protein, 336 aa, unidentified
MTIIRIGLDTSKHVFQIHGVDENEKPVLRRQLRRSEVEKFFAQLPPTRIGIEACGASHHWARLLRGLGHAVLLMPPQYIKGYVKRGKNDAIDAEAICEAMSRPTMRFVPVKTAEQQAALTMLGVRDLLVKQRTMLINALRGHAAEFGVAAAKGPNKVVELLQRLATGEGVPALAREMLGMLASQLEAVNGKLKAIEARLMAWHRQDQTSQCLATIPGVGPIAGVSFALKIPDARAFRSARHFAAWIGITPRENSTAGKHRPGKISHQGDESLRRLLVLGATAVIQRAKRGRVSPWLLGLLARKPKKLAAVALANKMARVIWAMMISGEVYRRPQEA

SEQ ID NO: 475716 - protein, 342 aa, unidentified
MHEITRIAIDTSKNVFTLHGVDAEGRQVLRRNLRRAGMERFFEKHPPVEVVMEACAGSHHWGRWLGERGHRVRLLPAHYVKPFVKRGKNDRNDAEAIAVAAAQPSIREVPVKSLGMQAEAMLLSVRELLVRQRTQLVNALRGHATELGLVAPAGDKGLTQLQSEIAGAEETVVPEAAKQALAMLGAEICRLEARLAVIDGRLKRQLANTPLAKRLAAVPGIGPIGALNLALRVDASAFSSGRHFAAWLGLAPRENSTGGKQRLGGISRAGNKGLRQLLVLGATAVVRHTARPGRAGPSPWLQELLKRRPRKVAATAWANKMARIVWAMMARDQPYRPVRAAA

SEQ ID NO: 475717 - protein, 331 aa, unidentified
MVDTDGQIIFEAICETKSGPIRDILRRHGVEAVQRVTIEAGNGTQMVRELLSFGFPVQVVDVRKSSKFLAIRRQKTDVHDARGLAEMGRIARTMGSSVYLKPLEHQNIRSLMNVRRTLLKNRTRTDAVIQSIIRLHGGDIKLLTGQGALLAEVKNQIRLMKREGLEIGIDLHPIVEIAEALRVQISVLDRHLRDLASSIPACSSFMTVPGVGTIVALSFYSAIGDPYRFKHNRDVGAYLGLTPTLHQSGITSRRGRISRHGNKLTRVHLITAATVILCRIETESHLRTWGLRLANRIGLLKARVAVARKLAVIMLNMWKSGLAFRPFGSFS

SEQ ID NO: 475718 - protein, 341 aa, unidentified
MNIKLIGVDLAKSVFQVCVLNQAGKVQINRALSRNAFVEFMHKQLPTQVVMEACGSSNFWARKLQSMGHTVQLVPAQHVKPFVKGNKNDRNDALAICEAAQRPHIHFVPVKSQVLQDLQMLHRIRQRYVQSSTAICNQIRAYLRENGIYLDTRIQTLLKEIPGVLEEAENELSVLAREVIRQLFDDLLELRRRVATINQKLDNWMANHDDCQRLKQVPGFGPIVTTALVAAVGNGGQFSKGRQMSAWAGLTPRHTGTGGKVTVLNSTNMGNAYLRYLLIHAARTVVTWVKDKQDPLSCWIRSMLERRGKHKTYVALANKLTRAAWRILQGEENYDVRKIAA

SEQ ID NO: 475719 - protein, 315 aa, unidentified
MREPQIFVGVDVSKARLDVAVRPSGDTVTVPYDEAGIAGLVVQLQTWQPAAVVLEATGDLESALVSALAAAGLPVHVVNPRQVRDVARATGQLAKTDALDAQLLAQFGEVLRPAPRPLPDEATQALSAVLTRRRQLIEMLTAEKNRLSHTRPALRTRLEAHIEWLTRELRRVDADLDTAIRHSPVWREQDDLLQSMPGVGPGLSRTMLAELPELGSLSSKQLAALVGVAPHNRDSGTLRGKRTIWGGRAVVRTALYMATLVATKWNPVIKAVYHQFLARGKAKKVALVACMHKLLIILNAMVKHRTPWRAHAQQA

SEQ ID NO: 475720 - protein, 379 aa, unidentified
MKDGIDYYVGLDVSQKQTSVCVIDSDGKPVCEGKCLSRPQDIHGWVMRRVEVGKRLQIGLEAGTMSSWLHRGLCEQGHEVVCMETFQAHRFLSTYRNKTDKNDARGLAQLLRMGGEDFLRVVTIRSQASQETRVLLAMRDHLVTHKVSLENHIAGVLKPFGLIVARGGVSAEVFYDRVLTALADAETAGLKLKEYVLPSLHLYKQACSRIEPLTKQVEDIAGRIEMVRRFMDIPGVGAITALSFYAAIDNPQRFEKSSDVPAYFGLTPRQFQSGESNYMSGISKRGDPATRRALVNAATVLLCHSQEWNSLKAWGVRLAKRIGFSKARIAVARKLAMIMHKIWLTNDRFRPKMISATERHALKKEMDMRYGRSISAAVA

SEQ ID NO: 475721 - protein, 392 aa, unidentified
MTWVIMGKTIKEPHTKEASTMDYTTFVGMDVHKDTITVAVAKEGNTEPVLLGTIPNRPDSLLKLLKQLAVTGNRLLFCYEAGPCGYGIYRFLKERNFSCIVVAPSLVPVRVGDRVKTDRRDAKKLARLLRSGELTPVWVPDEEHEALRDLVRAREDAYKDLQRKRHQLSKFLLRTGKRPPVGINPWTVKHRCWLDTVKYELHAQQLVLQEYRHAVDQAQERLKRLEQELIELGCKSVHAPVIAALRALRGIDYVSAITLVAEIGDFRRFDNAAKLMSYAGLVPCESSSGPRSRRGSITKTGNSHVRRIIVESAWHYLRAPNVGCTLRKRQEGVPESIKEISWRAQNRLNSKFRKLLARGKSRQTAVVAVARELLGFIWSVALQAKIEYEKAA

SEQ ID NO: 475722 - protein, 415 aa, unidentified
MKTKLSKIDEKCLIVAVDLAKSKHVCRFISICGIESKPVNVYNNIRSFNQLWKRALMYKSVYQLERIILGIEPTGSYGFPLMEFFKNKGAEIRLVNPMHTKRLKDMIGNSPQKTDEKDPRVMGDILKLGRGLSMVMPEGVIADLRHLVNTRENILEDINRVKNRLESLICIYFPEFFNVMKNLRTKTSIYILKRYPFPKDIVKVGKKKLTEEIRKVSRGQIKAEKVTWLYECANNSIGVKQGHQGIKVEIKMLLDQNDLLEQQKQNIEKTIRQQVVRVPYMKIITSIKGIKEISAAAIIAEVADFMAFRGTKEVEKLAGLNLFEISSGKHSGEKHISKRGRPLLRKTLFFITLNLVRKNGVFHHEYQNHRSKGMPGPKALTAISRKLLRTIYAMIRDNKSFDKNYLKTKQNKMAA

SEQ ID NO: 475723 - protein, 385 aa, unidentified
MPNTVSLPIVAIHFNTTLVLALETSSKNWVLAAHVPGTGQVKAKQVIAPSADALEAAIEGYRRRAAAGGQTVERVILVYEAGYGGFWLARWLKAHGIEVHVIQPSSVPVERKKRRAKSDNIDADLLLRTLLAWLRGEPRVCSMVPIPDETAEDARRPSREREELIRERISLTNRIGAVLTTLGIDGFNPLRKDRRKRLEALRTPFDQPLPEHAKAKIVRSIDRLELVMAQIAALEDQRDAVLEQDAPGAAERMVQALVLLRALGAQTATVLVYEAFVRHFSSGKALGSYAGLTGTPFNSGGAEREQGISKAGNQRLRATMGELAWLWVRYQPESALSKWFRERLGGAKGRMKKILIVALARKLLIALWRYATHGVIPEGAVLKPA

SEQ ID NO: 475724 - protein, 360 aa, unidentified
MIVQGTSVGLDVHALSVVAHAVDEETGKVARARLCPDHGEVLGWLHQLRAPVRVTYEAGPTGFGLARAITEAGMECLVAAPSKLQRPAGDRVKTDARDAAHLARLLRLGEITAVRVPEREIEAVRDLVRAREDARADLMRVRHRLSKLLLRQGIVYSGGTPWTCVHEEWLRRHRFDDIHLKAAFDHSFDAVLAATAARDRLDEQIMVVAASPRFADPVNRLGCLRGISALTGLALTVEIGDWSRFSGSSIGAYVGLVPCEYSSGNSRVQGSITKAGNTHVRRLLIESAWHHRKSYSTSGPTLRARWAKVDPALRARGHAGNRRLNKRWRSFTERGKNPLVANVAIARELAGWCWSLATMQ

SEQ ID NO: 475725 - protein, 456 aa, unidentified
MGTKMNMETKEHGNYNLLRLIFVGNKNTLTGGVTAMRKKNDNRQVEKRQRITGATLVIGMDIGCEFNAMCLMNKEGTVLGRYPKIYNSRKGFDYFHGIVEGMKKKYGFTDVLIGMEPTGHYWRKIAFFAMDKNHEVRFIRTTALKHQRELDESSSAKNDMRDAYTIGNIVREGKYIDTVIEDGVFRQLRTLAHTRERIQRISTGAKHALKGVLEDYFPELKSIFWSMNAKGLLALLEQCPFPGDVLTIGPDTLTEILAKSTRRKKKAREKALMIYEAAGQSVGLKCIGEADRHRAALFLSEIRHSEGQLKEIELRMKTLLQKIPFAEYILSMPGIGVLTCGVFLGELGDPYNFRDPKQIVKYAGYDPKEHDSGQSIGRKIISKKGRWLLRKYLYFMAMRVVHRSPFFKEYYENKQKTMAKKEALCAVVIKLVKVIFALLRDKRTFTEKQRCLKQAA

SEQ ID NO: 475726 - protein, 320 aa, unidentified
MPQVDDLSRSLVAFDQDATLIVVVEMSEASWLVAGMAPGVDRQPLKKLGPDPDVLLRLVERWRDEAVKAGKMIERIALAFEAGRDGFWLARWLQARGIEVHVIHSTSVAVSREHRRAKTDRLDTAMLMRVFLGWLRSERGHCGMVAIPTLEDEDARRPSRERESLVGERTRIINRMKAILAWLGVRGFNPILRKAPQRLDELRTPEDLPLPPNTVDELRRDMARLAMVCEQIKALEQARLANLEQAPGTGPHAMVRLIANVIGVGVETADMLVQEVLSRNLRDRRAVARFAGLTGAPNESGSRRRERGLAKSGNARVRRG

SEQ ID NO: 475727 - protein, 343 aa, unidentified
MKVSTIAIDLAKNIFQVLGMNSRAKQVFNKRLNRTQLIRFMQLQPTCNVILEACYSAHFWGRTFTRMGHCVKLIPAQHVTPFVRGNKNDKNDVLAIYEASFRPNIRCVPIKSEEQQEVLLLHRVRERLVQQRTACTNQARGVLIDFGICISRGFSAFENAMRDILQDENQRPMIKLMVSDFLEEYKTLTTRLGKVNKLIKQLVMQDPNGKILLSIPGIGPIIASAFAASIGAAQAFNNPKELATWLGLTPKQFASGNTSISAGITKRGNCYLRKLLIHGARAVVIHANKKKDDLNRWIIQLRARKSMSCTVVATAHRLARLIWILLQKQTQYQSQFGGYHQTC

SEQ ID NO: 475728 - protein, 457 aa, unidentified
MRTIGIDLAVTATHKAVVADDSGRFVTSVLSFRATWEEMAHLVACARAGVEVDHPVQAVMEPTGMAWFTVAVPLSRLGVTVYLVNGRKVHDLRRYYKRHAASDRISARVLAKLPVVDAESLYPLAIPGTVQLACQRGCKQDDRLQSWITAIHNRLLDIDRFAWPGLEQVLPDAFGPVALLFRQDWYDPARVVEAGTQRLSMAFAAIASPKDDLEWVKDLVELAIGVLKLYGPEAIDYDRLQAEVRCEQRLLTQLQREQAQVQEDTVQPLYHQLHPSGHLETLYGVGVKGAPVFASFIGEPDRFADNRHFRGWHGLVPDSRQSGESESKGLHISQAGPDLIKKYGYIAADTARRFDPQIAAIYYDQMVNKGKHHTQAVCACATHVLDRIRVVLRDDRPYELRDVDGTAVTPAQARAIIAERYQVPEEVRKRNSKKGRHEQADQQLERRQEQKGSRPRR

SEQ ID NO: 475729 - protein, 422 aa, unidentified
MLGVGIDWAEDFHLVALGRSGEGVIAIHRIQHTPAAVQELLADIAQLEPDPAEVRVVLETRHGMLVEQLVDAGYVVLPVNPDLVARRRGPARKKDDTEDARICCVLALDRYTSLRPLVPHGELAAELRAIARDDERAARDQRRLLNRLRQDLISTYPAALQLAGDDLGAPTILKLLQRWPSATALRAASRDALVSFARAAHHGWPERFADRVQAALTGDHFIARDYLVRAKADTIRLAATQLLAITQQRRVWERRMGALLLGAPRTGRAHQPNPDHLGQAFPGGEVYLSFPGLGDRLAARVAGEIGDHPEQFGSPNALACYAGKAPVTRRSGKSELVVACRLACNRHLAAAVQQWAFCSLRQSGWARAFYDAQRARGKAHQAALRALGNRWLEVLWHCLRKGVCYDETVHVANRNRALGNAA

SEQ ID NO: 475730 - protein, 342 aa, unidentified
MFYAALDVSLRSVAICIIDQDGKVRLERSVPSDVPDLVRCLCEFGEPIHQVGLEAGTLTQHLTYGLKEAGFNVVCMEARQVNAALSAMRNKTDKHDARGIAQILRSGWYSRVHVKSVESHYIRALLTSRKVMQRKCIDLENEIRGLLKVFGVKLPMRLSRGSFDATVRDTIESDPALSNALLPMLEARHTLLETFLELDRRVRRAAREDAICVRFMGIPGVGEITALSFKAAVDDPTRFKSSRTVGAHFGLTPRRFQSGEKDNPGRISHAGDADVRATLYAAANAMLMRSIAWSSLKAWGVRLMKTKGRRRAIVAVARKIAVVLHRMWSDGTEFRFGSEVAA

SEQ ID NO: 475731 - protein, 370 aa, unidentified
MKIKNYSLKTAPTALSKEQKIQKSPKAKRIVMGVDVHLKSYHTACKIDNGTIGAVAKFRSQTELLLHIEKQRQVAEEVVVVYEAGPLGYVLYRELEAQGIRCYVCAPESSAQRSQRRKNNQIDARNLTANLFNYLNGQERALQLVRVPTPAQEQARAQSRQQDQLVEERKRLGAQGNSLLLSQGYGSWAKWWRPKAFSQLSQLVSGWVLELLKSWVDVLRALDEKIQQAKVALAQRYQGPRPKGVGAASLVQLSAEVLDWNLYSNRRKIGCLAGMVPSEWSTGDHQRLGAITKVGVPAIRRIITEAVWRIILFQPQYQPVQKFQEVLRGTNRALKKKAIVAIGRQLMVDLWRLQTGRSTAQELNLVLIGG

SEQ ID NO: 475732 - protein, 503 aa, unidentified
MVVPPENPSGNKLSRKSQRKAVQRALGKQKRRKKPSAKKPSAKQPNPQPKAARRGGMPVNAPPGIEALEQVNLNAAGIDVGATVHFVAVPEGRDSETSVRWFGAFTADLEGLADWLEECGIDTVAMESTGVYWIPLYELLERRGFTCLLVNPADLKKFRRKTDVVDCQWLQTLHTFGLLQGSFRPEEKILELRSYMRQRDTLTKSAGDYVRRMQKALEQMNLKLTHVIADITGVTGLRIIDAIVQGERDPQKLAELRDERCKNDEATIALALQGNWRDEHLFALEQSLAMWRFHQQKLGEVDARLERYLETFEDKSQGRELPKQQKKGPNGPRFDTVNVMYRLTGVELTSVDGIGGHAALQLVSEIGLDMSAWATEKHFVSWLCLCPELHLSGGQKKSKHSKTHASKNRAAATLRMCAQSLLRADCALGAFGRRLRAKKGAPQAVTAVARKLAIIVYNMLKHGREYVDRGAAYYEAQYRQRVIKSLRRRASELGFDLMATATA

SEQ ID NO: 475733 - protein, 351 aa, unidentified
MQTQSKQIEFNGQNFYCGIDVHQKSWTVTIQTNSLVLKTFTQDPEPKVLVKHLKKHYPGGNYIAGYEAGYFGYGIQRNFESLGMKCLVLHPADVPTTQKDKEQKRDPRDSRKIAKALKNDEVVPIWVPPLGLEQDRQLLRAREKLTADQSRVKNQIKAALQFNGIEYPEAFSVKGTHWSARFIRWLDEIQLNEPSATEAMKSKIRHLLFIRGELLNLLRKIRELSRNERYSRLYAELIKIHGIGMITAMTLLTETGDIHRFKRPDNFKAFLGLIPRAHDSGDKERAGRITKRANSHLRYLLVEATWIAIRFNPYYLKIYQEYRKRMRANVALVRTAGKFANQIYFCLKKIS

SEQ ID NO: 475734 - protein, 402 aa, unidentified
MNCVGIDVSKGKSMIAVMRPFGEVVVSPFEVRHTANELSELAGLLKSLDGETRVVMESTGNYHAPVAWLLHDAGLYVSVVNAMLVHDYGNNSLRRAKTDKKDAVKLANYGLDHWLTLPRYVPEEDTRLMLKTCYRQYQQYSKVQTMLKNNLISLLDTAFPNANRLFTSPPRADGSEKWVDFVATFWHCECVCGLSKKAFTTKYQKWCRKHGYNFSEDKALDIYASACRHFGVIPKTDTAKLLVEQAISQLRATSAALAALKQKMQSLAASLPEYPVVMGMFGVGPTLGPQLMAEIGDVRRFHSKKALVAFAGIDAPPYQSGQIDVRSRSISKRGSASLRRTLFLVMGVLLQCAPMDEPVYQFMDKKRSEGKPYRVYMMASANKFLRIYYASVKAYLESLEHD

SEQ ID NO: 475735 - protein, 354 aa, unidentified
MKKVIKQVVGIDVAQKELVVTLGKLYEDLSTDLLAYKVFKNTSNGFEALVLWVKKLTQEDVEVRYVMEATGVYHEKFAYFLSDLEKAISIILPNKISNYIRTLEVKTITDKSCSQAIAQFGLERKLDNWNRPNPVLKNLKQLTRERDQIVDERSAIKNQLHAEDTESEPNKSSIKRMNQRIKLLSKQEQEIKVEINQLIASDKELNRHVKQATTIPGIGVLTASVIYAETNGFELIRNKKQLTSFAGLDVIEKQSGTSVKGKTHISKKGNRHLRKAMHLPALSDIKHDVRYKDLFVRLVGKHGVKMKAVTAVQRKLLELTYILHKNNTTYHALAKEQCESVENEREQLKVIAPF

SEQ ID NO: 475736 - protein, 354 aa, unidentified
MGKSITTDSGLTIGLDLGDRFTEGRVLDAAGEVVEAFRVRTTEPALSERLSGYPASRVVLEVGTHSPWVSRCVASHGHEVIVANPRRVRLIAENDSKSDGVDAELLARLGRVDPSLLKPIVHRGEPAQRDRILIQARAGFVRARTQLVNQVRGFAKTLGTRVPSSSTEAFAKRVRATTPLDLFPGLETLLDTIEQLTATIREMDREVERLCRARYPETELLRQVPGVGPITALYYVLTIEDPSRFAKSRSVGAYVGLRPRQRDSGEQSPQLRITKAGDRLLRSLLVSCAHYILGPFGPDTDLRRAGLRMAERGGQAAKKRAIVAVARRLAVLLHRLWVTGEEYEPLRGEAARAA

SEQ ID NO: 475737 - protein, 321 aa, unidentified
MSDTSVYVGIDVSKTELEVAVGEDAWTVSNDESGIETLLEELSERSPDLVVLEATGGHETAAVASLAEAGVPVVVANPRQVRDFGRATGKLAKTDRIDARVLALFAERVRPEVRALPDEQARELSALLARRRQLIEMMVSEKNRLQMAPMTVKNGIRKHIEWLKRQLKMVDSDLERRIKDSPVWCAKEDLLRSVPGVGPVVSRTLIGELPELGKLSRRQIAALAGVAPLNRDSGTLRGKRMVWGGRRTVRAALYMAALTASQRNPVISEFYERLRARGKPPKVALTACMRKLLVIMNAMVRDGVHWDPSAVVSEDQFAHSC

SEQ ID NO: 475738 - protein, 362 aa, unidentified
MTKVRSWVGLDVHARSVLAVAIDGESGELRSRRLSGTTSEVVEFCCSLPGPTRVAYEAGPTGYGLARALHAAAVGCVVAAPGKIERPAAENVKTDQRDAERVLRLLMIDALHPVRVPSGEEEALRDVVRAREAVRGDLMRARQRLSKLLLRHDVRYKDTASAWTIAHRGWLTKIDLGERGAQVTLLEYLGAIDAIVIRRDALENTIRELIPGSPWEQTVARLRCLRGIDTLSAVGLCAEVGDFQQFQRAGRLMSYIGLVPSEDTSGEKRRQGAITKTGSRHARRLLVEAAWHYRRAPAKGQTLRRRQEGQPAPIIEIAWQAQRRLHHIWQRLDTQRGKRRTIVAVAVARELAGFCWALANAD

SEQ ID NO: 475739 - protein, 412 aa, unidentified
MTIETVVERAAGLDIAKASLVACVRVPTPDGGWRVHKRKFATMSADLGALANWLAEHRVTRVGMESTSDYWRPVFYLLEDRFECWLLNARHMRAVPGRKTDMTDAEWICDLVAHGLVRPSFVPPPPIRRLRDLTRRRSILLADRSREKQRMEKLLEDAGVKLSVVASDIFSKSGRAMLDALIAGERDPRVLAELARGRLRVKIPALAEALAGRFGEHHAFLARMILTHIDAISAMVGELDTRIDAELAPYRTQVELLDSIDGIDTRAAQVIIAEIGVEMARFPSAAHLASWAGVCPGNNKTAGKAKTAATRPGNRWLKAALGTAALGALRKKSSYLHALYRRIAARRGGKRALAAVAHSQLVTIWHVLSTQTPYRDLGGDYFLRRDNPEHRRRRALDQLERLGYRVILEPAA

SEQ ID NO: 475740 - protein, 471 aa, unidentified
MTINKPPQSKNKRRKNKPSIHKINTEAKPHSAGIDIGAEIIVVAIPSDREENYVRTFSSFTSGLHQLRDWLLSHRITTVAMESTSNYWINCYDILEVAGIECYLVNARHVKGVPGKKTDVCDAQWLQQLHAAGLLKKSFRPAQEILPLRYLNRHRHSLKQEAADTLRRMQKVLTEMNLQIHHVFSDIDGVSAQAIIKAILAGERDAKTLAALRNGRCQSSETKILAALQGIYSREYLFVLGQLQSRWEDTRKQIAELDEQLKSIIKNINTPQRSEKPKTGKATKKPNRKQQNKNALPIEFSKESLRCYGVDLTDIEGVGGGVITALISEIGTREHLLESFKTADGFCAWLGLCPCNAISGGRVIRSQTRKIKNRLSEAMRLAAFGLEKSKSKMGEYCRRMKGRLGKASGLTATAHKIARIIYSLIASGQPYEEELAFKTNLNTEKKQQKLLIKLAQKLGYQLTPTLDPATS

SEQ ID NO: 475741 - protein, 479 aa, unidentified
MRIIAPLRLRAIVLLFASKEKALSKRTKKSKFQKFNVQSLPEHLRHINLNAAGIDIGSERHMVAVPEGRDEVSVREFGAFTADLQALADWLQQCGVTTVAMESTGVYWIPLFELLERRGFEVKLVDARHVKNVSGRKSDVLDCQWIQQLHTYGLLAGAFRPTAELCVLRSYLRQRNMLTQSSSMHIQHMQKALQQMNLLLHNVVSDITGVTGMKIIKAILAGERDPRMLARNRDRRCQNSSATIAKSLVGNYREEHLFALKQAVDLYETYQAKIADCDQAIIKQVEKQPDITDDTLPPSEKLIQARERIRSGVDVRELLFKKSGVDLFATPGLAADTLLTLSSEVGFDMSPWKTIKHFTSWLGVCPGTKISGGKVLNKKTKRHPNRATQAFRMAAATQARSKTALGAFYRRIKSRSGGKQAITATAHKIARIYYTLLTKGTAYVEIGQQAYEDKYKERRIHHLMAQAKSLGLQLVPCAT

SEQ ID NO: 475742 - protein, 346 aa, unidentified
MYKGMKKIIIGIDVSKEKIDVSHQDMDRQTVPAYLGKYENSPKGYKAMVKDLSRMHKGICPGQWLFCCETTGAYDRPMCYWLCANGFNVWRESALQIRWSLGIRRGKDDKADSMAIAEYAWRHMDKACLFHIPEEKLAALKDLFVYRMQLVYRCKAQKARLKSLDAQGKAASAAAALIKHDIKKEIEAIEKSIAKFENEIMTVINSSPDLKNSYKRITSINGVGMVTAVSMIAFSDNFTNIPTPNKMATYCGVAAFRKKSGDSIDKRQDVSNLSNRRLKGILSMAARSAIHYNPDIKSYFERLVANGKPYGIAVNNVKNKLIHIMYALIKNASEYKPGYQHERKSA

SEQ ID NO: 475743 - protein, 407 aa, unidentified
MDLQHPKCAGLDVHQHTVVACARVVAGSTVTHERRTFGTTTAELLALSDWLTAHDCTHVAMESTGVYWKPIWQVLEGQFALVLANARHIRNIPGRKSDVNDATWIADLLAHGLIRGSFVPPAPVQELRDLTRTRKQLVREITQHTLRIQKTLETANLKLTGLLSNILGVSGRAILHALVAGETDPERLADLVQGRLKASRAALVAALHGRLTAHHRFLLQLHLTQVDALEQAVHDVEERLGHALVPFRTALDRLITMPGVSETVARVVVAEIGFDMARFPTAGHLVSWAGLCPRLDESAGKRLSTRTRPSNPWLKTTLVQAAWAAARTKNTYLRAQFLRLKSRRGPKKAILAVASSMLIAAYHMLKHDLDYRDLGADHFDRRDKTKLANRLIQRLQELGLTVEVRAA

SEQ ID NO: 475744 - protein, 341 aa, unidentified
MDHIGIDVHKRESQICVLGETGEISEFRVATTRERLAAALGGRPAAKILIEASTESEWVAACLEGLGHEVIVGDPNYAPMYGHRTRAIKTDRRDAAALAEASRLGAYRSVHRVSAAQRQVRQQLRVREALVATRRRLIAMVRALCRGEGLRLRGGAAEHFLQRIAEVNLPPSFAETLAPVFATLAHLEGQLQLADRAIAQVAAQHAVVQRLMTVPGVGPVIGTAFVAALDTPTRFPRGRHVASYLGLVPREDSSADRRHRGRITKTGNPRMRWLLVQAAWAIRLSRQPRAAALREWADQVARRRGTRVAVVALARRLAGILYAVWRDGTVFDSQRLHRAVA

SEQ ID NO: 475745 - protein, 338 aa, unidentified
MQYIGVDYHREYSYMTAMDERGTILVEGRVANDPESVGHFMDRLPEGEKSAVLEAGRNWMVMHDWLEEEADEVHLAHPLKVKWIAESKIKTDKIDARALAHLLRCDLLPEAYVPSKEARAVKNFLRQRMFWIRLRTMVKNRISGVLDRHPEKRQNWKGSDLFGRSGQEWMKALDLPEMDRRLLDEEIELLKALEGRIEATEENMDGISGEDERVKHLRTIPGIGGFFATLLAYEIDDVKRFGNEKKLAAYAGLVPSTYSSGGRTLHGHITKQGNKYLRWAMVEAVWPAIRKDAGLKKFYEDHKERKGANNAKVATAKRLLTIVYRVLKDKRDYEVRAA

SEQ ID NO: 475746 - protein, 343 aa, unidentified
MYFTGLDVHKKTISYCVKDAAGRVFQEGKIGSTRRELDEWIRTMPQPRTIAMEATIFTGWIYDHLLPHAEKVKVAHPLMLRAIAAAKKKNDRIDAGKIADCLRCDFLPECHMASTEIRDRRRTLRYRSLVIKQMVQMKNRVSGLLMETGVSYNKQRLHKVGYFVELMTGNEDVHESIRPLLKLSRDMISRAQKLDYALVSSLERDPLLKERLRRLRTVPGVGPITALTWALEIGDFTRFSSIKQAISYCGLCGDEKSSADKVMRMPISKQRNKHIQRVLIEAAKLAPRESPKLAVIRARELERGNPNRATLAVARKMVSYMLAVERRKQDFVPAEEFSRTAAA

SEQ ID NO: 475747 - protein, 381 aa, unidentified
MYYIGIDISKFKHDCAVIDDSGEIVTPSWSFTNDAEGFSQLKLLLNSLDTETRIGLESTGHYGMNLKLFLESNNFSFMEFNPLLINRFVKSKSLRKTKSDSIDCMMIAHYLMTVEYKPYPSSFYHTEKLKSLTRFRDSLIRLRSRQLVELTNILDKVFPEFKPFFGSRFSVTALYILSNYSSPEKIANMNSKSYEALRKLSRGRFSTVDFAKLKQLAKNTIGTTEDYLLLQMQIVLDIYRQLDSKIDETEVSIKECVSDMNPPMLSVPGIGIESAAVILAEFGDFSKFKNASQMLSFAGLEPGYFQSGTSETTGKMVKHGSSYLRYALMNCAQTVVNYEPTFAMFYSKKRAEGKPHRVALLKSCYVSSTHCKLKTLHMMPI

SEQ ID NO: 475748 - protein, 433 aa, unidentified
MLKINYMSTLFVGIDVSSKTNTVYAMDFEENKYLSSSFGNNQPGADKLVNMISDCMHKHKNLDTLLIVLESTSVYSVHISNFLSTSEVLMPYKPYVFCVNPKTTANYRKSYIGMEKTDPTDAYLIADFGRVGRTKKLEPWRGGQFIALKRLTRHRTHLSECIAREKAYMVSNLYLKFSELQLLEGDDKPFGNLYGATSSAVLTEFLSPQEIIDMPEEELLAFLAEKSRNRISDISKTSELLRKAASDSYRLDKCMYEPLNVSLASSFNCIHAYQKEVRLIEQAIEKCINGMNPNALIILQSIPGIGPVWASGILSEIGDITVFHSSDALAKYAGLYWPKGDSGDFTSEDNKMSKAGSPYLRYYLGEAANSVRKHIPEYADFYARKYAEVTKHQHKRALALTSRKFVRLVFGLLAKNQLYTGEKLDAEYNIKSN

SEQ ID NO: 475749 - protein, 383 aa, unidentified
MSKTQETLQSKNTTNDRTLHIAFELADKTWKLAFSDGTKFRYRSMEARNLTRLQDEIERAKLHFEINSQARVVSCYEAGRDGFWLHRCLHNWGIENVIVDSSSIEVDRRKRRVKTDRIDAGKLSRMLIRYHGGERGLWRVVRVPSLSDEDARHLNRQLDSLKKERTIHCSRIRGLLMQQGLKVTTLCKTKFRRQMDRLRLWDGRQLPTGLKARVLREYERLRLVEEQILALEKEKDRMLEKAESDNVRKIAQLQMLYGIGTVSSWTFVNEFFGWRQFKNRREVAALAGLTPTPYDSGDDTREQGISKAGSARIRRLAVEIAWSWLRFQPQSKLSRWYFKRFAGGGKRMRRIGIVAVARRLLVDLWRYLEKGIVPEGARIRPIA

SEQ ID NO: 475750 - protein, 317 aa, unidentified
MERVIGIDVSKDYLDADMLPNSQKRRFANDPAGVAELVEWARPFQPERIVFESTGHYQKAAVGALLAASLPAVVVNARQVRDFAKALGILAKTDAIDAAVLARFGQVVPTVVRPLPAPEIQAFQELYDRRGQLVKMLATEKNHRHAASSDKVVQNIDAHIQYLKKQIKELEDRMDHFVDNSEAFRSRDEILQSIPGVGPHVSRTLLAYLPELGLGTRQQISALVGLAPFNDDSGMQSHTRHIRGGRGKVRLGLYQAAVVAIRHCPPMKEFYIRLKERGKATKVAMIAVARKILVLANALIRSMKPYDTANSVCPKNA

SEQ ID NO: 475751 - protein, 341 aa, unidentified
MDHYAGIDVSLEQSSVCVVDASGKIIREGKVASEPQPLIDWFGALGFDLVRIGLEAGPLSQWLYAGMKQAGLAVELLETRHVRDAFKAMPVKSDRNDARNIAQLMRLGWFRPVHCKSISAQEVRAMLTARKLVQSKLRDIEMSLRGTLRGFGLKVGNTTLTRFAARIRELVGENATLQVIAESLLAVHAVLLREFRGFEKRLRLMARCNVEAQLLMSAPGVGAIVSLTVASAIDDPARFKSSKQVGAHFGMTPKKYQSGETDITGRISKIGDKAVRTALYQAAHIVLTRPVKGSALKSWAMRLAKRVGMRKAKVALARKLAVILHRMLADRKPFAFAATAA

SEQ ID NO: 475752 - protein, 406 aa, unidentified
MRFYIGLDWADAEHAVWVEDENATKIVGRIVPHTAEGLSEWGRWLDERRAEGIELWAAIEKPEGRIVDLLLDHGVLVFPVNPKALDRARDRFRMSGAKSDPFDARVLATFLRTDHGHLAPLRPSSEAAQELKGLTRDHARQVRQQTRLLNQLTATLKAYYPRALEVCDDLKSQWARAFLREYSTPAALAALTARQWQRWTREHRLGAERTAKLWAILQGPQLPVPAHVVRVNARLVGALLAQLEATVTAVEAYREAITDFFASMPAAEWATSLPGGRSGTTVPQLYAELGDAAGRWQTFRHLQGHAGSVPVTDRSGKQVSVQFRFACNMHLRQAVHQFAFQSLGKSEWARAYYDRCRKRGHSHHHAVRALAAKWLKIIYVLWTRQVAYDETYHLATMARQHLRQTA

SEQ ID NO: 475753 - protein, 385 aa, unidentified
MQKCNDLSRSLTPLDPDGTLIAVIELSLSSWLIAGIVPSLGRQPLKKLAVDESALLKLLHRWRDEAAKAGHRIKRVAVAFEAGRDGFWLARWLSARDIEAHVIHASSVAVSREHRRAKTDRLDTELLKRSFLGWLRGERDHCKMVAIPTTKDEDAKRPNREHESLVGEQSRIVNRMKATLIRLGIRGFNPKLKKAAERLDGLRTPEGEPIPPNTLAELRRDMVRRRLISDQIRQIEDARLARLKQAPDNGPHAMVRLLARVIGVGVETADMLVQEVLSRSMRDRRAVARYAGLTGSPDESGRKRREKGLARSGNARVRRGMIQLAWRFLMFQKDSSLAQWFRARTESARGTRKTMIVALARKLLIALWRLVREGVVPDGVVLRPA

SEQ ID NO: 475754 - protein, 334 aa, unidentified
MEKSCFIGIDVSKNELDFAVVISNKFLFHLEVTNDKKGIEEFIKQFKKQTDFSFANSLFCMEFTGIYNNILLNYLSVHKASIWVENARQIKDSMGTIRGKTDKLDSILIAQYAYKNRENPRLWQPKREIIQELDRLTAIRSRLKNAVKMLETPLKDSKNFIGKQAHKSTRNACQESINALKKDIKSIEKQIDEIIKSDPELKHLFEIITSVKGISKVTATEIIITTNEFKDIDDPKKFGSYAGCVPFERSSGKRKGRPKVSPFANKKLKSLLHMAAMSAIQYCKEIQEYYDRKVKEGKNKMLVINNVRNKLILRVFACVNKNQKYNENYTFSLV

SEQ ID NO: 475755 - protein, 445 aa, unidentified
MAGRNRIRRLEVAHPNAAGIDIGSASHFVAVPPDRDERPVREFRSFTEDLEALAQWLKDCGVDIVAMESTGVYWIPLYELLDSRGFIVHLVNARHVKNVSGRKSDVLDCQWLQQLMSYGLLSGAFRPTDEICVLRSVSRQRDMLTKYQAQHVQHMQKALTQMNVQLDNVISNLVGETGQKILRAILAGERDPVKLAKLRNERIRASEADIVKSLQGNWREEHLFALKQAMALYDAYGKTLAECDQQLALVLNRLARHQIPAEPSQRRGRPRNLAKFDLRSALFRACGVDMTRIDGVDTGTALKVIAEVGPDLSRFKSVKQFTSWLGLCPGTKISGGKVLSAASKRTANRLAQALRMAAVSLRHSESALGAYYRRLCSRLDKPKAIRATAHKLARLIYTLLTKGTEYLDQGQDYYEERYQQRILHNLNRKATAMGYRLMPIEPSPT

SEQ ID NO: 475756 - protein, 339 aa, unidentified
MDLYVGIDLHSSNSYIGILNKDLERVMSRRLPNEREKILTALSPFKERISGIAIESTYNWYWLVDSLVAENYSVHLGNPAAFEQYNGLKYVNDKHDAFWLAQMLALGLLPEGYIYPKAERGLRDLLRRRSQLVRHRTSLKLSLQQICCNQTGSQLSNNLIEKMDDKDILEIFEERDWQMNGGSLFSTLEFMKKEITKIEQYILKQMKEKSYHKSLTSIPGIGEILAFTISLETGPIDRFESAGCYASYCRCVPSSYWSNEKKKGQGNSKNGNKYLAWAYAEAATFCIRYCEEAKRYYQRKQAKTNIPKAYRAVSNKLAKVCYHLMKEGTSFDAKRLFGS

SEQ ID NO: 475757 - protein, 324 aa, unidentified
MSSHEIVGIDVAARKLVVIGERLTLAEYENTAAGRSKLVNALCRNQRPVRVVLEATGIYFLDLACALAAAEIAVMVANPKATHHFAEAILQRRKNDPVDAAMLREFGRRMDFVSWQPPRHELFGFRALTREVQALSKTVAAARNRLHAITATQLAPAVLIGALERQIAHNQALINELVAAAVAQTESDPELARLLARTDSVPGFAAKAAVLVIGELAVLPPMTARQWVAQAGLDVREECSGTSLARRPRLSKRGNKRLREALFYPALTAARCCPAAQAFVDRLVAHGKTRLQAIVALMRKLLHGLHAMWRNDEDFDAEKLFAPA

SEQ ID NO: 475758 - protein, 419 aa, unidentified
MNKLFVGLDLSLKDYKVSIIDQGGTEAVRPFMVTNDQHGAQVLVQTILDCCKALAVDTVFIGLESTSVYGWHIQHILADSPQLKPYHPHIICFNPNIIKSFKKSLGNLPKNDWVDANTIAERLRFGRLPKSCPVDFRYLALQRLTRYRYHLVENLAREKSYYLSNLFLKFSGICQDKVFSTNFGASATELFHEFLTVNDIATRSLDELIDFIMEHDKKHFEYPQATAKALKEAAAKSYRLNACVDNSLSFVLKSCLENIKALEKQVKAVDKAIEKELPLFKNESLCLTSVKGISTVLAAGLISEIGGISRFDNDNALAKFSGLYWSEYQSGDYTAEDTYIEKTGNSYLRYYFIQAAEQLRKYLPEYADYYSRKYNESKTHHHKRALVLTARKAVRLVFALLRDEKLYNPSARKGDVSIN

SEQ ID NO: 475759 - protein, 375 aa, unidentified
MEEDMTKEQLTIHVGIDVSKDKLAVAIAGGGVRDEVLSLGTFENTPASVDRLLKKLSGRGLPVSVCYEAGPTGYGLYRQVRAFGIECCVVAPSLIPVRAGDRVKTDRLDAIRLARLFRAGELVPIWVPDATHEAMRDLVRARESAAEDQRHKRQLVSAFMLRHGRIYHRTKPWTMRYRRWLQSQSFAHPAHQLALQEMLQAERNATERHDRLTGHIEALVPEWDLAPAVTALQALRGVALISAVTFMAEIGDVRRFETPVKLMAYLGLVPSEYSTGKTTKRGGITRAGNSRVRHKLIEGAWTYRLPARPGARKLYILQEQSAEIQDIAWKAQSRLTARYRKLSQRGKKSTVVTTAIAREMAAFMWDIARRTMPAG

SEQ ID NO: 475760 - protein, 366 aa, unidentified
MGWTPPRRPWCARVVAFVTTEQEASVSEVSTIGLDLAKHVFQAHGADASGKVVFRKRLRREKLLEFFAGKPACVVAMEACSSAHHWARELARLGHIVRLIPPAYVKPFVKRQKNDAADAEAICEAAQRPTMRFVAVKSETAQANAVVFRVRDLLVRQRTQAINALRGHLGEYGLVVAKGPGHVIKLVEYVEDPGSDVPNAARVVLRTLVEALRFLSERISLLDREIARRARDDNEVRRLTSIPGVGPITAIALAALSPPPDVFRKGRDFAAWVGLTPLQHSTGGKQKLGTTSKMGERTLRRLLIIGASSVVRKALRQGTRAESWLGRMLARKPRMLVIVALANKMARIAWAVQAKGEVYRAPAVVA

SEQ ID NO: 475761 - protein, 430 aa, unidentified
MQVIIGIDPHKASHTAVAVSGDEDELARLKVRASRTQVDTLLSWAAPFASRTWAIEGAEGLGFLLAQQLVTAGETVVDVPATLAARTRVLGTGRSNKNDPNDAMSVAVTALRTCDLRRVRSVGNSEVLRLLSKRNSDIGRQRSRTASRLHALLVELSPGGIAREINVSNASALLAGITPETAVEQTRYDLAHDLLDDIGHLDAQLKQSHSKIAQVVAASSTTVTDLFGVGPMTAAVLIGNTGDIRRFRNRDHFAAYTGTAPVEFSSGGRTVHRLSRRGNRTLNSAIHMAAVTQLRHHHSEGRVYFDRKVAEGKTKREAPALIEATRQQRRLPTAPRRRQPSRPLNNPVGPEGQAGTTRSQRDRSHILATGSSAKPPPDPSPTLRQPATTGRTDAPTNASNTPLDTERILLERRLRTGSVGVLRRRFCAFF

SEQ ID NO: 475762 - protein, 338 aa, unidentified
MNVTRIGIDLAKQVFQIHGVDRDGKTVVKKQLRRSQMLAYFRKLPAILIGMEACGSAHYWARELNRMGHDARLMSPQFVKPYVKSGKNDANDAEAICEAVGRPNMRFVAVKSVEQQVLQAEHRIRARLIKARTALSNEIRGLLGEFGIVLPASLAKLRQAIPELLEDGENGLLGDFRRLLEQLGEELRKLDDHIKAYDARIAQRAKEDERIKRLLAVEGIGPVVASALVSAVGDAKQFSKGRDMAAWLGLTPSQHSSGGKSRLGHISKRGDKYVRMLLIHGARAALKAAENKEDGRSRWVTGLAKRRNKNIATVALANKNARIAWSILSREETYRPAA

SEQ ID NO: 475763 - protein, 282 aa, unidentified
MNKKTALKQCLGIDVSMKKIDCCLSLLTEELKIKVVASRSFDNSQKGFTQLGERLIKKKEAALVLYINMEATGTYHEEVAYFLSYLGYSLSIIQPSKGKQYAKSLDEKNKTDKIDALMLSRMGLERQLTQWNRPDEKMRILKRLSRERMSLIRDRNALTNQLHALCHSFQAFADSKQRLEDRVVLINKQISEVELQMRELASVDPKLWKKICHVITIPGINFVTAITVVAETDGFANISGRRQLVSYVGLDVILKESGTLSWRSRISKRGNAHIRAGLYRLL

SEQ ID NO: 475764 - protein, 389 aa, unidentified
MSGETDFTVKAEPEEFKNTLFLAMELSRATWLVATFAPRLGDKISVHAIPGGDTRRLLDLIGRLQAKLRGKGACRLRTVCCYEAGYDGFWLHRVLVNHGVENQVLDPASLPIDRRAKHIKTDNIDAKRLLRAIVGFVQGDPQSCRVVRAPTPEEEDARRLHRERQRLVRERTGHSNRIKALLIAHGIRALRITDAKWCERLDQMRTGDGRPIPARLKIEIEREWKRLKVVAEQVREVEVERDRLVKGSELTGDVCTEKMRRLVKLHGIGAEFATVLTREVFYRPFQNRRQIASYVGLTPAPYDSGDTKHDQGINKAGNTRARVIAVQMAWLWLRYQSKSDLALWYYRRVGDLKGRVRRIMIIALARKLVIALWRYVETGKVPTGAIVTA

SEQ ID NO: 475765 - protein, 452 aa, unidentified
MPAGKDITMHYQKVLKMPESIPYLSVGFDVGADFTWMSIMLPNGILIGKPFKIIHSDPQSRELAISKIKEAQEMYSLESRCFLESTGIYHIPLLCFLRDKGFDCAVINPIITKNSTNMNVRKLHNDKFDSKKAAKVGLDASLKASIVPDDAIIDLRNLVRDYYYFKDLQSAIVLKLHAELKVSFPAYLNVFSKVTTQTSLKLLEAYPLAADMLAAPKDELVETIRSTARFGETYALARYDAICTAAKDAAVFGRALPSNALRIRLYIKMYREYQAHLDSILEELHQAVGKLEGTPDYDRISFIQTLHGVGFLSAVVLIAEMGSFDLFSSPKKLYAYFGLDPGVNDSGKFHGDRVHMSKRGSSLARRILHMVAINNLKVDKATKTPVNPVIYDYYTRKCASKKKSVAVGAVMHKICNIIFAMLRDNKPFELITPEEHRERYAAEHPESVNTAA

SEQ ID NO: 475766 - protein, 424 aa, unidentified
MRAIGIDVHRDFCEVAISEGGRLRSAGRVPSTPEALELLGASLSDDDEVALEATGNALAIARIIEPHVARVVVASARELHAISGAKAKTDRRDARTLAKLLAAGMFAGTWLPGEEVRALRRRLAQRAQLVRARSRLKNEVQAALMRNLVGAPSATDLFGAAGRRWLADLVLPADERETLDSCLRTIAFLDGEVERFEVAIARYAMHSVEIRRLVTIPGVGLISAATLVAVVDDVHRFRCARKLVGYLGLDPRVRQSGSTPARMGHISKEGPAAARAALCEAAHAAMRTPGPLRAFGERVAARRGRQVAIVAVARKLATIAWRLLTSGEDYVYANPGQVRLKWRRVELLAGEPSQKGRRTGVSLASQHERELALAAEHAYQRLVADWQASASARKGAGAAPGRAADGSSQDQAARQAQQPHRSAL

SEQ ID NO: 475767 - protein, 343 aa, unidentified
MHFNTIGVDLAKNVFQVHGVDSAGKVVITRQLRRKQVLDFFSKLPGCLVGMEACGTGHHWAREISKLGHTVRLMPPSYVKGYVKRSKSDAADAAAICEAVTRPSMRFVPIKSTDQQALLMLHRTRDLLIRQRTQLINALRAHLAEFGLVAEKGREGLAELSAIIADEMNREALPSAMKQALQTIVDQLAALELQIETLDRAIHAHHRANDMSCRLETVPGIGVIGATALASTVTDPSGFKTGRDFAAWIGLVPRQHSTGGKERLGGISKQGDRYIRRLLVIGATAVVRQARQHPQKHPWIMKLLAKKPAKLVAVAVANKMARIAWAIMVRGGYYRAPALAAAA

SEQ ID NO: 475768 - protein, 415 aa, unidentified
MEILFTHCVGLDVHKKTIVACVLLSSPEGVQRLIKHFATTMAGLEALDAWLTGLGVTHVAMESTGVYWKPVFNVLSSHLEVWIVNARDMKQVPGRKTDVCDAEWICRLMGYGLLKRSFIPEVEQRDLRDLTRYRRRLVEERTSASNRIEKILEDSNVKLSAVVSKLQGVSARAMIEALIAGETDTTKIADLAKARLRSKIPELEAALVGQIRDHHRFLWRELLVHLDELNARIAAINERIAEYTAPHEILIQRLCTIPGINRWTAEVILAEIGPDVTPFPTAHHLASWACLCPGNNISANKRRTGKTRRGQNWLRPALVEAAWATSHTKTYFGSQFHRLRARRGDKRAAVAVAHSILIVVYHLLANPEAVYTELGADYFTKRNPEQEQRRAIRKLETLGFTVTLTPAQAAAAAPS

SEQ ID NO: 475769 - protein, 352 aa, unidentified
MTVTNLARSITGGVDTHLDVHVAAALDERGTLLGVESFATTEHGYKKLLSWLSDFGPIELVGVEGTGSYGAGLTRHLQAEHVRVVEVDRPNRQRRRLKGKSDPQDAISAARAALSGDACGDAKTRDGNVESMRVLRVARASARKGRTQALNQMRNLVSTAPDPIRAELRGLSVFNLLERASAYRPRDKRDIVSLTKLSLRMLARRALTLEEEISEIDAILKPLVKETAPELVATLGVGTDAASALLVAAGDNPERLRNEAAFAHLCGASPLDASSGKNQRHRLNRSGDRQANSALWHIVLTRMVYDPRTNEYIDRRKREGLTKKEAVRCLKRYVAREVFNLLPHDKLGLDSP

SEQ ID NO: 475770 - protein, 343 aa, unidentified
MEKRRYLGIDLHRDCFTCCLRLETGRNYLSQWKLEELDKFVGKLRPGDQVAVEVTSNTRFFYQAVAPHVARVVVVDTNQFRVITQSVKKTDPNDARNLALYLEKDLLPEVRMKDPQRARIASLTQTRDTLVKLRTALKNKVNNLVSAQGVNLPKESLGSEKGLVAVLKWRFDVLLELELKVIVQQIRSLNSSIAELEEIIAREGEKLEGHSNLTSIKGIGPLSGSILLSIIGDVQDFADEGKLAAYFGIVPRISHSNETEHSGRITKRGTKLGRTTLVQCALMAQRYSPYLKGYYERIKGRRGTGKAIIALARKFLGIIYRTLKYHWVFEDFSNFVLAEAIPT

SEQ ID NO: 475771 - protein, 370 aa, unidentified
MLDTTTFVGLDVHARSIKAVSLDVMTGEVRCATFGYDAGAVAAWVRSVDPRARCVYESGVTGFDLQKRLSGLGVDCVVGAVSKMIKPSADRRRKNDRNDAEFLARMLSVGNVVEVWVPDDECEAARDLTRALEDARDDLSRSKQRLSKFLLRHGLVFDERTPTGRRKGNWTRAHWSWIESIRFAEGADNEVLAYYVEAVRRAAEEKSRLEGLVGAEARKPRWRRRVDSLRCLKGVDTATAADLVFEAGEFSRFRNARSFAAWVGLTPSEHSSGESDRRGAITKAGNKHLRKTLVEAAWHYLTCSGRPKDLAKGQAPDPAARRHAAKGVRRLVERREALLARGVHGNKANVATARELACWVWAVGLMAEEA

SEQ ID NO: 475772 - protein, 430 aa, unidentified
MVAVMIGIDPHKASHTAVAIDPAEVPLGQLRVRACAAQAERLLGWAQAWPQRIWAVEGAGGVGHLLAQQLAAAGERVLDVPPKLAARVRLLAAGNINKNDPNDARSVAVAALRSAGVREARRDDHAAVLKIWSKRYGDLGRARTQVACRRHQVLCELIPGGVPGEITAGQAGRILETITPAGTVEAARWELAAELTEDLRGADVGETRKKLTTAVRAAGTSLTGLFGAGPVIAAAVIGDVRHVARFPGRDPFAACDGTAPIEVSSGGRKIWRLSRRGNRRLNHAIHMAAITQIRHRHSPGRAYYDKKLAEGKTGKEALRCLKRQISDAIFACLQADARRAAAAAAKSPGGQPGNGSASSAAGSHPEHRLFGQATPGPATHPTTPAGADTPAPLPAPLPSRASGRPGQGPGEARPRSGARRASPTRPPGSR

SEQ ID NO: 475773 - protein, 269 aa, unidentified
MEVIGIDISKDTFDVWNSSTGHTQFVNDKNGFKSFLKTLNQDDHCVMEATGCYHVQLASFIYESDIKISVVNGLIIKRFIQMKMKRTKTDKSDAKMICMFGQEQQPVGWEPEPAFIEESKLELTLISLYIKQSTQLKNKLHNLYSGGITNGVMISSLKLQLKRTIKEIEKLEKSVEQIFKAEAPQELSNSMSIPGIGKKTALLILVNTNMFRDFYAPRQVVAYVGLAPVDRKSGSSLRGRSYISKMGNPMLRNHLFMCSFTASKHWPTM

SEQ ID NO: 475774 - protein, 408 aa, unidentified
MNTLYVGIDISSKSNVVYMMLPNGDKHSNFSVASSHEGSIQLVKRIYSALTSHSLDTVLIGLEATSVYGDNLVYFLREDATLAPFNSRIHVINPKQVKRFHDAYNDLPKNDYVDSFVIADCLRFGRINKEVYSGDYRYQALRNLTRARFFTVQNLIKEKQRFMNVLFKKYSTMTQEKVFSNTFSATALAVYEEFDSAEALANMDLHELTDFIIEKGKNRFQNPDAVAKAIQKAARSSYRLPKTVNDSVNQVFSISITSMKALESQIKEFDKAIKAQTELLPNVLISIPGICPVYSAGIMAEIGDINRFDNQAALAKYAGLAWKQYQSGGFEAEVTRLIPSGNRFLKYYLCEAAFSLVRCDKEYSDFYRLKYKEVNRCQHKRALALTARKFVRLVFRLLKDNRLYCPAK

SEQ ID NO: 475775 - protein, 345 aa, unidentified
MGVDVSKRKCGVAVVDGDGVLVDEFSFSNDFEGIRRFVSRLSMGDAVVMESTGNLWVNLYEAVEANDVKAVLANPLKMRAIASAKIKNDKVDARVLASLLRGGLVAECYVPPRDVRELRALVRHRVQLVKSAGMVKNRVHSLLDRYGFRREFSDLFGKAGLEWLKHLELKPSDRLLLDSFIEQIECLERLIRNVDVEIGRRASVDGDVRLLLSLTGVGVYSALLIKSEIGDIKRFPNYKKLLSWAGLAPSLYQSGNVERHGHITKQGSKLLRWVMVECARIAVQYDARLGEFYERVKRRRGEQKALVAVACKMLKIIWFMLTRREPYQSRNARLYEEKIYRLSRY

SEQ ID NO: 475776 - protein, 359 aa, unidentified
MDGNEKTTRVVVGGVDTHKDLHVAAIVDEQDHVLGTQSFPATRQGYRQMLAWMRAAGDLLRVGVESTGSYGAGLLRFLQAAGVEVLEVTAPDRHDRRRRGKSDDLDAQSAAHAAFAGQRTVTPRRRDGMVESLRVLRACRKTAVNARKIALQMIQNTIVAAPDALREQLRSMTRMQLIRTLAASRPDLTAYRNLEAAYRISLKSLARRYLELHDEIAELDLMIKAIVEELAPELVARNSIGHNGAAQLLLTAGDNPDRLKSEASFAALCGVTPVPASSGKTIRHRLNRGGDRAANSALHLIAIGRLRTDEKTRAYVARRVAEGHSKLEVIRILKRYIAREVYGVIIRRHREVNASCFAA

SEQ ID NO: 475777 - protein, 347 aa, unidentified
MGKVITDFSVVTTVGLDLAKHVFQVHGIDSQGRVVVTKALRRKDVLSFFAQLPKCLVGIEACGSAHHWARELIGLGHDARLMPPAYVKPYVRRQKNDAADAAAICEAVARPSMRFVAVRTVENQSILMHHKGRDLLVGQRTQLLNALRGHLAEIGLIAAQGPNNARALAGLVAAGDEAIPACVCKALAPLVRQLDALDEEISASDRTIAAMAKANPVARRLMSIPGIGPVTASALAASTQDPANFSGPREFAAFLGLTPRQNSSGGKERLGRISKMGNRYLRTLLVVGAHAVLYHRARHADALRAWAKKLMQTKPFKLVAVALANKLARIAFAVMRDKAIYRGVPVA

SEQ ID NO: 475778 - protein, 416 aa, unidentified
MNAAGIDVSSRKSTVAVLRPFGEVVRVPFEVNHSAEGLASLVQQLKAIEGETRVVMEHTGRYYEAVANVLHEAGFFVSAVNPLLIKEYGGNSLRKVKTDKADAVKIARYALDNWADLRDYTPMDRIRYDLKTLNRQFHLASKQKTATSNNLIALLEQSFPGVRKCFDSPVRSDGTQKWVDFAHDFWHADCVRKHSLAAFTERYRKWCKRHGYHFRQGTAQQVYDLAKSVVVLVPKSDLTKVLVQEAANQLTTISKSVETYRAEMAHLASQLPEYPVVMGMYGVGDSLGPQLMAEIGDVRRFERKQSLVAFAGVDPMPNQSGEKNVRSNKSSKRGSPYLRKALFNVMICYLQKAPADEPVFQFLDRKRAQGKPYYVYMTAGANKFLRRYYGKVMEYLSTLEDLPPVDMDSTGLPKHP

SEQ ID NO: 475779 - protein, 401 aa, unidentified
MKRLSGGIDVGSESHHITILDEEDHILYNQKVAHKLNEFTESIKQFKKIERKEKGVISFALEGKNGYSAPFDRILLDQGFTLYNVDNLKLKRFRQAFAGEWKDDKRDALMLSKMLKLKEHINSQREKVFIKIEKPSPLTESLKLLSRHQQTLIDEKVRLVNRLRKKLLEVCPQILELGKAKSKKLIAILTKYPDFSKYKRITLCSLLKIKGIGEKGAFFLLKRINHIEYMPGLTDIYKTIIFSCAKRILELQEEIKDIDKSLDEIGKKNKGVNHLKTIPGVATKLASRLIGEIGDINRFPSEKQLAIYCGIACVDNNSGKVTKAKAVYKANKICKQTLITMAGGSIRLSLQCRAYYQKKRAEGKSHNHTLRCLARQLIKVIYKILTEDRDYMIRKELRKVA

SEQ ID NO: 475780 - protein, 381 aa, unidentified
MSRSLVALDQNSTIIAVVELSQSSWLVAGMLPGIDRQPHKKLEPSPERLLAVLHRWRDEAVQAGGTITRIALAFEAGRDGFWLARWLAARGIEAHVIHASSVAVSREHRRAKTDRLDTELLKRGFLGWLRGERGHCSMARVPTIAEEDAKRPNRERDCLVGERTRIVNRIKSTLARLGIRNFKPTLRKAAERLATVHTPEGMPLPPNTLAELQRDMARLGFVVSQIKEIEDARQKRLGQQPETGSQAMVRRLARIVGVGVETADMLVHEVLSRPLRDRRAVARYAGLTGAPDESGAQRREQGLARAGNARVRRGMIQLAWRFLMFQKESALALWYRARTADSRVATRKTMIVALARKLIIALWRFVTTGETLEGVVLRPAS

SEQ ID NO: 475781 - protein, 340 aa, unidentified
MKHYAGIDVSLECSSVCVVDASGKILREARVASEPEALIAWFRSSGFEFERIGLEAGPLSQWLFAGMKTAGLAVELLETRHVRKAFEAMPVKSDRNDARGIAQLMRLGWFRPVHCKSISAQETRSLLTARKLVQSKLLDVENSLRGILRGFGLKVGKTTKREFAARIEELVAGHPHLQMIAKALLAVRAVLRTEFAAFEKQTRRMVRSDTQARLLTSAVGPIVALTYASAIDEPTRFKSSKQAGAHFGLTPKKHQSGETDYTGRISKIGDASVRTALYEAANVMLTKPLKGCSQLKSWAMRIKKRAGMSKAKVALARRLAVIMHRTLADGTPFNSAAAAA

SEQ ID NO: 475782 - protein, 414 aa, unidentified
MLKIVYRICCGMDVHKSFVVACIASTNEQGVTSYKSKRFSSFTGDLHRCATWLAENGCRDVCMESTGKYWIPIYNILEPTCNIVLAHPKYVKAIRGKKTDKRDAKWIADIFKHDLVAGSFIPPADIRQLRDLVRYRWKLTNFTTGEKNRAQNCLTVSNIKLDDVFSDVFGKAASTITARILENPSEKITDVSGFRTKGMKATNEQVLAAVDGEMCEEQAEKLRIIRSHMDSLELCKLNLESLILSTAEQYLPQLNLVMTVPGIQSFAAIGIISEIGVDMSVFPTSKHLCSWAGLTPQNNESAGKKKTTRISRAGAYIKPLLVQCALCAIRAKQFPELRNRYLALKKRRGHKKAIIAIARMLLTAIYNMLKKNEPYNPELYRKGDQPPAHREVSVEEAIFILQRQGYLVTAPTTA

SEQ ID NO: 475783 - protein, 339 aa, unidentified
MKIKTHYIGIDLGKQSSYFVVKDENGKLLHSSKVFNDRAAIEAALKPYRNYRLQGVLEATCNYYWMHQELFRLGCKVILAHPRKTRAIADAKVKNDRLDANILCDLLRADLIPQSYIPTEEIRLLRELVRQHIRLVQMRTQIKNQIHSLLTKLNYQCKVTDLFGKQGRLWLSTLPLPDVFAFQRKQALCQLDQYNLLIKQADQQIQHALKKFQQAEKLRAIPGIGLLASAMLIAEIGPIERFPSPKKLASYAGITPGLYESGKTSHQRGITHEGNGYLRWILCQVTQVHIRKPGPLRQFFLRLKERIGYTKALIATSRKLLIGIYFVLKGEDFAPTIAG

SEQ ID NO: 475784 - protein, 428 aa, unidentified
MKQDDLIRVEQFRQLRKQIRGSENYLIVGIDVAKHKHHAFFGTATGKTLFKRLVFDNGREGFDRLLIQTEAIKVQHGLEEAVFGLEPTANYHKPLGEFLIKRGHSVGLISSVAVKRNRELLDGRWDKHDTKDAANVADLISQGKFLFYELPCQELRDLRSLLSLKRKLKKLEHGLRIRIRNHLVAQYFPELDRLYGQRESENLAIVRWCLNPAVIGALGYEKFFQLVTTRDRGISQHKRLRAIWEKAAASIGCDVGEAVEFEAEVLVETLKGLREAIKTTDYRIKNIGCSLPEFNYLLTIPGFGPDVSAKVIAAIGNPFRFYSAKQVIKLAGFDLSADRSGNRSDAAIPVISKRGKTYLRYALYQAAFIASIRDRHFIVYYTNTLRGRERERGIRTKMRVKLAAKMLVIAWTLMKKKEPFDPDYLNID

SEQ ID NO: 475785 - protein, 281 aa, unidentified
MRYVGIDYHKRYSVLCATDERGQELKQRRISGNSATGFAQFFSELGEESKVVMEACWNWGWLYDLLAKIDGIDEVMLAHPYKTRLIAEAQIKTDRLDAQMLAELLRGDLIAQSHAPSAATRARKHLLRQRLFWVRLRTMLRNRMHAILDRQHGLERPQLKNFFSRRGQTWLEEVQLPCAEDQPLLTQDLEVAELLEEKIKQLDRSIGQSQSEEEKLLESIPGIGPLFSSVIATEIDGVGRFNSATKLAAYAGVVPTTHTPAADAYSMVACSGSAINGCAGH

SEQ ID NO: 475786 - protein, 313 aa, unidentified
MEHAEEIHVGIDVCKTHLDIHLRPTDEAFQLQRDPTGLDELVRRLEALRPTLIVLEATGGFERIVAVELAAARLPLAIVNPRQIRDFARAFGRLAKTDRIDAEIIALFGERVRPEPRAIADQSAQELADLVARRRQVVDMLGMESNRRRRTRVRTVQRMINDTIATLQAQLDEIDRDLDGRIKRTPAWRAKDDLLKSVPGIGDVTARVLIAQLPELGRIDRRRIAALVGVAPINRDSGAMRGHRAIAGGRTYVRNTMYMATLTAVRFNPVIRDHYERLIATGRPKKLALVACMRHLLTILNAIVRDGRPWTTA

SEQ ID NO: 475787 - protein, 308 aa, unidentified
MIVQNYVGCDISKQRLDFFDEASGRCHRIANQADAIKAYVAGLSAGQDFVVMEATGIHDRLLRHALAKAGVAFSRHNPAHTHHYAKSTTQRAKTDRLDARMLSDYGRRYKPAPEPAPCEKGEHLQSLARHRDHLVEIRARLKRYLSEAFDADVVADLQDMIADFDIRIGALESRIVKTIRQAEDTALDYALMVSVPGVSTITALSLLAHMPELGQRSPKSIAALAGLAPFDNESGKLRHRSKIVGGRPRVRRALYMAALGAIRANDRFKAFYVALATRSGSKKLAIVAVARKLLVTLNAIIRDKTAFA

SEQ ID NO: 475788 - protein, 320 aa, unidentified
MAMSVSRSVVGVDVAKAEVVVYQADTDLLLPVSNDKPSLTKWLKTLPANSAIAIEATNIYHLDTVELAHAMGHTVYVIDGFRLSNYRKGVGGRAKTDASDARLLARYLKNEEEELRPWSPPPKVYTKLQSLLRRRATLVQARVSLTQSWSDEPLLKAAFKQQIAAMGRLDLLIQKKLLDVVKEAGLLEQVKRCQAVEGVGFLTATALTMAFQRGDFASGDAYIAFLGMDLRVSDSGQMNGRRKLTKKGDSEIRRLLHNAAMAASRSKTWKPFYERYLERGLKTTQVLVILARKLARVAFALMKNQSEYQPNPVFGASPQT

SEQ ID NO: 475789 - protein, 411 aa, unidentified
MEKVYDKCCGIDVHKKLIIACFKKGNQQEIREFGATTRELLEMADWLKDGGCKMAAMESTASYWKPLYNILESSGLNSIVVNARHMRAVPGRKTDVKDAEWIADLLMHGLLRASYIPDKDQRELRELVRYRKSLVRERNRELNRLQKMLEGANIKISGTITDINGKSARNILEYILSGKQIGSAEYDILYEKKVIAHNLKASKEQIIDDLNGIMSDIQRKMLRLLLKHLDELNAIINELDDDIDNFMKPQEKQAAKAIQDIPGIGNTSAQAIISVLGTDMERFPSDGHLASWAGLCPGDNESAKKRKSGKTRKGNALLRETLVVSAHSAVKNKRSYFYAQFMRISAHRGKKRAYVAVAHSMLIAIYHILKDGVAFQDLGADYYNQFNKERKIHAYLKKLKALGWEAPVVAS

SEQ ID NO: 475790 - protein, 349 aa, unidentified
MTIVEPRRAVIGGVDTHLDAHVAAALDPVGGLLGVEEFGTTTAGYEGLLVWLSAFGPVLRVGVEGTGSYGAGLARFLLDHGVEVVEVDRPNRQERFRKGKSDPVDAIEAARAAQSGRASGRAKTRDGAVEAMRALLVVKRSARNQRTASLVQMRHLVFTAPDDIRARFFGLTGVQLVAQAAALRPREGGDLVGHATKVALRQLARRVQGLSAEITEARRLLRPLVAGTAPGLLGLYGVGIEVAAVLLVAAGDNPERIKSEAAFAQMCGVAPLEASSGKVTRHRLNRGGNRQANHALFRVVVTRMGSDPRTIRYVERRRKEGKSTPEIMRVLKRYVARETFKYLPRHHVT

SEQ ID NO: 475791 - protein, 375 aa, unidentified
MDYCTTIGIDVSDRTSKVCVMSREGGGRRVLVETTCATTKEGFGECFAKFDRAWPVVFETGTHCRWMKRHFEALGFKTIVANPAEVKLITDSNSKNDRGDARKLARIALADAELLKPVQLRGEGFQRMLRLHESRLLLVKCRTSMVVQVRCFAKSCGFRLPDCPAERFHELDRSSWPSDFEQMVWPMMDMVKTANLKIAAYESMIRKLAATPEFKAKVERAREVYGVGFIGSTVVVAAIDGDATRFAHARDVGPYFGMTPKKSQSGESDPQLGITKAGNNLVRKVLVECANVAMMETAPDTDLKLKGLRIGARGGKVARKKAKAAVARGMAVLIVALLKDPGRKYVPLSEEGRKGFERYRAERQYLPRKAAEKAL

SEQ ID NO: 475792 - protein, 419 aa, unidentified
MKNIETKKVRVINKETLIVTVDISKVTNVGYCRCPNGIDVKPFSFMNNTQGFNTFWCRIMKTKNANNLKDVVVGYEPTGPYAEPLTHFIRKKKVKLVQINPMHTKRVKELDGNSPNKTDQKDPKVIADIIELGHALTIVQPEGSAAELRRLTHARERAMRRRTAIFNQLQDLVFVIFPEFSQVFKDVKTRSARFLLENCPTPEDIIKYKLKNLTITLRKVSRGQLGEERARELYAAAKSSVGVKEGRQSILFEIKEILSIIETTESFVTEIEQEMSHHLAKIPYSKFILSIKGIGDITVAGLIGEVGDFREYKTISEILKFSGLDLFEISSGIHKGQRRISKRGRSLMRKLLFFASINVVHKGGIMHEYYQGCLARGMLKMKALTAVSGKLLGVIFALVRDHSEYIGNYAVEQELKKAA

SEQ ID NO: 475793 - protein, 392 aa, unidentified
MVVSVGIDVSKDKHDCFIVSSDGEVLADVFTIPNTLDGFTCLLQRIRECTTPQDKIKVGLEATGHYSYNLLGFLLDNGLATYVLNPLRTNLYRKSLSLRKTKTDRVDARTIAFMLLSDAGLKPYTDTAYHNEELKSLTRYRFDKVKERAKLKSSISRLVCILFPELEKLVPTLHIASAYALLEEFPGAKQIAAAHLTRLKALLETTSKGRYKRDMALEIRDAARNSIGSRMPAKSLELQHTIRLIRELDVEIAEIEEQIQSIMDELHSPITTIPGLGFRMAAMILAEVGDFTRFDSPDKLLAYAGMSPSTYQSGQLKNCYPHMEKRGSRYLRYALYNATKYVCHWDPTFAAYLAKKRNEGKHYNIALSHAAKKLVRLIFAMEKSRAAYRLTA

SEQ ID NO: 475794 - protein, 316 aa, unidentified
MNQSTNSVKFLGVDVAKDRLQLFCNGLKVPAQIDNTPKSIASWLKGLKRLHSQLHIVCESTGGYENTLLRACWKAGVLVTRLNPARVRDFARCRGLLAKTDAIDAKAISEFASTFPPDPTPEPSPQQVLLAELVARREDLKTQRAAESNRSRDIQDKVLRRMLEKHLQFLDAQIKQIDKLIEDTISQDQAMHQKREILVRTKGVGATSAAILLSCLPELGTISGEAISALAGVAPFNRDSGTLRGKRCIRAGRAVARKALYMCALVGSRANPILKDFYQRLISKGKPPKVALTALMRRLVVHLNSSLKIINSPSPC

SEQ ID NO: 475795 - protein, 411 aa, unidentified
MREARYLVGVDQGREHEVVILSSEGEAIAQRRVEHGGAGLRELLAWVRGHGGGSMDGVLVATETPRGAVVEAFVGAGARVFAINPKQLDRFRDRHSPSGAKDDSRDAWVLADALRTDRSAFAPVACESALVEELRELGRLRDRMVAHQGRLTNQLEERLAEVWPELLRLSPGADEPWLWSLLQRTPSPHRARKLQKRTLAALLREHRIRRITPRELRKTLQEPMLPLGEGTWSAARKEILMLSDQCRLTRQHLGQIEDDLKALLEQAIEREDEGEEGGGPCDAEIILSFPGAGLVVATRLLGEASHLLRDYRRLRIVAGVAPVTKASGKHRMVIRRKSCKPRLNDAVFHWARNAIQKDTHLRRKYDAFRASGHTYGRALRQLGDYLLRCLCAAINSRTCYRCPGHLEIHAA

SEQ ID NO: 475796 - protein, 484 aa, unidentified
MAKRKMSNFERLNSGRLNRSQRRELGRRVAVADPGLTIVNANAGGIDVGNESHYVAVPPDRDRCPVREFGCWTAALKQMAEWLKSCRIDTVAMQATGVYWIALYDILEQHGIRVVLVNAQHTKNVPGRKTDVQECQWLMKLHTYGLLRDSFRLAQEIESVRTIWRLRDRHVKEAGRTVQHMQKALTKMNIQLANVISDINGVSGQQIIAAILKGERDPWKLADLKDYRIQASLEEVARSLEGNWREDVLFELQQAVDSYHFAHRQMQECDRKLEAYLASLPTRTLDLPAQPESAQAVTLKKKKKVKKPSGNQPQLDLATELKRICGVDLTSIDGIDVMTALTIVSEIGTDMSRFKDEDHFASWLGLTPSKDVSGGKTVGRGKRKVKNRLAVVLRTAATTLLRSDTYLGARYRNLRRQLPSLSAAVKAMGRHLAVLTYRLLTKGEAWVDRGATQFERRRTEQELANLNFRAQAKGFKLVPITEPS

SEQ ID NO: 475797 - protein, 320 aa, unidentified
MMAQSELVVVGIDVAKDKVDACIRSLSQRQTFPSTPDGRRALIRWLRKHKVGKAAMEASGGYERDWAKALREAGIEALIIDPKRVRHFARSAGRLVKNDPIDAEMIAWFAETCPAEAIQAPDPERIELDGLMTARAGLKAIETQIVQQGEHRRHKLAARAHAAVLKTLRAQLRALDAAIAARIRANPAFARRAEIVASVPGLADQTAAGIIAWFPELGHISDQAVAALLGVAPYDDDSGEHKGVRHIQGGRRKLRNHLYMPMMGAATQHNPVLKAYYQRLIAKGKDGKVALVACMRKLIVILNIMITRGEKWDASRYAVA

SEQ ID NO: 475798 - protein, 415 aa, unidentified
MTETAYAAYVGIDWGTATHQVAVLDAQRAPLGERAVAHDGAALQAFTEWLTLLTGGEPARVAVGLEVPRGAVVDTLLERGFHVFALNPKQLDRFRDRYTVAGAKDDRRDALVLATALATDRPAFRRLELEAPLIVELREWSRVEDELREEWGRLANRLREQLHRFSPQLLSLCPAADESWFWALIELAPTPPAAQRLRRAAVVTLLREHRIRRLTADQVLAVLRSAPLQVAPGTVQAASAHVALLLPRLELIDRQRRDCARRIEHLLDALATTGEHQGHRDVTILRSLPGVGRVVAATMLAEASRLLAARDYHGLRTQAGVAPVTRQSGKRLLVGMRYACNPRLRNALYYWGFISVRYDAHSRQHYRRLRGHGHSHGRALRGVADRLLTVLMAMLAQQTMYDPARRRAALAQTPS

SEQ ID NO: 475799 - protein, 394 aa, unidentified
MRFAGIDIASETHVVAIVDAQGAVELKATSFAEDAAGYQKVLALLGNPKEVLIAMEATGHYWKNLFAVLAATGHSIALVNPLRTHRFAGVDLERTKTDAIDALGIARFAANKRPPATPLPDALAEELRELVHLRERLLQDFGDRVRQLHRLVDLGFPEFTRYVRTLDSQLATAILRDYPTAAAYRGVSVRRLAGLRYDARHQVGLDLARTLIDAARRSVGQHHSATYRLQIRYACDDLDVLRHRLRDIDRDIDAKLRQHEVGRLLTTIHGIGPQTAACLIAELGDPAHFRNAPALAAYVGTIPGLKQSGKRRTLHAGLTPVGNARLRAALWMPTLTAVRFNPWLRAHYQRLRARGKLPKVALVACMHKLLFAIYAVAKHRRPFVATLDSENAST

SEQ ID NO: 475800 - protein, 353 aa, unidentified
MQCIAFDSHKHYTWALVQDEEGKVLREQRIDHARGALRGFLEEFELGSPVAVETIGNWYWITDEIEAAGMVPQLVNARRAKLMSGSINKTDKLDVRGMNRLQRSGTLPTVWIPPRELRDARELPRTRMVLVRQRTKLKNRIHANLAKYGLKAGGVTDLFGVRGRKILDDLLNEFPTETRYATEALIEELDHLQAKIKELEGRTAELFGGIEALNLIQTLPGVALILGVVILTEVGDIERFPSASHLASYAGKTPRVHASGGHVRHGKTRPDVNHYLKWAYAEAANAVMIHRRRHPRRHVSRLYERVQRRRGHQKAIGAVGRHLAEATYWMLTKKEAYRDPATDRAEVESKREA

SEQ ID NO: 475801 - protein, 299 aa, unidentified
MLQAHTLSVGMEGPTEAIAVASVAQEQGADVIALGTLGTRPGASDPLIRPLQSQSTPRVCVDDAGPCGAGLSRSLTQTGAVGWVVAPSVRPTKAGDRVTTDRRDARPLARRMRSGDLTPVAVPAVHEAAIRDLRRAREATLRDLQAAQVRLTACWRRQDSRSTGQAPWSPAPRRWRSAGGCPTPAPPMVWQEAVQTVTAPTARWPRREHARQAQVPPWRCAPVVEALQALRGVQCPVAVPPVAALGDLTRCETPRHLRHDLGRTPAESSRGARRPQGRMPQTGHTHARRALVAGAWASR

SEQ ID NO: 475802 - protein, 477 aa, unidentified
MAEHPLWRSVSLEVSIAAVRRQNMEEIFEDCHDVQVVYQRCCGLDIHKKTVVACLIILTADGKRRRQIRTFGTTVAALLELLDWLKAAGCTIVGMEATGVYWKPIYNLLEGHFELLVANARHIKAVPGRKTDVNDAQWIASLLQHGLLKASFVPDHEQRELRELTRYRTTLVEERARIVNRLQKTLEDTNLKLGDVVSDITGKSAQAILRGLLAGETDPAVLADLARGRLKAKRADLEAALVGTIKSHHHFMLTEYLGHLDRLDLSIKRVGAEIEARMGPLLPPEPEQDSGKEPEDEPSASEEPTESAPKEPLSLAQAMVLLCSIPGISERAAQGILAEIGTNMDRFKSAKHLASWAGMCPGNNESAGKRMSGKTNKGSPWLRKLLVQVALAASRTKNTYLAAQYRRLAARRGKKRAAVAVGHSMLVIIFHVLREQKPYEELGGNFFDQRESVEVRLVHRLEKLGYSVSKLPAAHAA

SEQ ID NO: 475803 - protein, 335 aa, unidentified
MTLYCGIDLHSNNQVIVVIDDKDKRLLERRVPNELGATLSALEPFRADLQAVAVESTYNWYWLVDGLNDHGYSTRLVNTAAVQQYSGLKYTGDQHDAYWLAHLMRLGILPSGYICPREIRDVRDLLRKRLGLVRERARNLTSVQNILARELGHRVPTAQLRRVLDSDEHFRPGVRTAIAANLAVIETLDTVIAGIQGQVLEVIKPTLRYQQLKTISGVGDVLAPTIALETGEIERFKSVGNYSSYCRVVDSRRESNDRKKGEGNKRCGNRYLAWAFSEAAHFAVRYNDRARRFFDRKTARRNRMVAIRAVAHKLARAAYFIQRDRVEFDAMKLFG

SEQ ID NO: 475804 - protein, 391 aa, unidentified
MSMYFIGIDISKYKHDCCIISAANQKVVSKVIIKNNKAGFNELLTIIHSLANPADIRIGFESTAHYALNLELFLENSLLTFMEENPVLISEYKKSKTLRRTKTDSVDCESIARWLMTVEYKPHSKGFYHAYSLKSLTRLRDKLIRQRSFYLVKITNVLDHTFPEFKPFFNERLSKTALYLLENYGSAEKMARMNSASYEKLRSVSRGKFSPQQFLRLKELAVNTVGVNNSIFDVELNSLLSLYKSLVKEIDTIKKEINQLIEEVHPHYMSVPGIGPLSAAVIYSEYGDISNFTNPGQMLAFAGIEPGINESGTESHGGKMVKRGSSQLRYTLINCCLPLIRFDMTFATYYAKKRGEGKPHRVAITHVAKKLIRVIYALESQDIDFNAQELR

SEQ ID NO: 475805 - protein, 365 aa, unidentified
MRRPNTKVIAGMDLHGNNVVIGIMNQDGKRIEHQKVATDLDEVESVLKPYKKRLSCMAVESTFNWYWLVDGLRLRGYPIDLANPAKIEQYNGIKHADDKHDAFHLAELQRLGILPKAHIYDAQLRPVRDLLRRRSMLVGHRTALYISFKSLYSRTTGRQMPLGELKSLGPGDVARLYEHPANQLIAQIQLEEIGRLDKSIQRIEAAVLSCARHIRLYPKLLTLPGIGKILGMTITMEVGDIQRFKTDGDFASYCRAVDSRRMSNGKQKGQNNQKCGNRYLSWAFVEAANFAKRSDPQCRRWYERKKARTSTVIATKALACKLAKAAWHVMAHNTDYLPERMFPGEQRDLENRRQPATGLAKSPKD

SEQ ID NO: 475806 - protein, 310 aa, unidentified
MDIIIDKGCGLDVHKETVVTCVMGSGIKKEIRTFSAMTGDLLRMKGWLTDLGITHVAMESTGPYWKPVFNILEDSFEVILANARHIKNVPGRKTDVKDSEWICKLLRSGLLTASFVPPQAIRDLRDLTRYRQKLIQAASAEKNRIQKVLEDANVKLSSVVSDTFGVSASRMIKAIMSGNFDTDSLAELAVGRLKGKKEKLKEALQGHFRDHHGFMIQASLDHIASLEKIIADLDRQINEKLKDYHRERELLASIPGVKEQGSSSILAEIGAAMNVFPSEGHLSAWAGMSPGNNESAGKKKVARQPMAIKT

SEQ ID NO: 475807 - protein, 420 aa, unidentified
MNSININQKGRFVKSDYMVVGVDIGKRFHVAVVRRRDGSFTKAFKFSSDASGFTNFWDWLNKWYEQGSFSGILIGLESTGHYWETLAYWLRQRGIEVVQVNPLHTHKAKDLYGNNPGKTDSKDAWIIADLVSQGKFLRCIIPQGRYADLRQLVLLRKRLVTERTRQLNNIHRVIDVLFPEFTKVFKNIKTKSCQYLLTHVYTPDLLLSFSYKRLVKTLHKISHGKLRMEKLTDLYKLAKSSVGIREGINGIKIVLYHGLSRYMQLNKEIKHLEGLIEEVVCELEEADYLRSVKGVGLITAAVILGETGGLSHYSSAEEVIKLAGLNLYERSSGKHRGKRRITKRGRSVLREGLYLAAVSVIRRDGVLRDFYERLINKGKARAVALIAVACKLMRLLFALVRARRFYAPDHSACEAELGVV

SEQ ID NO: 475808 - protein, 479 aa, unidentified
MTPHKDYCLDPGPPAPTPTLPESSILTEALQVCNPHAAGIDIGEAEHWVAVPPGCDPQPVRRFGTFTADLDALADWLIDCGVTTVAMESTGVYWIPLFELLEARGVQVLLIDPRQAKRAPGRPKTDRLDCKWLQRLHAYGLLAGAFRPEDQVCVLRSYLRHRQMLLTSAAHHIQHMQKALQQMNLKLTQVVSDITGVTGMAIIKAIIAGERDPQRLAKLRNPHCHHDADDIAKALQGTWRAEHLFALRQAVELYEVYHQQMAQCDQQIKRHLETFADKSAGQPLPPKARRHKKTNEPRFDARTPLYRMAGVDLTTIEGIEENTALIILSEIGTDMHRWPSVKHFCSWLGLCPQHQISGGKVLSRRVRPGAHRVTVALRLAARSLHHSQSALGAFFRRMKARLGTPKAITATAHKLARLVYSLLQHGSAYVQQGLDAYEAQYRERKVKAMARQAQALGYTLVALAVPEVQEIAAVPAPTP

SEQ ID NO: 475809 - protein, 431 aa, unidentified
MDIVHPRVAGIDVHKKVAWVAVRLPGEAPGERKVITKRFKTFWRPLQKMAAWLAELGVTDAAMESTGVYWWPVYHALAGAGIEVCVCNAAHMRNVPGRKRDIADCQWIAELHEHGLLRPSFIPAAEVAALRQRTRYRKRLIEQRTSEGQRLSKVLEDAGIKIDSVASRLLGVSGREMIEALIAGERNPGRLADLARGVLRRKTEDLQMACDGRFTAAHAQMCRLHLDAHDHLTAAIAELDALIAEAAAPFAAVIARLMTIPGIGQRTAEVIVAETGGDMTRFAASARLAAWAGLAPGDNESAGKRKHAAARKGNQHLRAAMTEAAWATARTRTRPGARFRRLARRFGKGHEKKAAVAVAHTLICIAWAVLSRGEDYAEAGEDYYEQRDRRNREHLIRHHQQALARLGCQVTLTPPGDGPPPADGPGQQPAA

SEQ ID NO: 475810 - protein, 419 aa, unidentified
MTTSNERTIVSVVNPICCGIDVHKESVSATILFTDRDGKESTIIEKFLTFTDDLVRLRDWLLTHECPIVAMESTGVYWHPVHNILEGYVAVVLVNARDVKNVPGRKTDIKDSEWLAGLLRHGLLRSSFIPPRDVRTWRDLTRMRRKYINNISDFKKRVQKLFESANIKIDSVVSDLFGVTGRNLMSLLASGHDITQDDIERCVRGKLRSKTHELYRSIQGFFNDHHRFMLQAFLSTIASLEHTVEFLDQRIGSLMRDHAALIERMIEVPGISDITAHYIIAETGTTLDAFPNEYALASWSGLCPGNNESAGKRKNGKNHTWKNQLKPVMIEAAWAAARTKGTYYQDKYHRLKARRGHKKAIVAIAHKIMKCLYHIIKDGARYTELGTDYLDKKTKAAKLYRLHKQAEALGFQLIPDSIQ

SEQ ID NO: 475811 - protein, 316 aa, unidentified
MQPQDNFVGVDVAKAELVIAMPGQRPRCIANQAAAITQWLGELPAHCSIAMESTGRYHALLASLGRRAGFKIYVLNARDVHFYAKALGMRGKTDRLDCEVIVRYLVQHHAELHEWSGNDSLASQLNELLQSRATVATHGSALRQVFRGMPSLADACTQLQSQFEWFLDQVDAQIERLIASDQQLARGCARLRTITGIGPQTSSLLGSLFCRFEFANSDALVAYSGLDPRPNDSGAKRGKRRLSKKGPALLRRQMWLAGFAASHSKALKPMYQALRARGISTTEAIMIMGRKLLRVAFAVWKSDKPFDPALMGAAKG

SEQ ID NO: 475812 - protein, 426 aa, unidentified
MISAVIERCAGIDVGKKELSVCVMTGPANGEARCEIRTYGTTMGQLEELRAWLKAEQCTHAVMESTGSYWKPVFNVLEDSLEVQLANPNEVKARKGHKTDNRDAWWLAHLLRHAMITPSFIPPRQQRDLRDLTRRRKRIIQAATGEKNRVDKILQDANVKLSNVLSDLFGVSGQRMLEGLLKGPVDPSVLASLAHGRMKKKVPDIIAALADNQMREHHRQMLRFSLEHLQFLEEQLLAIDDAIAALIRQAGYGPQWDLLQSIPGVQAPTAAVLLAEVGPNVNAFESEKKLSSWAGVCPGNNRSAGKNKSSATTEGSPWLKAALTESAWAISHTKRGQLRDKYWRLAAKNRSKAIVAVAHDVLRLAYAVLQRGTAYEERGGQPMSQAQRQRLIQHHVRRLGKLGVRVRAGFATKCNTKEAAQTEHQI

SEQ ID NO: 475813 - protein, 340 aa, unidentified
MQITTIGLDIAKNVFQVHGIDAAEKVVVRKQLRRGQVLKFFASLQPCLVGMEACATAHYWARELTKLGHEVRLMPAKDVKAYVKRNKNDAADAEAICEAVRRPTMRFVGVKSAEQQGRLMQHRARDLLLRQQTQVINALRAHLAELGIVAAQGREGLKQLLMIIADEKNERLPIDARASLIVLAAQIQALHTMIGSIERRLLVQHRANEASKRLECIHGVDVIGATAIAATVTDPKSFRSGRDFAAWIGLVPRQDSTGGKQKLGPISKQDDRYLRRILVVGAHSVLRRAKLNPEKYPWLTQLLARRPFKVVAVALANKMARIAWALLANGSHYRPQLATT

SEQ ID NO: 475814 - protein, 387 aa, unidentified
MAQVNDLSRSLTAFDPISTLVVVVEMSKASWLVSGVVPGVERQPLKKLEPDATALLRLIERWRNEAVRAGRPISRIALAYEAGRDGFWLARWLIARGIEAHVIHSASVAVSRERKRAKTDRLDAAMLMRVFLGWLRGERGHCGMVAIPTIEEEDARRPSRERESLVDERSRITNRMKSALARLGIRGFKPHLRKAPERLAGLRTAEGTGLPANIIEEFRRDMARLALVREQISSIEKTRAERLERAPDTGPHAMVRLLARVIGIGIETADMLVREILSRKLRDRRAVARYAGLTGSPDESGLKRREKGLAKAGNARVRRGLIQLAWRFLMFQKDSALAQWYRTRTEGPSGARKTTMIVALARKLLIALWRLVTTGEVPDGVELRPAA

SEQ ID NO: 475815 - protein, 310 aa, unidentified
MDAHFVGIDVSKDWLDVHVVPSGEHFRDDNDGKGIERLRRRIEALGPQRVALEATGGLERLAVAELSAAGLPVAVVNPAQVRSFAAAMGRRAKTDPIDAAVIAAFAAALRPEVRPLPDAMTRLLADLTARRRQITAMIVAEESRARTATARETSKSIQRLLAALRRELDSVDGQMDGLIRKSPAWLVRHDLLTSMPGVGKTVARTLLAELPELGSLDRRKIAALAGLAPFTRQSGTWRGRSCIAGGRSSVRSSLFMAGLVAIRHNPVLKAFRDRLVDAGKPKIVALVATMRKLLTILNAMIRDQKPWQST

SEQ ID NO: 475816 - protein, 371 aa, unidentified
MIDKPIRARYPKLFDRGTLMRFYKNQHQFYIGIDLHARTMYVCVINNCGETVFHKNMECSTDNLELVANTFGKDIVIGVECIFTWYWVADFCAERGIDFALGHAYYMKSIHGGKTKSDKIDSEKIANMLRGGMFPTAYAYPKAKRAARDLLRRRLYFVRRRAELSVHLQLTNHQYNINAPLDSSKMRSRAYRDAIPGKFSDPMTLEMVNADLFMFNAYNDIITRLESRIEGCMEVQDPVSYAIINSVPGLGFILSLTILYEIDDINRFPDEGKFISYCRLVKCSHESAGKKESGRHNKIGSVHLKWAFSEGAVLFLRNNELGQKWHDRLVQRYGKARAMSMIAQKLARTVYFMLKRKVPFNAKQFYGLEKT

SEQ ID NO: 475817 - protein, 444 aa, unidentified
MAMRKREDEVFPNAAGIDIGASSHWVSVPRHLAETAGDEPVREVGAMTDDLNALAGWLVKLGVDTVAVESTGVYWIPVFEVLEQHGLKVWLVDARQMKYVPGRKSDVQDCQWLQKLMSLGLLRAAWRPSADVCVLRSVARQRETLLIEQASWVQRMQKALVQMNIQLTEVLSDVMGQTGQAIIRDIVAGQRDARVLARHRSRRVRASEADIAKALTGNWREEHLFVLKQALAMYDDIERHLGECDTRLDELLDERARETVDVGKLPRAGSKTRVEHDIRQRLANWAGVDLTRINGLGVTVVMKLLTEIGPDLSRFATVKHFCSWLGLCPGTKISGGKVLSSGTKRSANRARQALKLAAQALWRSESALGSFYRRLCSRMDKPKANTATAHKLARMVYFMLTRGEAFVDQGQQHYEEQQRQRNIAALQRRANALGFQINPLGTPA

SEQ ID NO: 475818 - protein, 380 aa, unidentified
MTHAPVTQTRNTTGNDRLYIAFELSNTKWKLAFGNGIKKRRKTIDARDIKTFMKEVAIAKSHFKITDAVEIYSCYEAGRDGFWIHRFLESRGIRNVVVDSSSIEVNRRLRRVKTDRVDVEKLLTMLIRYVNGEQKLWSVLHVPTVEQEDVRRLNHESERLKKERTAHTNRIKSLLILHGIELKIRSDFIRVLDEVVQWNGRPLPEGLKRELLREYHRYQLIQLQLKELGAEQVEILKGSSVQAQKAKALGQLKGIGPVSSWTLVFEFFGWRRFNNVKQVGAASGLAPTPHASGDMQREQGISKAGNRRVRATMIEVSWFWLRYQPQSSLSRWFTRRFGGGGKRTRRIGIVAMARKLLVALWKYLEKGLVPEGAMLKSLPR

SEQ ID NO: 475819 - protein, 444 aa, unidentified
MKTTSASPRGAVPNVAAWIGLDWADQQHVGCLYDVASGQQEAFSLESSAEAIPLWLAQLRQRYGGRRVAIVLEQRRGALIHALLGCEFVILYPINPQSLAKYRQAYFSSGAKSDAADAPLLMDLVRHRPDRFHPWQPDDPETRSLQLLTQARRRWVDQQTALTNQLTQLLKGYYPQALELAGDLSSPGACQFLKRWPTLAALQQARPSQIRKHYQRYGRPTAAELDGRLERIRQAQPLTQDPAVLLHGSLMLRALVDQLLPLFDTLREFERQIAALFAQHPDRPLFEHLPGAGKVLAPRRLAAFGTQRERWQQAAEVLTYWGVAPVTEQSGRSRWVHWRLACPKFLRQSWHEFAAHSRKHCGWAQAFYQQLRAHGKGHHAALRALAYKWIRILFRCWQTRTPYDEQVYLKSLEQKNSPLLAAIQALSSSSAPSKAVRGSLVKNL

SEQ ID NO: 475820 - protein, 347 aa, unidentified
MKIIGCDFHPGFQQIAMLEQESGQRVRRKLEHASGEAERFYRGLREQGGEVLVGVEASGNLRWFERLIQELGFELRIGDAAKIRASEVRRQKTDRRDAERLLELLEQNKFPAIWVASEAERDLRQLLQHRHKLVQMRTRIKNQLQHVAMNQGLQKKRQLWTKQGQQWLRELCLPRWTERRREDLLVLLTGLEAAIAELTRAVEEAAQQDARARRLMTHPGVGPITALAFVLVIGEVKRFPCSRQLCSYLGLIPCEDSSGERRRLGSISKQGNTLLRTLLVEAGQSAAQCDPELRRSYQRLCHKKRYTGIGKVMVARKLAVRLYWMWKTEQPYPSARMQNGPSHPVSA

SEQ ID NO: 475821 - protein, 341 aa, unidentified
MKIIGCDFHPSYQQIATLDTETGELWEGRLEHEQGEARHFYQALVGQVVRVGMESVGNSQWFERMLAEMGHVLWIGDAAKIRIGVVRKQKTDRRDAQLILDLMVNGKFPKLWVPSPQVRDVRQLLRHRHKLVEMRTTVKNQLQHLALNQGVRLKRRLWSKHGRRVLEQLPLQGWTARRRSDLLVMLDRLEEQVGELDLAVRAEADQRPEVRLLMTHPGVGIVVGLSYALTIGPFTRFERGKNVASYLGLIPGEHSSGGRQRFGPISKQGNTMMRTLLVEAAQTAVRFDEELRRAYGRLKAKKHSAPAKVMVARKLAVRLYWMLRENKTYAELYARRPGARM

SEQ ID NO: 475822 - protein, 352 aa, unidentified
MRKECSTVSFKNQVIYVGIDVHKSSWQVSIRHCRHHLANFSMNPDALKLAEHLSRNYPEAEYRSVYEAGFCGFEIHRSLCGLGILNIVINPADVPTSGKERANKNDCLDSRKLARELENGSLEGIYIPQEDNLVLRNLTRRETQLTGNITRVKNRIKSHLYFNGLKFRSWSGSSLKIMESDAVKRHDFALCSLLRELRFLRLEKLQVVRDEKECLKFLNREKTQENLQSIPGIGFRTAVVLQSELWDLKRFPDKDHLKSYVGLAPRLVGSGEHEEVKSAGNRKKKQLHYLLIESAWRAARFNLEYRARYGLLIAKGTNPQRAITIIAKKLLMSIHAVWTQDRNFKVLLPRTK

SEQ ID NO: 475823 - protein, 352 aa, unidentified
MLYVGLDIHDKRIAICVLGETGQIVRRAQVRTIDEMMRILQALPDRFEVCYEASCGYGHYHDLLKPIAAEVTVAHPGRLRLIFRSKDKNDRKDAERLAKLLYLGEAPAVHVPSGEVRTWRELITCRGRVIAKRTRAKNSLRSLLRCAGVVPPGRPALWTKKGREWLRRLELPTASQRLRRDLLLEEIESLTNQVRRIEHELNHQAGRSPAVARLRSIPGVGVRTAEAVAAFIDDPHRFRDAKAVGRYFGLVPSQDQSGDRNRLGHITREGPAVVRQLLAEASWQALRRSPTVRAYFERVRHDDPQRKKIALVATAHYLVRVMWAMRKDGTTWEESIASADEPKGVARTVAII

SEQ ID NO: 475824 - protein, 436 aa, unidentified
MSKSQNPTKEVIPIMKKRIYRRMPVNDFQPQSISPADLGGKLVFAIDVAKIDMVAALAAADGRVLQTICWKAPEENPTVLSVLRSFRAAGVTVEAVMEPSGTYGDVLRYQLEQDAFPVFMVSGKRTYDAKEIFDGVPSLHDAKSAAIIARLHADGLSTRLPAEVPERRQLKAALAIMDLHQERYLQLVHRLESWLARHWPELPTLLDLTSSSLMALLARIGGPADVAAAPDQATKLLRGISHRLIPDDKVAAVIASANTSVGVPLVGLERDALIAIAAEAYHAHRAFATAKTKVAQLAATTPAAALSPVVGPTTAAAIYAEVGDARSYHCTRAFLKAMGLNLKEKSSGTVHGQIKITKRGPSRVRQLLWLAIFRWIQDDPIADAWYQRKKQRDGGRASRAAVALMRKLAKGLYHVGRGGTFDSSKLFDTRRLQVAV

SEQ ID NO: 475825 - protein, 343 aa, unidentified
MKITRVGVDLAKNVYQLHGVDRHGKMVWKRRLRRGQWLQALLDKTDPDCEVGMEACTGAHHWARELQSRGYTVRLIAPQFVKPYVKSNKNDANDAEAICEAMSRPNMRFVTVKCVEQQDIQATHRVRTELKNHRNAKGNQIRGLVAEYGLVAPPSLLALRRAIPEWLEDAENGLTDNFRCLLHGLWDDLLTLEDRFKALDKAIEKLARSNEVTKRLQQLRGVGPIVATALVATVGNGEQFSNGRQMAASLGLTPRQSSSGDKRRLLGISKRGDVYMRTQLIHGARAVVSQAKNRDDPLSRWATDIAKRRHPNVAAVALANKTARMAWAMLQNETDYDPSLAVG

SEQ ID NO: 475826 - protein, 346 aa, unidentified
MEHYVGLDVSLKLTAICIIDRTGKIEREGVVASDPEAIAAFIKLHAPHVVRIGLETGATSTWLWTELNKMGLPVICIDARHAKAALKMQINKSDRNDAVGIARIMQCGWYKEVRVKDLDSHATKALLVSRALLVKIKRDIENQIRGLLKNLGLVIGRAKMNTFAARAAELAGDRPELAAAVDPLLKAREAVEQQIFDLHRKVLRLARNNTQVRRFMTAPGVGPVTALCFLATIDDPARFKRSRSVGAYAGLTARRYASGEIDWTGRISKCGDKMLRSYLYEAANVLLTRVAKWSALKAWGVRLAKRSGLRKAKVAVARKLAVILHRMWIEGTEFKWSSKEAANQPA

SEQ ID NO: 475827 - protein, 407 aa, unidentified
MFYCGIDIAKHRHELCLLEQNGTQILSMHFDNSQKGLSKLLDALSSFEVEPDNIMFCMEATGHYWLALYCQLKELDFDVRVINPLQSDALRNLYMRKAKTDKKDAFILADLIRIGRAPVTRLATEKTLKLQTLSRVRLGFVHQIGGLKNRVLGILDRIFPEYPKCFSDVFIRTSRELLKEYPEPELLAEADLSELTAFLRQHSKGRLDRERAEQIQDLARGTFGIRLALDAFTLELKLLVEQIEFIEEQVNILEEALLAVLEEFRVDPEQPYRHVLETIPGVGPVLAAAIIGEVGDISRFPNAKALVAYAGLDATVRSSGQFEGTRNHMSKRGSPTLRNSLWLAAVTARRFNPELKAYYEAKKAEGKHSGVATGAVARRMVHLIYSLWKDNRPFELDYKWAPPGGER

SEQ ID NO: 475828 - protein, 373 aa, unidentified
MPKYSTAFGMDVHLRSTTVCALDADTGEAVTRRFPGNPWGEIAGWMDGFPGPSLAAYESGYLGFAPQRELAGLGVECVVAAVSKIPRSAADSASKNDRNDAARMAKAILAHDISPVWIPSPEVEGIRDLAGAYDGATARLATAKQRLLAFLAKRGFVYGGTTPAGNPRKYWTYDFLRWLDKVRPEDDGGVRTLAALRNEVEAAAEARADLLSEYRAAVDASPIAAEVTALQSIKGCAFALAAAFSAEVGDFTRFRSGRQVTAYFGLAPSQRSSGDSVRLGGISGAGNALVRKLAVEGSWCYAAARHQPKLMPRDTGVPLEIRMHGRKGSERLLRRRKEMLARGVPAAKANAATAAELVRWLWALGMMCREGAE

SEQ ID NO: 475829 - protein, 360 aa, unidentified
MQTQKTELDFKGQNIFVGIDVHLKSWTVTILTEDLTHKTFTQPASADTLSNYLVRNFPGGNYNSVYEAGFSGFWSHYKLKEMGINNIVINPADVPTSQKEQLQKDDPTDSRKLARSLRSGDLKAIYIPDPSMLEDRSLVRMRSTLVKDMVRFKQRIKSFLYFYGIQFPPQFEKAGSHWSKRFMKWLSEEVTLQHDSGTQTLKILVQEAEGQRMLLLEVLQKIRLLSRSEKYAENIALLRTIPGIALITAITFLTEIENIERFENTDHFAGFVGLVPNYHSSGEKKNNGEMTFRGHSILRRSLIESSWIAARFDPALLMSYHNYIKRMEPNKAVIRIARKVLNRMYYVLKNKMEYVSGVVK

SEQ ID NO: 475830 - protein, 369 aa, unidentified
MNTTTFVGLDVHARSIKAVALDAMTGEVRSATFGYDAAEVAEWVRSLDPAAKCVYESGVTGFDLQKRLSSMGIDCVVGAVSKMIKPPADRKRKNDRNDAEFLARMLSVGNVVEVWVPDDECEAARDLARALDDAREDLKRCKQRLSKFLLRHGLVFSETTPSGRRRGNWTAAHWAWIKSISFAEKADDDVLAYYIDATRQAMEDKARLERLVEAEASKPRWKRRVDSVRCLKGIDVTSAADLVFETGEFSRFKNARSFAAWIGLTPSERSSGESVRQGGITKAGNKHLRRVLVESAWHYLGCPPHSKDLAKGQAPDPGARRHAAKGVRRLVERRRAMLERGVHKNKANVATARELACWCWAIGCMVENG

SEQ ID NO: 475831 - protein, 387 aa, unidentified
MPDVSSCAPADVRLWVALDVHKLSVVAATLPPSGGRPEIIRVENTARAIRRLIERLGGPAGLAVAYEAGPTGWALKRLLDGLGVACDLVAPSLVPVRPGDRVKTDRRDAKRLVRLFRAGELTFVAAPSPEQEGLRDLIRCREDLRDARDRARQRVIKALLRHGHVFTDGKHWTIRHRNWVASRRLEDPAAQLAIETMRAHLEMIETQLRQLDVQLDRIAQEDRWRPGVRVLTSFRGIATLTALSLLAEIGDFHRFGTARELMSYLGLCPSEYSSGQQVHRGHITKAGPVHPRRLLIEAAWHYRHPPRLTERQRENANAARRDGEPELPPLVAARAWQAQVRLNHRHRVLTEHRKKRATVTNVAVARELVGFLWAAMTDQPPRQETAA

SEQ ID NO: 475832 - protein, 348 aa, unidentified
MRGAVHMQISTIGLDIAKNVFQVHGISSSEEVVVRKQLRRSQVLAFFKALPPCLVGIEACATAHYWARELTKLGHRVRLMPAKDVKAYVKRNKNDAADAEAICEAVRRPTMRFVQVKSVEQQGQLMLHRTRDLLMRQRTQVINALRAHMAELGIVAAQGREGIKELLKIIASEADARLPVDAHSSLVVLAAELQALQTMIGSIEKRIVVQHRSNEASKRLETIPGIGVIGATAIAATVPDPKVFRSGRDLAAWIGLVPREGSTGGKQKLGPISKQGDQYLRRILVVGAHAVLKRARQQPEKYPWLTGLLARKPFRVVAVALANKMARIAWALLTKGGIYRAPALAAAA

SEQ ID NO: 475833 - protein, 359 aa, unidentified
MRKAYFIGLDIAKNVFQVFMADEKGRKICNKKLSRSEAKTFFANLPAATIGIEACGTSHYWARTLIGYGHTVKLIDTMRVKAFLGSHNKTDAADAKAICEALMHPGTRFIAIKTEGQQELDQLIGMRERLVHNCTQLSNQLRSFLAERGIIFSKSKSFFHKDVKELIAEKWNEFGDSFQVIITEGLAELENINGKIAEFDFRIKQYAGKSEKGRNLMSIPGIGPLTATALEAHIGDAARFKNGRQMASYLGVTPKEYSSGGRQKLLGITKRGNKRLRTLLVLAARSIMTGLSRRKRDEEGNPVMLSDFERWILKLKARTGVCKTAVAVANKLARIAWVIMAKNEIFNPVKAVAATGTVR

SEQ ID NO: 475834 - protein, 340 aa, unidentified
MKVHVCGIDIGKTVFHLVGLSKEGHIVTKKRFSRKQLVTFTVNLPTCLIGIEACPGAHFLARILLKQGHDVKLMPAEYVRPFVKSNKNDYVDAEAIAEAVQRPTMRFVPVKNEAQLDLQALHRVRDRWMGRKTAVINQLRGFLLEHGITVATGPAHLKRQIPAILEDAENLLSPRMRTLLLELREEWMKLEEQIDASNQELAQFAKKEDGCRRLLTIPGIGPLTATALTAAIGNGAAFRKGRDLAAWLGLVPRQHSTGGKARLLGISKRGDPYLRRLFVHGGRAVLAQVKRERHQFGGWLDRLEARSPRNVAIVAMANKIARMAWAILTSGQSYNAAFST

SEQ ID NO: 475835 - protein, 414 aa, unidentified
MEVIHMHCAGLDVHKKVVVAALIVPDGAGGLLRETQSFKTMTADLLALSDWLIGQGVTDVAMESTGEYWKPIFNILENNFEVMLVNAQHISKVPGHKTDVSDAEWIADLLRHGLLKASFIPPEGQRELRELTRYRSTFVKERSTLVNRVQKVLESANIKLASVASSVVGVSGRAMLEAIITGTATPAQMAELSKGRLRSKRTELSQALEGRVKPHHRFVLTELLYQIDNLDETITRFNQQIEEYCRPFEEAVVLLDTIPGIARETAEIIVSEIGTDMSRFPTANHLASWAGVAPGNNESAGKKRSGKTTQGNKSLGVALNQAAHAAAHTKNTYLSAQYHRLAGRRGKKRAIVAVAHSILVIAYHMIIRKEPYHELGGDYFDQRRPEATAKRLVRRLEQLGFQVSLEQLMVPASS

SEQ ID NO: 475836 - protein, 425 aa, unidentified
MPTALAWEASMEVLHERCAGLDVHKNTVVGCVRLAQGGRVEKEVKTFKTTTGELLALAEWLDGHRVNHVVMEATGVYWKPVWHILDDGERQLVLANAAHVKNVPGRKSDVSDCDWLSDLEAHGLIRPSFVPDGPTQELRGLLRTRKQLVRERTSHTLRLQKTLEDANIKLDSVISNVVGVSGRRMIEALVAGESDPTALANLAYRRIKAPPEALCEALRGRVTRHHRFLLSLHLGHIDAIDQAIDKIDQEVEASLQPFCQAVGLVKTIPGVSQLAGQGIIAEIGSDMSRFPTCGHLISWAGLCPRSDESAGKRRSTRTRKGNPWLKTLLVQCAWAATRTKATYLHAQFLSIRSRRGARKAIVAVAASILTAVYHMLKNGTSYRDLGPQHLENRNKEAQARRLLARLRRLGFVADFDTLRPVPVSC

SEQ ID NO: 475837 - protein, 352 aa, unidentified
MTVTIVETRAQARAITGGVDTHADVHVAAALDPIGGLLGVAEFPASPAGYARLLGWLGGFGTVCLAGVEGTGSYGAGLARYLAAAGVRVVEVDRSDRQDRRRAGKSDPLDAVSAARAAQSGRARGAPKGRDGQVEAIRALMVAKRSARSVRTQTINQARALIVTGPDELRARFARHTPADLVAELASLRPRPGSMIRYHTLLALRELGRRAQYLDDQLARLDQLIVPLVTARAPGLLALYGIGPDTAAMLLVAAGDHPERLRSEATWAHLCATAPLSASSGKVTRYRLNPGGDRQANHALYRIVITRMSSHPPTRAYAGRRTNEGLSKKEIIRCLKRYVAREVYPHLRPPAG

SEQ ID NO: 475838 - protein, 482 aa, unidentified
MNKSNIYQDGSQELFQIFEQAGNNSNVMCIPIDYAKKEHVVMFCNGYGDIVRKPFDVKNTPEGVKYLIDQTVRSCRHRNIKKEHIFFGGEDVNSYAENFVNALRTKGWLVANVNAHDAKKQRQNIQASTDQLDLLGIAAMMLNCRANCCPAQSGVYRNLRTITRHRKKLVKMKTEVRNRIHTVVDRLFPGFLSEKNIGITPFSPAGLYLMEDRFSVPQIQRRKRSTLIKQLKRKGTKKPEEVAVRLQSYAAQVLTPPNQYTATLQVSLSSHVNHYRCLLDGSVQLKKEMALLLAQTPGAFLTTIKGIGIVLAAGVTAELGDPFSQKPTNNLVSYAGIVPRVKQSGGTQGQTRVGSVSKRSNHILKDYVVQSGFHIGLYGPEELRQDYKRRDAAGQHADFGMARRFVRMAMCLMKTSQVYLPRTLRTADVKPHQRADYYLSLWPYLKDKWAKLDALKIAFSKDRPLGQWRYIVQQLYDIKLKL

SEQ ID NO: 475839 - protein, 340 aa, unidentified
MKLYGAIDLHSTNSVTVLIDEQDKVVYRKRLPNDLQLIIEQLAPYQSRMEGIVVESTYNWYWLVDGLMEQGYKVHLANTAAIQQYNGLKYTDDDSDARWLAQLFRLGVLPEGYIYPKQERAVRDLLRKRSQLVRQRTANLLSIQNLVTRNTGSSISGNRIKVLDAQQVDELLVERDHALAVKSNLSVLQCLSREIAALEAVIKERVKLRAEFQRLRTVSGIGKTLALTMMLETGDIRRFASVGNFASYCRCVGSQKISNGKRKGSGNTKNGNKYLAWAFVEAANFAVRYQPAIRRFYQRKRAKTNGMVALKAVAHKLCRACYYVLRDQVPFDVIKAFGTK

SEQ ID NO: 475840 - protein, 329 aa, unidentified
MNGDYDGRQYVGIDLHRRRSVIVRMTEQGEQLGWVRIDNDPVALGLELAKAGPDPEVVLEATYGWYWAVDALQTAGAHVHLAHPLGVKGFAYRRVKNDVRDAADLADLLRMHRLPEAYIATPQERELRELVRHRAKLVALRSGLKAQVHATLAKQGRLPAASDVFGRAGMAWLRSAPLELVYRQRIDSLLELIDAYDGEIETFRTMIANRFTGHRGYRAIQQISGIGPTFAAVFVAEIGDINRFSRPEKLCCWAGLTPRHRESDTTVHRGPITKMGCGGRRRGLRLRSARVRGGCRGDRGWYRHSPGAVDIRLRGSRLRGSVPRADRPG

SEQ ID NO: 475841 - protein, 363 aa, unidentified
MASIAPSPASVSRVVTGGIDTHKDLHVAAVVDATEAVLGTASFSTTRAGYRSLVRWMRSFGDVQRVGVEGTGSYGAGINRHLAGAGVEVLEVFRPDRTDRRRRGKSDDLDAINAARAALHGRRTTIPKTRDGLVEALRVLRLTRSTAVKSRRAALQLLRNHIVSAPDELRDQVRDLTRMQLIRTLASWRPDTTGFRDPSCATRIALKSLARRILELDDEVALLDELIEPLVRELAPQLLERPGIGVEVAGQLLVTAGDNPERMRSEAGFAMLCGVAPLPASSGKTQRHRLNRGGDRQANSALHMAIVSRLRIHEPTKAYVARRTAEGHSKLEIIRCLKRYLAREVFFLLKPEPIAAKRPRNPA

SEQ ID NO: 475842 - protein, 408 aa, unidentified
MKTLHQRCAGLDVHKQEVVACLRLVTQGRVHREVRRFPTTTRGLLELAAWLEAARCTIVAMEATGVYWKPVWHILDGSFELVLANAAHIKGGPGRKSDVNDATWIADLLAHGLIRASFVPPQPIQELRDLTRTRKQLSREIVRHTQRLQAVLEEANVKLASVITDILGASGRRILKAMITGETDPSHLAELGSRRLGCSRDTLVEALDGRVRDHHRFLLDQHLKTIEQLEETMAAFDARIEAALAPFRDTVERLTQVPGLSTRAAEVVIAEIGLDMSRFPTAGHLLSWAGLVPALDESAGKRRSTRVTKGAPWLKPVLVQCAWAAANKKNSYFEAQFLRLKGRRGPKKAAVAVAASILTTVYHMLRDGTCYQDLGPNYFARRNPARTARKLADRIRSLGYIVEIRSAA

SEQ ID NO: 475843 - protein, 365 aa, unidentified
MDVHLRSTTVCALDAETGEAVTRRFRGNPWGEVAEWMPGFPGPSLAAYENGHLGFAPQRELSGLGVDCVVAAVSKVPRSAADLSSKNDRNDAARMAKAILSHDISPVWVPSPEIEGLRDLAGAHDAATARLAAAKQRLLAFLARRGYAYGGTTPAGKTPRRYWTYDFLRRLDKVRPADDGGIRALAALRNEVEAAAETRDDLLAEYRAAVAAGPLSAEVEALQSIKGCGFALAAAFASEVGDFSRFRSGRQVTAYFGLAPKQRSSADSVRLGGISGAGDALVRRLAVEGSWSYVQASHQPKLMPKGSGVPLEVRMHGRKGSERLLRRREEMLARGMPQAKANAATAAELVRWLWALGAMCREATE

SEQ ID NO: 475844 - protein, 364 aa, unidentified
MSKCDYTEKTVYMGIDVHKKTLSCVAVCRGMKDKHARMPACPNALIAYIDNHFEGAYLKTAYEAGFSGFHLHCCLTDAGIDNIVVHPGAIAVVSRDRVKTDRRDATNIAKQLADGRLRPVFVPSEEAVAMREVSRLRRLTVGACTRVAQQFKALLFRHGLIAHTEDSTISRAWVKAKLAEAKASKDIRRGLLYSMESLANEWIHLKDKAKQIQKDAKAMQSPEERALIDIYKSAPGMGDMQRFANNKQLYSYLGLTPTENSSGERRYLGHISRQGRSILRDIFIEAAWTAVRKDERLLEIYQDIAARRGKQRAIVGMARRLAGHLRACVRKGESYNSEYAYTARAKTFELAKAKAKAEAEAQAA

SEQ ID NO: 475845 - protein, 404 aa, unidentified
MFLFGIDWSQDHHNLCIRNGKGAIVSHIEFKHTLKGFQRFDDERRKLGVPPSECLVAIETAYNLLVDFLLDRGYLVYLIPPQATPGYRNRHRSSGAHTDDSDAALLSSILLTDLDSHRRLKPNSALTLQILAQVRLIEVLRRSIQRQTNQLRALLFRIYPQALSLFGKLTAQINLHFLMAYPTAQDAQSLSRASFEDFCRKHRYGRTDLISRRYAHLMEPAPQASPIAVAAYRDPIRILAELTLIHVHHRTDALSCLDQLFTQHPDAFIFDSLPGAGELLAPALLAKFGDHRDRFPTSNSLQALAGTCPVTQQSGKRKFVFFRRGCDREFRRIAQQFARASTRQSGWASAYWHEVRPRCRSNSDAYRRLANRWLAIIWKMWQDRKAYDETYHLQQRALRRQPKS

SEQ ID NO: 475846 - protein, 331 aa, unidentified
MKFKEFIGIDISKLSFDVRIHSNQQKSEFKNNNPGFNEMMKWVNKNVCCGKDEILFALEHTGIYSLPICIFLSENQYHFVLLPGLEIKRSLGIQRGKNDEIDSGRIAEYAYQKRDKITPTQLPFKNVLKIRRLLSIRDRLVKHRKGFLKDRGENKKFLKQRENKILFEVVEKSICDINKQINKVEKELDNIVKSDELINKQFNLIISIKGVGKQTALFVIAYTNCFTRFENWRKFASYSGTAPFPYDSGTSIKGRAKVSNLANKKIKVLLNMCARSAIEFNPEMKSYFQKRKAEGKNGMSTMNIIRNKLLARIFAVIQRGTPYVDTHKFAA

SEQ ID NO: 475847 - protein, 349 aa, unidentified
MRKRIDYSGKIVNVGIDVHKKSYSIVCRCEKQEVKKATIPASPDELVKFLEFHFSGAKICSAYEAGFSGFVLHRVLSAGGINSIVVNPSSIEVAANDKSKTDTRDARKLSTQLEDGRLKAIFIPTIDQEKDRLLTRTRSQLVKERSRVGNQFKSRLSQFGLIPFDDETLMSVDFIDDYLRQPLDGRLHRILLVLAEIWKQLNNQIKDLDKEIRKKSADNKIALVYRSIPGVGPLISLILAQELGDMSQFTNEKGLFKHTGLIPTEYSSGEKRRQGHITRQGSSRLRWILTEVAWHAIRLDPRLKEDFARISTTRGKKRAIVAIARKIIGRARACFKKGETYQLGFGMVA

SEQ ID NO: 475848 - protein, 334 aa, unidentified
MKSDTVHIGVDVSKGKLDVFVPAKKEGSRPITKEVDNSVAGFRELRDLARKAKATVCVEPTGGYELELIAFMHRFDVPVAYTDALRVRQFARAEGNLAKNDRIDAALISRFADKIGVRLIEARDVEAVELKRKAKFRQTIMDSRTAMANRLETEIDPEMRAMLRAQIKGLDRLIDKTGRLCLETVGKNERMNTLRERFTLVGGVGDLTAISILAGLPEIGTLSDEKLNRLAGISPEENQSGSKDRLRRIWGGRKDVRNALYMAAVASIQWNAILGSYYRRKRAEGHPHKWAIVPTMRKLLSLLNRIARDPGFTPMPEPESTKQNANVGRRTKAA

SEQ ID NO: 475849 - protein, 423 aa, unidentified
MMKLKYSICCGLDVHKNVIVATIVITNKDGISEYKQKSFSTINSDIQKFHNWLIENHCYHVCMESTGKYWIPIFNYLESDIDVCLTHPKYVKAIKGKKTDKKDSKWIADLYKFDLVRCSFIPPKDFRQLRELARYRFKLVCMKSSEKNRIQNCMTVSNVGIASVLSDPFGKTATDIMSYLLEHTADSMDEKAVRKLIKKGAKAKSDEIIEAIRGYNIETDQAKKLELARGHLEYLDDMITQTEVELYVRIKPYYEFVEFVSTMPGMTELSSTIVLAETGVDMNIFDDAKHLCSWCGLSPASNESAGKKKSVRIAKAGDYLKPMMIQCALAAVKNKKQPYFAIKYGRIKKRRGHKKAIIAIARMMMVCIYHMVSEKKSFNPTDYEELMDPRNHVERVVLNETNVFAYLESLGYDSSKLVKRNDS

SEQ ID NO: 475850 - protein, 345 aa, unidentified
MTIVKTRAITGGVDTHADVHVAAALDPIGGLLGVQEFPATAAGYAGLLGWLGGFGTVALVGIEGTGSYGAGLARHVTAAGIRVVEVDRSDRQDRRRQGKSDPLDAVSAARAAQSGRAAGAPKGRDGAVEAIRALMVAKRSARSERVQTINQARALVLTGPEDLRTRFARHTAASLVSGLASLRPRPGDVVGYATRIALRELGRRAEFLDGQLERLDELIAPLVAARAPGLLALHGVGPDTAALLLVAAGDHPERLRSEAAWAHLCAVAPLQASSGKVTRYRLNPGGDRQANHALWRIVLTRMSAHPPTLIYVERRTREGLSKKEIIRCLKRYVAREVYRHLRAAG

SEQ ID NO: 475851 - protein, 355 aa, unidentified
MLAEITQSKFVLHVGIDVSATNASVAWVMPATKRESEKAFESLLTPNGMAGLNQQILAIHHDAGAIHITMEATGNYHIRLAHFLYQQGYALSVINPVQARRFAEVFLQREKTDAIDALSLARMGDRVLLKLWTPPPPLYEELQQRIAQRAALVKMHAEEISRHKSREYRITSIVEVDTRSKALRLLLKRQIEEIEKEFEVVLKQDETWASCAKRIVSIPGVGIATATWLIMLTLNFTTCDSPEQLAAFIGLVPHRRQSGTGLNTFTSIGHVGHDDIRHHMYVVAMSCLHYNPIIKRYYDQVKIRRKSHRLCCIAAARKLIHMIWAIAKSDKPFDPDYSNKLQLAKQNLGPEQTTE

SEQ ID NO: 475852 - protein, 473 aa, unidentified
MAKGSGGSGMTRGDRRRNARRERLRELLPRDGAVIGIDLADVKQALAVIDHDVRVLARKTVRVKAFRLGEALDWAVAQARAKGFAQVTVACEPTGPRWLQVQRLCAERGVPLVCIQPLVSHIAREQQDFTTHKTDESDCVMIARLAVELHCYIPEELDESWAQLRHLGRRRAQLITAATASVQRIGDFLSVAWPTVTETCAGPFESVTWLAAMQLVTSRCGGQPARLAAMGAQAFTAAVRAAVRDWAGQKAHGPISRRVFAALADTEGVVVSSRRGLLRRVADELGDLQRTRAQLRATEADMVAVLDELGLSRLAGIPGLTAVGAAAILAETGDPRRYDNSSSLVKHAGMSPSDNASGAFSGQAHISRRGRPGLRLVVWRAVWPMLQYNPVMAAKYQVMTRAADTAAAGPAPQHGTAAAAAARARRAKARVACAASLLRWIYCMVIHDTSWDPAVASGAASWHDAPRARAEAA

SEQ ID NO: 475853 - protein, 365 aa, unidentified
MASVSHPAPIHLGLDVHKDTISVGILDPDQQVPDVERITHDEASVRRLVARFPDRGRLRACYEAGPTGFELARLLHGMGVRCEVIAPSLIPRAPGDKVKTDRRDCRRLARLHRAGELVAIRIPSSEEEAVRDLCRTRSDMVEDLTRARNRLGKFLLRHGRPWRGGSTRTKVYQAWLRAQRFDQPAMTQTFGHYLAVVEVRNQALDAVEADLVGWCGRPPFAWQVTRLAAYRGVTRLGALTLAAEVADWHRFAHASQFMGFCGLVPSEYSSGSRVHRGRLTKAGNAHLRAQLVESAWSYQHRPSVGAEIARRQQGLPPEVVARAWAAQQRLSGRFRTLAARKHTKSIVAAAIARELAGFLWAEMTA

SEQ ID NO: 475854 - protein, 336 aa, unidentified
MMIIGCDYHPRFQKIALLDKATGEIRVYRLEHENGEAKRFYAGLPKGTLVGIEATGSTQWFERMVGECGHELWVGDPAEIRARMVRKQKTDERDALHLLDLLMTNRFPRVWVPSPEDRDARQLLQHRQKLVRMRTAVKNQLHGLAMGQGLCRKQKLWSERGRKQLEALELGPWASRRRQELLALLDELEGKIAELDKAVEAEARRRPEVVWLMALKGVGPVTGLAFVLTLGPVDRFARSRQVVSYLGLNPREDSSGDHQYLGHITKQGNTMMRWLLVEAGQTAARLDPELGRVYKRLKARRGANVAKVAIARRLAVRMYWILRQAPQAAPAGSHVK

SEQ ID NO: 475855 - protein, 287 aa, unidentified
MNLSVAALGVDIAKLKFDVCLIKANGKAKHKVFANTTHGFEQLIVWLSSHGVGSLHVCLEATGSYGEALALYLFNVGLTVSVVNPAAVKAFAASRLTRTKTDKVDAELIARFCLAQQPEAWQPPAPEVRELQALVRRLESLIEMRVAEDNRLSSGVLIETVRHSLEEHIKYLIEEIKQTELMIREHIGNHPDLKVQSNLLGSIPGIGATTAARLLAEITDFKQYQSARQVAAYAGLVPRERRSGSSVRGRTWFIEDRQRPSAKGTLFSGDDGSAVQRLFSAVGSGNA

SEQ ID NO: 475856 - protein, 337 aa, unidentified
MRYLGVDLHTNCFTVCIRNESGKEKLATYRMSELKRFLKTLKDTDKLAVEATGNTRFFIDMVEPHIKEAVAVNPGKFEVIRASIKKTDKNDAKLLALFLSKDMLPEARLKNKQQAQISSLVGTRDKLVKLRTTLINKIHNILNHHGIKSKKEAFCSEKALDGVLAMDFDTIVKIELKVLVEQIRSLTDGIRKLDEQIKEVGTKMKGHDSLTSIKGIGDKSATVLLSVIGNIKDFADADKLASYFGIVPRVANSNETEHHGRITKRGSKIGRTTLVQCTLIAKRYNPYLRKFYERIQRRRGTGKAIIATARKFLGIIYETLKNGWIFEDFPNFVIANS

SEQ ID NO: 475857 - protein, 414 aa, unidentified
MNKDHIQFEQVVERGCGMDVHKENIVATIRGKDIKTQTKSYSTFTSSLIKLKAWLKKHGITHIAMESTGIYWKPVFNVLGDDFQILLVNARHVKNVPGHKTDKRDSKWLAKLLVSGLLRGSFIPNRRIRELRDLTRYKSKLINQVSAEKNRFQKILEDANIKLSVVLSDVFGATGRKIIAEILKGDYDPSKLLYLVHGRVKASREDIREALTGYVTAHHRFMLRTIQKSIGRIEETIAEIDAQIAEMTEGYTDIIELLETIPGVSYDGAVGIIAEISVDMDQFPTHKHIASWAGVCPGSNESAGKNKSGRIPYGNKYLRALLTELSWAASRTKHTYLSSKYKSLVGRRGKKRAVIAIGHKILIAAYFIIKDKVAYNELGEDYLNNFRKDKLIEYYKKQIDRLEPNYDFEKEAVA

SEQ ID NO: 475858 - protein, 306 aa, unidentified
MKEEIRFAQVVKVGCGIDVHRDIIVATIRKSNDEYLTREYGAYTSSLTSLRDWCKTEHVTHVAMESTGVYWKPVFNVLEEDFEIILVNARHVKNVPGHKTDKKDSIWISKLLLSGLLKGSFIPPVDIRELRDLVRYKKKVVAQAASEQNRIIKILEDANIKLSSVVSKVDGAVGTKIINSLIQGQTDPDELIKFYHGKMKVSKTEFRMALEGRISNHHRMMLQFHQDSIADKERLIERIDAAIEVAIKAYQVEIDLLQTIPGVGKDSAISIISEIGVDMSKFPNENHLSSWAGVSPGNNETGGKKK

SEQ ID NO: 475859 - protein, 342 aa, unidentified
MEYYAGIDVSLECSSVCVVDASGKIIREGKVASEPDALINWLKSRGYELIRVGLEAGPLSQWLFAAMREAGLAVELLETRHVRKAFEAMPVKSDRNDARGIAQLMRLGWFRPVHCKSMGAQEVRAVLTARKLIQTKLQDVENSLRGILRGFGLKVGKTTDRSFSGRIQELVKGQPSLEAIGEALLSVRAGLLREFNAFEKRVRAMARLNARTRLLMSTPGVGPIVALTYASAIDDPARFKSSKQTGPHFGLTPKRYQSGETDYSGRISKVGDASVREALYQAAHVMLTKPVKGCPQLKSWAMRIARRAGMSKAKVALARKLAVILHRMLANGTPFNAAAAAA

SEQ ID NO: 475860 - protein, 388 aa, unidentified
MKDNNSVQQNANAESINSVADVATAISNKKFIAIDLHSDNAVICVKENAFDAKTQTVVGRIVSRKTCRFTHGSFEFFEYLERYCSHFEHEMIVESTYNWYFLADEAEKKGWNMRLADPSTVSANKIKAANDETDAEFLAERLRTNTVKTTPILTHDERARRDLVRLRGDLIQQRAGYYTMLINQFRNVLCQKINKSFITQLGNDFEQKGEAALQELFSTRSERLKIAHYLNSIAFLTKEIDAIEEQNKVDFEQDKTSMSTVTLLQSIKGCGPILGRCIAAELGDFSRFASAGNFKSYCRLAPTSKLSNGKSKGSGNAKNGNAYLSWALTELANLVVSFNPEAKKCYERLFNRYRLRVVAIRAIAAKLAVAIFHMLRDGAVFEIKRCFS

SEQ ID NO: 475861 - protein, 328 aa, unidentified
MTPTTWIGIDIAKADFVAAQRTQEGFDIETFPMTQQGFEAFRDWLPEAGDLRVVFEATGPYWLRLAAWLDELEESLPYACINPRQLRDFAKASPERSKTDPIDAALLVHFAETFPPELERPKSPSAQRLRALWRHHLELQNLLDRTRDRQEKAAADPRLPVELAEGLETLLDCLKSELANVEQQARKIVQKNANLRQAHRLLLSIPGVGPKTALTLLAEYGPKLHQATPKQLTRYAGLEPILFESGASVRKRPHISKQGNWRLRRALYMAALVGVRHNPVLKNFYQRKIQQGLAKKSALVAAMRKLLHLVYGVLKHQQPFDPEYQQLT

SEQ ID NO: 475862 - protein, 397 aa, unidentified
MIAVGIDISKAKSTVAIIDSDGTVLASPFTMAHTQPEMEAFVTYLKELGEPTTILMEYTGHYHYPVLKKLQDEGFPVCIVNPYQMKKYGDVEIHKAKTDKKDALRIAAYALEKSYKLVPYSSMEQKYEDLKFLSRQYSQRITYVAKLKVQLIALLDQTMPGITRILPLNSRNPEKCALLLFIKRFKSFDEIQRIGKARFLASYDILAKKASERSASSKGLSIYELAVDSITTRGEDPYIWLSQNQCVDLLSATQNAADEIISQMRNIAETIPEYKVLRAMHGVGDRLGPIILAEIGDVHRFHSGKALNSYAGNDAPPYQSGQFESRNRHISKRGSSTLRKACYEVMQALKLTKPQDDPVYLFMLKKEQEGKPFNVAKMAGVNKFLRIYYARAMELYK

SEQ ID NO: 475863 - protein, 391 aa, unidentified
MQSATSATAVATTARANDTTLFASLELSKSKWVVTINSPGSEKFSKHLVEGGDGAGLIDLVSRSRAKAEQRCGMQVKAIVIQEAGLDGFWIHRLLLAHGIESHVVDAASIAVDRRHRRAKTDSIDGEMLLRALMAWARGERRVCSMVRAPSLEEEDRRRLTRERGTLLKERIQHTNRIKGLLSGQGVRDYNPLRRDCFERLEAFRTGDGRELPPMLKAVIRRELDRIAVVTTQLATVERARDALIGTDAEERNNPAALLLKLKGLGPEFASLLWLESLFRNFGNRRQVAAYGGLAPSPWQSGGVERDQGISKSGNRRLRKTMIELAWFWLRHQPDTALSRWFHTRVGAAKGRVRRIAIVALARKLLVALWRYVTQGVVPEGAVFKAVFKAA

SEQ ID NO: 475864 - protein, 415 aa, unidentified
MCKVIMIGCDLHDATTVLKVADGPDATVRKGFATSNRSAMIEWVKDFASQRGAVRIVFAYEASGQGFGLYDDLTDAGIECHVLAPTHLPHTTHSRKNKTDDKDALMILDEVRAHVLAGRTLPDVWVPNHQTRDDREIVRLRLEVATQRTRLKNQIRNLAKRSRLAFPDDFTSSGDWSKRSVAWLREVATGKTGALREGVRTALASLVELYQAMSVRIQALDQAIKRLSRTERYAQSYRKLKLLSGVGTLTAMVFLTELGDLARFANRRQLAAYLGLAPSAFESGERDDRKGHITKQGPQRVRHVLCQAAWAALRVSPEWKAKYDRIRRGSKSRSRIAIVAIMRQLGVEMWQTARSPELDAMLDERDALASQKTKKTTSARAPQKGAAPSTPPSPRPRRGEAEATATRKGLARHPE

SEQ ID NO: 475865 - protein, 412 aa, unidentified
MKRVSRRVGIDWGSESHQVCRIDGEEQPKQRAFPHTREGLSALVAFVVEGEIDPEQVAIAIEVNHGAVVEALLAKGLRAYSINPKVLDRLRDRFSPAGAKDDRRDAFVLASCVESDAHVFRRIEVGNEENTRLQAATRLREDLKSDLRANANRLWDALREYRPALLALCPGADEPWLWVLIEKAPSPSEGAKLTRASIGAVLKKHRIRRLTAEEVRTVLRGDILPLSSIYIESHVARVLVLIARLKLAQAQIATIERQIQTALAERVKSEEQTERRDLTILLSLPGVGPFTVATALGESGDAFERRDYNALRSASGAAPVTKQSGGTRHVVMRQVCQPRLRVALHISALQAIRIDPKFHDLYVRARARGQSVGRAIRNIVDRLLFLAVQLLRKNQLYDIELRQLAPEVVAAS

SEQ ID NO: 475866 - protein, 345 aa, unidentified
MTIVETRPVTGGVDTHLDTHVAAVLDGNGGVLGVESFTATRPGYRQLHAWMAGFGAVARVGVEGTGAYGAGLARFLRAIGLEVIEVDRPNRQARRRAGKSDPLDAIEAARAALSGRARAIAKTADGHMEAMRALLVAKRSARDMRIAALNQIRHLSFTAPDDLRERLRPVAVDRLAGTAAALRPRPGGDPVAYATKLAVRALAQRVLALDDEAAGLDVALAELVTATAPSLLGLYGVGVDTAAILLVAAGDNPERIRSEAAWAHLCGVAPVPASSGKTIRWRLNRAGNRQANHALWRIVFTRLGSDKRTRLYMQRRLEEGRTKPEIIRILKRYVAREVYRHLPRT

SEQ ID NO: 475867 - protein, 422 aa, unidentified
MKLKYSICCGLDVHKNVIVATIVTTNKDGISEYKQKSFSTINSDIQRFHNWLIENNCYHVCMESTGKYWIPIFNYLEHDIDVCLTHPKYVKAIKGKKTDKKDSKWIADLYKFDLVRCSFIPPKDFRQLRELSRYRFKLVCMKSSEKNRIQNCMTVSNVGIASVLSDPFGKTATEIMSYLLEHTSDSMDEHAVRKLIKKGAKAKSDEIIEAIKGYNIETDQAKKLELARAHLEYLDNMITQTEVELYVRIKPYYEFVEFVSTMPGMTELSSTIVLAETGVDMSIFDDAKHLCSWCGLSPANNESAGKKKSVRIAKAGDYLKPMMVQCALAAIKSKKQPYFAIKYGRIKKRRGHKKAIIAIARMMIVCIYHMISEKKPFSPTDYEELMDPQNHVERVVLTENNVFAYLESLGCDSSKLVKRNDN

SEQ ID NO: 475868 - protein, 311 aa, unidentified
MKEPERFVGIDISKEELVVAVRPTAELQSFPNTEEGLAALVGFLQPLGAHSIVLEATGGFARAAVNAMALAALPVVVVNPRQIRDFARSVGLLAKTDAIDARIIARFAEAVRPELRPLKDLETQKLEDLNNRRRQIVEMITAEKNRLVMAPPWSQKDIRSHIAWLEKRLKRINDDIDDLIKQSPIWRQKEKILTSVLGIGPVVTTTLLCGLPELGSLSARKLSALVGVAPFNRDSGHSRGRRSCWGGRAHVRAALYMAALTASRCNPVIREFYQRLRLAGKPSKVALVACMRKLLIILNAMVKNNTCWQQA

SEQ ID NO: 475869 - protein, 321 aa, unidentified
MSIKKSRRSWIGIDVSKQLLEVAVHKSDYHFRCPNEPAKFPALIAELITLRAARIVLEATGGLEIPLLQALQSAGLPVALVNPRQVRDFAKALGCLAKTDRLDARVLAHFANAIKPPLRPLKTTEATELDALMGRRNQLSDILVAEKNRRGSAATEAARADIDAHIEWLEQRLKALDKQLKKQLKRSVTWQHKDKLLQSVKGIGFVTSVSLLADCPELGQLNRHQVAKLAGVAPLNRDSGKQRGTRHIFAGRAPLRAKLYMATLTAIRWNPVIKAFYQRLIARNKLKKVALVACMRKLLTIINVMVRDNTFWNVKAQPVSA

SEQ ID NO: 475870 - protein, 345 aa, unidentified
MLHAGLDLSRRRLDVCLIGDEGDVVERLAAPPDADGLRHLVERVGRQGRVRGVIESMTGARFVRDTLEELGWEVLVADAQKVKGLAPLACKTDRIDAQVLAVLSHRDLVPAIWLPDPRVRAEREQARFRLHLVKHRSMLKHRIHATLITFGHPCPVSDLFGVAGRELLDRLAIPEPWRGTVEASLSLIDDLDAEIDLVNRQLRLSGADHPYIPLLLTVPGIGWVLAFTIGAEIGDIHRFATPKKLCGYTGLCPRVNQSGDKDRRGPLTKQGPRYLRWAMLEATMHALRHPAYADRYQATKRRLGKQRGAKVAQIDIARRLTEAVWHMLTRNQPFAPAGATLRLAA

SEQ ID NO: 475871 - protein, 339 aa, unidentified
MKSTTIAVDLAKSVFQIAVSKHPGKVSESHRLSRSQFLRFFAERQPALVVLEACGTAHHWARELGALGHQVRLLPPHEVRSYVHRSKTDRADAAALLEAHRNERIHSVPVKSLSQQTLASLHRLRSAWMADRIARLNLVRGLLRELGLTIPVGARHVVVQTLAQLETLPEPLRPALRAACAEIGEFEARIATVEKQLRALSKHTPVVERLQSIPGVGLLTATALVALVGDIERFPTSRHFASYLGLTPREHSSGLRRRLGAISKAGDAYLRTLLVHGARSALLAARRLEHPDRLRRWALRLHGLRGHNRAAIALANKLARIVWAVWRHDARFESRPVSA

SEQ ID NO: 475872 - protein, 355 aa, unidentified
MERYIGMDVHAASCTLAVISEKGRKLRDFPVETNGQALVEAIRMIPGHKHLVMEEGLQSAWLYETLSPHVDELVVAGITQSRGPKSDKRDAYALAEKLRVGNLDKPVFKAPRQFTHLRELSRIHMTLVGDVVRGQSRIKSLYRSRGIFVSGVNVYGVRHREKWQKQLSSSAQARATRLYDHLDFLLEQKKQAEAELLREAKKHKIVRVLETAPGFGPIRAARLVPIVVAPHRFRTKRQFWSYCGLGIVTRSSSDWIQTADGGWIQARVPQTRGLSRQHNRFLKSLFKGAATTVITQCNKDPIHARYERLLDGGTKPTLAKLSLARMIAATVLRMWKDEKEYDPGRGDPLTVTREG

SEQ ID NO: 475873 - protein, 366 aa, unidentified
MASMDVHAETIAVAIAEGRNTVRSVGTIANRPEAVRKLIGKLGDPGSLRVCYEAGPTGYVLYWQLTRLGVHCDVIAPSLVPKMSGDRIKTDRRDAEKLARSYRSGDLSTVWVPDAHHESLRDLVRAREAAKEDELRARHRLSKYLLRYGQRPGTECRAWTAAWWQWVRGLKMPHSEQNTVLLDHILEVDHQAQRIERLEGSIDRAIQSAPEHLRAIVEALQSLRGVAKITAITLATEFGTFRRFEHASAVMSYTGLVPSEHSSGARSRRGKITKSGNSHLRRVLVESAWHYRHRPHLCLRQRRLQQSLSPKVAAIAWRAQERLHRRYWSLSNKSKPTGKIVTALARELVGFIWAIGTEVETSGARH

SEQ ID NO: 475874 - protein, 342 aa, unidentified
MQKVSIIGLDLAKRVIQAHGAHADGSVSFRKKLSRERLLAFLKEQPRCVVAMEACGSAHHWGRAIRELGHEARLIPPIYVKPFVKRQKNDAADAEAIAEAAIRPTMRFVAIKTEEQQARAMLFRTRDLLVRQRTQLINALRGHLAEHGIVAPQGPTNVKVLEQAIEDEATSLPLLITELARVYLEQIDQLSERIGALEKTVAHEAKSGATTLRLQTMPGVGPITAMAIETFAPPMDVFRRGRDFAAWLGLVPVQHSTGGKQVLGRTSKMGQRDIRRLLISGAMVIVRWACRKGTPEGSWLHRMLARKPRMLVAIAIANKMARSIWAMLTKGEDYRVPVAVAA

SEQ ID NO: 475875 - protein, 343 aa, unidentified
MSIATIGIDIGKSKFHVCALDERGHVTLRKVFSRSGLIRFLANTPPARVATEACAGAHFIGRKAESFGHDARLLPGQYVKAYVKSQKNDYADAEAIAEAATRPTMRSVPVKPVDHQTLQLLHRQRSGWVGERTALANRVRAMLLEFGITVPKGIRQLRRNLPWVLEDADNELPDRLRELITELWSDMIRLDDRIEGLTDELDTLARADPQTRLLLSIPGIGPITATALTASVGDASTFRKGRDLAAWLGLVPRQYSTGGQTRLLGIGRRGNRHLRMLLIHGARAVLRVVHTRDEGDALRRWVERISPRKHANVVAVALANKLARIVHGVLHYQVPFDPRLMSA

SEQ ID NO: 475876 - protein, 345 aa, unidentified
MVTTIGIDPHKATHTAVAIDGSEMVLGEITIAADRDQTTKLVEWAAGLDGDGRLWAVEAAGGLGYLLSQQLIARGEQVVDVPPVLASRVRVLSSGHSEKNDPNDARAVAIAALRQPKLVVVHREDYRQVLRMLAKRHQELTALRTQAVCRLHAVLAQLKPGGHSRHLSAKAASRMLQGIRLLDVVGEQRRQRAKAHLADIRRLDRDINANKALVRKAVTAADTTLTDIYGVGPMVAAFVIGYTGDPSRFATADHYAAYNGTAPIEYSSGGSTKHRLSLRGNRVLNHAIHMAAIAQISKPASIGWAYYDKKQTESKTKKEAFRALKRRISDAVYRQLVADQKRHQV

SEQ ID NO: 475877 - protein, 356 aa, unidentified
MQTQVTKKIDFKGKDLFIGLDVHKKSWSVTILVEGMEHRTFTQPPDPRTLYNYLQKMFPGGTYYSAYEAGFCGYGTHRALNDLGIKNIVINAADIPTSQKDQIHKLDPVDSRKIARALEKALLRAIHIFDRDKEELRSLNRTRFYLMRDLRRSKNRIKSFLQYYGIQIPLEYDNNLWTLKYIAWLKQIQMKTSSGQDAFSNLIRSFEYHREQILILSRQIRIRMREYDKELYNLLKTVSGIGPLTSSALITELGDINRFPHINHLSSFVGLIPRVKQSGETSYNAGMTFRCNEYLRTLLIESSWQAIRQDPALMQYYQQHVINNKGQKVIVKVAHKLLNRVRYVMKNRQPYVTRVA

SEQ ID NO: 475878 - protein, 361 aa, unidentified
MSRMPQSTPSDPAEVVLGVDTHKDVHVAAVLTTLGVLLATSTFPTTAAGYRRLLAWARGFGPVHRAGVECTGSYGAALARYLRAETITVIEVNRGDRGERRRRGKTDTLDAETAARAVLSGRATAIAKSGDGQVEMLRMFKLAKASAVKSRSQAINQLKAVLVRADPALRESMTGLGNPALFRRCAQLIVSDPCDPAGAAALTLRLLARRVLTLTGEIDELNVHITTAIQTHAPQLLQRYGVGPDTAATLLLAAGDNPERLTSEASFAALCGVSPIEASSGKTHRRRLNRGGDRQANSALYTITIARLRWDKRTQDYVRRRVAEGKTRREAIRCLKRYIAREIYEDLAKTKSTPPTAQSAA

SEQ ID NO: 475879 - protein, 343 aa, unidentified
MKITTAGIDLAKNVIQVHGVGARGNAVFKKPLKRSQVLSFFVNVPPCLIGLEACGSAHHWARKLERLGHTVKLMAPQFVKPYVKTNKNDAADAEAICEAVSRPNMRFVPIKNGEQQAVLALHRARQGFVRARTAQANQIRGLLAEYGIVIPQGICHITKRLPGILEDGESDLPGMFRQLLQRLGEHLKELDRQVGELELQIQLWHRQHDASCKLAQIPGIGPITASALVASIGDAKSFANGRQLAAWLGLVPRQHSSGGKSMLLGISKRGDTYLRMLLIHGARAVIRVAERKVGYAESWLARLIGRRHPNVAAVALANKNARVVWALLRHDRIYQPGYQSPGA

SEQ ID NO: 475880 - protein, 348 aa, unidentified
MKILALDLGKNKSVFVDYTVGGDRAFGKIGTNPRELRNLLQRSVPDRLVIEAGPAAGWVCDLAESMKVPVQVANANDERWRWKTVKEKSDRKDALKLATLWEMDSLPTVHVPKASVRQWRSLIEYRHALVQRRTAIKNSIRSIYERQGLNLPSAKRAWTKAAVEELKKEASAALPEQLWLFQVHCELQQFESIQRQIEAVEEKLEQRAKADGRVEQLKTAPCVGPRLGETVVAILDDPHRFRNGRQVGCYAGLTPRRWQSGESDRQGHISHAGNGLLRQMLVEIAWLGVRRKTWMTEVYEQVRRGSDKRKKIAIVAVARRLLVKLWAMLRDGAEWKEPALAPLPAVTS

SEQ ID NO: 475881 - protein, 348 aa, unidentified
MNQFIGLDGHKDSCTFVVINEKGKVKQKAVLPTDEKQLVEFVKSVPGRRHLCIEEGTQSQWFYEIFSDHVHDLAIVQGRKSPGNKDDERDARNLAERFRTRDLGNRIQKVPESLATLKDLVRSYEMLNTDLVRVKNRIKHLYRSRGIAYSKTGCPFCTGRGGCQKPGFHQRLQLLRTQQESLKPLKAEAQKAMVTEANRHPMTRILQTAPGFGPVRTAELLSIVIDPYRFRTSRQFWCYCGLAIVGRSSANWVQKPNGELSRVKINHTRGLNQNFNHMAKAIFKGAAVTVLTSMPTEPLRADYDRLLANGTKPNLARLTLARKIAALVLAMWKNKEAYDPGKYRVTSI

SEQ ID NO: 475882 - protein, 399 aa, unidentified
MDDITYVGLDVHKATVCVAIAEGGRGGEVRQVGVFENRPDILCKLAARLDKGNRRLSFCYEAGPCGYGLQRLLTSRGHDCIVVAPSLIPVKSGDRVKTDRRDAMMLAKLHRAGELTAVWVPDAAHEAMRDLVRARATAGRVLAKARQHLQGFLLRHERIYRGPRAWTLAYRRWLTTVRFDHPAQQIVLQDYIHAVEDAEARRDRLTRQIEELLPSWSMAPVVEALQAMRGVGLVVAVTVAAEVGDFRRFANARQLMAYLGLVPSEHSSGAAIRRGGITKAGNALARRVLIEGAWTYRMKARVSRKLHDRLEPLSTEIRDIAWKAQVRLCARYRRLAALGKPSVVATTAIAREMVGFIWAIARRVQSAVEDQRTHSAHAEAPMLTAAAKPCGFAAALGRR

SEQ ID NO: 475883 - protein, 500 aa, unidentified
MSPLNTQSQSTKQRQPSRNLRPPKNAAELPAASPATAQAEPVINPATVADPTVRYVGLDVHKKQITYCILDRDGVTLREGEIMLTRERLTHFAKDILRPTDRVALESTTNCWAVVQHLQPFVPNVVVSNPMATKAIAHSKIKTDKVDAKVLAQLLRCDFLPTVWQPDEATRLRRQLTGRRGSLVGQRTQLQNRIHSVLAMRLIIPPGDYALFGTHGLAWLTALTEETIDLDGLMMIKSDLRLLATVQAEIDVFDLRLAKLAYEDERVKLLMTIPGVSIVVGQALVAAFGDITRFESGDSAASYLGLTPSTRQSANSVYHGPITKHGNSTARTMLVQAAQQYSRQAGPLGHFFQRLKRRKCHNVAVVATARKLAIVAWRLLTTGEPYRYAQPAATATKLASLRIAAGGEKRRGGSPRGVKPTAKLPGGSKTIRSLDDTYENEGLPVRSPLPPGEVRHLQETGTVNFVDRIGKSQLVPRKSKMNAQTAKNTGRQRDISQSEK

SEQ ID NO: 475884 - protein, 437 aa, unidentified
MSEKKSVEIRVSVDVGYRRHSVAIGLPSGEVLEEFEIAHRPEGFAEFFSRIEKQQKIRGCEVAVAMEGFNGCARPLDAMVRRHGYRLYNINNLKLARFKEIFPGAAKSDRIDARKGLELFQLSDHLPLAKEVLQEVKGTPRENEVLKRLTRRRRRLVDERVRVISNLQTDLQAVCPGLLEITKNAGNQWFLNFLVSAPTLPQLARLRPATLLKVCAVGRKYARLIEDWQKQAHFSEEVEWVSEMIQEDAKRCLELDEKIKALRAKIKEVAKDSKIAKTLLSIPGFGTICTAELAGEIGTIERFSKEGSLALYIGMSTLDNSSGKYQGSKQPKHVNTRAKAAMMVALDRHRKYVPESQRYYEKKRSEGKKHNQAIRALGRHLCRIIYKLLKEEREYEIRPEKGNTKTKVKRRSLIKTQIRKPKISVKGKNTKIYQQST

SEQ ID NO: 475885 - protein, 335 aa, unidentified
MQVYGIDLSKEKFDVNFIDANGKEESLKVKNSLASISRFLSSVSEDGFLCAEHTGAYGDLLVYLCNQMNISIALIPGYTIKHSLGLVKGKSDPLDSKRIREYGERFTDKLEYTEYPEENIVELKQLYTLRYQLVRQRKSLRTIDKGRGVLPMQSIEVYNHLNNVMVKLDEEIAAIEDEIEALIMSDQEMRESYELATGVIGIGPVIATNLIIKTGNFKTIDTCRRAASYAGVCPFPKTSGKMVGKSKTSPFADKELKTLLYMGAKAAVKHNKEFKLYFQKKELEGKPYFLIMNNVSNKLLRTVYSVVKNKTPYEKDHICLDPRERNTNSSTKKVA

SEQ ID NO: 475886 - protein, 338 aa, unidentified
MIVIGVDVHKYSLTAVAVDELGRTLAERSGPVDDELVVWARSLAEGRLLWAVEDCRHVTRGVEQILLAAAEHLVRVPPRLTGAERRRGRTRGKSDSLDALAVARAALREPRLDEPRPQEPLLRELKLLVDHRDDLVAERRRGQQRLRWHLHELDPALRVPLGALDRTLWLERLRRQLARREQTTQVRIARDLLGRCRELTRAVAELDRELQARMQTTAPRLLELAGCGPISGAKLVCEIGPIDRFASDAQLARHAGVAPLDASSGKHQRHRLDRGGNRQLNCALHRIAITQGRTYAPARAYLERKQNEGKSRREAIRCLKRQLARTVYTTLKTESALT

SEQ ID NO: 475887 - protein, 424 aa, unidentified
MKVTYQTCCGVDVHKSFLVATIIKTTAGIEPSYQKKRFSTFNNSILDFKSWLLENECHDVCMESTGKYWVPVFNLLEDQINVTIANPKWVKAVKGNKDDTKDSKWIGDLFRLGLVKSSYIPCRLIRILREYTRYRYKLVSCRSSEKNRYQNALTVCNIALDSVVSDIFGKSSSSIIDYLLEQSGTTINHEEIASKLLKSLKSKEDAVIESIEGYQMTDAQKYRMRLIRAHMDYITAEINDIDKQMESLISSDPDYDKAIRLLTTIPGVKRDSAITIISEIGIDMSQFCNSKRLCCWAGLTPSNNESAGKKKSVRITRAGVYLKPALVQCAHAAVKSDKSPYYKTKYESLVKRRGKKRAVIAIARMILIAIYRMLSTGEVWNPSDLYKIDMPAPLAEKQKAKAIKQAKKLLQKEGLLPPDEPLAS

SEQ ID NO: 475888 - protein, 416 aa, unidentified
MTIRSRFPYRATVGLDWADQKHDVFVRFANGDSYRRKIDSRPEAIQEWLLELRSACAEGKIAIALEQRRGALFFQLCTHLGWIDLYAINPHSLASFRKTFFSSGAKDDPVDSQLLEELVRTHPERFRPYQPEPTAERKLDQYCRHRRSLRDLATKTELKLISTLKQYFPLAVNLFDGMKSDIALNFLSRWPTLDELRRAKAQTVRSFFYAHNSRSQSLIEKRLQQIAQAHSVTDDLALIEPLVLTTKCLVAQLRQFNQAISEFDHKIKELFKSHPDHFLFESLPGAGEQLAPRLFSLFGSDRTRWGDATDIQKYSGIAPVVERSGKSLWVHRRLARPIFVCQTFHEFAQQSTQRSSWADQFYRRQREKGKSHHSAIRSLAFKWIRIIFACWKANKPYDESFYVNTLAKRNSASSST

SEQ ID NO: 475889 - protein, 338 aa, unidentified
MSEYYLGIDLHKRRSYVVLMDAQGKVISEGGLSNDDMSEHLKEEVPHDTIAVLEATWNWQFMYDLLSEHCEKALLAHPQKVKMIAEATVKTDKIDAHTLAHLARTGYLPLAYAAPREIRELRQLARHRSKMVADRTRHKNRIHATLARRNIHSPFSDIFGCKGREFLAEVADDKLSQIDQQVIEDNLAAIDLLNQLVDEAESIMAEQTVHDPKVSLLKTLPGVGLITAVTIRAELGEVERFSSGDRAARWAGLTPKVHVSDETVQYGSISRQGSPYLREAMVGAALRAIRYSPRLRSFYQRIAKRRGAGMARVALGRKMLLIAYTMLMRDEPYREDYC

SEQ ID NO: 475890 - protein, 452 aa, unidentified
MAKRSKKRCEELPILHPDAAGIDVGASDLFVAVSADRDPQPVRSFPTFTRDLNALADWLQQCGVRSVAMESTSVYWIPVYQILEARGLEVCLVNAQHVRNVPGRKTDVSDCQWLQYLHSVGLLRASFRPPGFICAIRSLWRHRSSLIQMAAEHVLHMQKALDQMNLQIHRVLNDITGLSGLRILDAILAGERDPVNLARLCHSGVKSSQDTIAKSLEGDYRPEHLFALRQSLAAFHYYQQLVVEVDQEIQRRLGSLETATTAKPTVPKRTKASAYQRRRYEPKTFDLRSELYRIFGVDLTNVPGISAITAQTILCEIGTDVSRFRNASAFASWLGLCPENKISGGKVLYTKSRRVRSRVATALRMAANSLHHAKDYLGEFFRRITRKLGKPQAITATAHKLARIVYHLLSTKEAYNETVFHRCDEEALRRAQFRLRRQPAQLGFQLIPVQNG

SEQ ID NO: 475891 - protein, 342 aa, unidentified
MKELKQVVGIDVAQKELVVTIGRLLEDLSVDLFSYKVFKNNDKGFLSLVEWVTKLVENPQEVHYIMEATGVYHQKIAYFLDTNQLKVSIVLPNKISNYFRTLEVKTITDKTCSQVIARFGLERKLDLWKRPKTVYKNLQQLTRERDQIVAERVIVKNQLHAEKAEAEPNSMTLKRISERIKLLNKQENEIKNDISKILKNNPELKEEIDRMMTIPGIGELTAVIILAETNGFELIRNKKQLTSYAGLDVKEKQSGTSIKGKPKISKKGNRSIRKAMHFPSLVAVKWDENFKELYARLVSKHGIKMKALVSIQRKLLEMSYVLYKNQTIYDKEHKNSVQTQMA

SEQ ID NO: 475892 - protein, 314 aa, unidentified
MSEKIFVGIDVSKDRLDIAASNGERWSCANREGDFTELLERLRGWPVELIVLEASGGYEGAVVGSLAGAQLPVVVINPRQARDFAKACGRLAKTDQIDASTLALFAERIRPEVRPLKDEQTRELEALLQRRKQLLNMLVAERQRLQIATPTVRTDIREHIHFLVKRLKEVNGDLDELMRKTELWREREQLFKPVKGVGPQTLRTLCASLPELGKLNRRQIAALVGVAPYNCDSGTLRGKRHCWGGRAEVRCALYMAAITATRCNPVIRTFYARLLKAGKAKKLAITACMRKLLTILNAMARDTSAWNQNMHVIA

SEQ ID NO: 475893 - protein, 404 aa, unidentified
MKVHVGVDLHKTQFTVCVKGLGEDQFAVYPTTKEGYETFLKRAANWRECGIEVKAAVESTGNTRYFKNRLEEAGIGVEVINTMKFKVVNESVKKTDKHDAATIAEFQEKDMLPHSHLCSQESEQMRRLLKARTTLVHAQVVMKNQIHALLTAEGFEDVKGSLQSKRGRKRTLDTLKQCKNGLAAQTLMEIIDQLEGNVNLVEKELRELTKEDKAVELLMSIPGCGEVCAWTIRAYTDDIRRFACAKKYASYAGLAPWVQNSNETVHHGKITKRGPEQLRTALVQVVMGMRRMKEKTLRWRLMERHEIMKRNKGSGKSIIATARKVAVIIWNMLTKEAIFEEERMTDGKLLKTSESMKKSVRTLEKIPVKEVTRNMDKTKLAVNCIEKKVIKKTGVARKRNEKAG

SEQ ID NO: 475894 - protein, 349 aa, unidentified
MGKAYFIGIDLHQSVIQACVLDDRGERVAEERFRYHSLEEGLDAVAFVQGFGPACRISVEALGFNRWFVNACEAAGLEVLVCDPRKLDLKKLGKKTDRRDAREIARKLWLGDLDRTARTYYPSDEEYGRRKLLRVRHRLVQMRQQTINQLRAMLSAYQVPAPRGVLYTRPSRECLAKVQLPVEELQEAYTALLAVLERLQEQIQRLTNQIRQLSKRDARVGALETTLPGIGAQSAATLIAELGDATRFRNSRAVAAYAGLVPKVNQSADKAHHGRLTKQGNRELRWIVSQWAVRLMKNDSAVNAWARNLRGRVHKNKARMALARRLLVGVWVVLTRGEAFDLRRCLGQA

SEQ ID NO: 475895 - protein, 457 aa, unidentified
MPFWGSRPRLLKWFALLPADRWVGLGARIAKCIQCLQGAFPASPKHGGEQKMSMSEQFCGVDVHRDLLVATILSSSTKETKRFVNDANDINKLKDWLKTHECKRAVMESTSIYWVPLYLALEEAGFDAVLANAHQVKAIPGRKTDQSSSEWLAHLLQGDQIKPSYVPHKQIRELRELTRLRVKLVENRTAFKNRCQKVLNRVNIRLSSRLSDVFGKAGKEILEGLMDGKTIEAILERTQNRWLKNRCDEVKVVAKGALSESDIFVLKELTEMVEHLNEKISRVEARIETLVDEQGVAVVSSVPGVGRRSAAAILAEIGDAKRFVDGKQIASWAGLAPSVYQSAGTFVTGSITKQGSKWLRRVMVEAAYSAVKKRDSRLRAFYLRVKAKKGEKTAIVAVARKMLTIIWHLLVKGERYVEEGFEKTVKSMRAGYAGHVPLEDMAEILRSAGYVVSSPDG

SEQ ID NO: 475896 - protein, 482 aa, unidentified
MKKKNIYINQSQELLTLFEEAGDSAKIMCVPIDYAKKDHVVMFCNGHGDILRKPFSVKNNPQGVKYITEQVSRSCRHHKINQNHVFFGGEDVGSYAENFASTLRSGGWLVAGVNAHDAKKQRANLQASTDRLDLMGIATMLLNRRANCSPAQSGIYRNLRTLVRHRRRLVVMTTEVRNRIHAIVDRLFPGFLDERKSGITPFSKSSLYLMENRFSASQIRRRRRSTLIEALRGLGTPKPDCAVAKLEEYAQQVLKTPDEYVSTLQLSMAQHVKHYRCLQENIEQLERETALWLAQTQGAFLTSVRGIGIVLAAGVSAEIGDPFEQKPLNNLVSYSGIIPRVIQTGGPEGEIYTGKVAKRSNRILKDYVVQSASHLGLHGPEDLMIDHKRRDAAGQHADFGIARRYLRMAMCLMRTSQVYLPPRLRKPGMKPEERAGYYLMTWPYLRDKWQKLGALEAAFSEDRPLGRWRNMVQEFYKIKLTL

SEQ ID NO: 475897 - protein, 384 aa, unidentified
MTVQAQFVPRNYDVFAGLDVDKKSMAVIFTDHEQLMQSLRLPYSAAQLLRYVGKHFPEQRVAFVYEAGPTGFGLYDELVAAGHPCLVVAPSMVPTAPGQRVKTNRLDARKLSVSLRGGELKSIHVPSPKYRELRHLVQLRDTQVGQLTASKCRIKALLLYEGITFPSDDGKEKQWSARVLDELLELPCSETVRFKLDQLIGTLHFHFNAAAAAQKQIRHYCKNDAELRQSIAWLKSLPGIGEIVATHLAACLRDPALITNVRQIAGFLGLVSSEHSTGDKQNRGEITRAGDSRLRNKLIQSAWVTIRKDPELREFYDRVYQRHPKKVAARKAIVAVARKLTTRIYAVLKEQRPFVLREVSAAPLITEETAGLRERLDGQQSERR

SEQ ID NO: 475898 - protein, 385 aa, unidentified
MASQNDLSRSLVALQQNNTIIAVIELSLNSWLVAGIVPGGERHPLKKLSVDEKLLLQLLYRWRDEAVKAGHMITRMAVAFEAGRDGFWLARWLRARGIEAYVIHPTSVAVPREHRRAKTDRLDTELLKRVFLGWLRGEPDHCSMAAIPSLQEEDAKRPTRERENLVGERTRVVNRMKACLVRFGIRNFKPTLRKAPKRLNALCTPEGDPLPPNTLAELRRDMARLRFIIDQINEIEAARLQRLELAPAEAPHAMVRLLARVIGVGIETADMLVHEVLSRNLRDRRAVARYAGLTGAPDESGNKRREKGLAKAGNARVRRGMIQLAWRFLIFQKDSALARWYRTRTESAGKKRKTMIVALARKLLIALWRLVTIGEVPAGVVLRAA

SEQ ID NO: 475899 - protein, 331 aa, unidentified
MTSLLNRTNDAPLTVGVDVAKAMLEVGFSDRDATLAPSNDEAGHQALLTHLAELRARGTVIGLIVLEATGGLELDVATALQLAGYAVVVINPRQARDFARSMGYLAKTDRIDARVLAHMGQTLLQRDDLRKLIKPLPDEHQRMLQALVTRRRQLLAMRIAEQQRASGPERRMRRSLNIMLKALDRELARIDKQMQDFIGEHHAELAALLNEVKGVGKATISTLLAEVPELGELNGREVSALAGVAPINRDLGTMRGKRNIFGGRPAVRKVLFMAALVASRHNPVIKAFYVRLLAAGKPKKLALTACARKLLTILNAMARTGKPFNAALHLG

SEQ ID NO: 475900 - protein, 351 aa, unidentified
MIIIGVDYHPSFQQIAFVDQATGECGERQLNHSEGEEDKFYRDLKLRGVSVRVGMEATGFARWFERLLAELGFELWIGDPAQIKAKRVRKQKTDREDARLMLKLLLEDRFPRIWVPDPENRDLRQLLWHRHRLVQMRTRIMNQLQALAMNEGKRWKSKLWSGRGRADFEKLQLAPWASRRRKELLELLDRMNPTIVELTIAVEQEAKKRPEVQRLMTHPGVGPLTALAYVLIIGTPMRFQCGKQIGSYIGMIPSEDSSAGKQRLGHISKQGSSLLRFLLVEAAQVAVRLDPDWRRRYLHLAFRREPRIAKVAMARKLGVRLFWMWRKKWTYQQVLEFGSRTGQLVTGHGVQ

SEQ ID NO: 475901 - protein, 379 aa, unidentified
MRNDSTVYVGLDLHKDSITVAYAIDAGEIELLGKTGTTGADIDRLCTRLQSKAPHVRVVYEAGPCGYGLYRQLVQKGFDCMVCAPSLIPRKPGERVKTDRRDAIKLARSLRADDLSAVYVPGIEDEAFRDLARAWAAAREDLRRARHRLKSFLLAHGVRYTGSANWGEAHRRWLGRCSFPSAWQHLAFDEHRRTIEDRLAQCARLETALREAVISWRFYPVVLAVQAMRGVQFVTAVGMVSEVGDLSRFEHPRQLMAWLGVTPSEHSSGGKRRQGSITKTGNSYARRLLVEAAWSYRHPARVSPEIQARLEGLPKAIIERAWDAQVRLCRRFRRLTARGKPINITVVAIARELAAFIWDISRLAMALAIPRSKLPAPCT

SEQ ID NO: 475902 - protein, 415 aa, unidentified
MKFKQSNGQNQRIERITASHLVIGIDMAKETHVAQATNYRGIVLSNRHLSFSNTIEGFEKLRRWMEGLQQKHRLSSLIIGMEPTGHYWWNLANWLADKGFNVVQVNPATTKRNKENRDNCPSKSDPKDALVIADVVSRGYYYEYSRQANSFQRLRTIMSDREFWVTNSVRLQNRIIRWLDIRFPEYASVFKDWTCPRSIATLKAFPSPLDLKGQSTAEVITGWRKYMQRACGSTGIQKAAELISKASQSVGDTAALNEAKQDLQRLVEEYERIVSILEQIEQKIVALLGEIPMASQLRSIKGLGPIYTAAILSGAGDLKQYAHGRQLLRKAGLNLAESMSGKRKGQIVLSKRGDATLRKYMYLATLTLVGTNPEFRQLHENNVQVKQMSKQQSVFKLLGNIGKVEIICCFQSWLM

SEQ ID NO: 475903 - protein, 390 aa, unidentified
MLLLGVDIAKLNHVASLVDSSSGELIFSNFKFQNNILGFSSLLEKISKFSINEIVIGLESTGHYGENFINFFFQKDFKIAVINPLQTSHLRKASIRDSKNDRLDSINIAKALLFGEHRYITQKNLTNFALKKLTRFRKSLIKQKTKTKIQLVSLLDIIFPELQYFFKSGVHSNAVYTLLKKYPSTEKIAALREKSLFSILNKASKGHYKEEHALQLKSLAKSSVGIKDTSVSMHIPQLIELIEMLDSQIKSIEKEIDSSIDEESPILTIPGINTVAAASILGEINDIDNFDSSSKLLAFSGLDPKIRQSGNFSASSCRMSKKGSPYLRYALIFTAWNLVRNSETFNRYYLSKRAQGKSHYSALGHTAHKLVRIIYTLLKKNISYQENLIS

SEQ ID NO: 475904 - protein, 337 aa, unidentified
MSVYVGIDVHRKRSQVAVVTEGGQVQLNKNVVNGSEPMLRLIGDLPPGTPVAFEAAFGWGWLVQLLEDYGFDPHLVHPLRCKAIASARLKNDKVDAAILAQLLRADLLPEAWIAPPAVRQLRAVLRHRASLVRLGTQLRNRIHAVAADHGYDRSASYWTGPGRGWLAELDLPAPSRQIVTDCLAVIDHLAPVIGRLDGELHQHAKADPRVKVLRTLPGVGEFTALVMLAEIGDISRFPSARKLASWAGLTPTVRGSDLKVRHGHISKQGSAWLRWVMNQAAQTAKRSPEFAAAYASIAKRRGKKIATIAIARKLLTRAWHLLDQIQPAEASTAPRRP

SEQ ID NO: 475905 - protein, 334 aa, unidentified
MENIALIGIDLGKNSFHIHCQDHRGKAVYRKKFTRPKLIEFLATCPATTIAMEACGGSHFMARKLAELGHFPKLISPQFVRPFVKSNKNDFVDAEAICEAASRPSMRFVQPRTESQQAMRALHRVRESLVQDKVKTTNQMHAFLLEFGISVPRGAAVISRLSTLLEDNSLPLYLSQLLLKLQQHYHYLVEQIKDLESQLKRKLDEDEVGQRLLSIPCVGTLTASTISTEIGDGKQYASSRDFAAATGLVPRQYSTGGRTTLLGISKRGNKKIRTLLVQCARVFIQKLEHQSGKLADWVRDLLCRKSNFVVTCALANKLARIAWALTARQQTYVA

SEQ ID NO: 475906 - protein, 329 aa, unidentified
MGFRYFLGIDVAKAKLDCLLLDSVTDRRRSKVVTNTAEGWLALVNWLAKQGAALEDVHAILEPTGTYHEGVLFSLAQSGIAISVVNPAQLRRFAEGLGVRTKTDASDSAVLARFGAMVAPETWQPAPLKARELRALLARRDAVAQDLQRERNRAEQLSVDTPERVRQSLREAISFLEDELQALQEAIDQHIDDDPGLKRIWDLLQSIPGVGQRVADHFTALLAGRDFASAEQLAAYIGLVPTEWQSGSSIKGRPRMSKAGSASLRQLLYMPAVVATRHNPHVHALYNRLLSKGKAKMSALGAAMHMLARLCFGVVRSGQPYRADWLVKT

SEQ ID NO: 475907 - protein, 312 aa, unidentified
MEAKFVGIDVSKATLDVDCLPVSTARQFSNDAGGIAALVEWLLGSGVERIVVEATGGYEIAVASALAAAGLPVVVVNPKRVRDFAKAQGVLAKSDRLDARVLALFGERIAPPVRALPEAAQRDLTELLDRRHQLVSMRAQEQARLATVLPVARGDVEQHIAWLDQRIRKHETVLLKRLRANEIWDAKVKLLDSVPGIGPVNLFTLVGRLPELGSLNRQQIAALVGVAPFNDDSGKRRGQRYIRGGRAQVRCALYMATLTAKRCNPAIAQMFERLIAKGKPFKVAMTACMRKLLTILNAILKSTQPWENRLAT

SEQ ID NO: 475908 - protein, 342 aa, unidentified
MNNATIIGIDLAKRVFHAHGAHIDGSVAFRKRLTRAQMLPFLSAQPRCVVVMEACASAHEWGRAIQQLGHDVRLIPPSYVKPYVKRQKNDTADAEAIAEAGSRPTMRFVAVKTEEQQARSMVFRTRDLLVRQRTQLINALRGHLAEHGLVVPQGPAHLKSLAKALDATDVAIPQLVRDIGRIYLEQIEQLNAKIADLEKTLRREAQFGEEIRRLQTMPGIGPITAMAVEVFAPPMQTFKRGRDFAAWLGLVPVQHSTGGKQRLGRTSKMGQRDIRRLLIIGAMAVIRWASRRGARPGSWLSRMMDRKPLMLVAVALANKMARAIWAMQTKREDYRDPGLAAA

SEQ ID NO: 475909 - protein, 400 aa, unidentified
MRWRGLSCERPKGRAVQSHKRKEPVMKEKLRFLGMDVHAETIAVAIAEPDGEVRSLGTIPNRIEPIRKLIKKLGPVEKLRVCYEAGPTGYVLYWQLAELGVQCEVIAPSLVPVKAGDRVKTDRRDAEKLARSYRSGDLTAVWVPDEGSEALRDLVRAREAAKQDELRARHRLGKFLLRSGHRPPTGVRSWTHLHLIWVSQIRFTQMAQESTRLDYLHEVEHMRERVLRLEQAIAEAVKLAPPILQEVITDLQALRGIAHISAVTIAAELGQVSRFPGARELMGYCGVVPSENSSGKRTQRGSITKTGNAHLRRIVVEAAWSYQRPPAIWAGLRKRQQSASEGANEIAWKAQHRLHKRYVRLAAAGKDKRKIVTAVGRELLGFIWAIGTKAEATVMQRRAA

SEQ ID NO: 475910 - protein, 322 aa, unidentified
MRMALFQVFVGIDVSRDWLDVHILPFRRRLRVANTPAGWRELAASLAEHPQASIALEASGGYERGILHHLVAAGWQAHCVDPYKVRQFARAGGRRAKNDRIDAETIARYLATFTLQPARIDPPIERLCEHVTYRRQLVEERTAVANQARLLRDPGLKRLSRQRLARLDTLIQRLDQSLAEQIAGDPRIAAKAAVLQTVKGVGPILTATLLGLLPELGTICRRKIAALVGLCPYDFDSGRFAGQRHIAGGRKHVRNALYMPTLTAMRFDPAIKPFYERCVAGRSDKKPAVIAAMRKLLTILNARMRDHLASLNHLNQNLQAAQ

SEQ ID NO: 475911 - protein, 343 aa, unidentified
MNIVRIGLDLAKYVFHLHGVDERGKVVLRKTLRRPGVAPFFANLPRCVVGMEASNGAHYWAKTLSEFGHDVRLISPQFVTPYVKSNKNDRNDAEAICEAVGRPNMRFVSVKSAEQLAIQAVHRIRSRLVASRVRLVNQIRGLLGEHGVVVAQAIGNLRRALPRIIDDEANGLNSIVRALIGELREELSDLDGRITIYDRKIINLYRMSEACQRLGEVEGIGPITATALVAAAGDGKCFKNGRQFAAWIGLVPKQRSSGGRSRLLGISKRGDRYLRTLLIHGARAALGRTRGKQDPRSLWLLKMRERRHANVVAVALANKNARIAWGLLASGMNYDQHLTVSSA

SEQ ID NO: 475912 - protein, 335 aa, unidentified
MDTIDINKVTFVGIDAHPTTHTALAINRFEEEKGILTFENTKEGIVTFLSWLPTIEADMGKVIIGLEGGGNSRHALVVNLLKNYPHIYEVNPLYTKQRRMFGTKADKTDPRDAKLIAEVLTRKLPELPKITRHDLSAHMLVLRKTVWFYEQTTAQGVSIQNQLHQLRREVELSSDTTERRILRMIIVDLEKQLKNVRKTQRKCEEQLTILLEKQGKNLTTIKGIKVILSAKIVAHSGGIERFANLDSFIQYAGIAPREKSSGKTKRHSKSKTGSRKLNHAFYIAAMVQLRWNSQAKVYFEKKVKEGKTKKHALKCLMKRTACIAYGMLRSGEDYK

SEQ ID NO: 475913 - protein, 332 aa, unidentified
MENNCFIGIDVSKNKLDICVLQGKEVLQEDVIDNTPSAIQRFLVDMAEKRGLDLCSCLVCAEHTGNYTYPLTLACRDLGCRLWLENPAQLKYSSGVHRGKNDRVDARRIALYASRFNDKAMLYHELTPELERVKQLRQERSLYRSDLSKYKGQLSDQKNFMESTVYKAKANRLKHVIKELEKMIDVVEREITGIIDSCDVLKRQMKIITSVEGIGRETALCFIVETAAFTRFTDSRKFACHAGIAPFQYTSGSSVRSRNRVSRRANKQVKTLLHMAALSITRKKKSELKVYYKRKVEEGKNKMTVINAIRAKLVARVFAVIRKNDIYSINFT

SEQ ID NO: 475914 - protein, 329 aa, unidentified
MKVQHIIGADLSKKSIDLVCHLQRTHIQIENSIVGFKNLLQWLKQLKINASKTMIVMEHTGLYSYCFEKFLHQHQVAFCKVSALEIKRSMGLVRGKTDKVDAARIAAYGYQKKDKLSVDVPASDVLKRLQMLHSVRHRLVRQRAALTCAIKEYRHIGIPEKDILMQTQLQLIKNFDKQIEKLMAEIESIVNKQESLKQNFQLLQSIPGVGKIVALVAIIKTHNFTRFGNARKFACFCGTAPFPHESGSSIKKRTRISHLADKQMKSLLDLSSKVAIQHDQELREYYLKRTEGGKSKMSTINVVRNKILYRMFAVIKRQTPFVENYLKAA

SEQ ID NO: 475915 - protein, 428 aa, unidentified
MLKINPLSTLYVGIDVSSKSNYVCALDFYKNKYINSSFANNQPGAEELVKKILECLKEHPDLNTIVAALESTSVYSIHIANFLSSCEELMHFKPYVFVLNPKCTANYKKSYIGLGKSDPIDAFVIADYARAGNIETEPWRGSQFLALKRLTRHRLHLVECMTREKAYLVSNLYLKFSELQMLEGDDQPFCDIYGATSSSVLTEYLSPEEIIDSSEEDLISFLAEKSRNRIKDISKTAELLKKAARDSYRLDKALYEPLNVSIASSFNCIETFKKEIKLIDTAIEREIKGLNPNAFIILQSINGIGPVFAGGIVAEIGDISAFHSSDALAKYAGLMWKSNQSGDFDGEDTPMSKAGNRYLRYYLGEAANSMRKHNVEYGAYYRKKYNEVPKHQHKRALALTSRKFVRLVYGLLARNQLYSGVSLDTSNE

SEQ ID NO: 475916 - protein, 343 aa, unidentified
MKDTIYDHYLAIDWSIENMAIARMTKKSNKITAIDVPSDIVDLQAYLKNLKGTKILAIEETTTSQWLYAELKDYVDTIFICDPNRNKLLNEGPKTDKIDAAKLVQLLKAGLMKEVYHSGDKFLYLRRVTSGYEDLVKAGVRLKNQRHALFRACGKVGNEKKDINLGSQGEQFVLECLDRQIEAYEREKQCYENEFERLARKNSAIKHQKSLPGIGTINAVKIVTRVVTPHRFSDKGHYLSYTGLIKLDKISGGRSYGKKNPRFSRQLKSVYKSGILAAIGGNNPMNDYYEHLIQEKGYPEHNARHKACRRLAILSLGVFKSGRKYQPHRRDHVKGGKEDTSGL

SEQ ID NO: 475917 - protein, 358 aa, unidentified
MEVLYERCCGLDVHKSSITACILLEQGRKPQKHLQRFGCTTRDLLDLVTWLKSFGVQHVAMESTGVYWKPVWNVLEEHFQMILANAQHIKAVPGRKTDIKDCQWIAELLKHGLLRGSYVPSLLILDLRDLTRTRATLSQEQSSVGSRIQKVLETANIKLSSTASNTMGKSGRAMLDAIVSGEDSAERLADLALGKLRSKIPQLQLALEGRIRDHHRSLLDSLLRQFRFLEAELKAVDLRLEQLGKEHQELTDAVARWVTVPGVERVVAWAFVAEIGSDMAQFASAAHLASWAGVCPGNHESAGKRLSGKSRKGSPWLRRMACQTAWAAARTKNCYLSAQFKRLGRVHANEALRRSGRS

SEQ ID NO: 475918 - protein, 446 aa, unidentified
MDSTDTLVEVDSTDAEIVARVAAIDVAKDSGMVCTRVPHQTQLGRRTTVWSVSARTNSIIALADQLAEQDIERVVLEATSDYWRPFYYLLEARGLTVWLVNARDVKNVPGRPKTDKLDAVWLAKLNERGMLRPSFVPPVEIRQLRDYTRLRVDLTAERSRHIQRLEKLLEDALIKLSSVVTDMMGVSGRAMIAALIAGERDPRVLADLAKGRLRVKHTALIEALTGRFDEHHAELAAILLDQADNLSAQIERLDTRIEQMIADIPAAQAPADTRAGDGVTAPAYLAAVDRLDEVTGIGRHAAQVIIAEVGLSMATFPTSAHLVSWAKISPRTIQSGAKNRAGKTGKGNRYLKGVLGEAAAAAARTNTFLGARYRRLARRIGKLQALVAVARSILVIVWHLLADPTSRYHDLGPEFFDNRIRPERRKINHIRQLEALGFTVTLTPAA

SEQ ID NO: 475919 - protein, 400 aa, unidentified
MRAVFGIDVSKASSAVAILVNGEKVHGYTMSNDAIGFARLLGDLRTVHKPEIIFEATGVYSRRLQTFLEDNGYAYTRLNPLEAKKQLDSLRVRKTDQIDAEKLAQSQFVLNRKPTYVQEEVYQELRDLSRFYQNLTEDIVRAKNRLHKVLQVTFPEIETVLSKPTGEQYWNLVTAFPYKDFVLDLSKDELLESIRQSTSKRISDKRVAYLAEKLIALANQSYCAVKKTSPIMEEVRYYAKELLRLSEQRQTVLDQMVELAQPLPEYDILLSIPGIAETTATSIIGELGDIRRFQSANQINAFIGIDLRHYESGNFLAKEHITKRGNPYARKILFKCIHNIASASHTNPCHIADFYEKRKRQSQTTSTKPHTIASIHRLIRTMYYLIMHNKLYDYASTQNR

SEQ ID NO: 475920 - protein, 344 aa, unidentified
MDYFAGLDVSVKDTSVCIVDDTGKIVREVKVASEPEALLAVLKNPAYHFKRIGLEAGPLSQWLFSALAEAGLPVICVETRHMRAVLKAQINKTDRNDARGMAQMMRVGLYRPVHVKTLRSQKLRMLLTHRKLLQSKAIAIDNDLRGTLRNFGLKVGIVGTVRFEARIKKLVENLPDLAALVEPMLVVRRTLREQFCILHRRLLAIVRDDEVCRRLMTAPGVGPVVSLTYRATVDVPARFRKSKSVGAVFGLTCAKYQSGEVDWDGRISRCGDEMMRVMLYEAAQSMMRSKKWSWLKAWAMQVARRRGMKKAIVALARRLAVIMHRMWVDGTEFRWTREQAALAA

SEQ ID NO: 475921 - protein, 464 aa, unidentified
MAHKSLSFKKKQHFLQLIKDIPTDRILFCPIDVSKHFHVALLHDIRCQPLSDFFEFSASKIGFASFTDRLEAAFTIHSPQLVLIGMEPTSVYYEGLLHNLRRRYATFTTPKLQLCIIDPAAVKENRRQHSLRTQKTDQIDAAAIGELLTRGLYTPAYFSSPQAILIKEVARSLNDHRHQMLALWNRLLTRLDRVFPNLLINYRDEKPFAQQPLQSKLLDDLLHLCPDPYLILDLTTADLIELFHQQDRPLGPKRAEKIIQAAQRALLPPKALHQVHLQLFKAELETLDFLKAQIAKLERQLEQLIIQSPARHLPAIAGNSAKLTAELIAALEDWQRYETIQPVWAAAGFAPIAEQSGSSSAKPKISKRGSVHLRNAIYKMTCSVIWHEPTFGIPCFQRLLDHHPFVPTILHVGRKLTGTALAILKADRAFHPPIADYSLAKEKLSLLQQQYLKQKKQTASQDQK

SEQ ID NO: 475922 - protein, 429 aa, unidentified
MNYTQNEKIEQVTDSTMVVGIDIGSQIHYARAFNNRGRELTKRIFSFHNDLEGFNSFNLWAETLKTENKKTAVLIGCEPTGHYWFAFAKYVNDHQKRLVMVNPFSVKKIKELDDNSPKKTDSKDPKTIAKLVVDGRYSIPYMPEGIYAEIRDLVYSRDRIMKQHNISANRIQRWLAIHFPEYLGLYTRFDAISGLAVLEKAPLPKDVIALGVNGIRKIWHDKKMRGRGVTEDRAKTLVEAAHNSVGLDGGIGTKSELYMLLEEHHLWTSQLEAVNKVLEKMILKVPHVEKLLAIKGVGSITIAGFIAEVGDIRRFDSPKQIQKYAGLELVENSSGKHKGRTRISKRGRRKLRKILYQVMVPLLARNKEFRGIYDYYVTRVKNPLKRRQAMVAVSCKLIRVFYAVLTKGVEYDRFKMMSDIHRKSDIIAA

SEQ ID NO: 475923 - protein, 389 aa, unidentified
MSEAPVEASVSATSKTILHCALELSKSCWLLAIQYPDRSQPSQYRIKGGDAEGLMAQLLISRQRCAKSTGEVPSIVLCYEVGYDAFWLARFLIARGVECLVVDPASLQVNRRGRRAKTDRLDVGMLLRALISWCRGERHVWSVVSIPSVDEEDVRRSHRERGRLIHERTSHINRIKGLLFAQGIRDLNIKAHYGKLQLDQLVTGDGRRLPPRLVNEIAREITRLALLQQQIAVIDRERDEAPTPCKTTEKKRIQLTQLKGIGPAISAVMSREVYYRQFNNRRQVASFLGLATSPYDSGDMERSQGISRTGRGPVRAIMIQAAWLWTKHQPKSTLTRWFVERTKGQSGRVKRIMIVAVARKLAIALWRYVEQGLVPQGAVIELPRTKSAR

SEQ ID NO: 475924 - protein, 439 aa, unidentified
MAVENQNNSDGKKASAGNSSGRRKRASNRVRIEDLADIHQRCAGIDVHKAGVTVCLSLGGGEGEVAEFGVTTAELRQLRTWLEENGVTHVVMESTGVYWKPVWQILEQGSLQLLLANAKQVRNLPGRKTDGADAIWLATLLRKGLVRGSFIPPQQIRALRDLCRSRTTLVHDRTRVTQRIEKVLEEANIKLDTVVSDLLGKSARHMLDELAAGETDTMSMAELALGQMRRKIPQLVTALEGNFLPHQLFLLQELLQQFDYLSSTIERYEQRIAEYAAPFEAELQRVDAMPGINRIAAAAILAETGVDMKQFPRPEQFCKWATICPGNNQSGGKRRNGSIGQGNRWLRGALTEAAWAASRTKDSYFKAQYGRLLHRGKQRALVAVAHSMLYTIWHLLHHAVDYQDLGIDYFQHRNLEGQKKLHVRKLQKMGFRVTLEAAI

SEQ ID NO: 475925 - protein, 362 aa, unidentified
MIVIGVDAHKRSQTLVAVEAGTGELLGQRTVLASDDGALEALRFGQTLDDERVWAIEDCRHVSGRFEQALIAVGERVIRIPPALTSTARRAARTPGKSDPIDATAIARAALREGVESFPEAFLDERAMDIRLLCDYRDQLITERVRLINRLRWHLLAIEPELEAQLSPAALDGPRIRARLAGQLRRQPESTQLRIAKAMLMRISQISRQESDLKAELTALIQQHNPQLLAERGCGTITAAILIGHTAGAQRFSSEAAFARHTGTAPIPASSGNTSRHRLHRGGDRQLNRAIHIIALCRARTDPQTRIYLDRKAAEGKTKREAIRCLKRHLARHIWGLLYPTNPAALRTERSLAKKPELANIT

SEQ ID NO: 475926 - protein, 325 aa, unidentified
MTASLSSDNSFIGIDVGSRSFEAAWHRGGCAQYANRPDAIAAFLARLRAEPPTQRIAIEPTGGYEKLLVIELRRAGLPVEIVHTSRFQAYRQLIGVRAKSDGSDARLLAAYAAAPDEIRRQSNRVVLPEDGDREELAALGVRRDQLNRMLHAESCRLANVRSTFVRHSISRHLEALRKEVREIGIAMKAIVRQRQDLSRQKRLLQTIVGIGEVTAVMCLARAPELGRISNKAAAALIGVAPFVHESGGLSAPARIFGGRADVRRVFYMAAVAASQHNPVLAAFYNQLIAAGKPAKVALIAVMRRLVVFANGVLRSDEPWKRGMAA

SEQ ID NO: 475927 - protein, 420 aa, unidentified
MKSFVPVAGVDVSKRFSDLCVLSPDNNVLLRQKIYHDMVSMKLAEKKLHEIELEYGARPVVVMESTSHYHLILFQFFTDAGFEVIVVNPIQSGALKNINVRKVKNDRVDAYRIAMLYRLKVLRPSQIPTSSLRGLRLLTRQRSELKGDVARFKNRLTAYLDQIFPGYGEVFSDVGGSASRAVLHMCPTPEKLLNADGSLLAKVICEAGNKGPKFGAEKAAKLREAAGSAQVIGVRSASNASLIKNVLDIIEGLLAAIQRIEGEIKELVTQDTRLDEDVKLLCSIPGIGFSSAVVIAAEMGNISLFGKPKQLAAYFGLDPGERQSGTFKGRKNKLSKRGSPQVRAALHMAAVSSVSRKRDGTYRNPVLAEYYERKCAEKPCKVARVAIMRKLSNIIYAVLRDRRPFELRTPQEHMALLAAA

SEQ ID NO: 475928 - protein, 418 aa, unidentified
MNAELIARLSRRYLALDIHKHYSVVAGVNFEGQVVVEPVRIEHADLEGWLKNHIQPTDYVVIESTTNAWHIYDLLVPLAEKVLVANPIKVKQIAQARVKTDIRDTLILARLLAANMVPEVWVPPAHVRELRYLLSQRRHLVGMHTATVNRMHSVAHRHHLNHPRGKRFNEQNTKWQQDNVLSESEQFQLELDMNTKKHLAEQTEKITEKLRRMSHQKPWAESMLYLMQLPGFGVITGMTVLAAIGDITRFESPKHLVSYSGLNSGLEQSGVKLRGKKITKDGRKDLRWAMVEVAQRAVKSDPLWKHRFIELCRRMHKNQAIVAIARRLLELVWYVLSRKQAYQNFSDERIAYKYLTWSWQLSEADRDGLTRQQFTRYYLMKLGIGHDLEQIALNPRYKRNLASEAEVLALRPELKQTE

SEQ ID NO: 475929 - protein, 348 aa, unidentified
MGVFIGLDVSLNKTAVCVVDRDGVVLWQGKVASEPGPLVARLAEWSGVIDLAGIEACPLSEWLHRGLREAGIPVMCIETRHAQRFLSSRPVKTDRNDARGIAEMMRLGHYRPVHVKSRAAQSMRTTLAVRMQLVASQLRIEGTIRGLLKIYGLKIGAIHRNRFAARVSELLEMAALPELSAAIEPLLRVREGMRAERRAFDRTLAGLSRRDDTTRRLMTIPGVGPVTSLAFKATIDEVGRFSTSRALGAHLGLTPRVYQSGEIDRSGHISKCGDRMLRHLLYEAASALMTRTRKWSRLRAWGVAVAKRRGIKRATVAVARKLAVIMHRIWVTGGEFEFGNPTAAAIAA

SEQ ID NO: 475930 - protein, 309 aa, unidentified
MEASYVGIDVSKDRLDVHVRPSGATFVVARDDEGVAELLRRLSVLAPALIAVEATGGYETLVAAAVGGAGLPLAVVNPAQVRHYAQALGKRAKTDPVDAEVIARFAEATRPEPRPLPDEATQALADLVTRRRQIIAMMVAERQRAGRLPRRLRKSCERVVRMLERELAALDIDIDTTVRGSPVWCAREDLLASVPGIGSVTARSLIAELPELGRLDRRRIAGLVGVAPYTRQSGKWHGKAFIGGGRRTVRAALFVATMAAVRHNPAIRDFRQRLLNTGKPKMVAMIACSRKLLIILNAIARDQKPWQHA

SEQ ID NO: 475931 - protein, 359 aa, unidentified
MQRNKISFKGQKIYIGIDVHARTWEVAVLTESGYKERHPQRASAKSLFDFLRKHFPDGEYHAVYESGFSGFSTYYALKEYGIDCVVTHAADVPTTQYEEVMKTDKVDAAKLARSLRAGDIRPIYIRERENIDDRSVIRIRKTIRKQLSGYKARVKHMLHCNGVEMPERFSKPGSHWSRAFIKWLKEDVKLLSSSRLSLDLLIKQVETIRLTLLDATRAMRNLGQTERYRSNYDLLMSIPGIGVSVAMCILTEIYDVKRFHNENQFASYLGLIPTCHNSGEKTSSGEKTFRGNKHLGPMIIEAAWIAIYKDYGLGMAYAKYKQSMKPQEAIVKVARKMSNIIFSVLKNNKKYEPYKWDEE

SEQ ID NO: 475932 - protein, 364 aa, unidentified
MPSITQSTAPCHVPADAAEEVLLGVDTHKDVHAAAIVTVLGTDLASRSFPTTAEGYRQLVAWARSFGVLRRAGVECTGSYGAALARHLRAEGIEVTEVNQPDKAVRRRRGKTDAIDAEAAARAVLSGRATAMAKANDGPVEMLRLFKLAKRSAIKSRAQAINQLKSILVSADVDLRESLAGLSNPRLFRRCAELDILQVTGPAGAARHVLRLLARRIQHLTAEIDDLNERIAAAVEASTPGLLDVRGVGPDSAAALLISAGDNPERLDSEASFAALCGTSPVEASSGKTQRRRLNRGGDRQANAALYRIVLSRLRWDERSQDYLRRRLAEGKTRREIIRCLKRYVAREIYRLIASTRNTANELA

SEQ ID NO: 475933 - protein, 318 aa, unidentified
MPEAVFIGIDVSRDTLEIGSSTASSTWQYANDSDGIEAMTAELAKLAPALVVLEATGGYEFEAACALQAAGLSVAVVNPRQARDFARAMGTLAKTDSLDARMLAAFARVLHQHPQRERFIKPLPDAQLQRLQALVLRRRQLVTMLTAERRRLTLAHASARPSIEQTIKFLKSQIDDVEHDCADHVRTHHAELAQALSSVKDIGPATVATLLAELPELGSLCRGRIAALVGVAPLNRDSGQMRGQRTIWGGRAEVRRALYMATLVAVRHNTVFKSFYARLTALGKPKKVALVAAMRKLLTILNAMAKSGSHWNDSLHLA

SEQ ID NO: 475934 - protein, 467 aa, unidentified
MTPHKDSFLDPRPLAPTPTLPQSPMLAEALQVCHPHAAGIDIGEAEHWVAVPPGCDPQPVRRFGTFTADLEALADWLIDCGVTTVAMASTGVDWIPLFELLEARGRQVLLIDPRQAKRAPGRPKTDRLDCQWLQRLHAYGLLAGAFRPDDQVCVLRGYLRHRQMLLTYAAHPMQPMHKALEQMHLKLTQVVSEITGVTGMAILKAIIAGERDPQHLAQRRNPHCHHPEDDIAKALQGTWRAEHLFALRQAVELYAFSHQQITQCDQQINAHLETFGDTSAGQPLPPKARRHKKTNDPRFDARTPLSRMAGVDLTTIEGIAEGTALVILSEIGTDMTRWPSVKHVWSWLGLCPQHNISGGKVLSRRVRPGAHRVTVALRLAARSLHHSQSALGAFFRRMKARLGTPKAITAAAHTLARLVSHLLKHGSASVQQGLENYEAQYHERKVTTMAKQAKALGYTLVPLVTQG

SEQ ID NO: 475935 - protein, 323 aa, unidentified
MSLTSPLTSIGIDVSKETLDIAVHETETHWTTKHEFTEFPQLLKSLRSLTPTRIIIEASGGTENLLVSYLATNGLPVIVINPRQVRDFARATGQLAKTDRIDAFVLARFGAVIQPAVRPLKSAENQELEALVARRAQLVNMLTAERVRLQQAQQQHRHSIVADLKAHISWLEKRLDKCEGDLSKLLRSSPLWQATDERLQSVPGVGPVTALVLIAELPELGQLPDKQIVALCGLAPHARDSGKWRGKRTTRGGRARVRTALYMAALVATKHNLVIKTFYRRLLRAGKEKKVALTACMRKLLVILNAMFRNQTSWQPPRLAQGA

SEQ ID NO: 475936 - protein, 385 aa, unidentified
MHQFSESTQAAVDYNSTIIGALELSEKKWVLAVQLPGVGRHSRHVMEACGDGLASFVERLKARCAAAGRKIARVILTHEAGRDGFWLARFLARRGIEVHVIQPSSLPVDRRARRAKTDIIDVEMLLRTLMAWLRGEPRVCSMVPIPSEADEEARRAYREREDLTGERRSIVNKIDGILATLGVKGYRALRRDRREQLTSLRQPDGDPIPQKAKARIERLLDRLDLVLKLIEQVESARDAVLKKDAPADEAERMIRSLTDLRSIGPDFATLLVREAFVRQFRNRRALGGYVGLGGTPFSSGGSEREQGIGKDGNRRVRAAMVELAWTWLRWQPDSALSVWFRARVGAMGGRIKKIMIVALARKLLVALWRYVKDGVIPDGAKMKAA

SEQ ID NO: 475937 - protein, 413 aa, unidentified
MKKHTYRAQKVNNMNWQQVNEQTAGEALVLAVDIAKVQQYALLTNQEHTQTWLMQWSHLEHTQYLIEQLKALEVPITVVMESTSTYGDSLRYQCRQAGFSIYQANAKKVHDAREIYDGVPSLHDAKAAWLIAKLHKDGATKLWCEPTEEARRMNALRLEYELHQDQHLRNKNRLEAYLSRHWPEVLTLMPPDSITLEQLIKAYGSPQEVGTQSEQAASDMRGWGKSGLSADKIAKVITCAKNTLGEPCIEAERQFLMALASELQHNRELKRAAKQALEAIVENDEALQEMGRTIGKITTAVLISLHLDPRCFATPKSYQKALGVNLTEKSSGQINGRLRLSKRGSAIARKFLYLAALRLLVNDPLVGKWYEAKKDDRAKLKTVIALMRKLPLALWHIARGERFDAGKLLKVAV

SEQ ID NO: 475938 - protein, 345 aa, unidentified
MQITRVGLDIAKRVFQLHAVDERGVVRTRKMLKRAQVKEYFAQLPPCLIGIEACAGSHYWGRELGKLGHTVKLMAAQFVTAYRKSGKNDANDAEAICEAVGRPTMRFVSVKSEEQQSVLMLHRARTLMVANRTAQVNQIRGLLGEFGIVVPQGITRLRSQLSQILENAENGIPDLARQVLADLLEQLRYFDEQVEDYDKQIAQLAEHSEPAKRLMAINGIGPLTATALVATVGDARVFANGRQFAAWLGLTQRQNSSGGKTRLGQITKRGDRYLRGLLVHGARATMRFLGRKEDPKSEWVKRLRARRHANVVSVALAAKHARIIWAMLARGTGYDASLSAQVVAV

SEQ ID NO: 475939 - protein, 414 aa, unidentified
MLKIVYPICCGMDVHKSFVVACIASTNDHGVTTYKSKRFSTFTGDLRRCAAWLAENNCKDVCMESTGKYWIPIYNILEHTCRIVLAHPKYVKAIRGKKTDKRDAKWIADIFKHDLVAGSFIPPADIRQLRDLVRYRWKLTNFTTGEKNRAQNCLTVSNFKLDDVFSDVFGKAASAITTRILENPTEKITDVSGFRTKGMKATNAQVLAAVDGEMCAEQAEKLRIIRSHMDSLELCKLNLESLILSTAEKYLPQLNLVMTVPGIQSFAAIGIISEIGVDMSVFPTSKHLCSWAGLTPQNNESAGKKKTTRIGRAGAYIKPLLVQCALNAIRAKKFPEIRNRYLTLKKRRGHKKAIIAIARMLLTAIYNMLKKNETYNPEIYRKGDRPPAHREVSVEEAVFILQRQGYLVTAPPTA

SEQ ID NO: 475940 - protein, 351 aa, unidentified
MNTPQTATSKLFIGIDIHKRSWKIHCSTDLSGGKTFSMDPRPKQLKEYVNKYYSDYEVTTAYEAGCCGYYAHRCFESYGWQSLVVNPADIHRKGKERHTKTDRIDAQLIARELKDGRLDSIHVPDKKREELRSLFRRRNDLVKNYRVIKNLIKAQLLYYGVEVPNEYDNSHWSHKFRYWLDDLDFDFQGARLTMDSKLRQFRFIDQEIRDVSTQLRKHCKKEYKTDYTLLRSIPGIGGIVACGILCELGDLRRFGSLKHLAGYVGIAPGIHQSGDNLRTTGITRRAHRLIRSYFIEASWQAIRTDPVMQAYYRKHQGKNVKSIIIKVARKLLSRTLAVIKTEIPYQIGVIE

SEQ ID NO: 475941 - protein, 399 aa, unidentified
MFVGIDWAKESHDVCVVDPAGKIRGRAAVTHSCEGFDELARHLARWAEQGEILVGIERPEGRLVDRILEAGYPIVVVPTFAMKDLRRRYAVGGAKSDPGDAYVIADVTRTDGHRLRRLEPFFEQTRALRSVVRARDDLVDQRVALGNQLRASLEAYWPGAAVIFADVCSEIALSFLERYPTPESAARLGEVRLGSFLKKAGYSGRRSAAELLERLRAAPAGIVGVEAEARTDSVRAMVRVMRSLNRSIKDLDRAVVAYLGEHPDAEVFTSLPRSGQINAAQMLAEWGDCREAYPEPDTVSMLGGLCPVTHASGKHRDVSFRWACNKRLRKAITTFADNSRHASPWAAEVYRRAIARGCDHPHAVRILARAWVRVIWRCWQDRRPYDPALHGAAVLLEAA

SEQ ID NO: 475942 - protein, 338 aa, unidentified
MKLYGAIDLHSNNNVTVLSDEQDRVVYEKRLPNDLSLIAEELATYRDSIQGIVVESTYNWYWLVDGLMDEGHKVHLANTAAIQQYEGLKYTDDQYDARWLAHLLRLGVLPQGHIYPKQHRPVRDLLRKRGQMVRQRTVNLLSIQNLFSRNTGSSMNANRVKRLDSKEIEELIPNADLALAIKANLAMLECADGQVDILEKAVIGRVKLKSEFELLKTVPGIGLILALTIMLETGDIGRFATVGDYASYCRCVGSKKISNGSKKGQGNTKNGNKYLAWSYVEAANFAIRFSAKIKSFYQRKKSKTNGIVAIKGVAHKLCRACYYIMKDQVAFDVTKAFA

SEQ ID NO: 475943 - protein, 310 aa, unidentified
MLENKNKRFIGIDVSKYKLDIFNSTTGEIKTIENSKAGIRQYIRALEFSEELYIVVDLTGGYEALCVNMFYDKGFKVIRAEGRKVKNFARAMGITAKTDTIDAKILADYGEKCFERLRIYKPYNSSIKKLVMRLSDLKDMAQKEKNRLKAPDNALIVVKSIQTLLKTYEKEIMKLEDHIEQLILKDEELNAKYTMLLEQKGVGKKVAFILLGLLPELGYLNRREIAALCGVAPFAKDSGTINGYRRTQNGRSEVKKALFMAALAAVKYDTKYKPVYESLLERAKPKMVAITAVMRKLIIYLNVKSKTLCA

SEQ ID NO: 475944 - protein, 342 aa, unidentified
MEITTIGLDLAKSVFQVHAVDSAGNVVVRKALRRAQVLAFFKQTPPCLVGMEACGTSHFWARELTKLGHEVRLMPPAYVKPYVKRGKTDANDAEAICEAVTRPTMRFVAAKSEQQQAALALHRTRDLLVKQRTQLVNMIRGLLAEFGIEMARGLHHALELAARIASGTAPDVPELAVRIITGLAGQIGDLQVRLTALEKELLAWHRASELSQRLSTIPGVGVISATALAASVTDPSRFRSGRQFAASLGLTPLQNSSGGKERMGRISRMGDRYLRRLLVVGMTSLVRRARANPTSVDPRIAAMLARKPARVVTVAAANRAARVASSIMARGGTYRAPASLAA

SEQ ID NO: 475945 - protein, 344 aa, unidentified
MGEVSTIGLDIAKSVFQVHGVDVAGTVVVRKRVSRAKMLEYFGELPPCLVGIEACPSAHHWGRELQALGHTVRLIPPTYVKAYLKRSKNDANDAAAICEAVTRPSMRFVPIKTIEQQTALMLHRTRQLLVRQRTMLSNALRGHLAELGIVSAKGRNGTAELLRIIADSADGRVSPAVRGILDVLARQYGAIGTEIASIDKSIMALHRACEASRRLAEIPGIGPVVATALVAEIGDWSSFSSGRSLAAWIGLVPKQHSTGGKDRLGSITKQGNRYLRWLLVVGAMAVIRYARKYGTQKRPWLDRLMERRPTKVAAVALANKIARMAWAIMVRGERYKEPKLLLAA

SEQ ID NO: 475946 - protein, 346 aa, unidentified
MIVIGCDYHPSWQQICWVDTTTGETEEKKLDHASGEAQRFYRQLQGPVLIGMESTGNCQWFVELLTSLGHDVWIGDASKIRACDPRSQKHDRRDAALILKLLLEGRFPRIWIPSGQEKDLRQLLIHRYKLVRIRAQVKTELQHLAMNQGVTKKRKLWSKVGERVLRELPPKPWASRRREDLFKVREMLNGQIALLDQAVVEAAEKNEKARLLMTQPGVGPITSLAFVLTMGDVNRFQRGKQVASYLGLIPREYSSGGHQRLGSISKQGNRFMRMLLVEAAQGAVRCDPGFRNEYLHRCHKKAKGVAKVAAARKLAVRLYWMLRTNTGYPEVVRVESSSRVPLVSAS

SEQ ID NO: 475947 - protein, 319 aa, unidentified
MTRVICGVDISSESLAARIGRDGAEASFANTPQGIAALAVFCRTHQAELVVMEATGGYEQRAFQLLWAEQLPVAIVNPRAVRRFAEAMGLVEKTDAIDAGMIAWFAETRRTLAQPPASAQQQHLRALVTRLRQLTLVHAAQRNQRRLVTDAAVLAMTDQLLALVQQQIGELETAIAALLASDPLWSELDQQFRSIKGVASRTVARLMAEMPEIGTLSAKSISKLAGLAPLARDSGKHQGRRMIRGGRAPVREILFVVASVAARYEPDFTAFHQRLRLAGKPPKVVRIALAHKLLVRLNAKAREVRNRITPVTPALPVAA

SEQ ID NO: 475948 - protein, 402 aa, unidentified
MNAVGIDVSKSKSVVAIMRPFGEIVSTPFEIKHTASDIHSLIELINSVEGESRIVMEHTGRYYEVLAHQLSKANLFVSAINPKLIKDFDNDSLRKVKSDKADAVKIARYALDKWQNLKQYNVMDELRNQLKTMNRQFGFYMKHKTAMKNNLIGILDQTYPGVNTYFDSPARSDGSQKWVDFASTYWHVDCVRKMSLNAFIDHYQNWCKRKKYNFSQSKAEEIYGKAKELVPVLPKDAITKLIIKQAVYQLNSASTTVESLRTLMNETASKLPEYPVVMAMKGVGTSLGSQLMAEIGDVSRFTHKSAITAFAGVDPGVNESGSYEQKSVPTSKRGSSDLRKTLFQVMDVLIKTHPQDDPVYQFLDKKRAQGKPYYVYMTAGANKFLRIYYGRVKEYLSSLPES

SEQ ID NO: 475949 - protein, 343 aa, unidentified
MNSHTTDTPCFAGIDYHKKSLVVALGDTHGKLLGQPERIPTEPETVRRFFRRYPGLHCAIENCRGFDWLVDLLKELGLVVHISNPYATRLIADSRCKTDKIDSRILMELLSKQFLPTCYQPTKAEIRIKEQIRWRRQLVKASTSVKNRAVALVDKENKGHSISFSASGLTQIKAIELQKHRKQLISKHIDLVTEFQEKIDLEDLWVAKECRNNPSVQLLKSVPGIGDLTALTLVVELGDIARFKRSNNVTAYLGLNPRLYSSASTRRTGSITKKGQRELRCLLVQAAWRAIKRSSPIQERFKKIAKRRGKNVAIVAIARLLAEICFHILRSGEPFNESKLALG

SEQ ID NO: 475950 - protein, 366 aa, unidentified
MEKGITFVGMDAHKVAIKQAVLLPEQTKPIEWQLANEKAAVRRMVRKVQRLSPGEVRFCYEAGPCGYALQRWIQEAGAVCVVIAPSLIPRKPGDRIKTDRRDARKLAELYRAGLLTEVHPPTPEDEAVRDLCRAREDAHEDLVRCRHRLSKMLLRRGWIWNGSKRAWSQGHRLWLRSLRFEQQADQVVLDDYLLAIEHVEQRLRCLEQHIEAASQLPAYAEAVGALRCFRGIDTLTAMGLVAELHDFMRFDSARGLMAFLGLVPSEFSSADSERRGAITKAGNRHARRLLIEASWHYRHHPNAASLKRRRQGQPAEVVALADKAMYRLNRRFNRLLAKGKPRSKAVVAVARELAGFVWAALHSKAA

SEQ ID NO: 475951 - protein, 359 aa, unidentified
MATRVKRNKINFKGKMVSIGIDMHKHSWRITALVEGDVVLAVTLASPNYDSFTKILTQFKGNHVRIVYEAGPGGFALYDRLTADGVECIVTPPSLIPTQSGSKVKTDKKDSLKLAKLLESNMLKAVWVLSPEERAHRQLVRTRRQIVDHRSDVMRQIKSLLLFHSIPIPFSSKQQWTGPFVRWLHDLDLGDEYLNRSLETLVSLFDYLSEEKRRLTHEVIQLSKDQKYASRVKILKSIPGIGALSAMETLVELQDITRFKTADELAAYLGLTPSQYSSGEYIRLGHITHAGNDRVRTTLVESSWILIGKDPKMRCKYENIKHRRGGKKAIVAIARSLSACIRRILLDQVPYEIGFQKAA

SEQ ID NO: 475952 - protein, 326 aa, unidentified
MTHFIGIDVSKAKLDVALLMPNDKIRSKTVANSAEGWRTLWHWLLAHAHPQGKDLHVCMESTGAYHEAVATFLHDQAATVSVVNPMLVKRFAESTALRVKTDRIDAQTLARFARERRPAAWEAPSKPLRTLQALVGRLDALLEMRQMEFSRLDIAHESVQSSHREVIEELDRQIKEVRRLICQCVDDDPDLGRRRDLLETIPGLGERTIPQLLAYIGRPERFKSAKALSAYAGLVPWIRQSGSSLDQRRGTHPLGHAPLRRSLYFPAMVAGRFNPVIARFWNHLKAQNKPGKVIVVACMHKLLAIIFGVLTSGQPFKASTETLTVA

SEQ ID NO: 475953 - protein, 372 aa, unidentified
MDKGTSFVGMDTSKGSLRVAALYEGREGFGEWEVVHEAAAVRRMVRKVQREAGGPVMFCYEAGPCGYVLQRQIKALGSDCIVVAPSLIPVKPGERIKTDRRDARKLAELLRAGLLTEVHPPRVEEEAVRDLVRCREDVVEDLARCRHRLAKMLLRRGYLWRSGRQWTTAHRGWMRALVWDHQADRVVFEDYLLGLEQAESRLLNLNKELETAAQTEPYRLLAGVLGCYRGIGTVTAMTILTELHGIERFTSPRQLMAYLGLVPSEFSSAERVFRGSITKAGNAHLRRVLAEAAHQYRHRPWVGPLLRRRREGQPAFAIAQADKAQQRLHRRFRRLLLRGKPYGTIIIAIARELVGFLWATLQQAQTSQRKAA

SEQ ID NO: 475954 - protein, 341 aa, unidentified
MTCTTVGVDIAKNVFQVHYIDAETGEIVNKPIRRAKFLEHFVNRAPCLIGMEACSGAHHWARQLTKMGHQVKLMPAAFVKAFNIRNKNDAADARAIWLAVQQPSKPIAVKTEMQQAMLALHRTREQLVKFRTMQINSLRGLLTEYGEVMGKGRAALDKAIPDVLARVSERLPVALIDTLREQWNGLTKLDDQIAGIERRMREWVKEDRAVKAISDIPGVGILTATAAVSMMGDAKVFRSGREFAAWAGLVPKQTGSGGKVNLHGISKRGDTYLRTLLIHGARSVLTHAKEPSPWVEQISKRRPANVVTVALANKMARTIWAVLAHDRPYQSGYLSAKPPQR

SEQ ID NO: 475955 - protein, 403 aa, unidentified
MKHVIALDVSKGKSTMVIYDSYRRCEFEGELNHTRVDFERLHTRMKEITKLDGQVPEIVFEATGIYSKPVESFLKDYGYTYSRMNPLEANLQMAKMRRHKTDRSDAHELAKTHFKMERESTYIQDEYYEQMRALTRYYDEIDEEMILIKSRMHAILHMSFPELETLLTPGSALFLNVVQLYPHPALVLAHSKTVIKNRLKTNTKKNLSLARAEAKAIELLAAAKNSYPAIKCTDVRCDQVRDYAARIADLKDKKEALVKQMIELSKERKEYIVLRSIPGIGNSTACRLIGEMGDIRRFKNAKQLNAYVGIDIMRYQSGNTQYRDRINKRGNKHLRKILYFMVCAMLMAKGKPNHFVDYYYKLKTQPQRKPHKVAIIACINKFLKMTFQLLTHGILYDYKTATN

SEQ ID NO: 475956 - protein, 339 aa, unidentified
MAIITTVGLDLAKRYFQVHGVDKQGKVVLKKKLSREGVLSFFVNLPPCLVGMEACGGSHYWAREIGKFGHTVRQISPQFVKPYVKSNKNDANDAEAICEAVSRPSMRFVTTKSIEQQDIQALHRIRDRLVGNRTALANQTRGLLLELGITMPQGIRHLRTMLPIIIEDMDNNQTLLEKDYLSDLYSELVELDAKFAAYDAKLAAICKQSAECMRLLKVPGIGPLSATAIVAAVGQAKEFKNGREFSAWLGLVPRQNSSGGKTKLQGISKRGDIYLRTLLIHGARAVAYRGSSGNDARSQWLRAICDRRGMNRAVVARANKTARIVWAVLAKGEAYKEAA

SEQ ID NO: 475957 - protein, 339 aa, unidentified
MNKTDHAGIEVSKDELLVALRRGEQTLPLQSFPNTPTGHRALVHYLARKGRVVQVCLESTGVYGLDLALLLQKRPGVEVMVANPRAVRHFAQALMERSKTDPLDAMVLLEFAARMPFQPFQPPSPTALHLCALARRIEAVTDLCAAERNRLHAASAAAALPAAIRQEIRRSIAFQERALARLARQALKLIARDPLWQQRFQQLDSIPGIASTSAIAILAELALLSPDRDVRQWVAAAGIDPREHSSGSSVHKKTRISKAGNRHLRRALYMPALVAVQHDPHLRAFYQHLLDNGKEKLQALVAVMRKLLHAIFGMFKHRLPYDGSKIFRLAPELCTTEAA

SEQ ID NO: 475958 - protein, 337 aa, unidentified
MEYFAGLDVSLEETHVCVVDRDGVVIHQAKVASTPADIAQELAKAPACRRVVFETGRMAPILFHGLVEHDVPVVCVESRQAYQGLKSLTTHKTDRNDARGLAHLARTGFFKPVHVKSLPAHAVRSLIIARKKLVGQRVTLENQIRGLAVVFGVRLPRALSPAFIEQALLSSEGINGLSAAMRGLIGARAAVLAVVAAIDADIKKIVRMSEACRRLMTIPGVGQLTALAFTAAVDDPERFRRSRDVGPYLGLVPRCYQSGEVNYTGSISKCGDRRVRTLLYEAANVMLTRCRRPLKLKEWALAIARRSTMRKARIALARRLAIIMHAMLRQGTEFKAA

SEQ ID NO: 475959 - protein, 394 aa, unidentified
MKNRNNVGRRRSKTKTKAKKATLQEIAELSGKEDVTVGIDIGDRSSRYCIVDSSGSIVIEGKLETTREGLKTGFAGFAPTRIALEAGTHSPWISRQLTELGHDVIVANPRKVGLIGQSSRKNDQADASKLAMLAHASPDLLHPVQHREEQAQADLAVIRAREELVKLRTSVINMARGQAKAVGHRLEHCDADAVDADMADKLPEVLRVSVRMLLVTAAQLTVQIKAADQHIHQIIVRYPEISLLTPIKGVGELTALAFVLTIDDKERFGTSREVGPYLGLVPGQDQSGQTDRPQRITKEGDRLVRWLLVQCAHCILRKNAPDTDLKRWGQQKIDEQVKQQQGKKKRPNKKKVLVAVARKLAVLMHRLWVNGEVYDPLYNARQQEASAQSKKKAA

SEQ ID NO: 475960 - protein, 490 aa, unidentified
MKGQRAKRNQKNQKTSKTTSDKATPGKWDEMNRKQRREMMRQMQSGDLSLEVIHPDASGIDIGNESHYVAVPPSRDSQPVRCFGCTTAELKKMAEWLTQCGIRTVAMQSTGVYWIAVYDILEAAGMEVYLVNARETKNLPGRKTDVQESQWLMKLHTYGLLRNSFRPSQEIRILRTYWRQRHDLVRSAGRHIQRMQKALTQMNIRLANVISEISGMTGQAILKAILDGQRDPRELAAYRDHRVEASEEEIAQALEGNWQEDQLFVLRQEQAGYEFCQQHITECDQQLEKYLARLEDRTQGATLPKETRKGRLNKKKKRNPQFNLREELFRMTGTDLTQIDGIDVTVAMTVVSEVGWDMSKWKTENHFVSWLKLAPDNKISGGKVIGKGRMPTNNRATTVLRMAATTLRESETYLGAQFRRFRTRLGPPLATKAMAAKLARLLYRMLRFGMKYADQGAEFYEAQHRKQQVIHRKRKAAQLGLGIIEVAAAA

SEQ ID NO: 475961 - protein, 478 aa, unidentified
MDKRRLVGIDLGISSAHTVRVLAGDGRIVCRRKAVPTVASLTQVEQAAVAGAAPGVRLEVVVEPTGPAWLPIAVFFTRRGHTVYRVSSAKAHDLRRFLKRHAKSNGIDADTLARLPLVDPAGLHPLGLPDAPRAALDRRVRATDRLTRQAATHKRRIKDLVRQLLPASPLVGELGMADLAVLERYADPHALLGVGQARLARVITAASHGHQGHHRAAQWLQAAQAALQLYDEHPAVAFAELAAEVQTEVRLLRATQAELARHAAERERCYRQVDPLHLARSLPGFAEIGAPALVATMGSPGRFQRGANFRSFTGLTPRASETGDTDRKGQPMSKAGSRLLRTTLVRAADNARHLDPQLARLYYLQMVQRGKDHLGALCVVAAHLAERAWVVMDRGRPYLICDTDGTPVTPAQAKHIIAEHWTVPEEVRRRRRSKKGKAPQQVLTGHVTGARSATRRPSPSPSSLGRRTKRVKQAQAHT

SEQ ID NO: 475962 - protein, 347 aa, unidentified
MAIVGGLDVHRQQITFDYLDTDTGEVSVGQIPAADRRVVAAWLVRRFGEREDRGEIEFSVEGCTGWRYVAEELRAAGMVAHLAEPAETANLRGRKKRAKTDRADARHQRELLVAGRLPTCWIPPGEVLEARALLGCYHDLRRDHTAWLQRIHAVLFHQGASPCTDLGTAAGRAKLAVVAAGQLSPAGRTQVAAAVLMLEATEAQMGLVHRQLLTTARHMTGPRVLTERLYGVGPMTGLALTCWLGGAGRFSSARKAVRFTGLDITVYSSAGKRSPGRLSRQGPAVLRWCLYEAGKTHARPSAPDYPYYAAVKKRIDGKHAALSEARKLVRQAMHILTELGDDAFAYV

SEQ ID NO: 475963 - protein, 334 aa, unidentified
MEQITTVGIDLAKRVFALHGVDGAGRVVLRRTVKREELVELVAGLSPCLIGMEAGSGAHEWARRFQAFGHTVRLMAAKFVTPYRRNGKNDGNDAEAICEAVTRPGMRFVPIKSAEQQAVLTLHRVRQGFIEERTSTINRIRGLLTEFGVVLPLRSVTIRRQAREAAEALPHIARRAIEDLCAHLRELDARVLAYDREIGEQARQSEAARRLMKIRGVGPLSALAIVATVGSARDFRSGRQFAAWMGLTPKQHSSGGKNRLGSITKRGDAYLRTLLILGARSVLNTAMRHKDRISRWVLALQARRGYHRALVAIANKNARIAWALLSRNQELRTA

SEQ ID NO: 475964 - protein, 363 aa, unidentified
MVNEVRGYGLKHQKEKRSMDHFAGLDVSVKQTSVCIVDDTGRMVREVKVASEPEALLPVLTNALYRFKRIGLEAGPLSQWLFSALAEAGLPVICVETRHMRAVLQAQINKTDRNDARGIAQMMRAGLYRPVHVKTLRSQKLRMLLTHRKLLQSKAIAIDNDLRGTLRNFGLKVGVVGALKFEARIRELVENLPDLAELVEPLLIVRRTLREQIGILHGRLLAIVRNDDVCRRLMTVPGVGAVVALTYRATVDVPARFRTSKAVGAVFGLTPSRYQSGEINRSGAISKCGDEMMRAMLYEAAHIMLVRLAKWSWLKAWAMKIARHRGMKKAIVALARRLAVIMHRIWVDGTEFRWTREQAAAAA

SEQ ID NO: 475965 - protein, 455 aa, unidentified
MPKRTSGDRAELKPVKVGAAAIDIGSKMHMAAVDPSCADRPVRAFATFTQNLHDLADWFKSCGVTSVAMESTGVYWIPVYEILEQRGFEVILVNARYAKNVPGRKTDVSDAAWLRQLHSYGLLRGSFRPDAEIASLRAYLRQRERLVEYAAAHIQHMQKALMEMNLQLHHVVSDITGATGMRIIRAIVAGERNPDVLATYRDVRCHSSIDTVRAALVGNDREEHVFALTQSLELYDTYQAKMLACDRKLEALIAALTEKGAKPVGKLSRPRVKTKQVNTPSFDVRAALHGVLGVDLTEIHGLGPSLALKLIGECGTDLRAWPTSKHFTSWLCLAPGNKTSGGKVLSSRTRRSSSRAAALLRLAATSVGRSETALGAFYRRLSSRAGKAKAVTATARKIAVLFYNTLRHGMTYRDPGADHYEEQYRSRVVANLKRRAKSLGLIVLPVPSDVEVAVS

SEQ ID NO: 475966 - protein, 334 aa, unidentified
MVYAAIDIHKHAFQAAVLDPETGVVVEERFSADRDSLARWAEPWQGRVAAIAIEATTGWRWVWRELVADGFDVRLAEPVQTRALLGRRRSAKTDRLDARWLARLLAKEMLPESWIPPAQIQELRDRTRLRKALAEDRRRWGQRLHAYLLHEGWPCSRSNLLRPPGLRWAAALRLSEHARLQVDSLLAVMAALETQLDTVEGELRRFARADERCRALQSIYGIGPIMACHLLAEIGEARRFRRAEQITRLAGLDPVVDESGETRRRGHLAKAGSPHLRWALVEAAVHAHRATAPDLALYRATRQRRDTTVARLTVARKIGKRAFHALRELELHAA

SEQ ID NO: 475967 - protein, 385 aa, unidentified
MNQTSSCAISTNTLHCALELSKNSWLLAIQFPDREQPSLYPIEGGNTEKLMAKLAAARDCWAKVSGSPPAITVCYEVGYDAFWLARFLMGRSIECLVIDPGSLQVNRRGRRVKTDRVDVKMLLRTLIAWCRGERHVWSLVRIPSIEEEDLRRSHRERGRLVRERTAHINRIKGLLFGQGIRGINVKSQYKTLAVDNLVTGDGHRLPPRLAYEIAREIQRLAMVQEQIAKIERERDTAPTGCEATERKRHLLLQLKSIGPAISALLSREVYYRQFANRRQVGSFLGLAPSPYNSGAEERCQGISRAGSGHVRAIMIETAWLWIRHQPKSALTRWFVERTAGQSTRVRKILIVAVARKLAIALWRYVEHGMVPQGAILNPPTTGNAR

SEQ ID NO: 475968 - protein, 316 aa, unidentified
MSQFNVFVGIDVSKDRLDVHLLPDDKTWQFANDEAGCAELSERLRGLSGPVLVVMEAANVFWRLAATRLASAGLSAAVVNPRQVRDFAKATGQLAKTDAIDAQVLALFAQRIEPPVRALPSEQCQVAAELLARRAQLMGMRVAEKNRLATARAAKVRKDISTTIAFLEKRIGALDEEIDQWLKSTPIDQSRVNLLKSFAGIGERTAKSLLITLPELGSLTAKQIGALGGLAPFARDSGNKRGQRQIRGGRTTVRAALYMPAITAIRCNAVIRALYQRLINAGKHHYVAITACMRKMLVILNAMLKSNQPWKNPQEG

SEQ ID NO: 475969 - protein, 342 aa, unidentified
MESTTIAIDLAKSVFEIGISERVGHVGKRQRLSRSELGPFMANQPAATVVMEACSSAHYWGRQFKSFGHDVKLLPPLKVRPYVQGSKTDRSDVKGMLEAWRNSDIHPVPIKTESQQQLTALHRIRAAWVAERTKRINAARGILREFGIVFAQGASALAAHVQEVIEDGDAPLAMPLRQLLQELIVEIGQLETRIQLVEKQLEALAKQTAVVKQLRTIPGIGLLTATALVGFVGDVQRFRSGRHFAAYLGLTPREHSSGLRRRLGRISKHGDVYLRTLLIHGARAVLIAARRQAKPDRLRSWALKRLGDLGHNKAAVALANKTARIVWAVWKTGTPFRSEAVS

SEQ ID NO: 475970 - protein, 324 aa, unidentified
MQTIPIGCDISKDKIDLCVWLNDGKQEYLLIGNNQKGYLKALAEIDRLNIKPHICMEATGIYYEGFADFMAENGHLVSVVNPLKIKKFAESEFQKTKTDKQDARLIACYCLKMQPKADYIKPNPEQYAVRRNIALLKQLNADLNGIKNRIKVAKDEFVRQILTNQQKEIKKHIKEVRQHLAKITEQTAAGQVAEKLESIPAIGQTTALILAHYLNMYQFDSENKFVAFAGLAPGKHESGSSVRRPGKLTKYGNRTIKGALYMPAMVAYRFGYFGAFVNRLKNKGKPPKVILIAIMRKLAAIAWNLWKNGQTFDPARYGLNSKTV

SEQ ID NO: 475971 - protein, 384 aa, unidentified
MSKDKHDCFIVSSEGEVLADVFTIPNNMDGFHCLLQRIQDCTNSQDKIKVGLEATGHYSYNLLGFLLDNGLTTYVLNPLRTNLYRKSLSLRKTKTDRVDARTIASMLLSDVGLKPYTDTAYHNEELKSLTRYRFDKVKERAKLKSSIARLVCILFPELEKLVPTLHMVSVYALLEEFPGAKQIAAAHLTRLKALLETTSKGRYKRDMALEIRGAARNSIGFPMPAKSLELQHTIRHIRELDNEIAEIEEQIQAIMDELNSPITTIPGLGFRMAAMILAEVGDFTRFDSPDKLLAYAGMSPSTYQSGQLKNCYPHMEKRGSRYLRYAIYNATKYVCHWEPTFAAYLAKKRAEGKHYNVALSHAAKKLVRLIFAMEKSRQPYCLAA

SEQ ID NO: 475972 - protein, 347 aa, unidentified
MLYAGLDLSRHKLDVHVMNEAGEPVQVTTAPPDADGLRGLARQTAGYGEPVAAAIESMNGARFVHDQLELAGWQVQVADAQKVKGLAPLACKTDRIDAWVLAELARRELVPAIWLPTPEVRAERERARWRLHLVRHRVALKNRVHATLLAFGRPCPTSDLFGSGGRQLLDRLRLPEPWAGTTAAAVTLIDDLDEQVHGCERELRHLGADHAYVPLLMTAPGIAWVLGYTIAAELGDIARFPSPKKLCGYTGLCPRVYQSGTRDHRGPLAKNGPKYLRWALIEAATHAARHPCYHDHYQATKRRLGRQRGPAVARVEIARKLAEAIWHMLTTQAPFRPARPHAKALAA

SEQ ID NO: 475973 - protein, 343 aa, unidentified
MGEVSTIGLDIAKSIFQIHGVDADGAVVIRKRISRAKLLEFFTTLTPCLVGIEACPSAHYWSRRLQALGHTVKLMPPSYVKAYLKRSKNDANDAAAICEAVTRPSMRFVATKSEQQQCGLMLHRSRQLLVCQRTMLSNAIRGHMAELGIISAKGRNGTAELLKIVADEHDDRIPAAARFSLDVLARQYAIVRAEIVSIEKRIHTWHRSSEESRRLEEIPGVGPIVATALVAEVGDWKEFTSGRSLAAWIGLVPRQHSTGGKERLGRISKQGNRHLRWLLVAGAMAVIRYARQHGTKRPWLARLMDRRPIKVAAVALANKIARMAWAMMVRGEHFKEPKLLPTT

SEQ ID NO: 475974 - protein, 364 aa, unidentified
MTDCITWVGMDDSAIKINIAILQGQEINPRQELVIVNDPGGLGRLAKKLKSIPGEVRCVYEAGVNGYHIQRFLTKHGISCDVAAPSLTPRRTGKRVKTDKLDAKALARLYRAGELTSIAIPEKEQESLRDLVRGREDALEDQQRARHRLARFLMRRGLKYKPGKNWSLGHLTWIKKLRFEDDRDQMVLDEYRTALQEQSERLTKFQQRIEELAKQAPYQKRASYLMALKGIQALTAMTIIAEALDLRRFTNAPAFMAAIGVVPSESSSGEIERRGSITKTGNSHIRRVLIESSWHYQHACVAGKTLKKRREGLPAEVLEIARKCDQRLHKKFRHLVNRGKDRRKAAVAVSRELAGFIWALGRVA

SEQ ID NO: 475975 - protein, 343 aa, unidentified
MDQIIRIGMDTSKHFFQVHGVNAGEKPVLRRKLRRQDVVAFFSQMLPTEIGMEACGAAHHWARVLSGLGHKVKLIAPQHVKPYVRRNKNDGRDAEGLCEAMSRPTMLFVPVKTVEQQAALMLAGTREQLVARRTQVSNTIRGYAAEFGVTMSKGLDRIEPLLTRIAADESVPEMARELFVLYAADYAQLQLQVKAIDVKLLAWHRAHADSLRLAEIPGIGPIGASALVMKAPDPKAFRSGRDFAAWMGLTPKDHSTGGKTRLGKITRAGDERLRSLLVAGATSVIRWARCGRGRASPWLLALLTRKPPKLAAIALANKMARIAWKLLVSGQRYHAGGASAQAA

SEQ ID NO: 475976 - protein, 405 aa, unidentified
MKKIAGIDVHKKVLMVVIAEAASPEQIVRKDKFGTGRAELERLRVWLQQTEVGDVVMESTAQYWRPVWNELEPFFALHLAHAQSNRAPQGRKSDWADARRLVKRFAAEELFLSFVPEPEQRDWRTLTRARQALVRDHVHLQNQIEALLEQASIKLSSVVSDLFGLSSLRILSALAEGQTDAEKLAQLADPRLRCGQQTLVDALRGRFREVHRQLLDQALQRLAILSKQIAELSRLAAQRLQPYASTLERLIEVPGIGAEAAQEILAEIGPTAAAFSSSAKLASWIGVCPGTQESAGENHSGRCPKGNRYIRRVLCQVAHAAARTKGSHFEVMFRKFLHKGYNKAIWAVAHKLCKIVWIILHHGARYLESGVVNPKAVQRAIQLHLKALRRLGYVLPPSSTPTSQP

SEQ ID NO: 475977 - protein, 339 aa, unidentified
MVEVYVGLDVSDKSTHLCVVDPTGAVVWSGACATDPEVIARTLKARAAGLARVILETGPLSSFLYHGLIERGVPVICVCARHAKGVLSARVNKSDVHDAEGLAQMARTGWFKPVRIKAEATHMDRARLKIREQLIAARQAIAGQLRGLLKLFGLRLGQVSTPGKRGERLRLLFAQRPELEPIMAPLIESLQALEVQIALSTRQLAAQAAADPVTRRLMTAPGVGPITALVFKSSIEDPERFSRGQDAGAFAGLAPRRNQSGERDDKGRISRAGDPMLRRALYEAANVLLGRVKRACALRDWGLRLAQTKGTKRARVAVARKLAVLLHRLWLSQTDFRWA

SEQ ID NO: 475978 - protein, 452 aa, unidentified
MAKKREKRECKAVVLEPDASGIDIGAEEIYVAVPPDRDEESVRMFSSFTCELHALADWLQKCRIRTVAMESTGVYWIPLFPILEARGLEVYLVNARYLKSVPGRKSDVSDCQWIQYLHSVGLLRASFRPGMDICAVRSLWRHRASLLQMASEHILHMQKSLSQMNLQIHHVLSDITGASGQAILDAILAGERNPVQLAQLCNCRVKSPREKVAKALEGDYRPEHVFTLKQSLDGYRYYQKLIAELDREIQRLMQTLPSAIETEQEIPQRTKHSAFQRQGNDPCFDLRGQLYRIAGVDLTDIPGVSAVTAQVILTEVGPDLHRFRNASAFASWLGLCPENRVSGGKILSCKTRRVKNRAALALRLGANSLCRAKGYFGEFFRRMRAKLGTAQAITATAHKIARTLYHVLLTKEPYAETVFHKCDEHTRRRAERRLRKHAALLGFQIIPVNPAT

SEQ ID NO: 475979 - protein, 345 aa, unidentified
MEQHAGIDVSLKLSSVCIVDTSGKIVRETKVASEPEALIAFFKGLSVPVTRIGLEAGPLSQWLHAGLVRAGFEAVLLETRHVKAALSAMSTKTDRNDARGIAQLMRMGWFRAVHAKSVGSREVRALLVARKQLLSKLMDLEASMRGILRGFGLKMGVVTRKGFEARVRELSAGQAMLERITNAMLDARAALWREFEQLHREMLRIVRDDEICRRLMSIPGVGPLVAVTFKSAIDNPGRIVKSKSVGALFGLVPKKYQSGERDFSGSITRTGDESVRTALYEAANVMLTRTTRFSSLKRWALEVAKRRGLKRARIALARKLGVVLHRIWVDGTTFQWTKPNPAIAG

SEQ ID NO: 475980 - protein, 386 aa, unidentified
MLLEHIRRHAFSGVDVSGEATSYYWFPYFWQLAHDAELAACDLSLFLLNPRQVRWFKQSLPPDDKSDATDPFYIAERTRTRRPKAAWDPQDDWLPLRFYTRLRFHLAQALTREKNYYLVHLFLLHSAYRRGQPFSDPFGVTSQQVLGGERSLAELVQLPLEELAEQLDVWSEGKLDDPLETAQKLQQVAQESFPLGEPLLTPIQRVLDLSGAHIRFLEAQITQVEGWIAAEVQARHPEALLLDSIPGVGLVLAAGIVAEIGNLERFFQTPKWDKKHQRYRKKTLREVEDALAKLAGLWWPKADSGDFVAEDRHLAKTGNRYLRYYFVQAANGMRRHIPAYARFYGLKFRAATRHKHKRALVLTARKSIGLFVGLLHRKEAYRSKEG

SEQ ID NO: 475981 - protein, 363 aa, unidentified
MSYGSRGQTERTVGLDLGDKYSYFFVLDNESGKMIEEGRLRTTPDDLRRRFDSEEQMKIAIEVGTHSTWVSRILHDCGYEVLIANPRKTRLIYSDKRKTDKLDAKKLARLARVDPELLYPIEHRGEESQAHLALIRSRDVLVRSRTQLINHVRGVVKSFGARLPKCSAESFHRRIRDQLPQELEVALVDVVETIGSLTERIGDYERRIERVCKEGYPQETELLQQVAGVGVLTSLTFVLTLEDPDRFKKSRTVGAYLGLVPGKDQSGEQDPGKRISGEGDEMLRRLLVSSAHYILGPFGPDSDLRRYGEKIAGRGGKDAKKRAVVAVARKLSVLLHRLWITGEVYEPLHNARVSGALLGEEIA

SEQ ID NO: 475982 - protein, 371 aa, unidentified
MNSIVYVGMDVHKESYTICCYTFEEDKIQYQQRLDPDYKMVLKYLEQIGKHYPEGTEYVCGYEAGCLGYTLYHELMDHGVKCIILAPTTMAIRNTNRVKTDRKDASNIAKCLAFNTYSEVYVPTDEDNSIKEYVRMRDDKKKLLKSIKQQILAFVLRHGQRFEGGKTYWTIAHVKWLKSLKLDGVFKETLEEYLITYEYLTQKIERLDKRIEEFASGERYEEKVKKLGCLIGVSTHTALSLLVEVGDFERFSQAKKFSAFLGLVPSEDSSGDVKNRYNITKAGNSHLRRLLVESAQAYTRGAVGHKSIALKKRQEGNSPKVIAYADKANERLRRRFYKMTLSNGVKRNIATTAIARELACFVWGMMTNNVA

SEQ ID NO: 475983 - protein, 414 aa, unidentified
MNTTQENQTYWVGIDWGVEKHVVAVCDDQRRIVSRFAIETTLEGLHTLVARLDKFARVGGVAIETPRDPVVLRLLEEGYAVYPINPKLSHNWRKCVSVAGVKSDAYDAGLLALELSRRHESLQAIVPKDASAQEFLGLCGALRTLIDQRTSQLQRLCAALRRYYPAALDFWSDLGSPSSWAFLKKFPTPASLAKTRKSTLINFLRAHRIGLRPCWLERIEQSRQAAAWPVSPMAEGDKHVALACAAQLQALEPQIRALEKKVAEKGKAFEELNLIKSLPGAGKALAPAITAVVVNLEEDGDAGEQLRHMAGVAPVQDESGKRVKTVMRRRCNKRWRNVFHLFAWCSIRYSAWAKAFYKLCRERGDSYATALRKLADKWIRIIACMIREKRPYDEQEYIESLRKSGSPIYERLCG

SEQ ID NO: 475984 - protein, 365 aa, unidentified
MTIVDAVRPVTGGVDARLDLNVAPCPVTGGVDTHLDLNVAAALDPVGGLLGVAEFPTTLAGHRELLGWLSGFGPVARVGVEGTGSYGAGVARFLRASGVEIVEVDRPNRQARRRSGKSDPLDAVEAARAALSGRASGAAKSRDGNVEAIRALVVAKRSARSAKIQALNQIRHLSFTAPEQLRQRLAGVSRHHLAAHAAGLRPATGAGADPVITATKTALRILGRRVLALDEEKAGIDALLAGLVTQTAPQLLAVFGVGVDTAAALLVTAGDNPGRLRSEAAWAHLCGTAPIPASSGKVTRYRLNRGGDRQANCALWGIVITRLGNDPRTKAYMTRRLAEGRSKPEVIRVLKRYVAREVYHRLPRP

SEQ ID NO: 475985 - protein, 433 aa, unidentified
MAGIDVAKAKADVCTRLPPARDGGRRASKVEEVPATAGEIVALAGRLLADRVQLVVMEATSDYWRIWFYLLEAAGLSVQLANPSHARQLAGRPKTDRLDAQWIARLAEMGLLRPSFVPPPEIRALRDLTRTRLQLARDRTREWQRLEKLLEGALVKLSSAVHSLARTKTARDILEAIAGGQRDPKALAALAHGGVKGGRAAIERALDGMMPGGQHLMLIRIHLDHITFLDRAVAAVEDEIGAALDAIPAARGIDAGGGTGPGAGRGPDAAVLPAAERLAEIPGVSPKLAMAIIAETGLDMTRFPTAAHLASWAGLAPVARQSGPRNRKPGKGQGDAYLKGYCTQAANGAAKTETFLGERLRRLSRRLGGNRAKCAVARSILVIIWHLLASPETRFADLGPDWHARHGDRDRKIQAHLRQLRALGLDVTLTPAA

SEQ ID NO: 475986 - protein, 327 aa, unidentified
MMRQPGSYTPKIKTQVALDVSSKALDVHFKSDGQAFSVPNTEEGLNSILKIFTAYDVSLVLMESTGGYEDLAACFFQAHGFDVAVVNARHARNFARAMGKLAKTDRIDAAVLADMAFMIDASHDRDRYIKPLTDEQRKRLSVMTVRRRQVVGLISTEKQRLTRADDWTRASIKKTIKALTTELRHIEQQISAHVKKNFVDLSKMLLSIPGIGEQAMTILIGEVPELGKADRRTISALIGVAPFNHDSGNFRGRRRIWGGRQSVRNVLYMGIISATRFNPVIRSFYNRLVSAGKPKKVALIACMRKLLTIINAMMRTGQPFDVALHGV

SEQ ID NO: 475987 - protein, 363 aa, unidentified
MLYLAIDQHRKQLTVNLRQEDGSVVLRRQVSTRWPELRGFLAEVHTRSAAEGGYLVIVEVCGFNDWLLELLREYGAREIVLLHPQRPSRQKTDRRDANRLGELLWVNRARLLAGQRVQGLRRVVIASAADQQDRRLTSLRWRVGRERTRLLNRIKQLLRRHNWEQHSPAKGIRTQKAQRWLEQLALPPLERWELDQLLRQCAAVEAERQALQKQIEQRQAEHALAPLLATLPGAGAFTSLALACRIGNIERFPRPRSLANYWGLTPGCRNSGEARQRIGSITKEGSALARFLLGEMVLHVLRRDGRLRAWYKEIRRRRGSKIARVAVMRRLATIIWHMVKHQQPYQLGGRPAAPAEATMAAES

SEQ ID NO: 475988 - protein, 387 aa, unidentified
MPQPNDLSRSLVALDQDSTLIAVIEMGQASWLVAGIVPGVNRHPLKKIATDQEQLLQVLRRWAKEAETTGRMIKRIAVAYEAGRDGFWLARWLRARGVEAYVIHPSSVPVSREHRRAKTDRLDTELLKRAFLGWLRGEPDHCNMAAIPTLTEEDAKRPGRERESLVGERTRIINRIKGALARLGIREFKPMSRSAPQLLEALRTPEGAALPPNTLAELRRDMARLSFVKQQINEVERARLERLQRAPGERGNAMVHLLTRVVGVGVETADMLVQEIFSRNLRDRKAVARYAGLTGAPDESGKKRRERGLAKSGNARVRRGMLQLAWGFLVHQPDSVLAKWYRARTADARGVTRKTMIVALARKLLIALWRLAATGEVPEGLALRAAA

SEQ ID NO: 475989 - protein, 415 aa, unidentified
MTMSCGIDWSEDHHDVAVVDAAGHLVAKRRIGDDAAGFAQLLELLAEAGDCPETPLPVAIETTRGLLVACLRATGRPIYAINPLAVARYRERHAVSGKKSDHADAVVLANILRTDRATHRPLPADSELVRAIAVLARAQQDAVWDRTQAHHKLRSLLREYYPGMLAAFRTARGGILRPEARALLAAAPTPADAARLTQAELVGLLRQAGRQRRLATQAAHLQAVFAAPCLRQPPLVEQAMGRHALALLGALDTACVNAEELAAATRQAFDQHPDAKIITSFAGLGPLTGARVLAELGDDRSRFAAAKAVKAYAGAAPVTRASGKSLHVSHRRVKNQRLATAGYQWAFAALTASPGAHAHYQRRRAAGDAHSAALRNLFNRLLGCLHHCLQTHQPYQEQAAFTRLNGTNGRPRLDA

SEQ ID NO: 475990 - protein, 360 aa, unidentified
MHYRTFVGLDVHKSSVTACAYNPVTLKEERRTFGYSPTAIAKWAGGLEGPVKVVYESGFCGFSLCRSLSELGVECHIAAISKTVRPKGDKVKTDRKDARFLAHQLASANLSLIVVPDVETEGMRDLSRLRSRLRDELTAAKHRVSQMVLRYGFRFEGTEKNWGARHRQWLGGLVMPTAHAQAVFERCLEEVCRLEEEKSRCEQAIHGLCKAGPLAAAAAVFSLIKGVSETTAFCMLVEIGDMTRFRSAGAFCAYLGLVPSEESSGDKTSRGRITKTGNAHARKALVQAAWAQNRVKSSYLQLPEGTGPELARAVRAINVRLKRRREHLLKANRRKSCVANTAIAREMACAFWALARLLAA

SEQ ID NO: 475991 - protein, 343 aa, unidentified
MEYFAGIDVSLEQSSVCVVDGAGKIVREAKVASEPEALVGFFRGLETGVTRIGLEAGPLSQWLYAGLVAAGFEVVLLETRHVKAALSAMVIKTDRKDARGIAQLLRMGWFRPVHAKSPAAQEVRALLVARKLLQTKLLDVEFSIRGILRGFGLKMGEVSKGRFVARVRELAAGHAMLEQITEPMLRAREALRTEYARLHGEMLAIARPDPVCRRLMTVPGVGALVAITFKSAVDDPGRFARSRVLGAHFGLTPRKYQSGETDVTGAISRVGDAMVRMALYEAANVMLSRVTRFSSLKRWALDVAKRRGLKRAKDALARKLATVLHRMWVDGANFHWGKQAAAV

SEQ ID NO: 475992 - protein, 416 aa, unidentified
MEVIVSRCAGLDVHKNTVMACVRGPGPNGGRTSTVRQFRTFTAGLRQLRDWLVAEQVGQVVMEATGVYWKPVWHVLDATPGLALMLVNAHAVKNMPGRKTDVADAVWLAELGECGLLRPSFVPPPVIAQLRDLTRYRKKLIEERARETQRIQKLLEDAGIKLDSVVSDILGVSARQMLEALIAGVRDVAALAELARTRMRPKIPQLRQALEGRFGAHHALMLRMHLEHVDQLSVSIDRLDSEVDRVIRPFSSALQRLITIPGVGRRTAEVIIAETGADMRRFRTAGHLASWAGMCPGNHESGGKRRSGRARKGNAALRAALCEAAWAASHARSGYLPAQYRHLLRTFGKKGQTRAVFAVGHSILVIAWHLMAHDRDYADLGGDHFTRATDAEARERYLVRQLEALGHKVTLEPAAA

SEQ ID NO: 475993 - protein, 362 aa, unidentified
MAKVRSWVGLDVHARSVLAVMIDGESGELRSRRLSGATSEVVEFCCSLPGPTRAAYEAGPTGYGLARALHAARVGCVVAAPGKIERPAADKVKTDQRDAERVLRLLMIDALHPVRVPTSEEEALRDVVRAREAVRGDLMRARQRLSKLLLRHDVRYEDTASAWTVAHRGWLTGIDLGERGAQITLLEYLGAIDAIVIRRDALEKTIGELIPGSPWEQTVARLRCLRGVDTLTAVGLCAEVGEFTRFEKPRQLMSYLGLTPSEDTSGEKRRQGAITKTGSRHARRLLVEAAWHYRRPPAKGQTLKRRHEGQPAHIVEIAWQAQRRLHRVWQRLDTQRGKRRTIVAVAVARELTGFCWALVNAD

SEQ ID NO: 475994 - protein, 352 aa, unidentified
MAVTIVETRAEIRAITGGVDTHADVHVAAALDPIGGLLGVKEFPATAAGYGALLSWLGGFGTVCLAGIEGTGSYGAGLARHITTAGVRVVEIDRSDRQDRRRQGKSGSLDAVSAARAAQSGRARGASRGRDGAVGAIRALMVAKRSAAGERTQTINQARALILTGPDDLRARFTGHTAAALVAELASLRPRPGSTVGYATRIALRELGRRAEFFDAQLERPDELIVPLVRAHAPSLLALYGVGPHTAALLLIAAGDHPERLRSEAAWAHLCGAAPIPASSGKTVRRRLNPGGDRQANHALWRIVFTRLGSDPATRAYAEHRTAEGKSTKEIIRCLKRYVAREVYPHLRTTVG

SEQ ID NO: 475995 - protein, 366 aa, unidentified
MRKTEDLPRICVGVDLHKLQFTVHAVNEETGEMVLNGVYRTNKEGYKMFCEELHTIESEQECSIELAVEATGNARYFKNQMESEGFGVVVVNTSKFKVITMSTKKTDANDAATLAFYLSKDMLPESHLCGQTNEEIRRMLKTRSILVSSTVKIKNQIHGMLLGYGIETKTAQLQSKKKRQELINDLADHNFSQFTASSLEVTLNILDEIYAQVKKIEEQIQEMTRNDETIELLMTMPGIGFVGATTIASYVDDIERFHGDFKKFSAYLGIVPSVHNSADSVRMGHITKRGPQELRTAFVQVAMGIIRQPQKTSEWKLMKDYHTMKTSKGSGRAIIALTRKVARIVFAMLNNREPFRPEQMMKSSVA

SEQ ID NO: 475996 - protein, 347 aa, unidentified
MKFYTKQHKYYCGIDLHTKKMFVCILDAEGNIRVHQNIKTDPEAFLRIITPFREDIVITVECMFTWYWIADLCVDQNIPFVLGHALYMKAIHGGKAKNDKIDSHKIATLLRGGMLPQAYVYPARMRATRDLLRRRNHFMRKRAELFAHIQNTRSQYNLPDPLGCIAKPQNREGIAERFNDSSVQKSMAANLEMIQSYDRLLTQLEHDIIASAKEHDLRSYALLQTIPGVGRILALVILYEIESIERFPQVQDFVSYCRLITSIKESNGKKYGSSGKKIGNAHLKWAFSEASVLFLKGNEPGKKFLERLTRKHGKAKALSILAHKLGRAVYFMLKNKEAFNQKKFLGL

SEQ ID NO: 475997 - protein, 368 aa, unidentified
MRKNSINFGSARASFIGLDLADKQSTFVGIDGRGRLVEEGKVTTDAGGLQREFADRQRCRIALEVGTHSPWVDRLLREMGHEVITANPREVALIYRNKRKSDKLDATTLARLARSDPELLHPVKHRGKQAQIDLAVLRARDGLVAARTQLVNLVRGAVKSYGERLPKCSTESFPAKAAAALPADLSPALTPVIEQIAALSERVRQYDQEIERLITERYPEALGLQQVKGVGPITSLAYVLTLEYPGRFPTNRDVGAYLGLTPGRRQTGESDPEMHITKAGDVFLRKLVVQAAQYILGPFGVDCDLRRWGLRLAGTPANADGQPRKGSKQRKKRAIVAVARKLAVLLLALWRTGEVYDPLRWASRKEAA

SEQ ID NO: 475998 - protein, 321 aa, unidentified
MNTTMPLGIDVSKAKLDCALWLGSKYRTKTFANTPEGFSRLSEWLHQHGADQVHACMEATGIYWEAAALYLADAGQRVSVINPALAKAHGQSLGLRSKTDAVDAKLLADFCREKQPPAWTPPSGAERRLRALVLRHQSLVEMQTQEKNRCESLREEVRTSVETHLAWLAAELERIEQAIAKLLDDDDHLRGQRELLASIPGLGERTIAVLLAYGVSGERFQSARQFVAFAGLSPRLHESGSSVRGKPRLSKIGHAFLRRALYMPAMVTLYKTAWGQRFRQRLATHGKPPKLIIGAMMRKLAQVAFGVIKSGRPFNPAFHGA

SEQ ID NO: 475999 - protein, 324 aa, unidentified
MSSHEIVGIDVAARKLVVIGERLALAEYENTAAGRSKLVNALSRSPQPVRVVLEATGMYFLDLACELAAAGIAVMVVNPKATHHFAEAILQRRKNDPVDAAMLREYGRRMDFVSWQPPRHELFGFRALTREVQALSKTVAAARNRLHAITATQLAPAVLIGALERQIAHNQALINELVAAAVAQTESDPELARLLARTDSVPGFAAKAAVLVIGELSVLPPMTARQWVAQAGLDVREETSGSSLARRPRLSKRGNKRLREALFYPALTAARCCPAAAAFVDRLVAHGKTRLQAIVALMRKLLHGLHAMWRNDEDFDAEKLFAPA

SEQ ID NO: 476000 - protein, 456 aa, unidentified
MPKPKHAQRGSRISPTIRVLEPNAAGIDIGATEVYVAIPSDRDLRPVRRFSTFTDDLNCLVDWLQTCGVDSVAMESTSVFWIPLFQILEDRGFRVCLVNARHVKNVPGRKTDVSDCQWLQYLHSVGLLRASHRPPQTICAVRSICRHRESLVQMATVHIQHMQKALDQINLQLHHVISDITGATGLAIIDAILRGERNPEKLAGLRDGRIAASRETIARSLVGDYRHEHLFTLRQSLEAYRQYQQWITACDGEIERQLQALPGNLANDQKALSKPKDRHKPRRNELRFDLRGHLYRIFGVDLTEVPAISGLTAHTLLTEVGSDLSRFPNPAAFASWLGLCPDNRTSGGKILSVATRKVKNRLAIALRMAAQSLHRSQSYLGQYFRRMRTRLGTPAAVTAAAHKLARILYHLITTRQPYQEATFAEMDQRARKRQFLRLAKQAANFGFQLTPVGSVP

SEQ ID NO: 476001 - protein, 312 aa, unidentified
MDAIVIVGIDVSKDRLDVAVRPGGEAFFVRRDGDGIAALIERLGPLGPAAIAVEATGGFETVVAAGLAGAGLPVVVVNPAQVRAFANALGKRAKTDPIDAGVIAHFVEATKPAIRPLPDEETQLLADLVSRRRQIVAMIGAERQRQKRAPARIARSIVRLVKALEKELASLDHDIDDAVRGSPAWRDKEDLLASVPGIGKTIARTLIAELPELGSLDRRQVAALVGLAPWTRQSGQWRGKSFIGGGRAAVRAALFMGAMVAARHNPTLKAFRDKLVAAGKPKLVAIIATARKLVTILNAVIRDRQPWREQTA

SEQ ID NO: 476002 - protein, 381 aa, unidentified
MDQQLIRQCVGIDISKESFTACVCSYYRSGEEQLTEVVEFKNQKTGFNQLVKWSRKITSASVPVGFVMEATGVYYEALAYHLHRLNQPVSVLLPNKVKYFAKSWNVKTKTDIIDARIIARMGAERKLSLWEPPLPIFKQLRDLTRAYSELMKEKTAFSNRLHALNSSYEPLALIVKSNKSIIKKLDEQLVRFKAEIEKVIYSESWLAEKVKKVLTIKGVGLMTVAVILAETQGFEFVDNIRQLCSYAGYDVVQRESGTSVQGKTRISKKGNSWIRAALHFPALVASRHNENLKNTYLRINEKKPSKMIGATALQRKILILIYTLWKNDTVYDEAFEKKRKADRSEVHKKTLRQNKTKAGRSINNLPAQDELKAKDLLSSLV

SEQ ID NO: 476003 - protein, 338 aa, unidentified
MKTYAGIDLHSSNNYIGVINAKDKRLYSKRHDNRIEDVLKVLGKFKASLQGVVIESTYNWYWLVDGLMDQGYTVHLANPNAIQAYNGLKHTDDKWDSFWLAHMLRLGILPEGYIYPKHQRPIRDLLRRRLMFVRQRTSQILSLQSMITRNRGLNFSGAQIKRFRDEFIDKLFSDRHLVFTAKRNIATIRFLDQIVSEIEIEVASQVKLKKEFISLLTTPGIGNILGLTIMLEVGNIGRFPKAGNYSSYCRCVESKKTSNGKKKGENNKKNGNRYLAWAYVEAANHAIRCCPKAQKFFQRKMAKSERVLATKALANKLTKATYYIMRDQVAFDEDKLFG

SEQ ID NO: 476004 - protein, 427 aa, unidentified
MVAAARNFRRGKRMNRQQWYAGIDWATESHHVFLTDGSGRKIGEKIFKHSGAGLAEMAAWLMAASQAKEPGHIQIAIEVTHGPVVETLIERGFTVHAINPKQMDRFRDRFTLAGAKDDSRDAEVMASALRTDPRCFRLLAAPDPVIAELREWSRIAEDLSAERNRLTNRFRQQLWRYFPAMLELESDLGAEWFLDLWEAAPTPCKAARIRETAAAKILKRHRIRRFAAGHVVAVLRKAPVQVAAGTVKAACAHTETLIARIRLVNTQIKEAQRHLDALTARLIPTEDSEAGQQKQHDVEILASLPGVGRIVLATLLAEAWDALLRRDYAALRSLTGVAPVTKRSGKSCIVIRRQACHDRLANAMYHWARIAVQYDAKSKAKYTALRGRGHSHGRALRSVADRLLNVACAMLKAGTLFDPSLKTQNAS

SEQ ID NO: 476005 - protein, 285 aa, unidentified
MSRMKRLAVQQLDVSKDYLVIGLDLAKTDTAVIAITTDGELYAIDRLKYSDLLNQARQLGSTVFAMEPCNGMTYLVHELEELGHECRVINGEAVKDYVKSHFAGQKNDLNDAQAIAFLAQDEMLKFIRVKAKSEMTMQTLQVVRQQLIKQRTCSVVCIKGICQNYGLVISKSIMSEAKIRPIIEETQKLPDEIKEPLKRLLRNAARFTIDIKQIDKAIEQGLKGNETAERLLEVPGLGPQCVSRLLTTIGDINRFEGPKNLAAYYGLVPRSHTTGHNEKMGKATD

SEQ ID NO: 476006 - protein, 339 aa, unidentified
MLYAGLDYHLRTSDLCIVNEDGKVVKRQRIKGRFGEVAEELSRLDQPVEVVFEATGGYGPLHEKLSQVARRVVMAHPAALALIWKSKRKNDRIDAQKLAKLLYLDAVPEAHVPAAATRQWRRLIELRRSLVRRRAALKNQVHALLRTCGIATPSTAKSLFGRQGIAWLLQQELDEASTLERSVLIEQMRSVKEQLNAVEKTLAKTSDQEPRVTLLKTIPGVGRRTAEAFVAYVDRIDRFGSSGKIGSYFGLVPCEDSSAGRERMGHITKQGPPAMRQLLVEAAWMAIRKSPTLRRRYEQMCHEDPDRRKIAIVGLARHLSQVMAAMLRDNQPWREEMAS

SEQ ID NO: 476007 - protein, 340 aa, unidentified
MEVATIGLDISKHVFHIHAVDGQGQVAGRQRLRRGEIVSFFSSLAPCLVGIEACATAHHWAREIRQLGHDVRLIPPAYVKPYVRRGAKNDAADAAAICEAVSRPNMRFVPIKSVENQGFLMLHRARGLLVRQRTMTACAIRAHFAEFGIIVGQGRQRVDGLVGLLDDEELTLPAHARIALAVLVNQLKELDRQVEAIERELAQIQRVNPMAKLLSSIPGIGPITATALAATVPDATMFRSGREFAAWLGLTPKQNSTGGKDRLGRITKQGDSYLRHLLVIGARNVVRYPKARSRVGGGWIEALLERRRPMIVAIAVANKLARIVWAMMTTGEFYRPKLAA

SEQ ID NO: 476008 - protein, 356 aa, unidentified
MKYYTSTTGYNCGIDLHARQMYVCVMDRQGKKLVHTNVKDNDFNFFLKLIEPYKHDLTVCCECMFGWYWLADACQAAGLTFVLAHALYVKAIHGGKNKNDRIDSEKLTHLLRSNLIPPAYVYPAAKRPLRALLRQRIFYVWRRSELLARIYSHQLAHNRTLARQTSRRNRDPWEQQLLATEDHPLRQIALKNDLAMIKHFDHQIFQLEEELQRQTKAVACREYALLQTVPGIGEALGLTILYEVGDVNRFPTVKDFLSYCRLVKGTVASAGKIKGLRGAKLGNPYLRWAFGEAAVIAKRDHQVIGPLAQRLEAQMQGNKFKANTVVAIKLARAAYFMLKNQTVFDPERLVATLAKN

SEQ ID NO: 476009 - protein, 356 aa, unidentified
MPTQVTKKIDFTGKQLFIGLDVHKKSWSVTILVDGTEHRTFTQPPDPESLISYLHRMFPGGEYNSAYEAGFCGYGIHRRLNQLGIKNIVINAADIPTSQKDKLQKRDPVDSRKIARSLEKGSIHGIHIFDRELEELRSLNRTRFYLMRDLRRSMTRIKSFLQYYGESIPMEFDNNQWTLKFVSWLKQVKMKTLSGQDAFSNLISSYEYHRSQLLTLSRQIRERIREYDRELYTLLKTVSGIGPLTASALITELGDINRFKNIDQLGSYVGLIPRIRESGETTYTGGITFRCNSFLRTLLIESSWQAIRMDPALMQYYHSHLINNKGHKVVIKVARKLLNRIRYVMKNRQPYVTGVI

SEQ ID NO: 476010 - protein, 338 aa, unidentified
MNKFSGIDLHSNNSVVVVSDEADRIVYQRRLPNDPVQIRAALAPHREDLVGVVIEATFNWYWLVDELMEDGYCVHLANPAAIRQYDGLKYSGDFADAAYLAQLLRLGLLPEGYIYPAQGRQVRDLSRKRMQLVQCRTAQILAIENLFSRQTGGQMQGERVKRLDEAQVSGFGFAPDVTLAMQANLAVMQTLQEEIGIIEKRLMERVKLHPDYALLNSVPGIGPILATTIMLETGTISRFAEVGNFSSYCRCVDSRRESNSRKKGEGNTKNGNKYLAWAFVEAANFAIRSCPEARRFYERKKRARNRIVAIKALAHKLARACYHMLREHKPFEIARCFG

SEQ ID NO: 476011 - protein, 418 aa, unidentified
MNKHNNSGKKSEPTLKQAKPRGPIRRDTKDVLAELVGKLKEKLDPKKLAATSAGEKHKRGELRPNLDRLTVGVDLGDQWSHYCILSLEGETLAEGQLRTTQEDLAEFFQALNAARVVFEVGTHSPWVQEVIGGCGHEVLVANPRMMDGSKRRKRKNDRIDANKLARLGRVDPQSLHPIQHRSREVRQDLVVLRARDALVAARTELINATRGLVKSMGTRLPKCSSPSFAEKVEGTVPAELRDALLPLVRMAAALSDRIQEYDEKIEELGREKYGHTALLRQVKGVGPITALAYVLTLENPERFVKSRDVGPYLGLVPKQEDSGEIQPQLGISKTGDTMVRKLLVGSAHYILGPFGPDTDLRRYGLRLCERGGKNAKKRAAVAVARKLAVLLHCLWVSGEVYEPLRQGTSATIAPAVAA

SEQ ID NO: 476012 - protein, 340 aa, unidentified
MQITTVGLDLAKSVFQVHAINASGEVVVRRALRRAQVLPFFGKLEPCLVGIEACGTSHHWARELVRLGHAVRLMPPAYVKAYVKRGKTDAADAEAICEAVARPTMRFVAIKSVDQQAALSLHRARDLLVRQRTQLVNLVRGLLAEFGVAIPRGITNVLAFARRLAAGEAPEVPDLAAKVVGALAAQALAVQDQVHRLERELMAWYRSSTLARRIATVPGVGLLGATALAATVTDPGQFRSGRQFAAWLGLTPRLNSSGGKERLGGISKMGDRYLRRLLIVGMTSLVRQAKCGPGTTDPRLAQLLARKPARVATVAMANKAARVIWAIMTRGGVYRAPQAA

SEQ ID NO: 476013 - protein, 411 aa, unidentified
MDVFCGIDWAEDHHDVAVVDRDGRLLASQRISDDAAGLARLLELLAGHGDSPDDPVPVAIETPRGLLVACLRATGRTVYPVNPMAVARYRDRHSVAGRKSDKGDAAVLANVLRTDRHAHRPLPADSELAQAIAVLARAQQDAVWDRTAAHNKLRSHLREYFPGFLAAFAAARDGIMRPEARVILAAAPAPADAAKLTVAQLRALLRKAGRSRGIDAEAQRLHETLRKEQMRQLPLVEQAMGRQTLAPLRQLEAACASASDLEQAAAESFNQHPDAGIITSFPGIGTLTGARVLAETGDDRSRFQDARGLKAYAGSAPITRASGKTRSVTHRKVKNNRLAAAGYTWAFAALTASPGARAHYDRRRDAGDRHTAAQRNLFNRLLGCLHHCLQTRQHYDETTAFPNQATGKTAA

SEQ ID NO: 476014 - protein, 408 aa, unidentified
MHYVGVDIAKRTHCAAVLDDGGSLVAEPFIFNNDSQGFAFFLMKLGSIGAHCDECTIAMESTGHYWFALLDFLIAHGFEPIVLNPIQTDAYRKVDNVRSAKTDVIDAVLIADLVRVKRFAPWSRGDELCDALKQLTRYRFTLVTQSTRVKNKTTAVLDRVFPEYAAIFTHPYGPTSKAVLQRCPTPQQVMRFGVHRLTRIIETASNGRCGRNYADTLIAAARTSVGAAHSSDALALQIKLMIEQLEFLERQMKDLDEEIAVILDETPGKWLTTIPGVGPTLAAQITGEIGDPWRFSSARKLVAYAGMDATVSQSGESEMAGHMSKRGSAQLRYALVRAADGVRRLDPYFKEYYERKLREGAHYFCAISGVARKLAGVVLALMREERAYERGRRSTRTNNECDSEVLAH

SEQ ID NO: 476015 - protein, 412 aa, unidentified
MQVVHPVCCGIDVHAKMLVACLILANGEKKKRTFSTMTAELLQLRDWLVAVQCTHVAIESTGVYWKPVFNILEDALTVILINPEHTHALRGRKTDVKDAEWLVDLLRHGLLQPSFIPPPVIRELRELTRYRESVIREQSSVANRIQKLLESGNLKLGQVASDALGVSGRMILKALAKGESDPRKLAALARGKLKEKSLSLEQALQGRLTVNQRFVLGELLSRWEQLEAADARVTSEIDKYVQANPKLARARELLDSIPGIGPRVAEVIMAEIGIEMASVFADAAHLASWAGMCPGNKATGGKRLSGRTRKGNTYLRSALVQAAWGASLKKHCYLSSQFHRLVKRLGRKKALVAVGHSLLVIIFHVLQNDQTYTELGGDYFDRRHVEQQRDYYVRRLQLLGLKVTLEKLPQAA

SEQ ID NO: 476016 - protein, 431 aa, unidentified
MLKINPLSTLYVGIDVSSKSNYVCALDFFKNKYISSSFANNQPGAEELALKILECLKEHSDLTTVVAALESTSVYSIHIANYLSSCEELMRFKPYVFVLNPKCTANYKKSYIGLGKSDPVDAFVVADYARAGNIDSEPWRGSQFLALKRLTRHRLHLVECMTREKTYLVSNLYLKFSELQMLEGDDQPFCDIYGATSSSVLMEYLSPEEILNSSEEDLIAFLAEKSRNRIKDISKTADLLKKAARDSYRLDKALYEPLNVSIASSFNCIETFKREIKVIDNAIEKEIKGLNPNAFIILQSIDGIGPVFAGGIVAEIGDITAFHSSDALAKYAGLTWKSNQSGDFDGEDTPMIKAGNRYLRYYLGEAANSMRKHNVEYGTYYRKKYNEVPKHQHKRALALTSRKFVRLVYGLLARNQLYSGVSLDTSIKDSN

SEQ ID NO: 476017 - protein, 367 aa, unidentified
MAKRSTTVGLDVQKETIDVVVAEPGAQGEVRHFGTIGGDLRAVDRMVKQLQGGGRRLQFVYEAGPCGFHLYRHLQAQGLECTVVSPSMTPKRSGDRIKTDRRDAEALARLHRAGELRGIYIPGPDDEAFRDLVRAREDAVTSQSRARHRLKALLLRHGYRYEGRAAWTFRYRQWLSNLKFATAAQQIAFQEYIDTIGEAERRVERLTEQIRVLLPEWKRAPVAAALQALRGVSMVTAVTLVAEIGDITRFSNPRELMAYLGLVPMEYSSGPKTRRGAITKAGNGHVRRVLAEAAWAYRGQARVGQALMWRQNGLPRPIIDIAWKAQLRLTGRFRRLAARGKSLPKVATAVARELTGFVWDIARHAAA

SEQ ID NO: 476018 - protein, 324 aa, unidentified
MQVTTVGLDLAKNVFHVHGVTHDGQVAFNRPLRRAQVLSFFQRFEPCLVGIEACASSHHWARELSKLGHTIRLMPPMYVKPYVKRGKSDAVDAEAICEAVTRPTMRFVEIKSQEQQALLSLHRARDFVVRQRTQLINMLRSLAAEFGITIARSVARAIDFAKGVIEGPSEDLPELAWDVLRILSRQLVELHNRLRWYEITMRIQARLSRQAQFLQTIPGVGPVTASAVAATIGSGHQFRSGREFAAWLGLSPRNHSSGGKERLGKITKMGDRYLRQLIVVGMTSRVRQVTNHPEHADPWLADLLKRKPARLATVAMANKTARIM

SEQ ID NO: 476019 - protein, 410 aa, unidentified
MEVLYPHCAGLDVHKDSVVACVRHMAGGAVTREVGTFKTMTTDLLAMSEWLSAEGCTHVLMEATGVYWKPVWHILSDGDFALTLANAAHVKNVPGRKTDVGDATWLADLLAHGLVRASLVPDAATQEQRGLLRTRKQLVRERSSHVQRLHRTLEDANIKLDSVISDVAGLSGRAMIEALIAGETDPATLAGLAHRRIKAPPETLREALRGRVTSHHRFLLALHLKQIDALDEAVAGIDQEVDAHVEPFRAAITQLKTIPGVGDLGACVILAEIGHDMSRFPTQGHLISWAGLCPKNDESAGKRRCNRMRKGAPWLKTTLIQCAWAAARKKGSYLQAQFQRLRARRGAKKAIGAVAASMLTAAYHMLKDGTFYQDLGGNHFDRRSNGAQTKRLLAKLQSLGYEVQITPSNV

SEQ ID NO: 476020 - protein, 343 aa, unidentified
MQTITTIGLDIAKSIFQVHCVDASGQVVIRRQLKRRHVLAFFQKLPPCLVGIEACASSHYWSRELQAVGHTVRLMPPAYVKPYVKRQKNDMADAEAICEAVTRANMRFVPTKTPEQQSGLVLHRTRHLFIRQQTSVINAIRIHLAEFGVTAEVGRKGIEELLRVIADPSDKRVPDAVRACLAALGNQLLSLKKQILDFDRMILAWHRSNQTSKRLNCIPGVGPLLATALVANVADPKAFQSGRNFSAWIGLVPKQHSSGGRPRLGSISKQGDRYLRGLFVAGALAVIRYAKLHGTKYRPWVAALLERRPTKVAAIALANKLARMAWAMMAKGERYNYPASLRV

SEQ ID NO: 476021 - protein, 403 aa, unidentified
MNSVGIDISKGRSTIAVMRPFGEVVISPFEVRHTGSELSKLARQLKSLDGETRVVMEATGNYHASVAKLLHDAGLYVSVVNAKLVHDYGNNELRRVKTDRKDAVKLANYGLDRWLTLPRYIPEEDTRLLLKNCYRQYRQYSKVQTVLKNNLISLLDTVFPNANRLFSSPIRGDGSEKWVDFVAEFWHCRCASEKSERAFTSKYLRWCRKHGYNFREAKAHTIYAEASGHIGVMPKSETTKLLVKQAVSQLRATSTALAALKQEMQSLASVLPEYPVVMDLFDVGPTLGPQLIAEIGDVRRFYSKKALVAYAGLDAPPNDSGDVTGRHKSMSKIGASSLRRTLFLVMSVYLQTAPLDEPVCQFMDRKRAEGKLYRVYMMASANKFLRIYYATVKAYLESLEHTA

SEQ ID NO: 476022 - protein, 410 aa, unidentified
MDLLHSRCAGLDVHRDTVVACVRVQVEGRTSNEVRTFGTKTGELLELSAWLSDREVTHVAMESTGVYWQPVWHILDGEFTLLLANAAHVKNVPGRKTDVNDATWIASLLAHGLIRGSFVPETPIQELRMLTRTRKQLVRERASHAQRVDKVLQDANIKLGSVLTDIMGASGRAMLLAMIDGVTDPEQLADLANTRIKASREDLVAALRGKVTANHRFLLKLHLGQVDALGATIAEVDKEVGERIEPFRDAQRRVTQIPGIESVAAAAVLSEIGVDMARFPSAGHLISWATLCPRNDESAGRRRSTRVRPGAPWLKPLLVQCAWAASRTRGTYLRAQYLRLKARRGPKKAAVAVAASILTAIYHMLKNGTEYMDLGPHHFMKDRTRTANQLIRKLDRLGFDVPEIRDRMTA

SEQ ID NO: 476023 - protein, 320 aa, unidentified
MNAEIFVGVDVCKAWLDAAQVSSPLKDAPGELTSRVSNDEAGRAVLVKQLQRLAPTLVVLEATGGFEAAMASELCAAGVAVAVVNPKKVRDFARSIGVLAKTDRLDAQVLAKFAQATRPQVYALPDETQQEIIELVDRRAQLVSMRAQEKNRLATVKHVARTSVRHHIEWLDKRIKEIDKDLDGRLKDSTIYQPKYELLDSVPGIGRVTISMLLGRLPELGSLDRKRLAALVGVAPFADDSGRRRGQRYIQGGRADVRSTLYMAVFTARRCNGPIKALYDRLKAAGKAYKVAMTACMRKLLIILNAILKSGQPWKQIESA

SEQ ID NO: 476024 - protein, 355 aa, unidentified
MSSEKYIGLDVHQATISVAVMDSQGKVVMESILETKASTLLEFFAGLRGSLFVTFEEGTWAAWLYDLLKPHVTEVLVCNPRKIPLLKQGNKSDKIDARKLAERLRLHDLKPVYHGETGVRMLRELARSYLTVVKDLSRVMNRLKALYRSWAIPCAGRDVYYTRHRSQWLEKIPEAGTRRRAEQLYQQLDMLQHLRQQARRELLAESRKHAITAKLRKIPSLGPIRCALAVALIQTPHRFRSKRQLWTYSGLGLETRDSGEYHYVRGQVRRRKKQATIRGLNKDYNHDLKGLFKGAVTRASVQPGPFQEFYQRSLAKGIKPTMARLTLARKIAAITLTLWKKGEDFDIDKLNSQAA

SEQ ID NO: 476025 - protein, 335 aa, unidentified
MKKIYVGIDISKEKCNLCYRGGLEIVREEECSNDVMALKKAFKAALKALGASLEEVLVCAEYTGRYIYPLTVACQELDIFLWMDDPTRIKNSMGLTRGKNDAIDAARIAEYAYRYSDKAVRYCIPDAALVSMKNLLSDREFLLIDKKRYQSQLTDQKKYMAPGDFKHKNSRWRKVIKSIDEQIAAIDAEIDALIAADPVLTRQKELLVSIDGIGDRIAINMIAITGGFTRFQNARQFCSFAGLTPYKYDSGTSVRSKAKISKRANQTMKALLHLAAVGAATHMKEGEYKDYYERKTKEGKHVMCVLNVIRAKLVHRMFSVIKRDTGYTKEYKPAC

SEQ ID NO: 476026 - protein, 344 aa, unidentified
MAYYTGIDVSLRSVSICIVNDKGEVCLETKVAAEIGAIVDRLRRFSSEVKSVGFEAGTLTQYLTYGLQAAGFEVICLEARQVSVTLAAMRNKTDRNDARGPAQILRTGWYSRVHVKSLHSHQVRALLASRKAILKKCVDLENELRGLLKVFGIRLPSRVGHGSFDAELRETVSSDEMLACALVPLLDARTVLYKTYLKLDNAVKALVRVDPICRRLMSIPGVGPVTALTFKAAVDDPSRFKSSRTVAAHFGLTPRRFQSGELDNPGHISRAGDADVRSALYVAAHSLLTRNAQWSTLKARGVRLAKTRGHRRAVIAVARKLAVILHRMWIDGSLFRWGAAETPA

SEQ ID NO: 476027 - protein, 400 aa, unidentified
MISVGIDVSKEKSTVCILKPYGEVVSRPFEVCHAEKELSELTSMLLRLNDDVRVVMEATGIYHLPVLSYLKEKGLFVAVINPFEMKEYRCQGLRRVKTDKQDAITISNYGIDHWYRLKNYEAEESVYAELKLLGRQYRHYMRMRVESVLELTHLLDYTMPGIKTLLKGWNETNGKDKLGDFAEKYWHYDNITKKSEEQFIKSYLKWAKEKGYHQSQDKAVRIYALAKEGIPTVSSDTPSTKMLVQEAVRVLREVDNTLMTILTQMQALAKSLPEYPVVRAMGGVGNVLAPKLIAEIGDVRRFHSGKALIAHAGIDAPPYQSGQFIGTERKISKRGSSSLRKIGYEVMRCLKTHKEPEDAAVYRFILKKEKEGKSKRAAKIAGLNKFLRIYYARVMEVYQK

SEQ ID NO: 476028 - protein, 355 aa, unidentified
MTSSKYIGMDVHKESISIAVRNSAGKVVMECVTETKASMILQFIEGLRGDLHVTFEEGTSAAWLYDLLKPHVTKLVVCDPRKNKSMREGNQSDKIDARRLAELLRLDHLTPVYHGEHGLRTLKELVRSYLTVTKDLARVMTRVKAIYRSWAIPCTGKQVYARCHRAEWLGKITEPGVRRRAEFYYLQLDALRVLRQEVRRDLLTESKKHKAWKRLCQIPAIGPIRAAVLLGILQTPHRFRTKRPLWNYGGLAIETHSSADHRSVDGHLERDKKQVSVRGLNRNCNHDLKNLFKGAAVAASSKPGPFQEFYTALVAKGMRPEMARLTLARKIATIVLIVWKKGVCFDAQHLKPQTA

SEQ ID NO: 476029 - protein, 307 aa, unidentified
MNEISTVGLDIGKKVFQVHGVDCSGAVVVRRELRRRQLRAWFSRLPPCLVGLEACATAHYWARELSKLGHDVRLIPPAYAKAYVRRNKNDPADAAAICEAVGRPSMRFVAIKTEQQQAAVGIHRVRDLLMKQHTMLRNQLRGLMAEFGVVAAKGQRGLNELLAILADPEDQRIPNPLREGLTAIAETLRGIDRKLAAIDRQIVAAGRQNAAYRHLITAPGYGPILSSAMAAFVTDPAVFRRASDFAASLGIVPRQEGKRAKQDPWLAKLLATKPRKLVAVALANKMARIGWALMTRQQDYRNMPATT

SEQ ID NO: 476030 - protein, 340 aa, unidentified
MGEVTTIGLDLAKHVFQVHGVDADGGTVLRKSLRRAQVLTFFSRLPPCLVGLEACATAHHWARELRALGHEVRLMPAQYVKAYVKRNKNDAADAEAICEAVQRPTMRFVAIKTAEQQAGVLLHRGRERLVRQRTGLVNALRAHLAEFGIIAPQGLRHVGKLIAIVRDDNDARLPGLARQVLMVLAGQLEQLEAAIAALERQLVAWHRVNPVSQRLATIPGIGPIIATAIAATVTEPGQFRSGREFAAWLGLVPRQNSTGGKTRLGGISKRGNQYLRRLLINGASANLLRSRATKADPWVIGLRRRRPSLVVAVALANKTARIAWAVMQRQQPYQRMAAAA

SEQ ID NO: 476031 - protein, 338 aa, unidentified
MAILFVGIDLAKNVFAVHGVNEAGKAGLVKPAVPRARLSEVIAALPPCTIGMEACTGAHHWAREFQAHGHTVKLMAPKFVAPYRLSGKRGKNDAADAAAICEAVQRPNMRFVAVKSVEQQGRLMVHRARQGFVEQRTATLNRIRGLLSEVGIVLPLKADTVRKQAAALLEELPGWVNTVIGDLLSEVHRLDERLREYDRHIALMARQDTRAQQLMKLTGVGETTATALIAMIGNAHDFKCGRQLSAWLGLVPGQYSSGGKTRLGRITKSGDAYLRSLLVLGARSLLHAAKGKTDSVSRWAVALAERRGYWRAVVAIAAKNARMAWAVLRRGEDFVMPA

SEQ ID NO: 476032 - protein, 329 aa, unidentified
MNYKWFVGIDIAKKTLDVVLYKKELQKKSPYCQILNDSDGFNNLMKWLKEQNVVVKHTLFCMESTGIYGMELVNFINGKANYCVESPLHIKRSLGLTRGKSDKIDAFQIARFCYLHREELVPSRAPSKIMLTLRSLINERERLVRARTIDKTIVKELNYKENKSCIERAENRIIFLTEDITQIEKEINLVIKENLDIECNYHLAKSVTGIGLINAVMFIIFTNNFSSITDARKYACYSGIAPFEHSSGTSILGKTRVSKLSNRRIKVNLTNGARSAIINDPELKLYYKRKTDEGKEHGTVMNAVKFKLITRVFATVKRGTPYVKLRQAG

SEQ ID NO: 476033 - protein, 340 aa, unidentified
MTQHKIIGIDLAKNIFFLFEINHKGKNLSRKKLQRSKLLSYIANKEPCTIAMEACSGAHYWAREFSQFGHEVILYAPQHVKTQRRKQKNDYNDAEAIAEVALYKRPHPVPHKSVEQQDIQSLIRMRRLLVTERTRIVNQVRGLISEYGIIMPKGAAAFRKAIPEILENDENQLSCILRELISHQYERYLYIDEQVKWFDDKLNQTIKQFENAKRLMSIPGFGPLTSQAVAVWLGSGQQFKTGRDASAAMGLVPKQDTSGDKVILLGITKRGNTYIRSLLVHGARAALRRAKFKSDNLSKWMLELQERRGPNRAAVALANKLMRIAWAVITKNEEYRPTQS

SEQ ID NO: 476034 - protein, 317 aa, unidentified
MNATHFVGIDVSKKTFDIHILPSGERLSLSSDTKGIAQLLQKLPPLQETLVALESTGGYHKRLACELTQAGYATSVLNPKRVRDYAKAAGILAKTDKIDARVIALFAEHFRPAPQAMPSEQQSQLEELVSRRRQLIGLRTAETNRLENLTSRTVRQDIQQVIDLLNKNLGRIEKEILKLLESDDHWKRKREIVESVPGLGPVSSATLVAELPELGEVNRQQASALVGVAPFNCDSGQQKGKRSIRGGRASLRCTLYMATLAAKRSNPVIKAFAERLTAAGKPFKVVMTACMRKLVVILNTLIRQNTTWQPRILPQNP

SEQ ID NO: 476035 - protein, 400 aa, unidentified
MELVERAWAGIDAGKGHHHVVVIDGEGRRMLSRRVANDEPDLETLIAAIVDCATEVNWTIDLADGPAALVLALLLGRGQRVWYLPGVAVNRASDGYRGEGKTDAKDAAVIADQGRMRRDLRELRLDDPLIAELRMLTGHRADIAADRTRAINRLRIQLLGVSPALERALDFTNRGPLVLISHFQTPRQLAAAGQSEVYRCLRNQKVRHADRLAATAIRAAATQHTSVVSEATAAELIARLAQAVLDLDRQLAELDKQIFLRFEAHRQANVIASMVGIGALLGAEFLAATGGSLDGFASADHLAGYAGLAPAPRDSGRRSGNLHRPKRYNRQLQRVFYTSALISIQTSTASRAFYDRKRAEGKRHSQAVLALARRRVNVLWAMIRDHSLYDDRRSPSTLAA

SEQ ID NO: 476036 - protein, 304 aa, unidentified
MFGIGIDVSGENLDVAVHEQAFRQFKNNKRGWSSLIKWLQQWPAKQVVLEASGGYEQKALDALHEAGLPMVRINPGRGRSFASAIGKQAKTDRMDAMVLAHMADALKLTRYVPPADWQRRLGELCQRRRHLVQMRVSEHQRMRAFSEPYLISMLNHHLCEIQKSIRQLDATIAALLAEQQGWRDFAKLKGAGPVLMATLACELPELGKLSGKAISALVGVAPMNRESGTWKGRRCITGGRAVVREALYMAALTAKRYEPRLKEFFESLVNQGKPGKVALVAVMRKMLVILNARKRDAEAQMASA

SEQ ID NO: 476037 - protein, 356 aa, unidentified
MNKISKLDFEGQQIYLGMDVHKKSWSISVLTDEFEHKTFTQPPEVSTLVNYLKRNFPGASYKSVYEAGYCGFWIHDCLQEHGVQCLVVNPADVPTKDKERRKKTDRVDCRKLAKSLRSGEIEGIYVPCRPKVEDRTLIRTRHSMVKKQTRCKNQIKSILQFYGIQIPEELADSHWSKRFITWIEAIRMERASGNFALKAYVEELNNMRKIIAELTRGIRSLANAEEYRQNVCLLKSVPGISILTAMTILTELYEISRFRNLDKLCSYVGLIPDTHSSGETDRDMGITKRRNAQLRGILIESAWVAVRKDPALLMTFNTLCKKMPKNNAIVRIARKLLSRIRYVLKNQQKYASAIVQ

SEQ ID NO: 476038 - protein, 392 aa, unidentified
MRFAGIDIASEKHVVAVVDERSEVVVKPKAFSEDADGYRKLVELLGAPGELLIAMEATGHYWKNLFAALVAGGYTVSLVNPLRTHRFAGEDLQRTKTDAIDALGIARFAAQKRPVATKLPDSATEELRELVRLRDRLVQDFGDRVRQLHRLVDLGFPELTRYVRRLDSELATSILKDYPTAEAFVGVRPRALSNLKYDGVHFVGLELATQLIEAAKTSVGRHHGYAYRIQVKFYCEDLDILRRRLKELDRDIETKLGEHEVGTLLTTIDGIGTQTAAKLVAVLGNPADFRNERALAAYIGAVPGLKLSGKATSMRASLTPIGNAALRKALYMPTLTAVKRSPWLRAFYQRLISTGKPPKVALLASMRKLITAIYSVAKNRKPFVSRPVEGTA

SEQ ID NO: 476039 - protein, 431 aa, unidentified
MRAAPPAGVRCPIGIQGQRPRTHKLGYPRRHRGEPERTSEEEGVRTAGIDIGSEHHVLAILDDSGTTLVRPTTLSEDAAGYERLFTLLGDPAEVAVAMEATGHYWQNLFAALVGRGFAVAVINPLRTARYAEEQLQRTKTDAIDALGIARFALEKRPAPARLRDETLVELRELVSLRLRAVQDLGDRVRALHRLVDLAFPEFTRLIKTLDSERATALLSRYPTATAIAAAPARTLAGLRYDGRHTLGPALAQRLQDSARTTVGAHQGAAYARGVRYACEDITRLRERITELDAEIGRTLGGSDLAPLLRSITGFGPTTTAHLLAVLGDPADFDSGKAIAAFVGTVPGLRESGKRRPGHARLHPLGHAALRHALWMPTLTAIRCNPWIRAFYLRLIAAGKPKKVAIIASMRKLLDAVHYVARTRTAFVSRAA

SEQ ID NO: 476040 - protein, 368 aa, unidentified
MRSNHIREPSTCKFRRSAWISPRTCSRLISTIGLDIAKNVFQVHGIDAAEKVVVRKRLRRRQVLEFFKALPPCLIGMEACATAHYWARELTKLGHRLRLMPAKDVKAYVKRNKNDAADAEAICEAVRRPTMRFVRIKSAEQQGQLMQHRTRDVLIRQRTQIINALRAHLAELGLVAAQGNAGVNELRAIVTDEQNTRLPIDARASVIVLAAQLEALESVIGAIEKRIKMKHRSSEASQRVEAIPGIGVIGATAIVATVTDPTIFRSGRDFAAWIGLVPRQDSTGGKQKLGPISKQGDRYLRRILVVGAIAVLRRAQENPGKYPWLTQLLARRPFKVVAVALANKMARMAWALLAHGGTYRAPELAETA

SEQ ID NO: 476041 - protein, 343 aa, unidentified
MDHFAGLDVSVKETSVCIVDDTGRIVREVKVASEAEALLQVLANPGYRFKRIGLEAGPLSQWLFSALGEANLPVICVETRHMRAVLKAQINKTDRNDARGIAQMMRAGLYRPVHVKTLRSQKLRMLLVHRKLLQSKAIAIENDLRGTLRNFGLKVGMVGTMKFEARIKELVENLPDLAVLVEPLLVVRRVLREQLGILHWRLLAIVRDDAVCRRLMTVPGVGPVVALTFRATVDVPARFRNSKAVGAVFGLTPAKYQSGEINRTGAISKCGDEMMRVMLYEAAQIMLVRSAKWSWLKAWAMTIARRRGLKKAIVALARRLAVIMHRIWLDGTEFRWTREVVAA

SEQ ID NO: 476042 - protein, 315 aa, unidentified
MDYIGIDISKDTFHVAWNDVAEVSVFANDNEGIDSFEDSLHHRQFQKEHTKIGLESTGIYHLLLCVLLTDHGWDVNVINPYITSKAIHATLRHVKTDVKDARAIRSVLIAGHGYRFTDTPAILKLKALLREYAALVKLKTRCKNLIRFYLTYQKTTEKRINSVFPRPCLSLEKNLKEMRRQLGNTESETQTLLQSIPGIGPVCSAALVGYIGDIRRFDHPGKLVAYLGLDCRVHESGTSIHGKGFLTKRGNGTLRSLLFNAAFIARQHNPDLQRFFEKKIAEGKHYCVAMCAVERKLVHLIYAVWTRGSPFEKRP

SEQ ID NO: 476043 - protein, 412 aa, unidentified
MDLMVERCAGVDIGKDEVVACVRTPAPSGKGRRKQTRTFSSFTSQLEAMADWFASEGVTEVVMEATGSYWKSPWYVLGERGFELKLVNAHHVKILPGRKSDVADAEWLAELLEHGLLRSSFVPPAEIRQLRDLTRYRKRLVQEHTSECQRVQKTLEDAGIKLGSVASDVLGVSGRLMLQALAAGERDPEVLAELAKGLLRKKIPELREALRGRFTDHHALMVRLSLDHAKYLEAAIAELDAQVDRVMAPFVEARDHLDTITGVGKRAAECIIAEIGADMTRFPTAGHLASWAGMAPGNNITGGKRQSGKTTKGNVWLADILNQCAWCAARSRNTYLSAQYWRLARRIGKKKAAVAVGHSILVICWHLLSNNADYDDLGGDYFARRDNTERHQDRLVQQLQDLGYQVTLRKVA

SEQ ID NO: 476044 - protein, 312 aa, unidentified
MTRTICGVDISSVSLEARIGREGAFASFPNNPEGIAALAAFCHAHQVELVAMEATGGYEQQALALLSEQGLPVAILNPRAVRRFADSMGQMEKTDRLDAGMIAWYAQTRHSQPVCLTSASQQQLRALVTRLRQLTEVRTAQMNQSRLVTDPAVLALIEELLAVVARQIRELETSIAALIAQDPLWQHLDRVFRTIKGVADRTVARLMAEMPEIGTLSNKAISKLAGVAPLARDSGKHQGKRAVRGGRASVREILFIVASVVGRHEPDFIVFQQRLSAAGKPRKVIRIALAHKLLVRLNAKARQVRQQLEAAA

SEQ ID NO: 476045 - protein, 317 aa, unidentified
MKDCLIFVGIDVSKAQLDVAIRPTAETLSVANDKAGIKALVKRLAKIQPALVVLESTGGLERQLISALVSAEIAVVRANPRQVRDFAKATGQLAKTDSIDAAILAHYAQAVRPQLRPWPDAVTVELRALSARRRQLIEMIVMEKNHLVTAAKAVAKDITEHIGELEQKLQGVDTDIDGLIEQSPIWKEHEDILRSAPAIGPVTSRTLLAELPELGTLDRKQISSLVGLAPFNRDSGTLKGRRCIWGGRASVRCALYMAALVATRYNPVIRDFYKRLKTKGKPFKVALIACMRKLLTILNAMIKHKSRWSETYSLQIP

SEQ ID NO: 476046 - protein, 333 aa, unidentified
MREQQTKESLGIDISKLTIDAALHHRGLHEQFANNRSGFKDMLKWLSKLGVVTDGLLICFEHTGWYCLKLSHFLHGLDIAYHCANPIDIKRSSGLKRGKSDKADAFEIARYAWLHREELDSSEPMSEQLIELQRMMAFRTQLVKQMTALKNQKSGMKVLSDSPSTDFSIRLIDQTLHHLKGQLKKLEKQMQELIKADRKMQSNFELSRTVKGVGPVLAMQMLLHTHNYSRFEAWRQFSSYCGLVPYEHSSGTSINRRPRTHAISDRGMKSLLSLSALSAIRCDPELKAYYQKRVEEGKEKMVVLNIIRNKIVSRVFATVKRGTPFVPLSKHAA

SEQ ID NO: 476047 - protein, 353 aa, unidentified
MQIVSALDVHRRQITYKTLDRETGEVRRGRVAPAARGDVREWLARFAGCEAEFVLEGTTGWRFVVEEIERAGHGAHLADPAETAAKRSRKRRAKTDNADCDLQLRLLLAGELPESWIPPAQILELRTRVRMRKTLVDQRSAWQQRLQAQLFHQGVPAGLKPRTRAGREALATVELSPSGRELVLLALRMIETLDRELAPLDRWLQAFARRQRGCRALIERLYGVGVVSATAIVAELGDCRRFTSSDDAVRHTGLDVTVYQSDSKRAPGHLSHEGPEVLRWALFEAAQAAARRSSPDHTYFCQVRERIDYNRACLSVARKLCRRAYHILRELGADAVAPVEDAADTEEAIAAAA

SEQ ID NO: 476048 - protein, 363 aa, unidentified
MNYGSKAATKMTAGIDLGDKYSYLFVLDNDGGEVVEEGRLRTTPEDLRRRFDSAERMKIAIEVGTHSTWVSRLLEECGHEVLIANPRKTRLIYGEKRKTDKLDAQKLARLARADPELLYPVKHRGAQSQAHLALIHSRDALMRSRTQLINHVRGTVKSFGARLPKCSAQSFHKKVAGQLPDELAETLEDIVVTIASLTERIRNYDRRIEHLSKEHYPQETELLRQVPGVGPLTSLTFVLTLEDPGRFEKSRSVGAYLGLVPGKDQSGESDPGKGISGEGDQMTRRLLVSSAHYILGPFAPDSDLRRHGQKIASGGGKNAKKRAVVAVGRKLAVLLHHLWVSREVYEPLHNARLWGTLGGEEVA

SEQ ID NO: 476049 - protein, 456 aa, unidentified
MTSKSKAKPRLSGRMLPIMHPDAAGIDIGAEEIFVAVPPDRDVDSVRRFDTFTRDLFALADWLRQCNIRSVAMESTGVYWIPLYQILETRGFEVFLVNAHHVKNVPGRKSDVSDCQWIQYLHSVGLLKASFRPPDEICVLRSLWRHREGLVQMAAEHIQHMQKALSEMNLQLHHVLSDIVGVSGSAILDGILAGERDPAKLANLCNRRIRSPRQTVAKALEGDYRPEHLFALRQSLAAYRFYKHLMAEVDLELAQKMRELPRAEHAPDKRPAGTKKRIYQRAGNEPSFDLKEEMFRIAGVDLTDVPGISTLTAHTILMEVGTDVSRFRNASAFASWLGLCPEKQVSGGKVLYTRTRKVKNRAAIALRLGAHCLYHAQNYLGDFYRKMKWRLGAPAAITATAHKLARILYHMLSTRQPYSDKVFARCDQQAAIRAEMRLRKQAAELGFQLAPITETT

SEQ ID NO: 476050 - protein, 340 aa, unidentified
MGEVTTIGLDLAKHVFQVHGVDAEGATVLRKQLRRAQVLTFFSRQPRCLVGLEACATAHYWARELRALGHEVRLMPAQYVKAYVKRNKNDAADAAAICEAVMRPTMRFVPVKTADQQAAVLLHRGRERLVRQRTGLVNALRGHLAEFGVIAPQGLRNVGKLIAIVRDEGDGRLPDLARQVLAVLAAQIEQLEAAVAALEKQLIAWHKSNPVSQRLASVPGIGPIIATAIAATVTEPSGFRSGREFAAWLGLVPRQNSTGGKNRLGRISKRGNQYLRRLLINGASANLLRSKATNADPWVIGLRRRRPSLVVAVALANKTARIAWAVMHRQENYRRVAAAA

SEQ ID NO: 476051 - protein, 402 aa, unidentified
MRVIGMDIHRSFAQVAIMANGNIIEEKRVDLVQERVIAFGKTLERDDEIVLEATGNTAAVERLLRPFVKRVVIANPRMVRAIAFARVKTDKIDAAMLARLHASGFLPEVWAADDDTVRRRRLATERMGLVEETVRLKSRIHAILHANLIPRYKGHLFGKAGRRWLAAASLPEHERAILDRLVDELEHTTSQLTLLDRDLAAQALVDERARRLMTIPGVGPVVASMVLAAIGDITRFDSAQKLASYFGLTPRVRQSGESPARHGRISKQGNAGVRKMLVEAAWSAKSAPGPLRAFFARVSATRGASAAIVATARKLAVLIWHVLTKEHDYAYARPAFQAMKLRKVALKAGAPRAYGKAGPGRDYWIKDIRHAEMAYVARAEAAYARMVAAWRQVPPKPKKTTA

SEQ ID NO: 476052 - protein, 338 aa, unidentified
MRYVGLDAHWRQSTICVLDHRGRKLLSRTIRGPWSKVLEEVGKLPKPFAVCFEASTGYGYLYERLQRLARRVVVAHPGQLRLIFRSKRKNDRVDAEKLAKLLFLDEVPPVHVPGEDVRAWRRMIGHRRKLVATRVRAKNAVRALLRGQGVEAPKGLWTRKGMAWLRSVSLATELDELQRDILCEQIDSLSGMIQRAHKVLDGFGRRHPGVQLLQTIPGVGPRTAEAVVAHIDDPRRFGRIKSIGRYFGLVPSQDSSAAMNRLGHITREGPSTVRFLLVEAAWQGIRRSARLRAFYDRILRGDAGRRKIALVATAHHLLRIMLSMLQSGELWREEKQAA

SEQ ID NO: 476053 - protein, 433 aa, unidentified
MQDVQDEPLFAERVAGLDIAKAEVEVTIRVPSDTTAGRRQQETRTFGTTRRELESLGDWLACWGVTKIGMEATGDYWKPVFFLLESRGFDCHLYNAAQVKALPGRPKTDRADSIWLARITERGTVSSSFVPPEPIRRLRTHTRYRRHLTQARTAEKQRVEKLLEDGHLKLSSVISDIHGASGRDMLAAIAAGQRDPKALAQLARGTMRAKIRRLEEALDCSFFTEEHAAVLAMMLAAIDHYTTQIEALTARIEVLIEPYLHQVTQLDDIDGIGPVCAQDMIAEIGADMTVFPTAGHLASWAKWSPQVKQSAGKRKGSNSTGRGNPYLGAALGEATISAGRTQSFLGAKYRRLTRRMPKKKALVATGNSMLASIHALLSDPDARYTDLGADYYEQRMHVRRQARNHVLGLQRLGYKVIIQPVNPDTGELQAATA

SEQ ID NO: 476054 - protein, 454 aa, unidentified
MATRKRSSEPSPKRPATALVTPLASRVGKHHSPAEGRAKRRPSKKLADLPPVGFPTDAPTRSTGAKSNGAQGRSTMRNVALDLGSKVIAFCEVANGAVVRRSKVGSLETLAPLLGPEQPPARVAIEACREAWFVHRMLSDWGNEVLLVDTTRTKQIGIGGHRRKNDRIDAELLARAVERGGIPLAHLLSPQRQELRRQLSVRRALIETRTQYVTTIRGIGREYGSPLPACDAEDFVARMRKKPLRADIAAVVDPLVTLLATLEVQLFAVEQRLAALSDSEPVIAQLTTTPGVGRIVAASFVSVIDDAHRFRNAHQVESYLGLVPSEDSSGGKQRLGAISKKGNSYLRALLVQSAWIILRSPNRADPLHQWASAVAVRRGRRIAVVAVARKLAGLLWAMWRDGTVYDVQLTATSGARGLRAAAQATEQRATALEEAARKTRLHLSRARPAHLRSA

SEQ ID NO: 476055 - protein, 331 aa, unidentified
MDNQIDLKYYIWRYSHALCGIDVAKNKHDVTALNVSGKTVLKPLTFSNNKAGFELLDLSLRQLNQDYLIALEDTGHYAFNLLNFLHEQGYKVYTYTPLLIKEFAKSLSLRKTKTNKKDAHGIALKLLSDPNREQFQHDNRQVELKILTKHIHRLKKKQSDWKVQYTRCLDIIFPELDKIVGKHSEYTYQLLTCYPNPQKRLEAGFDKLIEIKRLTASKIQDILSVAPRSIGTTSPAREFEIIENIKHYKRLIDKAETCVNDLMAEFNSVITTVTGIGNRLGAVILAEIRNIHAFDNPAQLQAFAGLDSSIYQSGQIDLAGRMVKRGSPHLR

SEQ ID NO: 476056 - protein, 347 aa, unidentified
MRGAVHMQITTIGLDIAKNVFQVHGIDAAEKVVVRKQLRRAQVMKFFAALPRCLVGMEACATAHYWARELTRLGHQVRLMPAKDVKAYVKRNKNDAADAAAICEAVRRPTMRFVEVKSAEQQGRLMQHRTRDLLMRQRTQTINALRAHLAELGIVAAQGREGLKQLLEIIADKTDERLPIDARASLIVLAAQLQALQTMIGVIERRIIAQHRANEASKRVATIPGIGFLGASAITATVTDASAFRSGRDFAAWIGLVPRQDSTGGKQKLGPISKQGDRYLRRILIVGAHAVLRLAKKNPQNYPWLAQLLARRPFKVVAVALANKMARIAWVLLARGGTYRTPQLAAA

SEQ ID NO: 476057 - protein, 312 aa, unidentified
MTSQTYVGIDVSKRSLEVCLHDQGDSRSFGNDPDGWTSLIRYLQPLQSILITLEATGGYERRAAAALRQAGFSVTVVNPTRIRRFAAAMGVLAKTDKIDARLIAWYARVAQPAPNGQLTPLEEQLGDLVERRRQLLVEVVAEKNRLSTCSEHVRGDIQEHIDWIEEHVDRLEQQIRDCIAQNPDWQVRAEIIDSVPGVGEVTASTLVAELPELGQLNRQKIAALVGLAPFNQDSGPKHGKRRIAGGRAGIRKTLFMATLSATRHNPIIRTFYERLLKSGKLKMVALTACMRKLLVIINAMVRKGEKWRLAKA

SEQ ID NO: 476058 - protein, 436 aa, unidentified
MGQVIIGVDPHKLSATIEVVDQDEKLLGAGRFSTDRAGYAAMRTYTRSWPERLWAVEGANGAGRPLAQRLLEAGEHVVDVPAKLAARVRLFDTGHNRKTDALDAHSIAIVAVRTEGLRVLKVDGELEALRMLVDRREALTRRRVAVVNRLQALLAELLPGQSKKDITTGQAKQLLASVRPRDIAGRTRRRIAAEELAELVVVDAKIRKATAELKTLVLARDSHLMDLHGVGPVVAARILADVGDIARFANRNRFASWTGTAPLDASSGEQNRHRLSRAGNRRMNHMIHIAAVTQLRLDTDGRDYYRRKRAEGKKPMEALRCLKRRISDAIYRQLVADAQGVGDEHLEAGPGGHRGASLLSSAAGSHPHTGTSDQPLPGPARTTLPLSATPAQPRPGPAPQHPRRRAGAVKVERPTGRTTLTATDVDAHSKEPIPTP

SEQ ID NO: 476059 - protein, 473 aa, unidentified
MPNKKTSPDLKVLPMLPHESIYIGVDIGKQKHIAGFVSKTLLERHKHFENCPAFSFEASREGFRSFVERIRDYCPLEHIFVLMELTGHYHRSLQQYLLELDIPVYVMHVQRRQASMIKTDKRDALSLANQLYTQLELGAQVTDKLQAVRRTVPPSATASQLKGLMRHRYELVNEATQRKNKLTAICDELFPELTQVLKDPNLATALALRERFPTPHALATASFTALSEVRVGRRASDADLLHLQHLATQSIGTKDVARQRSLVLEQSLLIKELRLIQEHLERLEGEVCQIVTQSREGQILTSIPPIGPLDAATLIAVIGSIANFEKACDLKSYLGWAPKREQTGTSYDRTRLSQGGSREAKRAMYLIVWRAIRTDTEWSKLYKRLVPRLCSYDERTQSYRGKGRAIGHVAGRLITLAYALLRYDYEVVNHLAPGTDPPAPMLYDLEVHHQHRSGHYHPLKRRPRENRIVQVES

SEQ ID NO: 476060 - protein, 424 aa, unidentified
MKRKAKSQPTHSGLAVVNPNAAAIDIGATMHMAAVGADRASDPVRSFGTFTADLHRLADWFAECGVQTVVMESTSVYWIPIFELLDERGFEVILVNARDAKHVPGRKTDVSDAQWLQRLHSYGLLRASFRPKGEIVELRAYLRQRERLLDTAASLIQHMQKAMTEMNLQLHHVVSDITGATGMRIIRAIIAGERDPAVLASMRDTRCHSSIEVIENALTGHYRAEHLFVLEQALALYDVYQQKVAACDIRMESVLKELISVRGSKEDASANGSGSPRRRSRQSNGPDFDVGKALNALLGKDLTRIHGIGPYLAFKLVSECGDDLSAWPTAKHFTSWLCLAPSNKISGGKVLSSRTRRSGSRAASLLRLAAVTIGRTDTALGAFYRRLSARAGKSKAVTATARKIAVLFYNAIRHGMDYTKGHDV

SEQ ID NO: 476061 - protein, 336 aa, unidentified
MVFFLNGFTIMMYLGIDVSKAKLHACLLNAAGQSKTKVVENNLPGIALLLAWAVRHGAPAAQVHAVMEATGVYHEVAAHALFEAGVTVSIVNPAQAKDFARGLAVRTKTDGVDGHVLARFGALLKPPAWQPPDPAVRELQALLARREAVAQDLRREQNRREKALATATPVRVQQSIDDAIAFLKKELALLQQDINTHIDHHPGLKADLALLTSIPAVGPQVGCYLLAILHGHAFVSAEQLAAYLGLVPVERQSGTSLLGRARLSKAGPARVRAVLYMAAVVAIRYNPHVKSLYERLLARGKTKMSALGAAMRKLAHLCFGVLKTRQPYQADYALSA

SEQ ID NO: 476062 - protein, 317 aa, unidentified
MTESVKVNVGIDVSKDFLDVHVGDVALRRVPNRSSGLSVLKRILSRYTVSLVLLESTGGYENLAVTYLQSLGYDVCVINPRQARDFARSMGRLAKTDKIDAQILCRLADVIDASPERARFVKPLTDERRQRLVSMVRRRRQLCDLMIAERNRRAKTDAYGSESISTVLDFLTDEVARIDRDIAEHVDSSFSDISSLLQTFTGIGPVTASTLLGELPELGKLNRRQITALVGVAPFNRDSGYMRGRRRISGGRSGVRNVLFMAVLSAVRFNPVLKAFFARLVAAGKPKKVALVACMRRMVCILNAMLRDGSRFEVAPG

SEQ ID NO: 476063 - protein, 417 aa, unidentified
MKKDSNSLKRIKAESKRVKLGSAAERKPQEVMAELVAKLAQQLDEEIVPAAEGGKGERDRVRPNLDRLTVGVDLGDQWSNYCILGLSGETLAEGQSRTRKQEVAEFFQDLATSRVVVEVGTHSAWVREVIAGFGHEVLVANPRLMDGSKRRRRKNDRIDAEKLARLGRMDPKSLHPIQHRSTEVREDLLVLRAREALVESRTKLISAVRGLVKSMGGRVSSCSSVGFSRKAATEIPEEVRETLQPLLSLIATLSEEIKTYDQRIDKLAAEKYMHTQLLRQVVGVGPVTALAYVLTLETPLRFARSRDVGPYLGLVPRQEDSGDSQPQLGISKSGDRMLRKLLVGSAHYILGPFGPDTDLRRFGMRLCERGGKNAKKRAAVAVARKLAVLLHRLWVSGEVYKPLGHGALARTEHDVAA

SEQ ID NO: 476064 - protein, 344 aa, unidentified
MKHFAGLDVSVNETSVCIVDETGRIVREAKVASEPEALLPVLRNRSYSFKRIGLEAGPLSHWLYSALGEANLPVICVETRHMRAVLKAQINKTDRNDARGIAQMMRAGLYRPVHVKTLRSQKLRTLLTHRKLLQSKAIAIENDLRGTLRNFGLKVGTVGKLKFEARIQELVERHPDLAVLVEPLLVVRRVLREQTAVLHRRVLAIVRDDEVCRRLMTIPGVGPVVALTYRATVDVPARFRNSRSVGAVLGLTPCKYQSGESDYTGAISKCGDEMMRVMLYEAAQILLTRTVRWSWLKAWAMQIARRRGMKKAIVALARRLAVVMHRIWVDGTEFCWTRQQAAAA

SEQ ID NO: 476065 - protein, 400 aa, unidentified
MLSIGIDVSKGKSTVCGMKPGGEIVYAPFEVQHTRKGMSELVSLLRGSGEEVRAVLESTGSYHCPVVAALLENGIFVSVVNSLRMKRFCSQSIRKVKTDRIDAMQIALYGLAYWQELQPTKLPEDTYRELQLLARQYYQMTSMLIKAKVDFNALCDQVLPGMQELMSDHAGRHKLSDFVLRYRHTTHILEMGETRFRKDYCKWAEKKGYRNCERMAALIFATAQNGIPVLPNAPSTQIVITEAIRVLHTVEASRDAILTQMQALAKTLPEYSLVREMPCIGDTLAPRLIAEIGDVRRFHSKRALIAYAGIDAPPYQSGKFCANNRHISKRGNRYLRKTGYEVMQSYVMHKPANDPIFTFIEKKRGEGKSGKLAMVAGLNKFLRVYYGKVTELYRSLPAIE

SEQ ID NO: 476066 - protein, 418 aa, unidentified
MKSMEITAVGIDVSKRKSTVAIRRPGGVIVACPFDISHSSHDLEKLVSILKTTGGDIRVVMEHTSNYWKPIALTLKNAGFYVSVVNAMLIHDFSDNSIRKLKTDRADSLKIANYALTFWNRLPPFNDEDETRLVLKEQSRMYERLASTATSLRNGLIALADQTFPSIDQAFGHAIKNADGHEKWVDFFSIYWHRDCVLRLSIEKFTESYRKWCLRRNYKFRTNTAHKLYALAQDAVPTLPKNNGTKALVLQACKSLNAVCEAKQSTQEEMNRLASLLPEYEVVMQMEGTGPITGPALMAEIGDVRRFKNKKALVAFAGIDAPPFQSGNFESKSRHVSKRGSPHLRRTVFLVANIILTLSHKDNSVFCFMDKKRAEGKHYYVYTIAGSAKFLRIYYARVSEYLRTQEPPAAAICLDCKD

SEQ ID NO: 476067 - protein, 422 aa, unidentified
MQPEPEFVAFVGIDWADQKHIWCLQRAGARQREAGELEHRPEAVEAWVGELCRRFGHGPIAVAVEQVKGALVYMLRKYECLHLYPVPSTMSASMREALYPSGAKDDPRDADLLLELLVLHRDKLRRLTPDNEATRRVQNLVEERRKLVEEKTAQLNRLTGYLKVYFPQMLEWFAKLDSKLVCDFLERWPSLEELQKVPSSELKEFFRHRRGRHGELTEWRMQGISQAMSAIRDRAVIEAKRTVVQVIAQLLRTLVEGIATLDRKIAEAAEVHPDFFIFQSLPGAGAALAPRLLAAFGSQRDRYSSAEEVQKYSGIAPVTERSGKKKWVHFRWACSKFLRQSFHEWAGHSIAQSVWARAYYQRQRERGKEHHAAVRALAFKWIRVVFRCWQDRVAYDETRYLAALARRGSHLTSAFAATAASM

SEQ ID NO: 476068 - protein, 406 aa, unidentified
MEPIYTSCCGLDVHKRSVQACVRRLRQDGRVHQETRSFGTMTRDILEMADWLAAEGVTHVAMESTGVYWKPIYNLLEGRFTMLLVNARHVKHVPGRKTDVKDCQWLAKLLQCGLLKGSFIPPRPQRELRELTRHRSQLVAEKTRVTNRIQKILEDANIKLASVATDILGASGRDMLRSLIAGEQDPAKLADLARRQLRSKIPQLRLALEGQVTEHHRFVLGELLDHLGYLESQIERFTRLIEEVSRPFVSAIDLVTQVTGFDQGAAQNVVAEIGATMEPFPTEHHLASWSSVCPGSNESGGKRKSGKTTKGNRCSALVQAAWAASRKKDSYFQAQYRRLAARRGKKRAILAVAHSLLVVIYHMLKTGSSYKDLGGDYFDKLNKNRLVPYLVRRFKDLGFRVTLEAA

SEQ ID NO: 476069 - protein, 419 aa, unidentified
MAPLSNQQFTAYVGIDWADTKHDICLQAAGNARREFDCIPHQVARIDEWAKSLHQRFGGPIAVALELARGPIVAALQKYDFFVLFPINPSTLAKYREAFKPSRAKDDPTDAELALELLLRHPERFAPLRPQSVAMRSLFSLVEQRRELVGDKTRFTNRLCDTLKQYYPQALEWFEQRDAVLFCDFLTCWPTLLTVRRARRTTLEAFFHAHKCRIRLIAARLESIRAATPLTEDPGIITACRLHVLALVAQLRTVLSAIDVFDREIAAVARAQPDFALFDCLPGAGPQMAPRLLAAFGEQRDRFHGADELQKYTGIAPVTERSGKKSWVHWRWQCPKFLRQTFVEWAAQTINKSFWAGAYYRQQRAKGSTHQAAVRALAFKWIRILYRCWQTRTPYDETTYLNALRKRGSPLLRHLELPG

SEQ ID NO: 476070 - protein, 394 aa, unidentified
MTIQAQASVQSQVAKFIPRDYQVFAGLDVDKHSIAVTFCNHEELLRSLRLPYSAPQLLNYVQKHFAQQRLAFVYEAGPTGFGLYDELVAAGHPCLVVAPSMVPTAPGQRVKTNRLDSKKLSTALRGGELESIHVPTPQYRELRHLVQLRDTQVRQLTACKCRIKALLLYEGIAFPSDDGKEKQWSAPVLDELLELPCSQTVRFKLDQLIGTLHFHFNAAAAAQQQIRWYCQKDAELRRSISLLTTIPGIGLIVATHLVARLGDPTLITNVRQIAGFLGLVSSEHSTGDKQKRGAITHAGDSRLRNKLIQSAWVTIRKDPELREFYGRVYERHPKKVAARKAIVAVARKMTTRIYAVLKEQRPFVLREVSAAPLTAEETAGPRERLDGQQNEQPS

SEQ ID NO: 476071 - protein, 315 aa, unidentified
MDTQVFVGIDVGKDVLFVAIRPFGDNLEIANREDGIVDLVKRLRFLRPTLVVMEATAGYETPVAVAIYRAGIPVVISNPRLVRSFARATGHLAKTDKIDAGVIAHFAELIRPEPRRLEDPDEERLGRLVKRRKQLLRMIVMEKNRVAKGVPEMRKEIQKHLDWLAKDLERIDQALNDFIQSSPIWSAKNDLLQSVPGIGKVGAQAIISDLPELGTLNRKQIASLVGVAPLNRDSGNFKGRRSIWGGRAHIRTVLYMVAVVASRCNPVIKEFYERLCKAGKPKKVALTACIRRLLAILNAMMRNGTRWGEFKPAIA

SEQ ID NO: 476072 - protein, 409 aa, unidentified
MDVLYPCCVGLDVHKRQVTACVRRVAAAGPAHHEVRTFATTAAGLLALQDWVEAAGCTHGVLESTGVYWKPVWHVLEDSLTLVLANATAVRNLPGRKSDVSDAQWLADLLAHGLVRGSFVPPPAIQALRELTRTRKQLVREVTAHSQRIEKVLESGDCKLGAVLRPLLGVSGRAMVTALAAGETDVARLVALAHPRLRPKQDAVREALTGTHLRPHHRILLSQHLDVITTLHASIATLEEAIGAALAPFRAAVAHLVTIPGVSETAADILVAEIGTDMTRFPTAGHLVSWAGLCPRLDASAGKHRSTRLRPGAPWLKPVLIQCAWAAIRREGYLRAQFLRLKARRGPMKAIVAVAASMLTAAYHMLRTDQDYQDLGADHFQHRDQHRLVAGLTRRLRALGYEVSLRPAA

SEQ ID NO: 476073 - protein, 370 aa, unidentified
MKKNSSQKQNSGKSNPPREKEGFASYIGIDLGDKYCDVCVLDGQGEVHEEFRLRMKGPELQGNFTSIGRSRVAVEAGGQSRWVAEVIQRCGHEVYVSNTRKVAYIHQSDDKNDPGDAYKLAELVHFKPRLLHPIQHRSLEAQADLSWIRAREVLVESRTQLVNAVRGMSKAFGERLAKCSVESFTAKMAGQVPEAIRKAMAPLLETIDHLNEQIYYYDLMEAHIARERYPKYRLLEQVNGVGVHTALAFMLTIGDAERFAKSRQVGCFLGMRPKKQESGESKPQLGITKAGDVYLRKTLVNCAHYILGPHGKDSDLRRFGLRLCARGGKNAKKRAVVAVARKLAVLLHRLWVSGEVYEPLRNSKAREVAA

SEQ ID NO: 476074 - protein, 340 aa, unidentified
MGWTVAIGVDTHKRTHTAVALDRIGVRLGSCEIDATSAGYLQLVRWAHQLGEPAFAVEGAGSYGAGLVRLLSSCALAVFEVERPRRDERRRGKNDLLDAARAAGRLLAGEGLSALRGGAPEREDLRLLLLERRSALRARTATLNQLHAVVLTAPAELRERLDGLTGDKLTERCLRLRPRHDRDQVLVTVLRRLARRAKLLAAELAELEQELERIVSLLAPELLAEVGVGPVCAAQLVVSSGDPQRMKRESSFAALAGTSPVEASSGPNRRHRLNRGGDRQLNCALHVIALTRIRCHPETRAYRDRLLARGKTKREALRCIKRALARRLYQQLTTIPALQT

SEQ ID NO: 476075 - protein, 347 aa, unidentified
MVADSFDVVIGVDTHRDSHALALVRCRDGALLQEQVLAANHSGYRSALDLGRRLGERRLWALEGTGSYGAGLARYLQGKGERVVEVERPAREGSQSRLKSDALDALRAARSALVAPVLASPRRAGRREALRVLLAVREGAVSTRRNGLNQLRALVVSAPEDLRERLHGLPAPALLRACLSLRLPRGAEPERHGTVLGLRLCARRVERASREAAELKRELGRLALELAPKLLELDGVGPISAAQVLVSWSHRGRFRHEAAFARLAGAPPIPASSGRTVRHRLDRGGDRRLNRALHTIVLSRRRRDPATIGYIARRVSEGKSERDAVRCLKRYLARQLFRLLEAMPIAA

SEQ ID NO: 476076 - protein, 416 aa, unidentified
MDVIVSRCAGLDVHKNTVMACVRVPGPDGGRTSTVRRFRTFTDSLRELRAWLIAEGVTQVAMEATGVYWRPVWHILEAVPEFELLLANAHAVKNMPGRKTDVADAEWLALLCECGLLRASFVPPPVIAELRDLTRYRKKLIEERSRETQRVQKLLEDAGIKLDSVVSDILGISARQMLEALIAGVRDVEALAELAHTRMRPKIPQLRRALEGRFGAHHALMLRMHLDHVDQLSATIERLDVEVDRVIRPFSTQLQRLITIPGVGRRTAEVIIAEVGVDMRRFATAGHLASWAGMCPGNHESGGKRRSGRARKGNRALRAALCEAAWAAARCKDGYLPAQYRHLLRTFGKKGQTRAVFAVGHSILVIAWHLLANDCDYTDLGSEHFTRNADPEARTRYLVRQLEALGHKVTVEPAAA

SEQ ID NO: 476077 - protein, 425 aa, unidentified
MMKYRIAGIDVHKRMLAVVIADIAVDGEFQFERRKVGTSLGELCQLADWLAAEQVEEVVMESTAQYWRPVWAALEQRWRPKRLQEGTGSGQLHLAQAQSNRGAAGRKKDFPDAERLVKRLAAQELRLSFVPDVEQRLWRTIMRRKHQLTRNRVQFQNRLECLLEEAHIKLSSLVSDLLGKSARRMLQAVAEGAASPEAIAALADRRLQATAQQLSDALGACRDIHPVYRQLLKMALEELQLIERQIDKLDQEMAQLLSAQRDVVQRLAEVPGLGADSAQQIIAEVGPAAAAFPSAKHLASWVGVCPGEQESAGVNYSHRSPKGNRQMKGLLNQAANAAVRTKGSIFEFVYRRLVPRLGHAQAIGAIAHRLCRLIWMILHQAIRYEERGPAVSRSKTERRARLMIRELRRLGYRVEPMGAQAGVSA

SEQ ID NO: 476078 - protein, 399 aa, unidentified
MLAVGIDISKSKSVAAILNQDGSMHTSPFEFHHTQPELDAFIKYILNSNQSATILMENTGHYHYPVLKAFREAGLPVCMVNAYQIKKFGDMDLRKAKTDKKDAVRIARYALEKSYSLVPYTSMEQKYEDLKFLARQYNQRMLTLKTNKVFLLNLLDETMPGITNILPLTTRTPETSLSVLFINRFKSYDRIKKMGKSRFLDAFEKITRKSRNRQTKTYGLAIYEAALRNITTRGENEYTLAAQDQCLELVCESQKAADSIILKMKTLAETLPEYAVLRSMAGVGDRLGPLILAEIGDIRRFHSGKALNAYAGNDAPPYQSGTFESHNRHISKRGNAALRKYCFEVMQALKLTQPQDDPVYLFLLKKEQEGKPYNVAKMAGVNKFLRIYYARAMETLKQQ

SEQ ID NO: 476079 - protein, 433 aa, unidentified
MISWLAADCERGIGKGIVLVVLFVGNDWAEDHHDVEVQDGSGKRLATARLPEGVEGIARLHELIGRFADPDDPAGAGQVLIGIETDRGPWVAALVAAGYRVFAVNPMQVARYRERRSPSGAKSDPGDSHTLADMVRIDAHQLRAVAGDSPLAEGIKVVARAHQTMVWERSRHTARLRSALREYFPAALAAYEQLADLAAPDVLELLAAAPDPRSAAGLSVERIEQALKRARRRDRAAKAARIQQLLRAPALGRPDVLAGAYAATVTATCAVIATLNTQITTLQGQVEAHFGRHPDVEIYRSQPGFGELLGARVLGEFGDAACRYCDAKARKNYAGTSPITRASGKRKSVQARYVHNDRLIDALTRQAFSALSASPGARAYYDSLRARNIGHWAALRQLANRLVGILHGCLKTGTVYDEHTAWGHHNQDQQDAA

SEQ ID NO: 476080 - protein, 349 aa, unidentified
MTVYVAVDFHAREQTVSYCDLADGEIHRRKLRHQHDDVRAFYQQFTGAVIVAFEASGYSAWFEQMLAELGHTVWLGNPAEIRRKAPRRQKNDRRDADLMLDLLLKGDFPRVHGFSEESRTVLRQLRYRHKLVKVRTIAKNSLHAIGINAGLPLKRRLLTEPGIAQLQALSLSPVLTQQRDEWLQLIALMNERIATVEAQLQQRAKDDAAIALLRTHPGIGLLTSLALRYTLLPTARFSTTRQVTAYVGLDCMEEQSAERRRMGSISKAGSKLLRFLLNEAGHTAARHDPELKKFYRRLLHRRDKPKAKVAVARKLLVRSFIMLRDQIDYAEFVRRGVAARVAREAHSLP

SEQ ID NO: 476081 - protein, 406 aa, unidentified
MAAVMIGVDPHKASHTAAAIGPAEEPLGGIQVRAVASQAAQLLAWAAAWPERTWAVEGATGLGNLLAQQLVTAGEVVLDVQPKMAARVRLLASGNTNKNDPNDARSVAVAALRSPAPRRVAAEDHTAVLKVWSKRYRDLGRARTQVACRLHAVLADLVPGGFSREITAGQGTSMLKRIRPSGPAARARRELAAEFLADLRRLDSQMRDTRNKLAAAVQASGTTLTGIFGVGPVIAAAILGDAGDASRFGDRDRFAAYNGTAPIEVSSGGRKIHRLSLRGNRRLNHAIHMAAVTQIRYAHSPGRAYFDRKLAEGKTGKEALRCLKRQISDAIYARLVADAAPRGTPAQAEGPGGQSGNGSVSSAVGSHPGRRLFGQATPGPHPSLRPAATARRAVQATAFKTSHRSP

SEQ ID NO: 476082 - protein, 339 aa, unidentified
MKLYAGIDLHSSSSYLAVIDDKGARKYKKKLPNNLGGILQQMKLYKKMIAGVVVESTYNWYWLVDGLAAEGYAVHLANPSAIQKYTGLKHADDKHDAFWLAEMLRLGILPEGYIYPKEERPLRDLLRKRSHLVRLRTSLIISLQNIISRNCGIRLNGDEAKRLKEDRVTPLLSQNEDLRLAGAVSKESIDFLTRQINSIEKVIEPKIELKEQYRHLLSMPGIGKVLALTIMLETGPICRFEHVGNYASYCRKVGSQWTSNGKAKGKGNKKNGNKYLAWAFSEASEIARRYDAQVRAYYNRKLQKSNRMVAHSALAHKLARAAYYIMRDGVPFMPEKLFS

SEQ ID NO: 476083 - protein, 317 aa, unidentified
MMKKHVGIDLGKYALDLHIFEDQKDIHLDHTAKNIEKCAAMLAKLDVELVALEATGGYETNLVMALQTAGIAVAVVNPRRVRDFARAAGVLAKTDKVDAKVLARFAAVMQPPARELIDANTRILQALVARRTQLVNMRTMETNRKEHAGDKLIARSIEAIIRTIQREIDKVEKQIRQHIDQQPELKEKAKLLETTPGIGETTAAMLVVEMPELGRANKKEIAALMGVAPLNRDSGTLRGKRMTGGGRRTVRARLFMPVLSAIRHNPMIRKYYQHLRAQGKAKMTAVVAAMRKLLVILNTMVKNNQVWNCQIARSSCL

SEQ ID NO: 476084 - protein, 410 aa, unidentified
MKKHNYRTKKVNEINWPELGQQLGGEAVTFAVDVAKAQQYALLTNDTQSLSIIVKWELLETKGLIHELKQLNCPVTVVMESTGTYGDAMRHQFRQAGFILYQASAKRVHDAKEIFDGVPSLHDAKAACLIAKLHKEGLTKPWHELDEAGRELNAVRREYDMHQSQYERNQNRLEAYLSRHWPEVLGLFDLDSVTLEKLLITYGSPQAIAADAEQAAKDMKSWGRHFLSAEKIACVIDSAVGTIGQPCINAERRYLQALATEMQHSRCQRQAAKQLLEASVEADAGLKEMAALIGKLTTAILIGLHLDPRNFSSAHSFLKALGLNLTEKSSGQYHGQLKLSKRGSATARKYLYLAALRLIQKDPVIGEWYRAKADPKVKMKTVIACLRKLAKALWHVARGERFDARKLVTI

SEQ ID NO: 476085 - protein, 327 aa, unidentified
MEHYVGIDVSLELLSVCVVDGRGKIVKEAKVASEPEALVYFLKELGFPVNRIGFEAGPLSQWLHAGLTQAGFEAVVLETRHVKAALSAMPVKTDRKDAFGLAQLLRMGWFQQVHAKSIGSQEIRALLVARKQLLGRLLDVELSIRGILRGFGLKVGQVTRKTFEARIRELVTGHTTLERIAEAMLSARATLKAQYEKLHKAVLAIVREDAVCRRLITVPGVGPVVAVTFKSAVDDPSRIAKSKAVGALFGLTPRKYQSGEKDVTGGTTRTGDEMVRTALYEAANVLLSRITRFSKLKRWGMDVAKRRGSKRAKVALARKIAVILHRM

SEQ ID NO: 476086 - protein, 378 aa, unidentified
MSKIIRIGRDTSKSVQLHGVDAAEKPVLREKLRRSQVLEFFSKLEPTLVGMEACAGAHYWARELIALGHKVVLLPPQYVKPYVKRNKNHAADVEAICEAMSRPTMRFVAVKTAEQQAALMLEGVRDSLISRRTQLCNMIRGYAAEFGLVAAKGLDKIEPLLARVASDHTLPMLARELFASHGEEYKRLKIEIAEIEAKLLTWHKDNELSRRLVAIPGIGPIGASLMAMKVADPRAFRSGRDFSAWLGLTPKDHSTAGKTRLGVITRAGDERLRSVLIVGATAVIKQLRRGKTQASTWLMALLRRKPPKLVAVALASKNARVAWKLMVSGEAYNPARYGSLVGPADAARAGRGAALLARIAHQPTSGDDRDDQSITSSA

SEQ ID NO: 476087 - protein, 470 aa, unidentified
MGKTSKTRRKRCSTASGSTKAVDAGLPVLRGSVAGIDLGSTENWVCCPPKSDGTANVKVFGTMTCDLEKTADWLKSEGVESVAMESTGVYWIPLYELLEERGFEVLLANARQLTNVPGRKTDMEDCQWIQLLHSCGLLRGSFRPSESICQLRTLMRESSNLIDERGRKVQRMQKALDQMNVQVHRAVTDITGVTGMGIIRAIVAGEREPLALVELRDKRCRKSIKEFAEYLRGTWREEHLFNLRMNLELYDKLNEMLEAYQQKIAMLMQKVEPEERCGKQTPEHPNKNKVNAIRKRGEEAIRQSLWRFSGFDLTRIDGISTGCATVALTEVGFDLGDFPTENHFTSWLRLAPHRSVSGGKVLKKKRNSVGATRLANSLRMAASSLHRSKTALGAQFRRISRRKGHSVAVFAIARKLAVLIYRMMRYGQDYVDQGAAAYEERFKQRRIHNLKSMAKEIGYELKPVPLAPAA

SEQ ID NO: 476088 - protein, 354 aa, unidentified
MIIIGVDFHPEFQQIASVDTDTGEFQEKRLVHREEAENFYRALAATGHNVRVGMEASGQARWFERLLNELQFELWIGDAAVICTKRVRKQKTDRQDAQLILQLMIEDRFPQIWVPSWENRDLRQLLWHRHRTVQTRTRIMNQLQALALNEGLRCKKRLWRERGRQQLESFRLGPWASRRRRDLLELLDRLNPTIAELTQAIEQEAEKCPAAQRLRTHPGVGALTALAFVLIIGEADRFHCGKQVASYLGLVPLEDSSGNRRRLGHITKQGSSILRFLLVEAAQVTVRSLPEWRSKYFHLAMRRGRKIAKVAMARKLAVCLYWMWRKGWNYEQLTKFGSHAGKPGTGHGVQLNTE

SEQ ID NO: 476089 - protein, 333 aa, unidentified
MKNSKLLLCGIDVSAKELVVAIDPGNGRLWEGVFANDAVGRRQLTRRLTRTKATARVCVEATGVYHLDLCLALQAASGVEVMVANPRITKDFARAQLRRSKTDRTDALSLLEFVRRMDFELWSPPSASILGLRALSRRIQALLVTRAQEKNRLHADDSVEATPLAIRESIERHLEALNSEIDSLTASAIEIVSADAKLAPRFAHLVSVKGIAQASAVTWLAELSVLPDDLDPRQWVAHAGLDPRHSESGTSVKASVRISKVGNRHLRAALFLPAMVASQHEPRVRAYYEKLIARGKKPMQALVAVMRKLLHPIHGRFEHDADFDGTKFFAETA

SEQ ID NO: 476090 - protein, 356 aa, unidentified
MGQKMVRSLFKSKNKSMDISSKNYLGIDVSKPWFDVSFIAVVNHVKQAMVTERFDNSIEGMKHFKTWLKTHAISLDENTLLVIENTGVYHRLIWSFCSKNNLPLHIGNAAHIKWSLGITRGKSDVIDSKRLCTYCCKQADELKATPVLNPVFMKLKDLMSSRSRLVAQLHSTKNYIKEIQCTNDKALLSMLDKAHKAAIDGIKKSIGQIEVLINKIIVEDAAIKANYELIKSVPGIGHLTAVYIICCTNNFANKVSGKQLASYAGVVPFGHSSGISIKGKNRVHKMANKELKKMLHLCALTAIKYYPEFKQYFDRKKAEGKNGMLVLNAIRNKLILRVVAVVNNQQPYVDNTKIAA

SEQ ID NO: 476091 - protein, 320 aa, unidentified
MTPECFVGIDVSKDRLDVALRPTGERFSVDNTDPGVERLIRRLVEVSPALIVLEATGRYHRLALGELLAAGLPAIAINPRQARDFARAIGVLAKTDRIDAAVLAEFADKIRPEVRTIADEDTQQLEAVCTRRRQLILMLTAEQNRYPIASKAVRPKIKKHIHWLEAELEDLDEELKMRIRTSPAWREKEDLLSSFKGVGKVTSHSMLAYLPELGRLDRRQIAAIVGVAPFNQDSGKRRGQRHIRGGRRRLRNVLYMATLVAIRHNPTIREFHRRLANAGKAPKVAIVACMRKLLTILNAMLRSKSRWQPDFPLVSQDSLS

SEQ ID NO: 476092 - protein, 339 aa, unidentified
MDHVAIDLGSRKSQICVRSADGQIVEEKRWDTAKLKAYLAKRPKSRIIVETCAEAFGVADAARELGHETRVVPATMVKTLGVGARRTKTDQRDARVLSEVSCRIDLPTVHIPKAESRERKTMCGMRDALVGARTKVINTVRGWLRGQGKRLAKGSRATFAERVRAVCDGQPPSYVERQLQVIEALTVEIAEADLEVESWSEADETCQRLMTVPGVGPLTAIRFVAALDDVKRFENAHQVESYLGLVPGESSSSERQQRLSITKAGPSPLRWVLVQAAWALRTRCRKTEAIPLQMWAHQVEQRRGKRTATIALARKLAGILYAIWRDGTVYDGGRGAKKI

SEQ ID NO: 476093 - protein, 399 aa, unidentified
MLDTDRVGQDAIRTDLGAIFVSLELSAKRWLVTSLSPGPDEKLCRHKLEGGDLAALLTRIEALQREALEKHGAWFEVISIQEAGMDGFWIDRALEAAGVESWVVDPASVAVNRRRRRAKTDRIDGEALLRALLAHKRGEPRACSMVRPPAPEVEDVRRLSRERGTLMSERTGHANRITGLLRTQGITGYQPLVKRQRLDRLEGLTTGDGRPLPAHMKAQIQRELDRLALVETQLTRVEAERDKRLASWAAPAKATPELVDKRPVPGARLMQLKGVGPESASVLGAEVFWRSFDNRRQLGGYSGLTGSPFQSGQMDREQGISKAGNKRVRHILIELAWSWLRHQPDSELALWFKAKVGHRPTATRKKVAIVAIARKLLIALWRYETQGVVPEGALLDEAA

SEQ ID NO: 476094 - protein, 332 aa, unidentified
MDNFYFIGVDVSKKKLDFCVLFEGKVLREEQVSNYQQAVARLIGELKNDLEMDNEQFLICAEHTGQYTFPLVCACKSVECKLWLENPSQIKYSSGMQRGKNDKVDAKRIAIYASRFGDKVKYYDRPTEEIERLKQLERERALYVTDLAKYKGQMYDQKDFMPAALYRKKTKRMKGLIQELQAAIDAITAEMEKIIGSTEVLARQMELLMSIDGVGKVVALNVIIETEAFSRFDNPRKFCCHAGVAPFSYTSGSSQHSKNKVSHRANKNIKKLLHMAAVSVTHRKEGELKAYYMRKVEEGKNKMSVINALRAKIVARMFAVIKRNEVYTPIYS

SEQ ID NO: 476095 - protein, 426 aa, unidentified
MSPSSPVSTVIVCWIGIDWADQEHVISLKAVGSPTVERLQLRQQSEALQDWIGQLRQRFAGRPVAIVLEQSRGPLLYALMHTDFLYLYPINPKSLARYREAFYPSGAKDDPEDADLLREIVEKNPERFRCWTPEDPLTRQLQLAVEYRRKLVTQRTALTNQLTSLLKSFFPQALEWAGGLDTAQACDFLQRWPSLQGLQATAPSKIRQFYRTHHSRDLQHLDERIAQIRAAQPLTGDSGIIGAMSLMVRSLAQQIQPLLDSIAEFDRLIETLFQQHPDHSLFDSFPGAGAALAPRLLAALGSDRQRFETAAHIKSFSGIAPITRKSGHSRVVLFRLACPKFVRQTFHEWAGLTVRFSPWAREFYQRKRATGMKHHAILRALAAKWINILTRCWKEGIPYDEQRHLDNLKKRHAPRSLVGFSRERPV

SEQ ID NO: 476096 - protein, 421 aa, unidentified
MAQQVFDRLFERVAGLDVHKAQVTAAVRVPDGDGGRVQHVAEFSTTVRGLVALRDWLEAHQITHLAMEATGVYWRPVWAILEDRFKCILVNPRDVKQVPGRKTDVGDAAWIAQLLEAGLLRASLVPPKPIRTLRNLTRYRKTQIEERQREANRLHKILEDTGIKLDCVASDILGKSGRAMLDALVAGTTDPAILADLAKGRLRAKIAALTEALEGRFDSEHALIVSAILAHLDFLDEQIDRLSDAIGAQLGPFATAVELLCTIPGVQRRTAEVIIAETGGDMTVFPTARHLASWAGACPGNDQSAGKRRSGRTRKGSRWLGIALTEAALAATRTKDTYLAAQYRRLRPRRGHKRALGAVKHSILVAVWHMLNTGELYREPGGDYFERRRDPQREINRLIARLERLGANVTIGPATSTPAPA

SEQ ID NO: 476097 - protein, 360 aa, unidentified
MAKARSLVGLDVHATKIVAAVLDAETGQLQTFAMSGENTKAAAFCAGLPRPVRVAYEAGPTGYGLARELSKRGVECVVAAPSKIPRASGDRVKTDRRDAEHLVRLLLAGQLHAVRVPGDEEEALRDLVRARDAVRMDLMRCRHRLSKLLLRHEIRFDDGQAWTQRHRDWLATVTLDWPAAQATLLDARGAIDALAHRREQLEREIVALLPASPWVRQVARLRCLRGVDTLSAVGLCAEIGDFERFARAEQLMSYVGLVPSESTTGQQRRLGSITKTGSGHARRLLVEAAWHYRSRPSIGRALTDRQDSQPPEAIAVSWSAQRRLYRTWTRLEARAKRRTIIAVAAARELAGFCWAITRIE

SEQ ID NO: 476098 - protein, 403 aa, unidentified
MVKYHVGVDVGKDRHHVSIRDLSKDMYCKNFAVTNDRDGFTALITVLEKLSSERSDFLIGVEACSYALNLSYFLLALGFTLMEVNPFRAGQFRKAQGKKAKTDKIDARTIAAILSLDNHKPLSIPNPILDNLKEFTRFRVDLVNEKSTMIIHLREALSVLFPEYEKVFRQLDSAGSLALLAAYPGPEHMIGAGEEAVGKTLSLASPRRMSRGMARRIIEAARNTVGVTQKQLALGMKISVLAKRILNLQSTICDLDRQITALYNSLPCKPQGFPVGRAPSLATIIAEIGDIHRYRTLKKFLSHLGWCPQSFQTGNYRLEHPKMSHAGNKYVRRLIWMLSIFAVQFVPRYREYFKRRVSKGKAKMHIIVAVGRKLLSALYAMLKSGMAYDPKWEENGRLALARR

SEQ ID NO: 476099 - protein, 346 aa, unidentified
MKHYAGLDVSLKETSICIVDETGAICREMKVPSHPEDLVRALQDPAWRLARIGLEAGPLSQWLFSGLAQAGLPVVCIETRHTKAFLKAQVNKTDRNDARGIAQMMRVNLFRPVHIKTLTSQHRRALLTARKLLQEKAVAIENDIRGLLRNFGLKVGMTGAVGFDVRIRELVDGRPELADITASLLAARRMLREELSRLHRKVLEITRDDGVCRRLMTIPGVGPVVALAFTSTIDVPARFRKSKAVGPVLGLTPVLKESGESKRVGQISLCGDGMMRGLLYEAAQVLLTRVKKWSWLKAWATNVAKRRGIRKAIVALARRLAVLMHRIWSDGTEFRWTKDPLMQPSL

SEQ ID NO: 476100 - protein, 353 aa, unidentified
MGDQSLRSEVILGVDTHLDVHVGVVISNTGKLLGTLAVPTDKTGYFKLLSWASSLGSLCRAGVEGTGTHGAGLARLLRDHDIDVFEMNRPDRAKRRRQGKSDPTDAEAAARAVLSGDATAVPKTQTGAAEAMRAVSVARRSAVKAKTQAINQLRALLVSAPQEIRERLWKANPSECVAGCARLRPLGSTPLLRALTTTLRLLAKRWLMLAEELKELDGNLESLTSQHAKRLRQQFGVGPQTAAVLMAVAGDNPERLRNEAALAALCGASPLQASSGKTSRHRLNRGGDRSANNALWTIAMVRMRSDPRTRAYVKRRTADGMSNKEIHRCLKRYIVRALYPLILADLADSARLS

SEQ ID NO: 476101 - protein, 404 aa, unidentified
MEVINERCCGLDVHKRIVVACVLTPEGSETRTFRTMTQGLLELADWLVEHEVSHVAMESTGVFWKPVYNLLEGLELTLLVVNARHIKAVPGRKTDVKDAQWIADLLRHGLLQGSYIPDRSQRELRELVRYRRNLIRERSRVINRIQQVLEGANIKLSSVVTDITGVSGLAMLGALARGETTPEQLAALARGTLRHKRAELEAALHGLMGPHQRLMLQSQLRHLEFLAQEIEQMNQEVATRLDPFEEAVQVADAIPGIGRRGAEEILAEVGTDMSRFPSRGHLSSWAKVSPGNKESAGKRKSGATGQGNPWLRSALVEAAWGAARTRGTYLSAQYHRLAARRGAKRAILAVAHTILVTLYHLLRDGTTYQDLGGNYFDQRNPQAILRRSVRRIEALGYKVILEAA

SEQ ID NO: 476102 - protein, 351 aa, unidentified
MPHKSTVHAVTAIGIDMGKNTLHMIGLDLRGAIVLREKVSRGRVASRLANLQPCLIGIEAGMATHYVARELAALGHDVKQVPPTYAKPFRQGHKNDFRDAHAVAEAVQRPTTRFVPAKTNEQLDLQALHRVRSRLVSERTAVINQIRGFLLERGIIVRQGLRFLRQQLPDILAKRTDVLSPRMVRIVADLAGDWRQLDERIETVTDEIETLAKSDDNCRRVMTVPGIGPIISSAMVAAIGSGAAFARGRDYSAWLGLVPKQMSTGDRTILGRISKRGNGYLRTLFMQAARVILLRPANWPKHGFGAWLIRAAQRLHPNVLAAALANKLARIAWTVLAQERSYEARVTKAAA

SEQ ID NO: 476103 - protein, 377 aa, unidentified
MGSKQREEKIEQLSVGVDLHKSQLTICVMREDGELVQEGMYRTTAEGYQAFVQKMHEWENELGCSMSMAVETTGNARFFKNRMEAEGFSVVVVNTNKFKVISQSTKKNDRGDAATLAYYLGKDMLPESHLADQSSEELRRMIKCRSLLVSSMVKMKNQIHGMLLGYGITTKAAQLQSKKKRQALVKDLVDQGSTEAAASLEVILGIIEGVQEQIKVLEKRLLEMTSDDEDVELLMTIPGVGFLTASTIAAYTKDLDKRFCGDFKRFASYVGIVPSVHNSNETVHMGRITKHGPQELRTAFVQATMGMIRLSKVTGDWRLMTDYRAMKTGKGSGKSIIATTRKLARIIFAMLQNREPFNPALMVRDKCLFTVEEVIGA

SEQ ID NO: 476104 - protein, 348 aa, unidentified
MQVTTLGIDLAKNVFCVHGCDANGKPVLRKQLSRRQLLSFVANLPRCLVAMEACASAHYWAREIEKLGHQVRLIAPRFVRPFVKANKNDASDAEAICEAVSRPSMRFVAVKSTAQQDVQAVHRVRQQLIKTRTALVNQARGLLAEYGIVVAQGVGRLRRALPAMLEDRDNGLSGVMRELLAEIGERLRFIDDRLRKYDLTIHRLFRQDERCQRVAAVEGVGPLSATALVAAVGNATDFKSGRELAAYLGLVPRHRASGGRTVLLGISKRGDRYLRTLLVHGARSALYRIERHRGARAIWAARLKLRRGANVAAVALANKNARVLWALLSRGQSYRPAPFPARVPQAGG

SEQ ID NO: 476105 - protein, 331 aa, unidentified
MNYSHFVGLDVGKKTFDASLMSAAEKELSHKSFDNTPEGIQSLLDWIAGYHLSLSKLLFCAENMGSYVTELSVSSVSMGFSLALVCPLTIKKSMGLQRGKNDRIDAKRIANYAVLHYRKLELYKLPNKDLVRLRGWIIIRDNLVKQKVSSIKLLETFSQMAKLADVTESISFLEEQLKSIKEKILEVEEDMEQLIAASTSLYTNYLLLRSIKGIGIINAIVLLCVTDNFQRFDTPRKFACYCGVAPFEHTSGISIRGKTQTSSLANKEVKVYLTRAAITAISWDPQMKAYYKRKIAEGKHKASVINAVRAKIIARSFAVIRRQTPFVTLAV

SEQ ID NO: 476106 - protein, 408 aa, unidentified
MSNEKLYCGIDIGSTNHSLVVLNMQGKIVLKKNIDHRFTVFNEIIISLKNLEKENVAEVIIGLEGQSGYATPFDRLLKEAGFKLYNIDSLKLNNFRKIYGTENKNDERDAELIALFIKSKSQFESENEKAFTELKVRSIMNEKIRLLIHHQQSIIEERVRYMQRLEKHLLGFCPELLEIGSLKNISVLNYLIYYSNPQKYKNMTLKKLIKISSIGEKKAAEMLPKLTNVKYDEKLTEEFSYIIKSLAAKILDLINEENEIEKKLEDISTDDEDMKILTSIEGCAAKSAGILSGEIGNIQNFKGESQLASYCGVACIDNSSGKKEAVKKNKKINKLCKFALMQVANAARQFNEESKKYYNKKRTEFGFKKKGSHLHAIRCLARQLVKVIFKLLTSKKEYVVKNIEVAVI

SEQ ID NO: 476107 - protein, 411 aa, unidentified
MDKVYDKCCGIDVHKKLIVACFRKGNKQEVRDFGATTRELLELAEWLKEGGCEMAAMESTASYWKPLYNILESSDLNAMVVNARHMKAVPGRKTDVKDAEWIADLLQHGLLQASYIPAKDQRELRELVRYRKSLVGERGRELNRLQKMLEGANIKLSGTVSDINGKSARSILEYLITGASIDGKKYDEMYEQKVIAHNLKASKDQIIDDLNGIMTPLQRRMMKELLIHLDELNAHIRNLDDEIDNFMKPEEKQAVSAIEDVAGIGHTSAQAVISVIGTDMTRFPDDAHISSWAGLCPGDNESAGKRKSGKTRKGNALLRSTLVTCAHAATRNKGSYFYAQFMRVSAHRGRKRAYVAVAHSMLVAIYHILKDGVVFKDLGADYYNQFNKERKINAYLKKLKALGWEGSVVAA

SEQ ID NO: 476108 - protein, 370 aa, unidentified
MSEMKSVQTSVLGNRPWIGMDVDKERFAAALYADPRPGTPDLKGMPTEMFTRDAAGVAACMKWAGKALAKSRPGAPVPRVCMEATGRYSIGLAQEILRQCPGWEPAIANPRFVKKHGESMGQRCKSDKADARVCACYGAERQPIAYQAPQPAFEQLQDLTRERRAIVEQRAALKNRMVGTAATKIARRVQEQLMKQFDKLVEKLDAAIDQAFKDIPQLCADAQTVAQIPGVADVVSSVTISELGDLRNYHRSRSVAAAVGANPRVIESGKHKGKTRMSKQGNSRVRSILYCAAMACLRTKNDHCLKRFYNRLVGRGKTHMQALGALMRKIIVLMRALVISGQPFDPDHDLKKHLSTASPEKELQPVDNLA

SEQ ID NO: 476109 - protein, 351 aa, unidentified
MNILAMDLGKSNTVFCLYDSESGRHRFGKARTTPQQVHNLLVEHSPDRVVFEICSAAGWVYDIAASLGIEVQVANTNHQAWRWKNIKNKNDRNDALKLAQLSAMNQLSLVHIPRRSVRQKRSLIQYRQSLVGRRTRIKNSIRAILDREGLPVMPQGKSGWSKAAVERLRRLAMPMERCDAGNLWRGQLQVEIEMLESVEGCIRGVEGKLDELGRDDAQVRRLRTVSGVGPRLAEAVVAFLDEPGRFRSGKQVGSYVGLTPRQYQSGQMDHQGKISGQGNKILRSLLVEVSWLGLRHNRWMNETYHRILRGSASRKKIAITAVARKLLVRCWAMLRDEREWMDEVKSKELAA

SEQ ID NO: 476110 - protein, 360 aa, unidentified
MDITEDTTGPFVIGGVDTHKDLHVAAVVDNHDRLLGSQSFATTRHGYKQMLAWMRSFGPVRRVGVEATGTYGAGLLRYLQKAGVEVLEVTTPDNGDRRKRGKNDDIDAQNAAHAAFAGKRTVTPKSRDGMIEALRVLKACRKTAIAARRVALQMIHNTVVCAPDDLRDQLRKLTRMELIRTLAAWRPDMTDYRNVASAYRITLRSLARRYLELHDEIADLDCMISAIVDELAPNLVAQNSIGHESAAQLLLTAGDNSERLHSEASFAALCGVSPVPASSGKTTRHRLNRGGDRAANSALHIIAIGRLRTDPRTKAYVAKRIAEGHSKLEAIRCIKRYIAREVFSFISQRRREINQLPVAA

SEQ ID NO: 476111 - protein, 411 aa, unidentified
MTDSGKRYIGLDVHKHYLIALGVDAELNVVLPVRRVELSRLENWMEKTLTEQDEVALEMTTNTWQLYDELCEYAGSVVVVHPPHVALITRSQVMNDKIAASILARLLAKGLLAGIWVPPQEVRELRGLVAQRKKMTRLATQAKNRLHAVLQRHHLQPPDGNPFRESQNDWWLALPLGQLEKMNLQSDLETLQFAEKQQVRLTEVMTRIAAENEEISRLLHLSGFGVITAVTVWAAIGNIQRFAEPKHLVGYAGLGARVHDSGQTTRTGRITKAGRRDLRIALVEAAQVAANTHPHWKAELARLEPRLGRNKAIVAIARKLLMSVWYILSQQATDRFAEPEAIAQKLLKFAYQVGKNNRPAGQSAAEFVRQRLDVLHLGSDLSSISWGSKKPIPLPPSVWQEKGVSDVPNLS

SEQ ID NO: 476112 - protein, 331 aa, unidentified
MKILDTVGIDMSKLTFDTRIHSNQDYKEFENSKSGFSRLLKWVYKNSSFPKENILFVFEHTGLYSHQLSVYLTEKKVPFSIIPGLEIKRSLGIARGKDDKVDATKIALYSYRLRDEIEIYKMPTEQVASIKRLLSLRVRIVKQRAGFKTSYGEQKRVLSKKENSTLFNVQEKTIKYLSKQIADIEKEMMTIIQSDDKLKEQYKLITSVNGVGRQTTLFMIAYTHGFTKFKTWRKFASYCGIAPFPNSSGTSIRGKTRVSNLANKKIKSLLDLCAKSAIQYNPEMKIYYNKRVDEGKNKMSTINIIRNKLLARIFAVVERQTPYVDIMKYAA

SEQ ID NO: 476113 - protein, 354 aa, unidentified
MSIVADHYRTVVGVDTHAATHTYAVVESPSGKLLDQKTFPTTPAGLSRATVWIRRRADGNAETVLISAEGTGSYGAVMARRLTEGGYRVVEAPTPSAKRLRGKGKTDSLDAITAARSTLIMDIERLRDRRAGEVQTALKLLTVGREQMNTDRLRTLNALTALIRAHDLGIDARHALTPGQIVTISSWRHRDEPLGSTIARSEAVRSAKRILTLDTDLKTNRLQLTNLVDEHSPALIAMPGIGAVTAAMIMTVWSHPGRIRSEGALAQIAGTCPIPASSGKTIRHRLNRGGDRQLNRAINTIALTRMRTDAATREYVLKRLAEGRTKREIMRCLKRYITRQIYRTLAAAASSPTA

SEQ ID NO: 476114 - protein, 338 aa, unidentified
MGTYAGIDLHSSNNYIGIMDQDYKRLFGRRQPNDLNNVLKVLEPFKADLEGVIVESTYNWYWLVDGLQEHGYTVHLANPSAIKQYEGIKHTDDRWDSFWLAHMKHLNILPEGYIYPKEQRSVRDLLRRRLFFVKQRTANILSLQSTITRNLGIKISGNNIKKLNMDDANELFDSSNLVFMAQNNISAIKHLGKIIKGIEKEIKPQVQLRKEFVMLLTIPGIGIILGLTIMLEVGDIIRFSKVGNYSSYCRCVSSKRLSNGKKKGENNKKNGNKYLAWAYVEAAHFATRYIPKAQKFYQQKMAKANGAVATKALANKLARASYFIMRDQVPFDEDMLFK

SEQ ID NO: 476115 - protein, 373 aa, unidentified
MVAGKKSGKKEGCKMNSIVAGIDLGDRESLATVLSPIGDVADRFTFPMNEEGYAFFASRVPKNARVAFESTIMAYPISRALRMHGYSDVTVAHPKTLAWIVRSKKKNDRVDSLKIAKLHMAGMLPESHLLDRDEQIVRDLLVQRVKLGVEIGRLKNSVIGYLKREGVYDSLPRTGDNFSARRRQAIHSLRFNDNRDLVLGTMMDRLHFLEKQCTPLEDSVRENAKLSDDVKILMTITGVDYYLASLISSFIGDVERFPSDDHLASFFGIVPTSRDSADVKRRGRMTKDGSSIARWTLSVMVDTVMHHNEPIREYYTSVKKRTASGKLAHVSTMRKLTRMLYHMLKAREHWKWENPLLTERKIARLQMGGGDWS

SEQ ID NO: 476116 - protein, 456 aa, unidentified
MQNYLGIDVSKGYADFALLDEFKQPLINNFQLDDTSEGHSKLGEFIRKLFEQNEQLILLSAVESTGGYENNWLNCLQKLQRCYAIKVARLNPKGIHHYYEAKLRCTVTDSISARMIAEYMISHGEVVRFEQQDQMYSLRKQWTLIRMFCKQKTQLLNQLNNLVYQASPELLIYCRNSWPVWLLNLLKRFPTASKLANSTTDQLTEIPYLKADTAEKIIKRAQQSVASATDTVTENMIKTIVEALEQKTKFIESCKKQLISTCSLPDVELVASIPGLGTYSAVGLVIEIGTWLRFSSVKQLAAFFGLHPILKQSGDKTWIPRMSKHGSAEVRAILFMATMVAIQHNPLIRELFARSLAKGKCKMSAIGICMHKLLRIVYGILKSGIPFDAAIDQAYRARKPVQKKSIPSTIRRFQPIDENAPVSARQNKKRKELSRSQDDSVTICEITTTALSRCVT

SEQ ID NO: 476117 - protein, 300 aa, unidentified
MGQGRKTLSVGLDVHKESIAVAYAPEDRGAEVVARGAIGTRQTDSDTLIRRLESKRAPLVFGYEAGPCGDWLSRDLTGKGLACQVVAPSLIPRKVGDRVKTERRDAITRARLMRSGDLSAISLPGIEDETLRDLSRGRDDTMQDLTRSTRRLTSFLLRHDVRSESRANGNPAPLPCLSEVVCPTPPNQIVFQESARAVSDQQERLQPLERELHEAAQGSRLSPVVEAIQALRGVELTGAGIVLAALGDLPRFDTPRQLMSCLGLTPSEYSSGERRRQGGITPPWNNLHRSSTSNASPFSV

SEQ ID NO: 476118 - protein, 408 aa, unidentified
MNPLYVGIDVNSKTNVAYLMLPNGDKHSNFSVANSHVGSTQLVIRILSALTSHSLDTVLIGLEATSVYGDNLVYFLREDATLAPFNRKIHVLNPKQVKKFKDAYNDLPKNDYVDSFVIADCLRFGRINKEVYIGGYRYKALQNLTRARYYAVCNLVKERQRFMNVLFKKYSTLTQEKVFSNTFSTTALAVYDEFESAEALASMDLRELTEFIMEKGKNRFPDPDSVAKVIQKTARSSYRLPKTVNDSVNQVLSISITSMKALESQIKEFDKAIAAQMKLLPNVLISIPGIGPVFSAGIIAEIGDINRFESQAQLAKYAGLAWTQYQSSGFEAETTRLIRSGNRFLKYYLCEAAFSLVRCDKEYSDFYHLKYKEVNRYQHKRVLALTARKFVRLVFALLKDNRLYRTAK

SEQ ID NO: 476119 - protein, 428 aa, unidentified
MNYNTQNKKIASITEKTLIVGIDVGSQTHYARAFDWRNYEYSKKPFAFINNEEGFVAFKNWMDEIAEKHHKDKVIPGMEPTGHYWFSLGAFLQNSGMRVVHVNPHHVKKSKELDDNNPNKNDRKDPKTIAALVNEGRFSYPYIPTGIYAEIRNLSNLRFQTQEEITRIKNRIARWFSIYFPEYKDVYGKLDAISGLMILREAPLPEDIVKLGAEGNNKIWRDAKLRAVGMKRAKSLVNKAEHSVGSQEAPEAARMELRILLSDYEMYSQRMEELIQTIEEKLKEIPYIDKLMEIKGIGMITICGFIAEAGDIRRFDNPKQLQKLAGYAIVSNDSGKHNGESHISYRGRKRLRYVLYEAAISLIGKNPEFKEIHNYYLTRKENPLKKMQSVIAVACKVIRVFYMMLTKGVAYDGVKMLQDIRRTELVMN

SEQ ID NO: 476120 - protein, 355 aa, unidentified
MDSTKYIGMDVHKETVSIAVMNSAGKVVTESIIETKTATILQFIQGLRGNLHVTFEEGTWAAWLYDLLKPHVTKIVVCDPRRNALLKEGNKGDQVDARKLAELLRAGLLRPVYHGENGLRTLKELSRSYLTISKDLTRVMNRLKALYRGWGISCEGATVYAPHHRSEWLGKITEAGVRRRAEFFYQQLDALQALRQQVRRDLLAESRKHSERKLLRQIPSIGPIRAALLMALIQTPHRFRTKRQLWAYSGLAIETHDSAQYRYVAGQLRRSKKPQQLRGLNRNHNHDLKAIFKGAATKASSGAGPFHDFYQALLTKGMRPSMARLTLARKIAAITLIVWKKGAHFDAEQLKPQAA

SEQ ID NO: 476121 - protein, 400 aa, unidentified
MISVGIDVSKGKSTVCILKPYGEIVSKPFNITHTHKDLSELSSMLFRLNDEVKIVMEATGIYHLPVLTYLQEKGFFVSVINPYLMKSYRNESLRKAKTDKIDSRIIANYGIDHWFKMKEFQTSGEIYEELKLLGQQYRHYMKLHLLSLAELTHLLDLTMPGIKNLLASWNETNRKDKRSDFVERFWHYDVITSMSEQKFTEEYILWAKEKKYVPSQEKAKVIYTLAQESIPTLPSETSSVKMLVTEAVRVLKEVDATLGLILSRMQEIAKTLPEYSVVREMGGVGNTLAPKLIAEIGDVRRFRNGKALVAFAGIDPPPYESGQFVGCNRKISKRGSASLRKVGYETMRSLKMRSRPEDPVYRYVVKKESEGKSKKSAKIAGLNKFLRIYYARVTELYKNI

SEQ ID NO: 476122 - protein, 355 aa, unidentified
MKKVLKQVLGADVAQNELVVTLGRMFDDLTIDLYAHKVFRNTEKGILALMDWVKKLTDPEVDVRFVMEATGVYHQKFAFCLYAQNHEVSIVLPNKISNYMRTLENKTITDKSCSEAITQFGLERKLDRWHKPKKIYQSLQQLTRERDQIVMERVMIKNQLHAEQAEAEPNERSLERLNERMRLLNKHEKEIKSDLTEIINSDRILKSEITNICSIPGIGELTATIVLAETNGFELIRNKKQLTSYAGLDVKEKQSGTSIKGKPRISKKGNRHLRKAMHLPSLSAVKYDENFRNVYVRIFSRQGIKMKGLVAVQRKLLEMIYVIYKSKNEYQKNYADLKGSSALSQKDQYATQTSS

SEQ ID NO: 476123 - protein, 408 aa, unidentified
MRYYIGVDWADEEHAVWVEDEQGQLVSVGMVPHSAVGFSEGGRELDEWRAQGIVLWAAIERPEGRVVDCLLDHGGRHPVNPKALDRARDRFRQSGAKDDLFDARVLAGFLRTDHAHLMALEPSSEASQELKLRTEDYQRQVRTQTRLVNQLTATLKAYYPRALDVAELTTALASAFLQAYPTPATLMVLTERQWQQWAKAHHLSEARTMELWTSLKAPQLPVPPHVVRAKSRLMQALVTELAAVVAVVASYRQAIDAFCATMPAAAWARTLPVGEHGVTVPTLWARLGDAPGRWESFRHLQAQAGMVPITVRSGKQVVVAFRFACDKQLRYAVDQLAWLSLQRSEWARAYYDQQRARGHRHRRALRALGAKWLKIIFIMWQRQVPYSEEHHLATMARQALRRPEKKIA

SEQ ID NO: 476124 - protein, 317 aa, unidentified
MSNPELFAGIDISERRLETALTRDGLHCAEEITHRYDPAGVAELISVLADKRVGLVVVEPSGGLERDIVSALVSAAIPVVVINGRRVRNFARSMGLLAKTDKIDARVLAAFGERVRPAVRAIPGEDVQELDALTSRRRQILEMIGMERSRLDRAKQNVAPSIRAHIDYLQGQQKRVEAEIQQRIEASPAWQTANELLMSIPAVGPILSATILGELPEIGSVPAEVITRLVGVAPINCDTGEHRGKRRIQGGRVAVRNVLFMATTCGIRWNPVLRDCYERLRRNGKSHKVAMVACMRKLLVIMNAVLRDGQPWQLAPV

SEQ ID NO: 476125 - protein, 342 aa, unidentified
MDRVYVGLDMGSSSFQQVGMNEAGMVRVKREFQTSEANLIKAVSDLKGEIHVHLEAGELAPWVVSVIAPLVHRVVCSHPQSNAWIAKDADKCDSIDAFKLADLLRLNRFKEVHYPAAQARRDFKSLVQHYDELTAQQARLKTKLKARLRMQGVIVRGQRAFSVSGRKTVLAAVKSAAVRTAINQLYTVLDQSVAAQTEARLLMLRAAQALPEIKIMKTAPGVGPIGACRFSAYVHAPLRFSSTRKLWKYCRLSVSHRSSNGKPLRRPRLDRNGCGRLKDVSRKAFDAALRSSQDNAFKRAYQRALETTHDTTHARLTVQRKIVSTLRAMWITQTPYGEELMR

SEQ ID NO: 476126 - protein, 343 aa, unidentified
MKHIGLDIDSTTTHINVFSDRGREIRRAAIPTREADLVAFMLSIVGPKQVALEESQMADFVTRILTPHVTKVIRCLPQHNRLISESEQKCDETDARNLAELLYLGKLKPVHHAPWDYRQLREGVRTYWRASRDLARTKSRLKAFCLFNGVHCVGEKVYSQRFRSGFYKEIAKRSGNREILQQLYAHMDFCRDRKAAHIKILRRLAKVFQKDVSNLKSYPGIGFIGACTLVSYLEDGWRLKNKRKLWQYCGIGVRRHESAGIGHRGASRKGNRYVKNAIMTAAASIAARRNADNALTWMWRAGIQAGIAPERMKRYLARKVAVLAQRSLRFKEEYDDARVVTTQ

SEQ ID NO: 476127 - protein, 408 aa, unidentified
MQVTFGIDVSKSTSTVCELIGESRNELTITNNRPGFIQLLHELTVFSKHPQIIFEATGVYSRRLQAFLEDYGYEYVVLNPLKAKKEMNMGLRYNKTDKTDAYHLALIQRLYRHPVNQSESQTYKQLNALSRFYDQLTSDLVIAKNRLHQALQSTFPEIENLFSIARGKNYWQIVARYPHCDLVRKDDKKQIINWLMKLKGIAFNHAQRTTDKLIELAHLAYPVVSCSDIEVQQAQYYARRLLNLSNQRQRIITKMVKLAKTLPNHDLENLESIPGFAQTTAVRVLAELGDLRRFSNPNKINAFIGIDPGRYQSGEMDSNLSITKHGNAVARKLLYRAIGQIDNAAKTNPCHIADYYESKKLSSQTKGFKKIAIASIHKLIRTIYALIINDQPYDYNVATHNQKDFSRN

SEQ ID NO: 476128 - protein, 422 aa, unidentified
MLEETHDNDQIIQRVAALDLGKAELTCCIRVSGPGGSGRRLQEVRTYQTMTRSLLVLADRLAELGVTRVVMEATSDYWRGAFYLLEAHGFETWLVNARDVKHLPGRPKTDTLDAVWLCKVAERQMLRPSFVPPRPIRQLRQVTRYRADLVAARTAEKQRVEKLLEDAQIKLSVVASDIFGVSGRAMLAALVAGERDPKRLAQLARARMRAKLSLLEEAFTGFFTDQHAFLLGKMLGRVDALDADLAELDAKLQELIAPLAHAVERLDEIPGVGQTAAHLLIAEIGADMTRFPTAGHLVSWAKFAPGVKESAGKRKGRGSTGHGNPYLARVLGEVAVAAGKTDTFLGERYRRIARRRGKKRAIVAVGRSILVIAWHLLADPEAHFHDLGVGFYDTRIDPDRAKRNHIRQLEALGYKVTLEPAA

SEQ ID NO: 476129 - protein, 349 aa, unidentified
MSIAMIGLDTAKSMFQVHAVDEAGKAEIKRKLRRSELVSFFEKQAACTVVMEACGAAHHWARMLTGLGHSVKLIAPEAVRPFVKRGKKNDAADAAAICEAASRPDVTFVPAKSLEQQGILALHSARSLLVKQQTMLANAMRGLAAEFGLTVPLGTDKLDELMALVEADEAVPKGARQAVRGLLDHRQALAESAKGFEAAIVAHARQDETARRLATIPGIGPITASLIAATVADIGVFQSARHFAAWLGLVPRQHSTGGKARLGRITKTGNREIRRLLVLGATSMVHRAAGWNSAAGVWTKGLLQRRPVRLVTVALANKMARIAWALMTRKEVYHAKGRVAAAAEAEAVA

SEQ ID NO: 476130 - protein, 318 aa, unidentified
MLIHYIDIAKRNFVIAVSSLSKTKTETNNPKGIAHTIEYLKKHKVALVVTESTVGLEIPAAKAIRRAGIAVIIANPRQTHQFAQSQPLTKTDAKDAKMPAFFAQMTAQKEDSQTMPYQPPTEAEEVLEALVNRRNQSADMRTAEKNRLHQVHETQVESVKQLIAHFDRLIDELDKQIDNHTHTHFDGKAQVAEQIKGIGSITTATLMAMLPELGRLSHKRIASLVGIAPHPRESGETKFKSRCFGGRSAVRKALYMATGAATRFEPLIRDFYHRLPSEGKPYKVAVTACMRKLLTISNARMRDYFAETDTAENGIRTA

SEQ ID NO: 476131 - protein, 376 aa, unidentified
MAQTDVQYPTIHLAIELSRSAWLVAARLPGVEKPSLHRIEGGDTAALLALAAALRARAAARLGTPVRVACCFEAGRDGFWLHRLLTAEGVAAYVLEPTSILVNRRARRAKTDRLDALGMLRVLAAYLGGDRQACSMVRVPTPEEEDAKRPHREREELVRERVRLENRIAALLATQGVRERPSLRSWERDLAALRTGDGRPLPPHLRAELDRLRRRLVLTLGLIREVEAERDAALAAGPRDAAGRKIAALCRLRGVGANFAAVLTREVFYRAFDNRRQLAGYVGLAPVPHQSGEADRDRRISRAGNARARTTLIQLAWLWLRYQPDSAPARWFRDRVGALRGRTRRIAIVAMARKLLVALWRYVETGLAPEGVEVAA

SEQ ID NO: 476132 - protein, 315 aa, unidentified
MYYLGIDVSKKTIDCCLISDSIFYERRFDNTEDGFRRLDDWIQEYTSEAVHCCCEATGIYHEAIAAHLRQKNIVSIVNPSKIKGFREAEQTRTKTDRQDARLIAEYCRKMQPQAWQPPTEEQEYLQAITDYIARLKQQRAAEQTKQQTAPDTIRHHIQTTIDHLNRLIATVQNELKDFYRQNPIYNEKKNRLKTIDGIGESAASALLAKLTRYDFANQNQFAAYLGLDPKIKDSGTSVKGKPRISKQGQKNARKALYMPALVAYRMNAFPAFTARLKARGKPPKLIIVAIMRKMAVIAYQLYKTGKDYDRSRYRN

SEQ ID NO: 476133 - protein, 350 aa, unidentified
MLIIGCDYHPGFQQIAFLDTDTGELAERRLTHQDEAEQFYRDLQQRSWAVRVGMEASGHARWFERLLRDLQFELWIGDAAEIRTKRVRKQKTDRQDAQLLLRLMMEDRFPRIWVPDAANRDLRQLLWHRHRLVQMRTRVMNQLHVVALNEGLRRKKALWRPAGRSELESLLLAPWASRRREDLLDVLDQLTPKIQELTRALEAEVEKRPVTRRLITHPGVGPLTALAYELVIGTPERFHCGKQIASYVGLVPTEESSGDRRRLGHISKQGNVLLRFLLVEAAQVTVRSHPGWRSTFFHLAMRRGRKIAKVAMARKLAVHLYWMWRQGLDYGQLQKLGSHAGEPGHRHGVQ

SEQ ID NO: 476134 - protein, 403 aa, unidentified
MVLVGIDWSEKWHDVCLMDEAGRVLSRCRVEDSLPGLTQLQSLIAEQASDPGEVLIGIETPHGLLVRALRAAGYTIYAVNPQAASRYRDRHAVSKKKSDRGDAMMLADLVRTDRHRHRPLAEDSQLAEAIKVLARMHKSLIWTRQQLGNQLRSSLREFYPGALEAFGDRLCEADSLALLKQAPTPGQGRRLSLAKITSALRKAGRHHIEQRAVAIRDALRTPQLEQPALVAQAHGVAAAALAGLIQDLIAQIDHLEKELDRSLRAHPDAEIYLSQPGLSTVLSARALGEFGDDPNYYQEGKARKNYAGTSPITKRSGKTKVVLARFVRNERLADVCQWWAFAAISASPGARRYNDAQRMRGKGHQEALRTVANRLVGILHGCLRYRQLYREDVAWPSSEAAAA

SEQ ID NO: 476135 - protein, 502 aa, unidentified
MRPFSHWCVRTRLGAWPARYRRGVVEGTAQAVTSYERVNPFATVLPPRTLSHTMEEILMARKSKKQRLKIVHPSCAGIDIGSREHWVAVDPDCCEEPVRCFSAFTDSLYALADWLQSLGVEIVAMEATGVYWIPLFEVLDARGFQVHLVNSRATRQVSGRKSDVLDCQWIWQLMSYGLLKGAFRPADPVCQLRSLVRQRDNKVKEQSRCIAHMQKALTQMNIQLDNVVSDLMGKTGTAILRAIVAGERDPRKLARLRDRRLRADEATVARSLRGNWREEHLFALAQALAHYDFLCQQIRDCDQATERQLAVLPSLADEPPEPVKPLRNPHRSAAQQAALHQALYHVMGVDLTAIPTLGVDTVLVLASEIGPDLSRFPSASHFCSWLNLAPPTRISGGKPLPGRAPRVSNRAGQALRQAASNARNNHSFIGASHRARLARMDGANAVKATAHQLARLIYAMMTKGQPYVEQGMEAFEARSQNRQIRALQRKARKLGLHLVEAA

SEQ ID NO: 476136 - protein, 436 aa, unidentified
MPESIPYLSVGFDVGADFTWMSIMLPNGILIGKPFKIIHSDPQSRELAISKIKEAQEMYSLESRCFLESTGIYHIPLLCFLRDKGFDCAVINPIITKNSTNMNVRKLHNDKFDSKKAAKVGLDASLKASIVPDDAIIDLRNLVRDYYYFKDLQSAIVLKLHAELKVSFPAYLNVFSKVTTQTSLKLLEAYPLAADMLAAPKDELVETIRSTARFGETYALARYDAICTAAKDAAVFGRALPSNALRIRLYIKMYREYQAHLDSILEELHQAVGKLEGTPDYDRISFIQTLHGVGFLSAVVLIAEMGSFDLFSSPKKLYAYFGLDPGVNDSGKFHGDRVHMSKRGSSLARRILHMVAINNLKVDKATKTPVNPVIYDYYTRKCASKKKSVAVGAVMHKICNIIFAMLRDNKPFELITPEEHRERYAAEHPESVNTAA

SEQ ID NO: 476137 - protein, 368 aa, unidentified
MTSLSDLVEVVIGVDTHVDTHTAAIIDAGTGGVLGQVQVAATPAGYAELVEFVDTHLRGEDEADIETDPCAATGGRAWAIEGTRSHGAGLTRHLQARGELVIEIDRPQRAKRRRGAKSDPIDAVRAAREALTREHLATPRSGGNRHALAILLSTRDSLVTEAGRAARQVFHLIITAPEPLRAKFAGKKLPAMITTAARLRTRPGQDIETTTTITILRDLARRAQDLTTQATQYKKQIHHIVTSMRADLLDQPGIGPIVAARILCAWSHPGRIHSEAAFAMLAGVAPIPATSGRTTNRHRLNRHGDRQLNRALHVIVLTRLRHDPHTRAYAQRRTTQGRTHREITRCLKRYIARDIYRQLEHHNPTNTP

SEQ ID NO: 476138 - protein, 371 aa, unidentified
MKKTITFVGLDVHKATIDVALADAGHTGDVRFYGTIGGDLDALHKVVRKLQSNGTELRFVYEAGPCGYDIYRSLTKQGFDCMVTAPSLIPRKSGDRIKNDRRDALNLARLYRAGELTAVYVPTEEDEAMRDLSRAREDAVKALRVARQGLLAFLLRHGFRYNGKKNWTKAHNNWIAGIKMPHRGQQIALQEYVNTAQEQLERVDRLTGQIRDLLPHWSQAPLVTALQALRGVSLIVAVTTVAELGDLTRFRSAKQLMAYLGLVPSEHSSGGTVRRGGITKTGNGHVRKALTEAAHTYCHPARESRVLLERLEGLPPEVRQIAWKAQVRLCGRFRRLLGYGKNRKTVVTATARELSAFMWAIANAVAPKPTA

SEQ ID NO: 476139 - protein, 360 aa, unidentified
MDIAKTIFEVALSHEPGRVAERRRLSRGTFLIFFAQMPAATVVMEACGSAHSWARKLQELGHKVVLLPPHQVRPYVMRNKTDRTDAKGILEAYRNADIRPVPLKSVSQQVLVTLHRFRSAWMAERTAQINTVRGLLRELGFVIPLGMEKVLPQVRALVEDADSEVPDALRGVLFEACEEIRTLGERIKKTERQLEALAEQTPVVERLRSVPGIGLLTSTAQVTFVGQILRFPSGRHYASYFGLTPREFSSGAKRRLGRISKRGDAYIRMLLIHGARSVLCHAKKEQEHDRLRAWALALERRVGHNKAAVALANKLARIAWAVWKNDPPSSRCPWPLRRRPPQEERRNQGFAHPGTAQSIA

SEQ ID NO: 476140 - protein, 341 aa, unidentified
MEEYIGLDVSMKETAVSIRRAGGRIWRGKCASDPSTIAELIRKRAPSVKRVVFEPGPLSVWFYHSLRTEGLPAICIDARHAKAALDMATNKTDANDADGLAQLAEVGFFREVRVKGFDSMLTRTLVAARTRLVRITTELSNQIRGVMKTFGLLVPAGKGSAFEKNVRSLLADQDRLASIVLPMLEAWRGIRIRAAELGCQLVRDARQSRACRILMSIPGIGAITATSFTTAIEEPDNFRKSRSVGAWIGLTTRRYQSGEVDYDGHISRRGDGPLRGLLYEAAAVILTRSSTHSTLRTWGLQLRERIGFKRAAVAVARKLAVIMHTMLKTGELFNPNAGAAA

SEQ ID NO: 476141 - protein, 418 aa, unidentified
MSQEQSTEILSVVHQKCCGLDIHKVKVSATLVITEEDGSHSEEILEFGTFTEDLYQLRSWLQERECPIVAMESTGVYWRPIHNVLEDVCEVILVNPRHVKRVPGRKTDISDSKWLAGLLRHGLLRGSYIPEKHVREWRELSRMRRVYVENLGDYKRRVHKLLESANIKIDSVASQLFGVTGRNLLQKLALGKPITLADVQGCTKGKLREKAPELYRSIQGFFTEHTRWLLISMLDIIAMLEKQIGLIEDRLRGLMSDRSDKISMLTKVPGIEELAAMSIMAELGDNLKQFENASVLASWSGLCPGNHESAGKRYHGKSPVKNHHLKTLMVEVAWAAIKTKNSYYREKYYRLKSRRGAKRAVIAIAHRIMKAIFHILKHGVPYRELGEGYLDRRKEQSKLHWLNKQASSIGYILIPREE

SEQ ID NO: 476142 - protein, 448 aa, unidentified
MRKKKKTVKFDLLNPNAAGIDVGSKNNWACIASDIESPREFGVFTEDHHKLASWLQENGVETVAMESTGIYWKALHVILESYGLEVLVANAADVKNIRGKKNDAHDSQWICQLHSAGLLKGSFQPDSFTSKLRVYTRHRKSLILDASRFIARMQKEMIQMNIQLSVVLTDITGKSGRAIIEAIISGERDGKELAKLADGRVKASKEQISKALTGEWSEDHLFALDQCWRMYESYQAQIAECDKKINALLEKRLEETGQNDLAYTPTKKKLPSKNSPKVDLPKYAFQLSDGIDLTEVNGIGHDTLVTLMAEVGFDLAKKFPSSKHFTSWMSLSPNKKITGGKVLSSRTKKNKNRLAQAFKHAANAVGRQRDNPLSDFFARLAYRKGRKAAITATARKLAVIVYNMLTRGEAFNPLIVEEYREHQRKRLIKRMQRNISKFGVDKADLQFS

SEQ ID NO: 476143 - protein, 342 aa, unidentified
MQIITIGLDIAKNVFQVHGIGAAERVVIRKQLRRNQVLAFFEALPPCLIGMEACATAHYWARELTKLGHQVRLMPAKDVKAYVKRNKNDAADAEAICEAVRRPTMRFVQIKSVEQQGRLMLHRARDLLLRQRTQVINALRAHLAELGVVAAQGREGVKELLKIIAGEQDARLPADAQASLVVLAAELQAMQTMIGAIDKRIMAQHRSSEASRRLESIPGIGVTGASAITAAVPDPKVFRSGRDFAAWIGIVPRQDSTGGKQKLGPISKRGDRYLRRILVVGACAVLRYARHRPEKYPWLTQLLARKPFRVVAVALANKMARIAWALLAKGGTYRAPALATAA

SEQ ID NO: 476144 - protein, 338 aa, unidentified
MTIFAGLDVSDKMTHICVVDGEGAIVWRGVCATDPDVLAKTLRRRAGGLVRVVLETGALSAFLYHGLIERDVPVTCICARHAKGVLSTRVNKSDPHDAEGLAQLARTGWFKAVRIKQETTHIDRAQLKIREQLCRSHRSMANQLRGLLKLFGLRMGQVTTPNKRTERLAALFAQKPELKAVMQPLVESLEALEVQIRRSTKLLAASAAADPVASRLMTVPGVGPMTALTFKSSIEDPDRFDRGEDVGAFAGLVPRRNQSGERDYKGRISKAGDRMLRSALYEAANSLLVRVKRPSPLQTWGKALAKTKGPNRARIAVARKLAILLHRLWQSETEFCWN

SEQ ID NO: 476145 - protein, 360 aa, unidentified
MRNYRTSVGLDVHARSVVACGLDQDTGEVFQRRLCPDHREILDWLQSLPGRVAVTYEAGPTGFGLARFLLAAGVLCLVAAPSKLVRPAGDRVKTDGRDAAHLARLLHLGQIVEVAVPTVTQEAARDLVRAREDCRGDLMSARHRLSKLLLRQGIVYCGGQAWTGKHEMWLRGQRFDNPALRLAYEAALDAMVACVHRRDRLDEAITTMAADSEFTPVVARLGCLRGVSTLTAFGLAVEIGDWHRLTGRSIGAYVGLVPTESSSGATRVQGGITKTGNGHARRLLVEAAWHHRAPYRPSRDLRRRWDAATLTARDRAHAANHRLHARWAGFDQRKKRPVVANTAIARELAGWCWSLAVMPD

SEQ ID NO: 476146 - protein, 418 aa, unidentified
MEYAPQASLPATPPGGRTAGVDWAGADHAACVVDATGAVVTRFTVQHTDAGLRDLVRRLREAGACEVAIERGDGPVVEALLAAALTVVVISPNQVKNLRSRYGSAGRKDDRFDAYVLADTLRTDRARLRPLIPDTAPTATLRATVRARRDLVAHRVALCNQLRAHLKTAFPGVVGLFADLDSPISLAFLSRFDCQDRADWLSERRLAAWLKGVGYCGRKTPAALLTHLKAAPRGATGHDGAARAHITRALLNVLTSLTEQIKTLEAQIAEQLALHADAHIFTSLPRSGVVRAARLLAEIGDCRARFPDPSSLACLAGVAPATRQSGKHKAVGFRWAVNKQLRDAVCDFAADSRHANPWAAKLYADAIARGKDHPHATRILARAWLYVIWHCWQDTAAYDPAKHRALQALLQQDQTAAA

SEQ ID NO: 476147 - protein, 333 aa, unidentified
MVALMTVMTAFLGIDVAKLKLDVVLRLGQRAIHQVFANTPDGFAALDAWLLSFGLTVSQVRICLEATGSYSDAVALDLFARGYTLSVLNPAVLVDYRRSQNIRSKTDKLDAHLLARYAQEKQPRAYKPLPAEIVTLRALLHHRDDVQQMLRQERNRLEAGRMTAAIKQRVLKHVQDLQSEFKTTEREIKAHFKAYPHLKAIWQRLQTIPGIGWLTAARLLAHLGEIDRFDKVGSLVSLAGLAIKEQSSGSSVRGKAQIDRHGRKDLRQTLYMSALVAKRVSPHMQGWAKRLQAQGKPKKIILIAIMRKLLHIVYGVWKSEQDYQPALAFPVAS

SEQ ID NO: 476148 - protein, 418 aa, unidentified
MKSNPESIPIERYIAIDIHKHYVVVGGMNPHKEWVLRTRKVRMSRFPKWVQKNLLPTDAVVIESTSNAWEIYDQLVHLVAKAVVANPLKVGQISGAKVKTDRLDVERLLTLLIADIVPEVWVPPHHVRDLRSLISHRWRLHKQISMTKNRLQSFIHRFNLIPPKGKLFSEENLSWWQEQDFSPIVRIQIKQDLLILEHLSAHKDAIHQELACLSNRKPWAKDMVFLMQIPGLGVVLSMTVLSAIGDISRFECAKNLVGYAGLGAGVHDSGKKHQDKGITKAGRKELRWAMVEAAWNAVGSSPYWKATYEDLKKRGKHSNQAIVAVARKMLVAVWHVLSHREPYRHFDDETIAYKMISWSQRMDEVALRGMTRQQFVKYGLLRLGAGHDLTRFVRNGTPRRIASSDEVLALKPDLRPPI

SEQ ID NO: 476149 - protein, 343 aa, unidentified
MKLHVVGIDLGKTIFHLVGLDSTGRAVIRKKCSRKQLLAFTANLEVDLIGMESCSGSHFLGRALREQGHEVRLMPAQYVKPYVQTNKSDYLDAEAIAEAVQRPRMRFVPIKTEEQLDLQALHRVRERWVMRRTAVVNQIRSLLLERGLTLPKGRRYLDQQLPRILEDAELRLSGSFRVLLAQLKIELEQLAARIEEMDRVIQKMAKDNEDCQRLTEIPGVGPVTATALIAAVGNASTFGKGRKLAAWMGIVPGEYTTGGKQKLLGISKRGNKYLRTLFIQGARSVLQQRHKQAPGLSSWLAQLLARAHQNVVIVALANKLVRMAWAVLCKNEHYRAPVLAVTT

SEQ ID NO: 476150 - protein, 346 aa, unidentified
MHHSTTVGVDLAKNVIQVSVVSARGKELINRSFTRTKFAEFLGKQKSSLVAFESCASAHYWARAAKRHGHEARIIPAKAVAPFRQGHKTDSNDALAVAEAARRPNIKEAPMKTAEQQGLQAIQRSRELLIGECTALSNHLRGILLEFGVAIPQGFASLLRALPEILEDGDNELPDLYRPTLHRMHQRLLELREDIESMTKEVDGLVKQHPVCKRLTAIEGIGPIGALSLYAVMGSGKAFTRSREFSAYLGLTPRQYSSGGKANIVGISRKVGNRRLRSILIQGALAYVYRMKEPRSCKDRWLRDLIERAGPRRAAVALANKNVRTAWAMVTQGTEYQRRLQLEMAA

SEQ ID NO: 476151 - protein, 398 aa, unidentified
MAAVMIGVDPHKASHTAVAISAAEEPLGELRVSACAAQAGRLLAWAAAWPQRTWAVEGAGGLGHLLARQLLAAGERVLDVPPRLGARVRLLAAGDTNKNDPDDARPVAVAALRSAGVREVRAFLDDLRRIDAQVRETRKTPATAVQAAGTCLTRLFGVGPVIAAAVIGDVRDVSRFGSRDHFAACNGTAPIEVSSGPRKTCRLSRRGNRRLNHAIHMAAVTQIRHRHSDGRACYDKKLAESKTPKEALRSLKRQISNAIFACLQADAARAAARAEGPGGQQGNDSAASAAGSHPRHRLFGQATPGPGHHPTAAAGNTAPSPARARGGAGHSSIAATLPPAPPRVQVERPQRSEDERPAGAARRRPHSAARKATGQGSLRKPQRPKGTSQAAKNTGGAP

SEQ ID NO: 476152 - protein, 428 aa, unidentified
MKYALIQVLPDVPAGQVFAGVDWAAADHVACVVDMAGRVTDRFSAVHDKAGIDALISRLRGGGVSEVAIERGDGVLVEALLAAGLIVVVIASRQVKNLRSRYGSAGAKDDRFDAFVLADTLRTDRARLRPLIPDAPATLALRAAVRARKNLVAHRVAACNQLHAHLAVAFPAAIGLFCDLGSPISLAFLARFGSQDAAGQLDEQALAAWLKTIPMRGRTAPVSVLCARLRAAPGGVTGEDGAARAGITVALTATVAMLSAQIKTLENGIGVQLAAHPDAHIFTSLPRTRTLRAARLLAEIGDCRARFPDPESLAGLAGVCPVTRQSGTHISRTFRWAVSRQLRDAVCDFADGSRHASAWAAAIYDAARARGKDHPHAVRILARAWIYIIWRCWQAGTAYDPAKHHALQRILDQQEAAHAAATDSGDTR

SEQ ID NO: 476153 - protein, 409 aa, unidentified
MYFIGIDIAKNFHVATVLGIDSDKVLHTLKFNNDEKGFEKLFLLLSSLDEISNFTIGMEATGLFFENLYLYLKAKGFKVVLLNPYQTNRFREMDTMKKVKNDNIDALMIAALIKSARYSKAYVSEESYQSIKSLYRHKSSLQDELKKHKRQVSTLLAVVFPELEQVIKDPFNVTGLALLEKYPTAKHYHHASVDRILKTFRGIKGNNFNETKATKLLELAKSSIYQGNGVDERAFVILSHIRQIKFINSEIERCESQMLALFNQQPKLNSNEEQKVMDIIDNLRTIPGVSDKTIFALMSECGDLSRFTNQNSFIGYLGLYPTLEQSGNKTIHGSIAKRGAKLAKKALYQAAVASVRHNKELNKLFHDKVSLGRAKKEAIIIVARKLAHIILAIYKNNVAYNPNRVFVSS

SEQ ID NO: 476154 - protein, 406 aa, unidentified
MKQIVSVGIDVSKGKSTVCAMIHPNTIIKESFEVLHTVEEMSMLADYIGSLDGEIRIVMESTGHYHLPVAQFLYQKGFFVCVENAYIIRQFSRIMLHGAKTDPLDAKKLAKYGLAYWSELKPYKFHPSCYTELSLLSKQYQTYIKLLIAAKQNVIHLMDEMLPGFKEALDTASSVQFSKVKYVDFAKEFYHVDMIKTMGKEIFRENYKQWCKEKGYRFQSEKADELFHLAEDGIPTLPTEFPSTRLCMEVATEQVSQLGYALEQILSQMQNLAKTLPEYQTIRQMGGMGEKLCVRFIADIGDVRRFHNGKALVAYAGIDAPPYQSGQYTGTKRRISKRRNSALRKTGYEVMKSLKSHPPKTDTRVYDFIIKKENEGKSKKQAKIAGLNKFLQIYYARVIEIYKNIV

SEQ ID NO: 476155 - protein, 423 aa, unidentified
MDVIHDRVAGLDVHKDTVVACVRVMSGGKAERRCQTFGTTTVALGELCGWLDGNGCTEVAMEATGVYWKPVWKILSDGRFDLVLANAAHIKAVPGRKTDINDAMWIADLVACGLIRASYVPGESQAELRSLLRTRKQLCREQASHVQRIQKTLEEANIKLASVISDILGVNGRRMIEAMIAGVRNPRRLAELADRRLKASPKQLYDALHGRLTDHHRFLLELHLGQWDALEAAIASIDAQVEAQITTMDAEVTAGKASFRLLIDWLAAIPGLSTLASTTILSEIGSDMTRFATAGHLVSWAGLCPAQNESAGKRRAARLRKGAPWLKTILVQCAWAASRAKTSYFGAQFRRLKSRRGPQKAICAVAASLLTTIYHMLKDGTVYRDLGRDHFDRRPRETTAKRLVNQLSKLGFDVEIRRVADAA

SEQ ID NO: 476156 - protein, 397 aa, unidentified
MIAVGIDISKAKSTVAVIDSDGTVLASPFTMAHTQLEMEAFVSYLKGLGEPTTILMEYTGHYHYPVLKKLQDEGFPVCIVNPYQMKKYGDVEIHKAKTDKKDALRIAAYALEKSYKLVPYSSMEQKYEDLKFLSRQYNQRISYVAKLKVQLIALLDQTMPGITRILPLNSRNPEKCALLLFIKRFKSFDEIQRIGKARFLASYDVLAKKASERSASSKGLSIYELAVDSITTRGEDPYIWLSQNQCVDLLSATQNAADEIISQMRNIAETIPEYKILRAMHGVGDRLGPIILAEIGDVHRFHSGKALNSYAGNDAPPYQSGQFESRNRHISKRGSSALRKACYEVMQALKLTKPQDDPVYLFMLKKEQEGKPFNVAKMAGVNKFLRIYYARAMELYK

SEQ ID NO: 476157 - protein, 340 aa, unidentified
MELYAGMDLHSRNTLVGVIDSSLKRVFEKRVPNDLCLIVDKLEPFRSRLKGIVIESTYNWYWLVDGLMEAGYSDVRLANPSAIKQYEGLKHTDDRHDAFWLAHLFALGILPEGYIYPKEDRPVRDLLRKRSFLVKHRTAHILSLQSMLEREKAYKLKGNEIKSLKVDDVERIFCEEHLVLSAQANRASIEFFGHHIKRIEKAVRKRVKLCKSFEYLLTVPGIGDILAMTIMLEVEDIARFARVGNFSSYARCVSSQRLSDGKKKGQGNRKNGNRYLAWAFVEASHHARRYNDRLRSYYQRKLAKTKQAVATKAVCNKLARACYYIIRDQVAFREEALFCS

SEQ ID NO: 476158 - protein, 346 aa, unidentified
MEHYVGLDVSLKLTAICIVNERGKIVREGAVASNPEAIAAFVKSHAPHVARIGLETGATSTWLWTELSMMGLPVICIDARHAKAALKMQINKSDRNDAVGIARIMQCGWYKEVRVKDLDSHAIKGLLVSRALLVKIKRDLENQIRGLLKNLGLIIGRAKMNVFAVRAAAFVEDRPELVAAVEPLLKTREAVERQIADLDRKAMRLARNDAQVRRFMTAPGVGVITALCFLATIDDPTRFKRSRSVGAYLGLTTRRYASGEIDWTGRISKCGDKMLRSYLYEAANVLLTRVAKWSVLKAWGIRVAKRSGLRKAKVAVARKLAVILHRMWVDGTEFNWSAKEVAAQST

SEQ ID NO: 476159 - protein, 409 aa, unidentified
MEVMFDRVAGLDVGKDSVTVCVRTPGSRGRRRQTRTFKTTTGSLQLMRDWLVEAGVSIAAMESTSTYWKAPFYCLEEVMEVWLLNAAHMKAVPGRKSDVRDAEWIAQLLEHGLLRPSFVPPPEIRRLRMLTRYRTQLMGDRAREIVRLELMLEDASIKLSSVVSSLKTVSARAMLTAMIEGETDPLVLAEMAKGKLRRKIPDLAQALTGHFDANHARLARSMLRRLDSVEQALAELEAVIAEAGRPWQHQIELLETIPGVGPKVAQVIIAETGADMTRFPSPAHLAAWVGLAPAMHESAGKQTPAGKRHGNKWLNAMLVEAAGSVGRMHGKNYLAAQHARLLKRRGMGRAQVAVAHSMLVAAYWMLKRDEPYHDLGADWHRRRGAEAHTRRLVAQLEHLGHQVTISPAA

SEQ ID NO: 476160 - protein, 364 aa, unidentified
MKIVGCDLHAGQQSIAMMDSETGELTEKVLKHEGNTVREFYGSLEGPVVVGIEATGAMQWFLELLEELNIQCRVGHPAKIRAAETRQQKYDRRDADVILELLLMKNRFPDIWMPSTEQRDLRSLLRDRHQWVKMRARLQHTLQAIALNHALRKGKALWTARGRQALQDLALPDYTAQRRDELLRLYMQLEQRIQQLDKQVEKEAQGRPQARRLLTHPGVGPVTALATEVFLGDPHRFRTAKEVASYIGMIPCEHSSGKRRRLGKLTKEGNSLLRYLWTEATLHAAVKDPELKRFYRRKLVQKGMGKARVATARKLGIRLWIMLRDEIDYEEFCRRGKLPQKGKTHAGMPDFNSGPAQAVTGSTE

SEQ ID NO: 476161 - protein, 425 aa, unidentified
MNYTQNEKIEQITETTLVVGVDIGSRSHYARAFDWRGRELSKVLKFANCRDGFDRFHKWVVELQGAQKKDKAVVGAEPTGHYWFALRDYLEAAGIQLVLVNPYHVRQSKEMDDNSPTKNDRKDPKVIAKLVTEGRYGVPYSPKGAYADLRIMSPIRQRTIGQLISCKNRLNRWFSLYFPEYEQVFGSFEAKSSIILLKKACMPADIVELGAEGVNRIWRDAKLRAVGMKRATTLLNAAQASIGQREGSEAARMEMELLLEEYEYHNAQYEKIMEKIQELCSKIPESKEMLVIKGIGLITVAGFLAEVGDVRRFDSPKQIQKLAGLALKENSSGKHKGQTTISKRGRARLRSILFKAVIPLIATNEEFRSIHEYYISRPEHPLKKKQSVVAVGCKLIRIFYAILTKEIVYDGQKMLEDIHRAPLVA

SEQ ID NO: 476162 - protein, 358 aa, unidentified
MKVVFPTCCGVDVHKTFVVATIITTPAGSLQPNYRKKRFSTFNSDLNRFANWLLEHDCLDVCMESTGKYWVPVFNILEKRGIRVVIANPKWVKAVKGNKDDTKDSKWIGDLFRIGLVKSSFIPDLDIRILREFTRYRYKLVSMKSSEKNRFQNAFTVCNVALDSVVSDMFGKSATAIADYLTSDESFDPDHCVSLLQRSLKKKAAQVLESIEGFSMADEQKARIKIIREHYDFAEKLIAKVDACVDEMVAKHEGAINLLCTIPGIDRSSAITIISEIGTDMSQFGSSKRLCCWAGLTPGNNQSAGKKKSVHISRAGVYLKSALVPVAHAAVKDKNSPYYAHALPNAGARRGRSSLLPE

SEQ ID NO: 476163 - protein, 482 aa, unidentified
MKPKQQEETRKATCRPTQGHWHQMNRKQRREMMRRIQSENLSLEVIHPDAAGIDIGNESHYVAVPPTRDSEPVRRFGCTTAELKSMADWLKQCRIRTVAMQSTGVYWIAVFDILEEAGFEVYLVNARETKNLPGRKSDVQESQWLMKLHTYGLLRNSFRPSQEIRTMRTYWRQRNDLVQGAARHVHRIQKALTQMNVQLANVLTDVSGITGQAIIKAILAGERDPRKLAAFRDPRVKATEEEIARSLEGNWQEDLVFVLQQEQDAYEFCQKQMAECDRRLQDYLQQRKDRSAGADLPEEKRKTRLKNKKGNKPQFDSRRELFRMTGADLTRIDGIDVMTAMTIISEAGWDMSKWKTDGHFVSWLRLCPDNKISGDKLIGKGRLPSNNRVTIAVKMAASSLRTSHSYLGAQFRRLKTRLGAPVAIKAMAAKLARLVYRMLSHGMQFIDRGADFYEAQHRHRQINALKWKAARLGLQIIEAPAA

SEQ ID NO: 476164 - protein, 416 aa, unidentified
MNTPPKSSVQRFLALDLHKHYLVVGGVNRRQEVVLNPRQISLEKWPAWAKANLQPNDALVLEATTNAWDIYDQIVPLVDRVAVAHPPKVKWIAEARVKTDRHDVLRLAHLLAADLIPEVWVPPLEVRELRALMAYRRRLVQMGTRTRNRLHSVLHRHNLKPPPGKVFTQKHREWWQKLDLSPTQVMHIRHDLATIDHVDEQLAEIEEELYRLSTSEPWAEQVPFLLQLPGFGLIVTLTVLAAIGDISRFSHPKKLVGYAGLGASIHDSGMKHRTGRITKQGRKELRWILVEAAWRAADTHPYWKAQYERLERRIGSTKAAVAVARKLLVAVWHILTERIADRHADPDKVAFKYIMWSWKLDSTKRNGMSTRQWARYHLMRLQLGEDLTHIMRGGNRYPIAPDDELKALLPELQAAD

SEQ ID NO: 476165 - protein, 344 aa, unidentified
MKISTIGLDLAKLWFQVHGVDATGHVAVRRRLRRSEVLAYFRSLEPCLVGMEACATAHYWARELIALGHEVRLMPPAYVKAYVKRNKNDAADAEAICEAVTRPTMRFVPVKDAEQQSVLMLHRGRSLLVRQRTMLVNALRAHMAEFGITAPQGLVHVEYLATVIDDDGSALPELARSILRMIVAQYNDTSARIHALERQLAKWHRESRISQLLATIPGVGIMGASAIAATVTDPNLFRNGREFAAWLGMTPKQNSSGGKERLGRTSKRGDKYIRCLLVAGAVAVLRHTRNRTTKDAAWVRGLLARKPTKLAAVALANKTARIVWAVMARGEGYRSKEQFEPAAV

SEQ ID NO: 476166 - protein, 469 aa, unidentified
MFGKAEKMQDSDKRKSNAGSSKQIAGLPVVRHKVAGIDLGSERHWVCAPTIEGGGREVADFGATTSELIRMARWLNARKVESVAMESTGVYWIAPHEVLEAERLEVILVDTRQLAQVPGRDKKSDPFDCEWIQRLHSCGLLMGSFRPKEAVCMLRTLVRDKGNLVAEAGDWLRRMQKSLDQMNVRVHRAVSDIDGVTGMAILRAIVAGERDARQLAKLRNWRCHKSEEEIAEQLSGHWREDHLFSLRQGLKMYDSIQERITDYEKEILRKLAEMERGECRGQEVPKSKNPQKGRAIQSRGEEPMRQALYRMSGVDLTGIDAIGVETVQVVLSEYGPDLSRFPTEKQFVSHVTLAPHKPTSAGKPVKKKKRNSASTRVAAALRMAATSLRHSETALGAYYRQIARRIGGDVAVFATARKLATIIYRLLRWGQPYVDEGAEAYEKRYQESRIKSLTARAKELGYQLTPITA

SEQ ID NO: 476167 - protein, 358 aa, unidentified
MATMAWAGLDVHARSTEAAAIDVLTGELTRRRFGSGTGPVVTWLLELPQPVCACYEAGPTGFGLYRAAGEAGLDVRVIAPGKTPRATGERVKSDRKDAELLVRLLMAGALTQVSVPPPEAEAARDLTRARDQVRSDLMRVRHRVSKLLLRHGRVYDGSAWTQAHRAWLARQRFTHEATELAYLDALAAVDGLVARRETLDRRLSLLALEEPWWPTVARLRCFRGVDTLSALALHLEVHDWRRFERAPQLAAWLGLTPALHQSGESSSQGSITKTGSGYARRLLVEAAKHYARPPRIGVTLRNRQQGQPDHVLQIAWRAQHRLYRLQTRLRERGKPPNVATVAVARELACFLWATAVAP

SEQ ID NO: 476168 - protein, 346 aa, unidentified
MTIVEVDRAVTGGVDTHLDIHAVAALDPRGALLGTETFATCAEGYQALLEWLRGFGTVSKVGVEGTGAYGAGLARYLAQEDIAIVEVDRPNRQARRRQGKSDFLDAIEAARALQSKRASGLAKTRDGAVEAIRVLLVAKRSARRARTKALTQMRQLSYTAPEQLRCALKGLSVPKLVSEAERLRRGRCADPITASTKAALFSLATRVRDLEAEITALDERIAPLLSATAPELVALYGVGIDTAATLLVAAGDNPERLRSEAAWAHLCGVAPVPASSGKVTRYRLNPGGNRQANSALWSIAIVRLAHDPATKGYMERRLKEGKSKREVLRLLKRYIAREVYRTLPRG

SEQ ID NO: 476169 - protein, 361 aa, unidentified
MLYTGVDLHRRLIVVCTVDDNGSVVARSRMKTDPTLVSEYFLRWPDQHRAVVECTTGWYWFSDLLRSLGVEVVLTHAKYLKAISYAKVKTDAVDALTLAQLLRMGYIPEAHQLPPEYRAMRDLLRQRMVMEHKRTNIIQRVTSILAQFNVTELPFSPYQPGFADFLSQCQIPEEYRMTLMLYHQQCLQVTEHRKELEKHFKARLRPTPTVQLLMSLPGIGDITGSIIAMETGDIHRFADAKHYCSYCRLVPGAKDSGGKYSHRSGSKDGNQYLKYAFTESAIKAMRFYPEIKHFASRLERRSSKAIARTVVAKELAKISFYVLSRQQEFKTFKGIEINKLRNWPRTRKPVRLTGGMTSPSV

SEQ ID NO: 476170 - protein, 388 aa, unidentified
MGEREKQGRSFGSRKSALDAVDGSSTGTSVPSKWVLLSAHSQEEQMQTITTIGLDIAKSVFQLHGIDAAGTVVIRRQLKRRYMLGFFEKLPPCLVGIEACATSHHWSRELQALGHTVRLIPPAYVRPYVKRQKNDCSDAEAICEAVGRPNMRFVPTKTIEQQSGLVLHRTRSLLIRQQTSVINAIRGHLAEFGMVAPVGRNGLETLLSLVATEDDTRLPEIVRASIEALALQLRALKAQILEFDRKIIQWHRSNELSKRLDEIPGVGPALATALVASIADPKSFRSGRDFSAWIGLVPKQHSSGGKPRLGGITKQGDRYLRSLFTIGALAVIRYARIHGTQHRPWLAALLARRPTKVAAIALANKMARMAWALMVKGERYREPAALAA

SEQ ID NO: 476171 - protein, 371 aa, unidentified
MSNVAKYIGLDVHKATIAVAVAEGGPGGEVRFVGTVANDDDEVRKLVKRLATPGATLSFCYEAGPCGYGLQRLLIKLGQPCIVIAPSMMPRRPGDHVKTDRRDAMTLARLLRAGELTAIWVPDEAHEAVRDLIRARRSAQEDATAAKQTVRSFLLRHDRRFEGRSAWTKMYWRWLSEQRFDYPHQQLAFEELQKRVLEAQARVVRLESALGEAVASWHFAPLVRGLQALRGIKLVSAATLVAEVGDLTRFDNPKQLMAYVGLVPSEHSSGARTHRGRITRAGNAQARTTLIEAGWSYRLPAREERRYRERVADLPEEVQAIGWKAQVRLCQRFRRLSATGKPQPKVTTAIARELVGYAWDIARRMAPAMAN

SEQ ID NO: 476172 - protein, 340 aa, unidentified
MKLYGAIDLHSTNNVTVVIDEQDRVVYQKRLANDLALVLKELSVYQCELEGMVVESTYNWYWLVDGLMEQGYKVHLANTAAIQQYNGLKYTDDNSDARWLAHLLRLGVLPKGYIYPRADRPVRDLLRKRSQLVRQRTTNLLSIQNLLTRNTGSSLNANRVKGLDVQQVDELLPDGDLALAVKANLSVMSSADEQTKILERTVIERVQLRPQFCFLKTVPGIGKILSLTIMLETGDIRRFPSVGNYASYCRCVGSQKISNSKKKGKGNTKNGNKYLAWAFVEAAHFAIQFNSKIKSFYQRKKAKTKGVVAIKAVAHKLCRASYYIMRDRVAFNMTKAFGQN

SEQ ID NO: 476173 - protein, 364 aa, unidentified
MRRQTADAMMRWCYSLPMKTNITKTSPTPSVVPTSSAAVSSGFTLGLDLGDRQHHVCVLAAAGNIVREASLPNTRPALAQLLADFPRATVALEAGTHSPWISRYLTEQGATVLVANPRKLHAISRNERKCNRRDAQMLARLARVDAALLHPIQHGSAQAQHDLLGLKLRDALVRNRVSLINAIRFTLKSLGHPVRNPSSESFHKTVLADIPADCLPVVQPLLTVLAHVTEQIKAMERDLVRRSKQDYPATQRLQQIAGVGPLTALCFVLKVGDPQRFSRGRDVGAYLGLCPRRDQSGGTDKGWLRAVNKLSKLAKSTHGRQAAKKFEIRWPEILPLTEIAQAKNEKIISFRKNQMARGFGLESE

SEQ ID NO: 476174 - protein, 348 aa, unidentified
MNYYAGIDVSVECSSVCIVDASGKIVREARVETTPEAIIAWLGSFGHPIERIGVEAGPLSQWLHRAMSEAGLAVELLETRHVRNALKTMTVKSDRKDARGIAQLMRTGWFRPVHCKSMEAQEVRAILGARKLVQSKLLDVENSLRGTLRNFGLKVGHTTTRSFAGRIQELVAGHPSLEVIGTSLLSVRDVLLRELNGFEKRVRAMARTDARTRLLMSVPAVGPIIALTYASAIDDPSRFKSSKQVGPHFGLTPKRYQSGETDRSGRISKVGDAAVREALYQAAHVMLTKPVRGCTALKSWAMRIAKRAGMKKAKVALARKLAVIMHRMLADNVAFNPAPQAASSAMAA

SEQ ID NO: 476175 - protein, 353 aa, unidentified
MEYIAFDAHKHYTLASVARPDGQLVREQRIAHERGALQQFLERCEPGSPVAVETVGNWYWIIDEIEAAGCVPRLVHARKAKLMMGQINKTDKLDVRGLNQLQRTGTLPTVWIPPGELRDQRDLPRTRMVLVRQRTQLKNRIHSTLAKYALHDIEVSDLFGARGRALVRQRLELLPPCTAYTTRHLLEHVERLDHQVREFEQQIRTLFKPTPTIQHLLTLPGVGLTLAVVIALEVGDVARFPTAEKLAAYAGTTPRVHASGGKTRFGPSRPDVNRYLKWAFVEAANAICLNRGRTPRRHVTRLYERVAQRQGHQKAIGAVARHLAEATYWVLTKQQPYREPTTAAVSSTGDKRG

SEQ ID NO: 476176 - protein, 343 aa, unidentified
MQAVTTIGLDIAKSVFQIHGVDAQGNVVVRRQLRRRQVLPFFKKLPSCLVGVEACATSHHWSRELQALGHTVRLMPPVYVKPYLKRQKNDAADAEAICEAVMRPSMRFVATKTPEQQSCLMLHRTRHLFIRQQTAAINAIRAHLAEFGIVAPVGRNGVEELLDVVADPDDERVPEVARECLAALGAQLRMLKAQVLEFDRRILAWHRSNETSKRLDEIPGVGPALATALVASIADPRAFRSGRDFSAWVGLVPKQNSSGGKERLGSITKRGDRYLRSLFTAGALAVIRYAKIHGTKHRPWLTSLLSRRPTKVAAIALANKIARMAWAMMAKGERYREPVALAA

SEQ ID NO: 476177 - protein, 472 aa, unidentified
MKIPTNIMAVGIDPAKQVHQAVAIVYPEVVLLNCRFENNYEAISSFDEKVMKIAKKNNLRLIYGLEDSGAYGRTIKEVLTSRYREVREVNPLKTNRQKDFYGGDKSDEIDAKCIAQILLRSYENLPKIEEDNQVYISIREAERFRETLVKAKTQNVNRLHFYLTKTWGGSYKKFFSNLQNKIALDFFSSYPIPQTLKEIKAKELAKFLYEASSHHLGKGNPWKLAHEKVKFILSSIKTVKDLPLNWERKIKAEIIRQLIANISQAKDSIKAIERKLEKDLLPQTGQRLTSLKSISTVTASVLLGETLNPDRFNTRDKFARYNGTAPQEISSGGKIKHRARKGCNHRLKKTLRQISITAILREPLTKEYYQRCLSRGLSKSQALKRVDRKISDIVYKMMRTKQPYDRELAIRKIIERRQRTNNLGRARWQSRNLRIKKSSDEIESLVLPPLDIISELREIEKKDRSVSEKILT

SEQ ID NO: 476178 - protein, 330 aa, unidentified
MKNKEFIGIDVSKNVLDIFIFSLQFHFIIENSPLGFAKLLETCYSKLKNKEDFFFYFENTGRYSRLLSIFLSENNLPYFMVNAMELKKSMGLKRGKSDKKDAKTIAIYAWKNRDQIQPTILHTQEVGQLKQLLRLRDKLIKHRTAYKNAIKDLQDCFVEGENDFIRSTQKRLIEQLNIEIQNVEKQIEVIIQSMPRWNINYQLIQTIRGIGPVLAKYMIIYTENFTLFNDPRKFACFAGIAPFEYSSGSSVKGRTRVHPLANKHLKSLLNMAAMGPIQLDGEYKTYYKRRTDEGKNKMSTLNIIRNKLVFRIFAVVKRGTPYVDLSKFAA

SEQ ID NO: 476179 - protein, 376 aa, unidentified
MISSDYTVGCDAHKHFSLFAILDKRGELIQRIRVDHAPGEIRAFLSQFPEGTPVALETVGNYYWIVDEIERAGCLPLLAHAAKAKIMMGNIHKTDKLDAYGLAILLYLGKLPSVWIPPGDVRDERELPRTRMTFSQHRARVKNRIQSTLAKYALSLDTHSDIFTPKWRRDLLAAVDRLPEETARCVHQQLDILDAIQEHIKKLEARILERIRMTPTMQLIQSVPGPAKVLAIVIDRELGSIDRFPGPKNLSSYCGLVPKVKASAGRVHYGRMVKQCNTYLKWAFIEAANVIVRQRHHPNWRGKYVVHLYERIRRRKGHAIAIGAVARYLAEATYWVLKKREPYREPPHWKAAGKQSLSRSARVRSVANMGPMRSAS

SEQ ID NO: 476180 - protein, 440 aa, unidentified
MSRERSERRTATEAAKERKEDRTTLSSGSETGSCRKVCPSSKGDDGGQLPPKTAGWRDGRQSRIREEPVLNQGITFVGLDAHKQSISVAMLLPDREAAIEWELVNEAAAVRRMVRKVEREAPGEVRFCYEAGPCGYALQRQITEAGEASCMVVAPSLIPVKPGDRIKTDRRDARKLAELFRAGLLTEVQPPSESDEAVRDLCRAREDATEDLLRCRHRLVKMLLRRGLVYTGGKRSWSGGHRRWLKQLRFDNPVDQAVLDDYLLAIEQVEERLKGLGEKLEQVSRQAPYAEAVGVLRCFRGIDTVTAMTIVAELHGFGRFTSPRGLMAFLGLVPSEHSSSTRTRRGSITKAGNSHVRRVLVEAAWNYRHRPGTASLKKRRQGQPAEVIALADRAMQRLHRRFSRMTNAGMPRPKVAVAVARELVGFIWAALYPLSERKAS

SEQ ID NO: 476181 - protein, 389 aa, unidentified
MKIYVGIDIAKLNHFAAAISSDGEIILEPFKFTNDADGFQLLVSKLESFDKNSIIIGLESTAHYGDNLVRYLVAELYQVCVLNPIKTCQMRKNNIRKTKTDKVDTYVIAKTLMMQDDLRFISFYDLDMMDLKALGRFRQKTIKQRTRLKIQLTTYVDQVFPEIQYFFKSGLHQNAVYALLKEAPSPKEIASMHMTHLANLLKVNSHGHFTKEQAKELRVLAQKSVGANDSAISIQITQTIQQIELLDSQLEKIEAEMTDIMKFNDSVIMTIPGIGYINGGMILGEIGDIHRFSNPNKLLAFAGLDPSVYQSGNFQAKTTRMSKRGSRVLRYALVNAAWNVVRNNATFKAYYDAKRAEGRSHYNALGHCAGKLVRVIWKMLTDEVEFNLE

SEQ ID NO: 476182 - protein, 419 aa, unidentified
MTNQQAFAAFIGIDWADAKHDICLQAAGSEHTASTVLEHKPETIDTWVRGLRQRFGARPIAVCLELDKGPLVYALRKYDFLVLFSVNPSTLAKYRAAMSPSGAKDDPTDAALALEFLTKHPERLARLNPQSPALRALAQLVEHRRRLVDDQTRITNRLTSALKNYFPQPLDWFGEKSTTLFCDFLERWPTLKALQQARRSTLERFFREHRVRDARLIERRIHAIKAATALTRDEGVIAPNALLVQALVTQLRATLKAIAQFDQAIVEHAHPHPDFALFNALPGAGPVFAPRLLVAFGEQRQRYRCAAEVQKYSGVAPVTERSGKTSWVHWRWQCPTFLRQTFVEWAGQSIQHSFWARAFYQQQRERGKSHQAAVRALAFKWLRILFRCWQNRDPYDESRYLEALKRRGSPLIHNLAKSM

SEQ ID NO: 476183 - protein, 366 aa, unidentified
MKKTNTVRENGNMIFKGQRLTLGMDLGDHWSCYCVLDEAGKIILEQKVAMTPEAMKQTFAKIPQSLIALETGTHSPWVSRLLTELGYKVIVAHAQKVQLITKSNRKDDRHDARTLARLARIDPELLGPVRHRSAQAQIHLTVIRARAELVRARTALVNAARGLVKSYGQRLPKCGTQQVNRELAAGLHAELREVLEPLLQEVESLNERIQEYEVRMEKIAKENYPHVELLKQVKGVGTQIALTYVLTLDDPHRFPKSREVGCFLGLRPGRRDSGESQPEMNISKEGDRYLRTMLVQGAHYILGPFGADSDLRRWGLKLAARGGKNAKKRAIVAVARKLAVLLHRLWVSGEVYEPLRNSQKAMRAAA

SEQ ID NO: 476184 - protein, 312 aa, unidentified
MANLVYAGIDVGKDKLFVNIHLDSQVRDFSNTHSGLERLSRFLIKNAVNLVVMEASGGYERLPASDLRARGLSVAVVNPTYVRRFAQGMGSLAKTDPIDARLIAHFASVKQPKPQQAKTVEEEELAALVERREQLVSLLSVEKNRLSKASDYSKASLQISIQFLTGQIASIETEIKALVAKSPERLARMRCMCSFIGVGDITAVTLLTEMPELGMESGKHIAALAGVAPINRDSGKMKGKRRTYGGRARVRRTLYLAALSASRHNPIIRAFYERLLAAGKEKKVALVACMHKMLTILNAMLKKGELFNPEYS

SEQ ID NO: 476185 - protein, 350 aa, unidentified
MRFAKVDARHYCGIDLHSRSMYVCVMDREGEIRFHRNLPNNFDIFHKYINPFLPDMAIGVESSCYYYWLADACREAGIPFYLGHAYYMKSIHGGKVKNDKVDSKKIADLLRCNLFPLAYPYPRKMRPTRDLLRRRHYFMWRRASTYSHLQLTCAQHGIIDLEPNIVKDKVRRNQLLNLFDNPELRMMIALDLMFIEFLDPVIAKLERHIRQQARYHNHLDYQILRSIPGVGEILALIILYETHDIKRFKTVQRYSSYSGVVKCDRESGGKKMAAKNTKIRNPYLKWAFGEIILKAQVCEPKIAKLYNRMKSKYGVGRAKSIMAHRFAVATYFMLKNKQAFDVDRFVQTSK

SEQ ID NO: 476186 - protein, 443 aa, unidentified
MVSDPNRVTVGIDAAVVANHQVAIRGSTGEGVIAEDFSVSPTLAGLERLTGRLSEYPGALVVAEPTGMSWLALGHAVNDASCGFSLVESRYSSKLRQAIAGKNKTDVIDADMLASSADLFGLSAGSLPTPSQVALRRAVRRRHRLTAEAHNTDLRLWSLAIWAFPDLWKAMGESHRLGRAVLGQWPRLDQLSRAHTKSIAALCRRCLRDGGDPEQRAERIRDTARGWARFWTGRLDLDALAWEITQLLDDIDIADRKVEEASQKATRLWRSAYGSDDLLLSVSGMGPVTAPVVRAYLGDAHQFRTSKQAAAFVGLNPSNWESGLMVSPSRPITKEGPPELRLAFYQAANVARQFDPQLAAFYQRMMCERGHHHIQATCATARKLVCRVWATLTSGDPYQLRDVDGNPVDRVEARRLVARYAVPEHVRRRARARNKPARGRLSG

SEQ ID NO: 476187 - protein, 412 aa, unidentified
MLFVGDDWAEDHHDVEVVDDDGQVLARRRLPNGLDGIAGLHALIGEHLPEGWADWEPAQVAGMVKVGIETDRGPWVAALVAAGYEVFAINPMSVARYRERHSTSGAKSDSADAHVLAEIVRLDRAHHRPLAGDSDQSEAVKLTARTHQSLIWDRTRHVLRLRSALREFFPAALQAFPDLGAPDALELLRRAPDPDQAAQLSRSTISAALRRANRRDIDDKTTRLQAVLHAEPLRQPTVIQAAYAAIVTSEVAIIETLNTQISQLGQVVSAHFGRHQDAEIYASQPGLGAILASRVLGEFGDDPHRFLDAKARKSYAGTAPITRASGKTKIVLARYARNRRIGDALQQWALCSMRGSPGAKAYYQQLRDRNIGHQAALRQLANRLVGILHGCLKTGTTYDEHTAWDHHTKAAA

SEQ ID NO: 476188 - protein, 344 aa, unidentified
MEHFAGLDVSVNETSICIVDEAGRIVREAKVASEPNALLSVLKNGGYHFKRIGLEAGPLSQWLYSSLSEANLPVICVETRHMRAILKAQINKTDRNDARGIAQMLRAGLYRPVHVKTLRSQKLRTLLTHRKLLQSKAIAIENDLRGTLRNFGLKVGVVGAAKFEARIRELVDSHPDLAALVEPLLVVRRVLREQIAVLHKRVLAIVRDDEVCRRLMTVPGVGPVVALTFRASVDVPARFRNSRAVGAVLGLTPCKYQSGESDRTGAISKCGDEMMRVMLYEAAQILLTRTVNWSWLKAWAMQIARRRGMKKAIVALARRLAVIMHRIWVDGTEFSWTRKEAAAA

SEQ ID NO: 476189 - protein, 413 aa, unidentified
MKQMLDPVAGLDVHRDNVVAAIRTVGTDGEVAFTKARYPTTRRGVAELAAHMSQAGVVRVAMEATGVYWKSLYYSLEGLFPELWLCNAQHVKNVPGRKSDLSDAEWLADVAAHGMVRPSFVPPPEIRELRELTRYRKTQIDERAREIQRLEKTLQDAGIKVTSVASSVWSVSSRKIVEALIAGERDPIKLASLAVGRLRPKTAELEEALAGHFGPHHGMVCAQVIEHIDFLDSSIAKLSEEIAARLLPFEAAVALVSSVPGIGEISAQVIIAEIGVDMARFRTAGHLCAWAGLAPASHESAGKRRPAGTRNGSRWLRRTMIEAARVAARSRGTYFSAQYSRIARRRGPNKAAVAVANSMLAAIWHLLTTGAFYEDPGADYFERRHDPVLEAKRLQTRIEALGFVVTMTPMAAA

SEQ ID NO: 476190 - protein, 416 aa, unidentified
MTDDARWFVGIDWASETHQVCLVDAGGKIVGERGFPHGGAGLAEMCIWLLVTTRAKPTVIAVAIEVPHGPIVETLLERGFLVYAINPKQLDRFRDRFTVAGAKDDRRDAHVLGDSLRTDRHCFRHLAAEDAVIVELREWSRMAEDLQQERNRLANRVREQLWRYYPQALKISDDLGADWFLELWAAVPTPAKAARVRESSIDRVLKTHRIRRIAAAEVAQVLRQQPLTVAGGTVEAASAHIRAVAARLKLVNRQIKEAHRRLDALCGKLAAREETTASGQEPEPRDVTILRSLPGVGRIVLATLLAEAAEPVRRRDYHALRTLSGVAPVTKRSGKRCIVIMRQACHMRLRSAVYHWARVAIQHDPLSRCRYAELRKRGHSHGRALRSVADRLLAVACAMLDQQTMFDPGRAEKQAA

SEQ ID NO: 476191 - protein, 335 aa, unidentified
MDYKHFLGVDISKGTLDFCLLTDEGVITFGQSENKPDLIIEAIRDICSSNGAVLAETLLCAEYTGHYGKHLVEASLRAKFQLWLEHPAQIKMSQGMQRGKDDRKDAERIAVYAKRFSEKATLVTVGEDVFEELAYLTAERDLLVTDRAKYSAQLKDEKGFAVKGLYEQKRKRYEKLIKQLDRSIKEIEEHIEKLIDKDDTLKRQYEILTSVDGIGKQVAVQTIVATKGFTKFSEARKFACHVGCAPFKYHSGSSIRSRNKVSHRANKKLKQLYHMAALSVVRSEGVMKEYFERKVAEGKNKMTVINAIRAKLIATIFALIRDNRKYEKIYTTNLG

SEQ ID NO: 476192 - protein, 355 aa, unidentified
MNDEKYIGLDVHQATIVVAVLDSTGKLVMESILETEAATILQFFAGLRGTLSVTFEEGTWSVWLYDLLHPHVDKLVVCNPRKNALLKDGNKSDRIDARKLAELLRGNQLKPVYHGETGVRMLRELARSYLTIVKDLSRVMNRLKAVYRSWAIPCAGRDVYYRRHRTEWLDKIREAGVRRRAERLYEQLDMLQHLRQQARRELLAESRKHAITAKLRQIPYLGPIRSALAVALIQTPHRFRTKRQLWAYSGLALETRISAEYRLVEGQVRRSKKLLSIRGLNKDHNHDLKGLFKGAATMASVRPGPFQDFYQAALAKGIQPTMARLTLARKIAAITLTLWKKGENFNAEKLKSQAA

SEQ ID NO: 476193 - protein, 316 aa, unidentified
MLIGIDVAKAELVIAARPSGERWTVANDERGVRTLLDRLTHERPELIVLEATGGYELLVVAALAAAALPVVVVNPRQVRDFARATGQLAKTDRIDAAILALFADRVRPVVRPIADEAAHELEALLARRRQLLEMLQAEKNRQGQVFGRSQRLVKKSLKAHITYLERELRIADTDLGAMVRESPAWRERDDLLQSVPGVGPVLSLTLLADLPELGRLTRREIAKLVGVAPLSRDSGTFRGRRFVQGGRATVRAVLYMAALVATRRNAVIRAFYQRLIAVGKPKKLALVACMRKLLTMLNVIVRTHTPWRAPESIVSA

SEQ ID NO: 476194 - protein, 370 aa, unidentified
MSARSQLPTGRTVSEACAECAAACMHKVDQPADEANVSESIIARNEMVDNVLGIDVSKGKFDAALRRADGRGRSRTFANTEAGFEQLGAWLKQLGVGKLQACLESTGTYGLALAKWLHGAGYVVSVVNPACVKAFADSELSRAKTDRVDAKLIARFCVAMEPAPWSPPAPELSQLQRLVRRLETLQQMLQQERNRRGVPGVSGLVQSSLERTVELLERELEQVRQQLADHLEEHPDLKRRRDLLCSIPGIAETTAARLLSELSGLEFGRARQVAAYAGLVPSPRESGTSVRRKARLSKRGNARLRRALYWPAIVAMRHNPILRPFAQRLLAAGKPKLVVIAAVMRKLLHLAFGVLKHGRPFDPNYHALTA

SEQ ID NO: 476195 - protein, 347 aa, unidentified
MKFYTTQHPYYCGIDLHARSLYVCILNDAGETILHREIKALPEPLLDLLTPYIGNIVVGVECMHCWYWVSDFCAEHGIDFILGHALYMKAIHGGKAKNDRIDSYKIAHLIRGGNFPMAYVYPPEMRAARDLLRRRTRIVRHGADLKAHVKNTTSQYNLPPNNLDLKYPCAREAMRNCFEDEFVQRNIDLDLNIIAFYRHELSSTECFIEKHAKHHNGSDYHILTSFPGIGRILALTILYEVGDISRFNTVQDFASYSRLIKCKAESAGKTYGTQGNKIGNAHLKWAFGEISVLYLRGNDKAKGYLLRLQKRMSKAKALSALAHKVGRCVYYMLKNKKVFDEKRFLAS

SEQ ID NO: 476196 - protein, 344 aa, unidentified
MDTIGLDVHKRETQVCILTADGELLERRIATTRERLGALFGRRPRARVLLEASTESEWVARHLEALGHEVIVADPGFAPMYAARSRRVKTDKRDARALCEACKLGAYRPTHRVSDAQRHVRAELAVRDALVRTRTRYVALIKAAVRREGLRLSQGDPERTAAKLRALPLPEATARELAPLVALLEPLNAAITAADRRLARLATESSAAQRLMSMPAVGPVTALGFVAALDDVGRFGAAHQVEAYLGLVPSEHSSGERQHRGRVTKRGDSRTRWLLVEAGWRVRRSKDPALAPLNAWADRIAARRGKRVAVVALARRLAGILYAMWRDDAPYATQRVGAATPAAA

SEQ ID NO: 476197 - protein, 355 aa, unidentified
MRASTTSQESRASTVGLDLGDRTSAVCILSKAGEVLETGVVRTTREALELRFKSADPVRIVLEAGPQSPWTSRLLESLGHDVIVANPHRVRLIAESRRKDDRTDAETLARLGRVDPSLLAPITHRSERCQQDLSLLRSRDALLSSRTHLISHSRGVVKAATGERLPACGSTVFHSKALASVPEALVGGLGPVMAAIGTLTQCVRGIDRQVDRLIAERYPEALLLQQVGGVGPLTSLAFVLTLGDPARFTSSRAVGAYCGLTPGRRQSGSRDPQLRITKAGDGYLRRLLVQSAHYILGHFGPDCDLRRWGLAHAASGGKNGKRRAVVAVARKLAVLLHRLWLTGEVYRPLRDEPAA

SEQ ID NO: 476198 - protein, 339 aa, unidentified
MELYSAIDLHSNNSHVAIIDDQQNRVFYRKLANDAKLITSAFAPYREWLKGIVIESTLNWYWLADLLIEKGYSVHLANPCGIQKYSGLKHADDKHDAFWLAQMLALNILPEGYIYPKEDRPLRDLLRKRAHLVRVRTSLILSLQNIVMRNHGIKIRSSDLKKLTQDPVAELLKDQEELALAGRASKETIDFLSRQIQRIETAVRSKALLKEPFSKLLTLPGVGDILGMTILLETGPIERFKAVGHYVSYCRKVPSRWTSNEKTKGKGNTKNGNRYLSWAFSEAADHARQTHEPSRNFYNRKLNQTNASVAHNALAHKLARAAYYIMRDHVEFKEDKMFR

SEQ ID NO: 476199 - protein, 355 aa, unidentified
MDSKKYIGMDVHKESISIAVMNGAGKIGMECVIETKASMILQFIDGLRGEVQVTFEEGTSAAWLYDLLKPHVNKLVVCDPRKNASMREGHQSDKIDARRLAELLRLNHLSPVYHGEHGLRSLKELVRSYLTITKDLVRVMTRVKAIYRSWAIPCTGKQVYAPRHRAEWLAKIGEPGVRRRAEFYYQQLDALRTVRQEVRRELLAEAKKHQAWKRLCQIPSIGPIRAAVLLGILQTPHRFRTKRQLWSYSGFGIETQSSADHRSVDGQLQRAKKQSSIRGLNRNCNHDLKNLFKGAAIVASSKPGPFQEFYTALLAKGIRPEMARLTLARKIATIVLMVWKRGACFDAQHLKPQTA

SEQ ID NO: 476200 - protein, 365 aa, unidentified
MKKISTEVAGRIENFKGDQLTIGLDLGDRFSHYCILNESGEVIGEHHLATTPKGIDEVFRRIPRSRIALETGTHSPWVSRQLARLGHEVIVAHARNVRLIGDSSRKDDQFDARTLARLARIDPGLLGPVQHRSAQAQIHLTVIRARAGLVSARTALVNTARGLTKSYGERLRKCGTQKIREMAKALSQELRDALDPLFGEIESLNERVAEYDRRIEQIAKELYPQVALLKQVKGVGTLIALTYVLTLDDPHRFRRSRDAGCFVGLRPGRRNSGMSQPQLHISKEGDVYLRTMLVQGAHYILGPFGEDSDLRRWGLKLAERGGKNAKKRAVVAVARKLAVLLHKPWVSGEVYEPLRNNHRVAAAVA

SEQ ID NO: 476201 - protein, 313 aa, unidentified
MKALQSSVFIGVDVSKDRLDVAVAPSGESMGFANSEDGIALLADFIKPHNPTLVLFEATGGWEMNAVNHLAAQRLPLVVLNPRQVRDFAKATGQLAKTDAIDARILARFGEAVRPEVRPLKPVELRKLEALNTRRRQIVEMLTAEQNRLLSAPEWIRPDIEELIEILKKRLAAINRDLSKLIRKSPLWREKDKILQSFPGVGPVTASTMIAALPELGTLNRRQIAALVGVAPLNCDSGTHKGKRKIWGGRGDIRSVLYMCAMTAARCNPVIRELYQRLLRAGKPNKVARTACMRKVLVILNAMMRSKTCWQPT

SEQ ID NO: 476202 - protein, 365 aa, unidentified
MHATPKSASVTTVAVDLAKDVFELAFADAHAHILERRRLTRTAFARAFDKRAPLRIVMEACGSAHDWARRFIRLGHAVELLPAHDVRRYVRRNKTDRTDAAGLLEAARCESIRRVPVKTSEQQGIQGLHRVREFHKAQRTAAINLLRGLLREFGVVIAPGSAKVRPAVLAVLEDADNELPMTLRHTLKTVLDSISADERAMAAIEERLQGFAEGDLRSQRLQRAGGVGLITATALSASVGDFDRFPSGRHFASSLGLTPREHSSGNARRLGRVTQRGDVYLRMLLVHGARAVLRSAKVAKKKQQPLDRTRAWALALSERVGHNKPVLSSSKERRLRSPTSRPVDCGRPSIIDPASTPITSACMAR

SEQ ID NO: 476203 - protein, 348 aa, unidentified
MTLVGCDLHSRKQQVAVLDTRTGELGEQELAHEGDAVERFYRALPPPVTIGIETTGYTQWFHALMHQLGHTVVVGEAAKIRAMVVRKTKTDRRDARHLLDLLQHDRFPTVWIPDPGTRDRRALIAHRVRLVRMRTMVKNGLQAIALNQRLALHSALWTQRGLTQLKALALPPDTTCRRDDSLALLAWLTTRIDQLDEHIAAVASADPRVQLLLTHPGVGPLTALTTVLVLGPLARFPDSKRVVSYVGLAPAVNASADKQRLGKITKQGNALLRWVLGQGAPLAARADDDLRRRYFSVMQRRGRPKAKVALARKLLVRLYIMLRDQIDYEEFRRRGRAPRPHHLPVAVI

SEQ ID NO: 476204 - protein, 381 aa, unidentified
MTNTNKSKTTKTRTQKQTAVRAEIPGKAKTIKLGIDVHLDRYVVVRIVDGGTPQPPQRFAPAQFLLWAAKQLTLAEQVFTCYEAGPFGYSLHRKLEQMGATNYVVRPRDWDEYGKQVKTDKRDAQQLALHLDRYVNGNREAFCVVRVPSPEQEQARSLSRQRESFQRERQRLAAQGRSHALYYGEHLQGEWWQPAAWKTLAAQLPPIVVNLLEPLRRLMAVLEVELKIRTQEVAAAAPEALPVGLGRLTSEILEREVADWNRFQNRRQVASYTGLCPREASSSDRRFQGAINKHGNRRLRPALIECLWRLCAFQPEYRIVKKWRPELINPKTSRPRRKKIIVAMARAFCVDWWRVRTGRCQAQDLGLRLQPRSGALKSAPK

SEQ ID NO: 476205 - protein, 485 aa, unidentified
MVLGHVGDTGEAVRAAIPFERVSTTTYPSRRGIPILMMEQAMAVRKKVVLELAHPNAAGIDIGSASHYVSVPPDRDDEPVREFKSFTEDMERLADWLKACGVDTVAMESTGVYWIPLFELLDARGFTVFLVNARHVKNVSGRKSDVLDCQWLQQLMSFGLLSGAFRPKDEICALRAVSRQRDMLLSYQARHVQHMQKALTQMNVQLANVISDIVGETGQKIVRAIIGGERDGAKLAKMKNVRIRASDADIAKSLRGTWREEHLFALKQAMALFDAYGERLAECDRQLEAMLSALHRDGAGEPGKARRRGRAKNAPGFDVRSHLFAMCGVDLTRIDGIDTTTALKVIAEVGPELSRFKSAKHFASWLGLCPGTKISGGKLLSGATKRTANRAAQALKLAAAALRSSHSALGAYFRRMASRLDRAKAITATAHKLARLIYTMLTKGTEYTDKGQDYYEERYRERVMHHLTKRAKQLGFQLTPIPETV

SEQ ID NO: 476206 - protein, 338 aa, unidentified
MHRAGLAFASMSQNNKTINDNKLSFYAGIDVAKATLQLSINATSWTLSNDPKGCIRILKLIAEAEATRPGYKIHVIVEATGGYEAALVETLHRANQRLSVIQPSRVRHFANAKNKRAKSDPIDAAILAQFSEAIQPPPTLPPNAAQIHLVRLVARRAQLIETRITELNRAAHYRDKLLHKQSQQLLALLNRQVQQCEHAIAAQLAADQEMKTRAERVQQVPGIGPVVAAILQAQMPELGALRDTEAAALAGLAPYNRDSGPRKGTRSIWGGRASVRCALYMAALSAVRHDPILRNFYTRLRAAGKKPLVALTAVMRKLVVLLNHMLSKPTFKLAVRPN

SEQ ID NO: 476207 - protein, 362 aa, unidentified
MAKVRSWAGLDVHARSVFAVTVDGDSGEMRMRRLPAATSEVVKFCCSLPGPTRVAYEAGPTGYGLARALHGAGIGCVVAAPGKIERPAQDRVKTDQRDAERVLRLLMIDGLHAVRVPSSHEEALRDLVRAREDLRGDLMRARQRLSKLLLRHDVRYEDTASAWTARHRAWLTGLDLGERGAQATLLDYLGAIDALVIRRDALETSIAELVGDSPWADTVARLRCLRGIDTLSAVGLCAEVGDFDRFDRAGQLMSYFGLVPSENSSGETRRQGAITKTGSRHARRLLVEAAWHYRKTPARGHALKRRQNGQSAHVLAIAWQAQQRLHRVWRRLDGERGKRRTIVAVAVARELTGFCWALARAD

SEQ ID NO: 476208 - protein, 427 aa, unidentified
MLKHNTEPNPAEEFAAFLAIDWADEEHAFHLQVVGQSKIETGTLEQKPEVLGTWVAKLRERFGGRPIAVGLEQSRGALIHGLMAYDFLVLYPIHPTTVAKYREAFKSSGAKSDPLDAGQILEILTKHRDRLHRFNPDTVETRLLGRLVEDRRKAVDLRTTHVQALGANLKEYYPQALELTNGNLSSRLAGDLLLKWPTFADFQQAKPSTLKRFYYGHNVRSPQVLERGLALAEKSQALTTDPAIVESGSRLSQMYVRLIQALNPVIEKYDQRIQRVFDAHPEVKIFTGLPGAGPVMAPRLLAFFGTDRSRYAAALNVQSFTGVAPVTKSSGKSRVVYARAACPKFDRQTFHEFSRLSVSNCQWARNYVQYYTDKGKKYHTIIRALAYKWIRILHKCWKERTPYNDDLYMEILKKRGSIFATLHLQTK

SEQ ID NO: 476209 - protein, 354 aa, unidentified
MSIAMIGLDTAKTTFQVHGVDETGKVEIKRKLRRNEVVGFFATQPACTVVLEACAAAHHWGRVLETLGHTVKLVAPEAVRPFVKRGRKNDAADASALCEVARRPEVKFVPVKSVEQQATLALHAARALLVKQQTMLSNALRGLAAEFGLIVPQGFVKLEQLMGMVEAENQAILPEPARQSLKALYRRFCAMVEEATMLEKAIGAHAREDATARRLATIPGVGPITASLIAPTVTDIGLFRSARLFAVWLGLVPRQHSTGGKARLGRITKAGSSAIRTSLVLGATAMVHRASQWNSAAGAWLRGVLGRRPVRLATVALASKVARIAWALMMRGEDYRPHTVRPVISAASGKVAAA

SEQ ID NO: 476210 - protein, 458 aa, unidentified
MGRNKSRNKDRGTISVVHPNAAAIDVGATMHTAAVNADRAPEPVRSFGTFTTDLHRLIDWFAECGVDTVVMESTSVYWIPIFELLDARGFAVFLVNARDAKHVPGRKSDVSDAQWLQRLHTFGLLRASFRPKGQIAELRAYLRQRERLLEYGASHIQHMQKALTEMNVQLHHVVTDITGSTGLRIIRAILAGERDPAVLARMRDRRCHATVETIEKALAGNYRAEHLFALEQALALYDTYQQMAFACDARIEAVLEQLSVCRGREGGQLPAARQNRSSQQNSLRFDVRAALFALLGKDLTQINGLGPYLVLKLIAECGDDLSAWPSAKHFTSWLCLAPSNKISGGKVLSARTRRSGSRAASLLRLAAATVGRTDTALGAFYRRLSARIGKAKAVTATARKIAVLFYNAVQHGMNYVDPGASAYETRYRTRIIANLRRRAKAFGFVLQPVDPTPSVAVS

SEQ ID NO: 476211 - protein, 337 aa, unidentified
MKKVIRIGLDTSKQVFQVHGVDALEQTVVRKKLRRGEVERFFAALPPTSIGLEACGGSHHWARVLQRLGHEVRLLPPQYVKPYVKRGKNDAADAEAICEAMSRPSMRFVAVRTAENQAALMLHGARDLLIKQRTMLVNAIRGHAAEFGLTGAKGVGRIRALLERIALDPAIPDLAREILAQLAAQLDALECQVQRLEARLNAWHRSNELSQRLAAIPGIGPIGATALAMKVPDPIVFRSARHFAAWLGLTPKDHSTAGRQRLGGITRAGDETLRRLLVSGAMAVIQRAHPERSSPWLLALLARKPRKLAAVALANKTARIAWVLMARGKTYRCAAAA

SEQ ID NO: 476212 - protein, 377 aa, unidentified
MVLSRHDHFYHNVWTPPTYELSLLVSTKTQIEGPHMNKVNTIGVDLAKNVIQVSILSPSNKELTNKELPRTKFAEFLAKQPVSLVAFEACSTAHHWARLARSYGHRVKILPAKVVSTFRQGHKTDKNDALAVAEAANRPNVKEAPLKELEQQGMQSIQRSRELLVQNKTCLSNHIRGLLMEFGVFIPKGFASLFKNIPDILEDGENDVPDMFRATLNLMYQRLLDLRDDVALLNEQVKQLVKNNEACSNLTNMEGVGPISAILLFSTLGTGEAFKNGREFSAYIGLTPKQHSSGGKASLIGISKFVANKRLRSVLIQGARSYVHRMKSVTTKKDEWLVKLIERAGYGKAAVALANKNVRTAWALLTQGTEYRKELIA

SEQ ID NO: 476213 - protein, 435 aa, unidentified
MSNQLFDIVRFKCAGIDIHKNYFVVTVSVTDRTTLLTTYHTKEFHGFNSELDEMCAFLKSYDVDDVCMESTGKYWIPVVKKLEANNIRFRLVHPKYVKAVYGHKTDKADSKFICRMYACDMCGPGSVILPEKYRETRDLARRYWILGYDLTSEKNRYQNCLTVSNLPLDAIFSDTLGKSAQAVMNEILAGHEKDETRILSVVSSRCKNKGKIMDAIRGSSISPDQRFKITDIRSHMDELEQHRDHVFAQIITNLSDDMENIIFLTSIPGISVSSAVLIVSEIGMNMDFWKDGRNLTAWVGLTPRNDQSHGKKKSTRITKAGTYLKPLLVQCALAATKQKDGYFARKYNRIRRRRGHKKAVLAIARMILISVYNILKKKEEFKPSDYEDVMNPSKKAKKVSEHDAIRVLESLGYNIDQITRAITPVSSPVVFPTTT

SEQ ID NO: 476214 - protein, 336 aa, unidentified
MEHCAIDLGGRKSQVCVRASDGTILHESRPDTLALKEFLQGRPKSRVIVETCAEAFGIADAALALGHEVRVVSATLVRTLGVGARRTKTDRRDAQTLSEVSCRIDLPSVHVPGQRSREVKTICGMRDGLVTARAKLINTVRGWLRGQAVRISSGATPSFAERVREIGDLPEHLAAQLRAIDSLSREIKMADERVQRLADADPVCRRLMTVPGVGAQSALRFTAALDNITRFPDSHRVEAYLGLVPGERSSSEREQRLSITKAGATSVRWLLVQAAWAVRRCKSAEARPLQLWTLEIEKRRGKQIATVALARKLTGILYALWRNGTTYDPTRTTQTH

SEQ ID NO: 476215 - protein, 411 aa, unidentified
MQTLVERGCGLDVHQSTVVACLLIVLKNGTVHKNMRTFGTTTRELLSLRAWLLSEGCTHVAMESTGVYWKPVYAILEGGALEIVVANAHHVKKVPGRKTDVKDAEWIADLLCHGLLRSSFVPPKPIRELRDLTRYRRKLVESQTAERNRLLKLLETSNIKLASVATDVFGVSGRLMLRALIEGKATTQEMANLAQKKLRKKIPELEPALEGKLEEHHRFLLRLQLDRLEAAEADLAVLEQRIQQKLQPYEAQVTLLDEIPGVDWTLAGVIIAELGVDMKVFENVSHLASWAGISPGNNESAGKRKSSRIPKGNVYLKTGLVEAATAAARTKGTYLRDKFYRLKARRGYKRAVVAVAHKILVAIYHMLSHRVCYNELGDLYLDKLNKHHLTRNLVHRLERLGYTVKLEQKAA

SEQ ID NO: 476216 - protein, 330 aa, unidentified
MSQCTTSKFVGLDVHKDSIVIAVAEVGREAARVIGTVPYEWKALSKVLEKLGPRAAVHCCYEAGPTGYGLARALQAAGWACDVIAPSLVPKKSGQRIKTDRRDAMKLAQNHRAGELVAVFIPDEQTEAIRDLERAREDAKKTERVARHQLSKFLLRNGRRYSGKTTWNDAHRAWIAKEVFAEPAQQYVLSDGLAAVEAATLRCQQLTQRLRELTAGWRLAPLVKGLQALRGVEFVTAVTLAAEVGDFRRFAKATDFMGSIGLVPSEFTTGNQRRQGPITKTGNAPCTSRAGGIGLALSAATADQQGAARARRGDFAADPRPRVEGAEAVA

SEQ ID NO: 476217 - protein, 339 aa, unidentified
MRLYAAIDLHSNNSVLVILDENDKIVHERRHPNDLPTILAALEPHREDIQAIAVESTYNWYWLVDGLMEAGYTLKLVNTLAVKTYDGLKYSSDEHDARHLAHLMRLGLLPTGYIYPKEERAVRDLLRKRSLLVRNRTLHILSIQNLVSRNSGTGIVATSIRKLDDEALSRICGGNSNLVLAIKSSLSVLFCLDAEIKGLESVVLAKARLRPEFKKLLTVDGVWHIIGMTIMYETGDIGRFNKVGHFASYARCVGGGRFSNGKKKGEGSRKNGNKYLSWAFIEAAHYAVMHNERIRKFYQRKKAKTNTVVALKSVAHKLARACYHIIKEQTVFNEERAFA

SEQ ID NO: 476218 - protein, 409 aa, unidentified
MRYYLGVDWADQEHAVWGIDEAGQKVTARTVPHTADGLSEWGRELDEWRGQGIELWAAIERPEGRVVDVLLDHGVVVYPINPKALDRARDRFRQSGAKSDPFDARVLADFLRTDHPHLTALHPSSEAAQELKYLTEDCQRLIRQQTRLVNQLTATLKAYYPRALEAAELTTALAREFLQAYPTPEAVARLTERQWRQWAKAHRLSDARTAELWTVLQQPQLPVPAHVVRAKAQMMLALVAALAPVVEAVATYRRAVEDFFARMPVAHWARTLPVGEHGITVPTLWARLGDAPARWTSFRHLQAQAGTVPVTKRSGKQQVVTFRFACDKQLRYVVDQVAFLSLRSSEWARAYYDAQRARGHRHRHALRALGAKWLKIIFVMWQRQVPYDEQHHLATMARQALRHPEKQIA

SEQ ID NO: 476219 - protein, 474 aa, unidentified
MDYIGIGIDVSKGRADIAFLNQSGTQLAGSGAYDDTHAGHTRLQAAIQEVRHRHPDAQLIAGVEATAGYERSWVAFFAREQPQRGKPVVVHRLNPLAVKRFLEADLHRKVDDRNAAHGIARFLLERRRETKVEAIPLDGRVTLYRMIRSLMLQRTAQQQRFHTLLAVVQPELVQYCASGIPNWILSVCRHYPTAARLSRCHVTALAALPHVGATKAAALRTAAQTSTASMTDDGTALTIELLVDDLFALDERIHAGQQRLEALMVNDPDVARIDGIPGIARWSAIALVLEIGPIERFADVRQLIAWSGLDPRVDESGDGVISRGISHRGNAHLRAILFPLTLAAMQHHPRIADFITAKVNHGKPKKVALVAGAAKLLRIIFALLASKQPYRADHEQLLASERATARQAARSAPAPAPTTLPTTPPDLSAPVSAKERRRRTTEQKKAAAQKSQECEVEPQRDQRATAAPSLMIPT

SEQ ID NO: 476220 - protein, 429 aa, unidentified
MLLETFLLLVIFMKNKTNKFTAFVGVDWADCKHDISIVSATGGKPVHQVITHTPEALSEWLAKVRQQYPEGQIAICLEQSKGALIFHLLGYDFLTLFPINPKSLARFREAFIPSGAKSDFSDADYLREFISVHFDRLRSWEPDDEHTRTIAFLAEGRRKAVDDRTRLTGRLRSTLKMYFPQALELLGDKLHSKMALDFLGRWPRLADIQKAKPKTVQKFYATHNSRSPQLIEKRLKLIMPAVPLTADQAVIKSCLITVKMLIGQIVQLNSSIDEYEKELKSLYDNHPDKNIFDSFPGSGGALGPRLLAAWGSDRNRHDSANSMQKFSGTAPVTKASGKSKIVIRRLACPKFLLQTFHEFANCSRKFSIWAQAYYEMLRDHGKSHHTAVRSLAFKWIRIMYRCWKDRTKYDEVKYLQALKKSDSPLREYI

SEQ ID NO: 476221 - protein, 366 aa, unidentified
MSGLGITQAAPSVVVGVDAHKRTHTLVAVNHLGQKLGELTVEATDPGHAKALRWAQTKFGPDPALWAIEDVRMVSGRLERFLVDAGLTVVRVPTQTMAKTRASARSPGKSDPIDAEAVARAALRYPELPRACHEPVSYEMKLLIDHRATLIKQRTAAINRLRWRVHRLDPEYDCGPNLKADVHRERLRGWLLETQSGVLAEIAASDVDELSRLTQLIRPLERDIEVRIAEVAPNLLAVQGCGSFTAARIVAETANVTRFRTEAQFAMHVGVAPLPFWSSNSPHVHGVRYGNRQLNAAIHVIALSQLRSGGIGRPYYDKHVDAGDSTRSALRRLKRRLARVVFNAMRKDYALRVAAETDTAVSVDAP

SEQ ID NO: 476222 - protein, 456 aa, unidentified
MEQYYLGVDVSKGYADFVILDDKKQPVEKNFQLDDTFNGHSYLYEKLCQFLHEHPESIINASVESTGGYENNWFNTLIKFQGTLNLRAARLNPLGVSANSKADLKRNITDKISAQNVAEYMIAHPEKVSYQEEDHLAGLRKQWGFIQMLTKQKTQLLNQLESLLYTANPDLLTYCKDGVSEWVLKLLICYPTADKLSRAKVPSVAKIPYISSSRAQELVTNAKKSIASATDKITAQLITATAEQILHLKEVITSQTRIMAEECSLPGVNLLKTFIGISDFSAIGLILQIQTVERFSSVKKLASFFGLHPVFKISGDKSSGFRMSKRGRKEPRHILFMVALCAIQSNPLIRSIYLEHVEKGMNKMAAIGACMHKILRIIYGMLKHNKAFDPEIDRQNRDKTSQKKKTSSEDKNRRYQDFDSRAPISRRQGKKRKEQKQSHSDNNTKNGIIASVPHTL

SEQ ID NO: 476223 - protein, 354 aa, unidentified
MPRKTTSVEAVATIGIDIGKNTFHLIGLDKKGAIVLRQKLSRGQVDNRLANMPLCLIGMEACVGAHHLSRQLKAHGHDARLMPARYVRPYSKGQKNDFRDAEAIAEAVLRPTMKFVAIKAVEQLDLQGLHRVRERLVCQRTSVINQIRAFLLERGIAVRQGLRALRTEIPIVLAMTDKLSPRMIHMIEDLCTDWRYLDGRVATVSNEIEMLSEQDDGAKRLMTVPGIGPIISTATVAAIGSGDVFSKGRDFGAWLGLVPRQMSTGGRTILGPISKRGNRYLRMLFVQAARAVLLRPQSWEKHGLKSWIEAAARRLNRFKLAIALANKLARIAWGVLHGGRNFEVRPLRPAPQAS

SEQ ID NO: 476224 - protein, 344 aa, unidentified
MKIKLLGIDLAKNVFQLCALNQANKVLYNRTVRRTQLASTIAKLEPTTIAMEACSSAHYWGRTFETMGHKVLLVPAQHVTPFVHGGKSDARDALAICEAAERPGIHLVPIKSIDQQDIQLLHRLRQRQVQHSTALANQIRSLGREYGVIFPTGIKSLISHLPEALEDGSNELSPVARYALADQHRCLIEVRQAMKVFLLQIEQLAGQHPAYVNLLPLPGIGPMTASAYIAAIGNGNQFKCGRQVSAWLGLVPRQYGTGGQIQLRGISKSGDRYLRTLMIHGARAAITRGLKKNPELTRWVQPIIDRQGFNKAVVALANKMTRICWVIVTTGEAFDIKQAFKPVA

SEQ ID NO: 476225 - protein, 394 aa, unidentified
MKLVGIDVGKNSHHFCVMDKETGEFNVTPSSFSNNKEGFDFLINSLKPYSKKSILLGMEDTGHYHVALLKFLLSNGYTVALINPKTTDLTRKMEGGITKNDKLDTITICDVLDTPERKKQYRITKVDRFDLYEQRQLTRHHHNLKEELNIYCNRLQKSIDLVFPEFNTLFGSKYGVVYMNLLKTFGSAEAIASTDIRTIRKCFEIKGRGGRISLTAEKLKECAKNSIGISSEVETIQIKHLVSQIMLIKEQIAEIDKKIEEFSIKNNSPILSIPGISHFSGTSILAELGDIGNYSKPSRIIKFAGVAPYHYESSQYNAQHTAITKKGSKYLRKTLYQVILPVINNNPVFKKYYRLKISQGKGHRCAQGHCIRKLLRIIYHLLETGQSFDPALLR

SEQ ID NO: 476226 - protein, 391 aa, unidentified
MIYVGIDVAKNKHDCCILGSSGTVLREAFTLSNDRKGFQELYAAIQEALHQEGTDPIKAGLEATGHYSDNLVAFLRSSGIQPVVFNPLQVNLFRKSQSLRRTKTDKVDAKCIAQLLMSAESTPVPASYQIQELKTLTRHRSRLVSQRTKLKQCISRLVDILFPELPSVCCSATQASMRTLLLELPSARQIAACRIDRLTNLLYVASKGRYSREKSLEIKQLAQQSIGANSPASELELRLTLQQLDFLLDQLKQLEKAIQTIVAAIHSPILSIPGIGPTLAAIILAEIGDIHRFSSPDKLLAFAGLDPSTYQSGKFTAVRTPMVKHGSTYLRWALMQAARLASIHCDTFRHYMDTKLAQGKHYFVALGHVSKKLVRVIFRILTTNEAFVPQA

SEQ ID NO: 476227 - protein, 380 aa, unidentified
MASETTQVNHTTFTPNLYMAMELSNAEWKLGFTVGLGQAPRLRNLAAREMAGLKEEIRLSKVRFGLPESAPVISCYEAGRDGFWLHRCLTAQGVTNLVVDSASIEVNRRKRRAKTDRLDASKLLLMLIRYVQGERKVWSVLHPPSPQEEDQRQLHRELMALKRERTHHINRIKGLLISQGVSLKLKADFLSQLEAVRLWDGTPLLPELRQSLLREYQRYQLVQEQVHQIEVERQEAIRTGDTLAIRQVRQLLQIKGVGVNSAWLYVMEFFSWRGFRNRRELGSLSGLTPTPYQSGNSAHEQGISKAGNRPIRAMAIELAWSWLRFQPGSALSIWYQNRFAHGNSRLRRIGIVALARKLLIALWQYLERGLLPAGACLRTP

SEQ ID NO: 476228 - protein, 338 aa, unidentified
MGLYCGIDLHSTNSYVTVLDESDRVVAERRLVNDLGVILGFLEPYRDAMEGVAVESTYNWYWLVDGLMAAGYRVRLANPAAMQQYSGLKHAGDRSDARWLAHMMRLGVLPEGYIYPVAERGLRDLLRKRHRLVQHRTRLYLSMATAVERTSGRRLGGNAIDRLGEADVDSFGLPADVALAARSELRVLGCLRGEIAGLEKVIVARLRPTPVYRGLLEVPGIGKILGMTIALETGDIGRFAHVGNYVSYCRCVEAKRVSNGKRKGAGNAKNGNRWLAWAFVEAAHFAVRYDERARRYHRRKKAKTNGMVAGKAVAHKLARACYHVMKDGTAFAPERCFG

SEQ ID NO: 476229 - protein, 402 aa, unidentified
MNCVGIDVSKGKSMIAVMRPFGEVVVSPFEVRHTASELSELARLLKSLDGETRVVMESTGNYHAPVARLLHDAGLYVSVVNAMLVHDYGNNSLRRAKTDKKDAVKLANYGLDHWLTLPRYIPEEDTRLMLKICYRQYQQYSKVQTMLKNNLISLLDTTFPDANRLFTSPPRADGSEKWVDFVATFWHCECVCGRSEKAFTTQYQKWCRKHGYNFSEDKALDIYASACRHFGVIPKTDTAKLLVEQAISQLQTTSSALAALKQEMQSLAASLPEYPVVMGMFGVGPTLGPQLLAEIGDVRRFHSKKALVAFAGIDAPPYQSGQIDVRSRSISKRGSASLRRTLFLVMSVILQCAPIDEPVYQFMDKKRSEGKPYRVYMMASANKFLRIYYASVKAYLESLEHD

SEQ ID NO: 476230 - protein, 428 aa, unidentified
MERENCSRLAEFRQLRKDIRGSDEHLIVGIDVAKERHNAFFGTATGETLYRRLIFDNDKDGFERLLLQAEAMKVQHGLKKVVFGLEPTANYHKPLGEYLIKNGHVVVLVATDAVKKNRSLLDGRWDKNDKKDSANVADLISQGKCLFYEHPSQEVRDLRNLLSFQRKLKKLEHSTRMRMRNHLVAQYFPELDTCCNWGANEGLAIVKSCLDPAVISALEYDEFLRKIQTRGVTLAQQRRLSTVWQRAIKSIGCEFGLSAEYEAQMIVKMLGQVRMSIADTQQQIKAVCEKFPEYEYLLSIPGFGPDISAKTLGAIGDPFRFDNASQVLKLVGLDLSASRSGKNSDNITPSISKKGKSELRYALYQAALIASSRDRHFIAYFTNKLKGREREKGIKTKMRVKLSAKMLIIAWTLMKKKEFFNPEYLNIE

SEQ ID NO: 476231 - protein, 416 aa, unidentified
MNAVGIDVSSRKSTVAVLRPLGEVVCLPFDVTHDIAGLASLVEKLKALDGETRVVMEHTGRYYEAVAKALHEAGFFVCAVNPLLIKEYGANSLRRVKTDKADAVKIARYALDNWADLRDFTPMDAIRYDLKTLNRQFQLASKQRTASANNLIALLEQSFPGIRKCFDSPVRSDGTQKWVDFAHSFWHVDCVRKQPFPAFCERYRKWCKRHAYLFKLSNAEEVYALAKRAVVLTPKSKVVKVLVQEAANQLISISRSVEVYRAEMDRLAAMLPEYPVVMAMYGVGKSYGPQLMAEIGDVRRFERKQALVAFAGIDPMPNQSGDKNVRSNKSSKRGSPYLRKTLFNVIRTYLQCAPQDEPVFQFLNRKRAEGKPFYVYMLAAANKFLRRYYAKLRDFFASLDTLQPVAPIPTILKATL

SEQ ID NO: 476232 - protein, 586 aa, unidentified
MSTATSFDRIGVGIDTARYGHRACFLGPDLHPAARPLTVTEDRAGYQALRDRLDQLRRRHPQAHFHIRIDAAGQYAANLEQFLRGLDGPMTLSVGQPKRNKDYRAAHFPKRTTDDTESQALARFALVERPAATPAPPAPMAPLREAVSRLQGQVKQTTRATNRLHNLTARTFPELATLAEDITAGWVLRLLKRYPTAERIAAAHLASLEKIPHIDGERARALHQAAGRSVASFRGPVAEALARHLVEQVVRSRAAERDLLRLVTAAWEDLPASPHVRVLTIPGIGQATAAILVAKIGDIDRFARPEGLVNYFGVFPEEDSSGVDKEGRPRPTAAMHMSRKGNDLARAYLWSAARSAIRHNPAVRPLYRRLRAKGTRGDVAIGHCMRKLLHLVYAVWKTDRPFDAGHYPWEPAGEPAPTTTAAGEPVGGVADEGAVGHRRDEPAGRVVATAPPTVGPIPSVVNPPAPSIRVARPRVDYAFLRQQIDIGRVLAHLGLLARLRGVGPRRRGPCPLHSHPAAAGRTFSVDLDKNIFKCFDSECGAQGNALDLWAAVHRLPLYEAALHLAETFGLARNREEEPVPGTRRPE

SEQ ID NO: 476233 - protein, 324 aa, unidentified
MAKRITICAGIDTGKRKLDVAIDGSSLQLQVENAAEGHKVLLEWLRRHKVKRIGIEASGGYELPVVTELRRKRFVVVVFQPAQVRAYAKFHLQLAKNDKIDAALIAACTAAVKKIHAAPDPRLQPFAEHLTLIEQIGEDIKLYKNRIETCRDPRIQKLWKEEISRLAKRERAELKALVAAIRQHRDLAQRLDLIYSVSGAGMPTAVAILVRMPEIGTLSREQVAALAGLAPYDDDSGERSGARHIDGGRKRLRRALYTAALPASFFWNPHLIALYQRLRAAGKEHKRALIACARKLLIFVNTVVARGTPWQEQQPVRATNPAAA

SEQ ID NO: 476234 - protein, 356 aa, unidentified
MVVIGIDAHMRSHTAVAVEAGTGRQLAELTVAADELGHRRLLEFATRLGDEREWAIEDCRNLSRHLEKALLNAGERVVRVPPKLMARARRSERTFGKSDPIDALAVARAALRESDLPVAQLAGVEREIALLLDHRANLIVERTRLQGRLRWLLYELDPTIDPAGRSLDNYQVLDRLKRRLAKQPPSVLLRICRELLARIRELTVQVRALERDLKPLVVRHAAPLLAVPGVGIINAARLLAEVADIRRFRTEAQLALYAGVAPLDASSGRQLRHRLNRSGNRQLNAALHMIALTQARLHPPAREYIARRRADGKTGKEAIRALKRHLIRTLYRLLNACRQPRPAIEVTAAPNAPCIT

SEQ ID NO: 476235 - protein, 317 aa, unidentified
MAKRVAKITLGIDVAKDECRVCQWESTEALTLPNQAGSIRAWLQSLQGPVQIALEPTSHYHLVWVDAALALGHEVYLINPRQLAHYREAVNVRNKTDPQDAWLLARYLVHEGCQLRAYQPPCRKAQQLWALLKRRAVAVTARKQLQQSFREINLSTRALLSQFQHLLARIDRRMSILIQALGWAGDYQRCLSIPGVGPLNAAALVTAYHRGAFANSDGFVAFIGMDVRLRESGRYRGKRKLTKRGEAELRRLLYCAAQPARTYPPFENYYQRQLDKGLPKIAAKVILARKLARIAFSLLNNQQMFIRQTEKMVAYSP

SEQ ID NO: 476236 - protein, 313 aa, unidentified
MTVSAGLDVHKDRCHGVIMDEDGEILKDEKFENSLPGIQEFFKGFKHADVVMESSYSWRPTYERLEEIGFEAKLAHPKRTRAIAESEIKTDSIDARTLAHLLRTGLVHEAYVPSREIRELRDKVRLRTKLVRERTRLRNKIRAELEKNRIDLDENPFTEKGRKKLKETGIVSIEHYLAVFEKLDERVKMITKGLEEIAEKREDTSLLMTIPGIGHISALVIVAEIGDIDRFDSPEKLCSYAGLVPKVHQSGDTLRIGGDKEGSKQSSPLDNGRKRLVPCQSRGLTYNQILREKGTGKRIEKSSDSVSIKSLLL

SEQ ID NO: 476237 - protein, 391 aa, unidentified
MIFMFFLGIDIGKNTHVASLLDEKAKVIFKAYSFANTLDAAESLVVKLEPYKASLEIGMEATGHYWLSLYSFLTEHNFIVHVLNPIQTDGWRKGIEIRKRKTDVIDSVLIADLIRYGDFLETSLADEDILSLRNLTRFRSYLVNSVSDLKRKAIAVLDQIFPEYASVFSNVFGQTSKELLKSLSLPSDYENLSATKIEEVLSNITQKKKASETISTLSDKASRSFGISFCKDSFAFQLKLIIEQICFIEEQIASVELEIEQLMSKLGTNIKTIPGVGNVIGAVILGEIGDIERFDNPSKLVAYAGLDASISQSGEYEASSGKLSKRGSPYLRKALYMAAQRAEFCDPVFHAYYEKKRNEGKHHLVATNAVARKLCHTIYAILKKNIPYEIQ

SEQ ID NO: 476238 - protein, 318 aa, unidentified
MSKNETYVGIDVAQDHLDVQVSGETAPWRVPRTEAGLEALCTRLAPSLPARIVMEVTGGLELPVAQALSAAGHAVARVNPRHVRDFGRALGYRAKTDAIDAALLARFAETIRPAVRPLPDAETQALRGLVGRRRQVVRLIAQERTHRHTAAPDMQARIDRHLAWLAEERDQLDQALERLLQAHAAWQEQAELLRSVPGVGGVVTGVLLAELPELGRLSHRTLAALVGVAPFNHDSGHFRGRRTIGGGRASVRQALYMATLSATRANPVIRAFYTRLVARGKPKKVALVAAMHKLLTLLNAVMRDKTPWRTPPQVMPGT

SEQ ID NO: 476239 - protein, 318 aa, unidentified
MEPQVSFNQVVSRGCGIDVHQKVVVATISGDGLKKETREFGTFTRSLTELKDWLLKNGITHVAMESTGIYWKPVYHVLEPTSLKVWIVNARHIKYVPGHKTDKLDSAWICKLLLAGLLKPSYIPPREQRELRDLTRFRTKMIQDVASEKNRIIRILEDCNVKLSSVVSNTQGVVATKLINKLCEGQAITMADIDEVYHKRLEVSKEDLYEACQGLMDDHHIYFLQMIRQDIASTEAVIENLNARIKDMLSCYENVLENLKAIPGLSNKTVEDLVAEIGLDMSVFPTEKHLASWAGMCPGNNESAGKKKADAPTMAINT

SEQ ID NO: 476240 - protein, 357 aa, unidentified
MGKSIRNIAAVTRVGLDLAKNAFQVHAVDAKGETVVARKLARGRLVAFFAELPRCLVAMEACSSAHHWGRALVELGHEVRLLPPAHVKPYVRRNKNDAADAAAICEAAGRPGQRFVPVRSVDNQAALMRHRARELLAGQRTSLLNALRGHMAEIGIVAPQGAQHAYHLKRLAADGFDEVGEIVVPECVRVALRPLIDQIDALDETIGAIDRELEASVKTDETARRLMTIPGVGPVTASAITATIQDMSAFASGREFSAFLGLTPRQSSTGGKERLGRITKMGDRYLRKLLVVGACATLSHRKGHNDALRRWASGMLERKTVKYKFKLTAVALANKVARIVFVLMTRGGQYDGRPVAA

SEQ ID NO: 476241 - protein, 403 aa, unidentified
MTTLFAGLDWASRTHAVCVIDEHGTVCRQFEVAHSAAGLAELQRHLAACGKPPVAIERPSGLVVDTLIEAGFTVVPIHPNAVQATRPRYRSHGAKSDAGDAYLLADLLRTDGHRFKPLLPQSDEIRALRALVRGRDDLVATRVRLTNQLRTLLESFWPGAAAIFADVDSPIALAFIERFPTPDSAARLGPKRMAAFCVQHAYSGRRSPEELLARLHQAPAPTCAELQTKANGELVRSLARTLECLLEQIRLLTGRIEHYVASLDDGRILMSFPRAGRVCAAQILAELGSVRERFPSDTQLAAEAGVAAVTYQSGKSRVVTFRWACNHRLRAALTCLADNSRHASAWAAHVYAQARARGCDHPHAVRILARAWVRVIWRAWTDRRPYQPDLHRAATQLLTAPAG

SEQ ID NO: 476242 - protein, 470 aa, unidentified
MKERNAIGIDPDSQGFVCAYVKRSDTKVDTRGYMATDSDLKSFLKWVKGEKDVVVAIEGSNGLSKPLEKALREAEIVFYSFKPTDTDKFRKAVLGQNKNNNKDAESVARYAMALEAQGKLEKYRRVWFADMELQLLTRRHESLNQQLTAEVNRLWKLLRYASADLYLALGGKNPEVECGEKVVKSEGILNLLISTPDVGKWKSLSEKQMLEAMGGGNYKGRRALIQELRKVISSFQSVSKAMALLLSTSAHQIQRLKEEQLDIVRMLEELTAENTAVQELRQMKGIATKTAAKMIAEIIDIRRFAREDSLACYTGLGMREHSTGQTTNMVPTQLFNHRLKDAFMTAARNVVFYDPDSHIAGYYRNLVKAGMSPLAATRRVARAMVRVIYRKLSALTAGTTDVPTGDKQEEGESDMASGSTRSGQSHTSDISLSSPRNHRARSVRKVKREVTLTGRTRELGRRKIISKKIT

SEQ ID NO: 476243 - protein, 416 aa, unidentified
MNAPSDSEFAAFIGIDWADRKHDVCLQAAGSSKRELAVLPHRPESIAQWAEGLRRRFGGRPIAVCLEIAKGPLVYALQRYPFFVLFPVNPTTLAKYRKTFHVSGAKDDPLDAQLALDLFLTHPEKLTRLQPQGAAMRILTELVEQRRALVGDVGRLTNRITAALKQYFPQVLDWFEDKDTLVFCDFVTRWPTLKHAQRARKARLTAFFHEHNVRYPHIVEQRIQAIASATALTADRAVIEPNRLLVDALVQQLRVLLPAVERFDHQIDALARTLPDFAVFISFPGAGAVFAPRLAAAFGERRERYASADEVQKYSGIAPVTERSGNKCWVHWRLQCPKFLRQTFVEYAGLSIPHCYWAKAYYDQQRARGSSRQAALRALAFKWIRIMYRCWQERMPYDEATYLTALKRRGSPLISG

SEQ ID NO: 476244 - protein, 355 aa, unidentified
MDSTKYIGMDVHKETVSIAVMNSGGKLLMESVLETKAATILQFIQGLQGNLYVTFEEGTWAAWLYDLLKPHVTKIVVCDPRRNALLKEGNKGDQVDARKLAELLRAGLLRPVYHGENGLRTLKELSRSYLTISKDLTRVMNRLKALYRGWGISCAGATVYAPHHRSEWLGKITEAGVRRRAEFFYQQLDGLQALRQQVRRDLLVESRKHSARKLLRQIPSIGPIRAALLIALLQTPHRFRTKRQLWAYSGLAIETHDSAQYRYVAGQLQRSKKPQQLRGLNQNHNHDLKAIFKGAATNASSGAGPFHDFYEALLTKGMKPSMARLTLARKIAAITLIVWKKGAHFDAEQLKPQAA

SEQ ID NO: 476245 - protein, 475 aa, unidentified
MNLKGTKKKNQVSNANIFEQQELLKKIEVVRENLTASTWHELETKGKFDKNAKLSFICDDMLILGCDVGSETHYLRAIDTRGRELSKSAFSFSNNADGFSKAKEWAVKIAAEYDKKQIVLGLEPTGHYWFCLATWMISNGISVVQVNPYAVKQTKELEDNSQLKDDAKDPKLIANLVKDGNFGMPYLPEQLYADLRRLSMFRDQLNEDRIRSINRLHRELKIYFPEYKEALGKTEGTFSLELLKQAPFPDDLAALKEDGIRQIWHNAKLRGRGYSRAGEILEYAKASVGIREGKETGKLVVQWFVQKILELDAELALIETQINQKCLEIPHTDKVLEICGIGENTLSGMMAEMGDISRFDDVKEIQKLSGLGLVASSSGKHKGETRISHRGRKRLRYWLFQAAKSAVAHAEEFKKLHVYYTTREQNPLKKMQSLIAIACKLLRIIFTILKKGIKYDPRKMLKDIRRESRQESLAA

SEQ ID NO: 476246 - protein, 365 aa, unidentified
MFYLGIDQHARQITISLRDDSGDVVQARQVSTQPEKVHAFFQQLTRQRLCDGASFVAVLEVCGFNDWLIRMLQEYHCHKVVLIQPEDRKKCKTDRRDAAALSELLWVNRDRLLQGKPVRGVRQVDIARGTDQENRRLTTLRKEAGQARTRLVNQARHVLRRHNLQWQMPTKRLPTQAAIAWLKQLALPAIDRLEMDHLLTDLEQVQRRLKGLERVIAQRCGVSEEAVLLSSIPGVSYFTATALACRVGRVERFPRARSLANYWGLTPGCRNSGEATQRLGNITKAGSGMARWLLAQVAIKVLRKDARLREWYKRIRRRRGSTIARVAVMRKLATIIWHMLSKRKSYAECRAVAGTGAEEREKQEC

SEQ ID NO: 476247 - protein, 456 aa, unidentified
MASRKSARTSKSRTSFPTVHDHAAGIDVGSRFHVVAVPPDLCSEAVRTYDSFTGDLHRLADWLVEIGITTVAMESTGVYWIPAFRILEERGLEVLLVNARHVKNVPGRKTDVNDAQWLQQLHQFGLLRGSFHPAQQLEALRAYLRHRERLVEYAAAHIQHMQKALMQMNVQLHHVLSDITGVTGMAILRAIVAGNHDPDQLATYRDGRCKASIDTVRKALTGHYCPEYVFALRQALELYDTYQTKVADCDQVIEAALRSLDHADEPAVALPPARHKTRQSNEPKFNVRQALFDVLGVDLTQVHGFGPATALMLVGECGTDMTRWPTVKHFTSWLTLAPGSKVSGGKVLSSKTRQSASRAAKLLRLAAVNVGKTNTALGAFYRRLAARIGKAKAVTATARKLAVLFYNTLRYGMTYQDPGVSYYEEQYRQRVIKGLRRRAKEMGFELLEASAVEGVS

SEQ ID NO: 476248 - protein, 297 aa, unidentified
MTLFAGLDVSVKETAVCVVDESGKVLCERKVPTEPGDIISLLCSIDGDYGRVGIEAGPLSQWLVNGLTAAGLPVVCVETRHMMALLKAQQINKSDRNDARGIAQMMRVDLFKPVHVKTQIAQEQRILLTSRKLLQAKLQDVESDLRGTLRNFGLKVGKVSSGKFDARICELVADYPRLAMIVEPLLAVRCVLQKQFATLHKLLLDTVRHDPVCRLLMTAPGVGVVVALTYRATVDQPQRFLHSRAVGAHVGLTPKRYQSGEIDYDGGSRNLTMPCCGQRSTRQQIRCLPALPADGHG

SEQ ID NO: 476249 - protein, 423 aa, unidentified
MAYRIAGIDVHKKMLAVVVADVEVQGEYQFERIRYGSNPEQLRLLAAWLIEHEVEEVVMESTAQYWKPVWGALEQYWKPSGQKRETTGPMSGTLHLAQAQSNRGPRGRKKDFPDAERLVKRLVANELSLSFVPDAEQRLWRTVMRRKYQLTRNRVQLQNRLEALLEEAHIKLSSLVSDLLGASARRMLKAVADGETDTAALASLADKNLRATPAQLCDALGACTELNPVYRRLLKMFLEELQLIDQQIGQLDKEMATLLGQHQAAVERLAEVPGLGVDSAQQIIAEVGATAATFPSAKQLSSWVGACPGDEESAGVSKSHRSPKGNRHMRRILNQCANAAAKSKGTIFEIVYRRLVSRLGHNQTIGAIAHRLCRLIWIILHQNVRYEERGPSVSAKSRQRRTHRMIRELRNLGYRVEPVVTTL

SEQ ID NO: 476250 - protein, 412 aa, unidentified
MELLHRRCCGLDVHKETVVACLRLVADGKVTTEVRTFQTTTADLLRLSEWLAANGCTHVAMEATGIYWKPVWHILDDGEFELVLANAAHVKNVPGRKTDVNDAMWLAELLAHGLIRASFVPDAQTQEMRNLLRTRKQLVREQSSHVLRVQKTLEDANIKLDSVLSDVMGKSGRAMIEALIAGETNPAKLASLADRRVKASPEQLREALRGRVTKHHRFLLRLHLNQIDALDAAMATVDAQVEANLAPFRTAVELITSIPGIKTLSAHAIVAEIGIDMSRFPSAPHLISWACICPRNDESAGKRRSNRQRKGATWLKTTLVQCGWAAVKKKGSYLQAQFHRIKARRGPKKAIMAVVASILTAIYHMLKDGTMYKDLGCNHFNRRSTDQQKTHLIKRLADLGYTVEIKPVVAMA

SEQ ID NO: 476251 - protein, 337 aa, unidentified
MAFLMEETGECGEQELNHSDGQAEKFYRDLKQRGICVRVGMEATGYSRWFERLLAELGFEVWIGDPAEIKTKRVKKQKTDREHARLMRKLLLENRFPRIWVPDPENRDLRQLLWHRHRLVQMRTRIMNQLQALAMNEGYRWKKKLFSEQGRAQLEKLSLAPWASRRRQELLELLDRMNPTIEELTAAVEREGRKRPEVQRLMTHPGVGPLTALAFVLIIGTWERFPCDKQIGNYVGMIPSEDSSAGKQRLGHISKQGNSLLRFLLVEAAQAAARINPEWRRRYIHLAMRRHKSIAKVAMGRRLAVRLYWMWRNRCEYSQSLEFGSYAGQLGTVHGVK

SEQ ID NO: 476252 - protein, 387 aa, unidentified
MIYVGIDIAKLNHFASALSSDGEIMLQPFKFTNDYDGFHLLAQKLDSFVSDELIIGLESTAHYGNNLVEFLVKHNYKVCVINPIQTNTMRKNNIRKTKTDKVDTYIIAKTLMMNPHRIFTMQDISIMHLKELGRFRMKLIKKRTQAKIQLTSYVDQAFPELQYFFKSGIHQKSVYAVLKEAPTTEAIVSMHLTHLSHLLETTSHGHFKKHTATELRILAQKSVGSTDSSISTQITQTINLIELLDSQVKEVETQMKLIVASLDSVIMTIPGIGFINGGMILGEIGDITRFSNPSKVLAFSGLDPAVYQSGNFNASHTKMSKRGSRPLRYALINAAHNVVKNNKTFKNYYDQKIAEGKSHYNALGHCAGKLVRIIYKMLTDNVEFKLD

SEQ ID NO: 476253 - protein, 385 aa, unidentified
MQKLNDLSRSPSRLDPDGTLIAVIELSLSSWLVAGIVPGVERQPLKKLAVDESALLKLLHRWREEAAKAGHRIKRIAVAFEAGRDGFWLARWLRARDIEAHVIHASSVAVSREHRRAKTDRLDTELLKRSFLGWLRGERDHCKMVAIPTTQDEDAKRPNREHESLVGEQSRIVNRMKAALIRLGIRGFNPKLKKAAERLDGLRTPEGEPIPPNTLAELRRDMVRRRLVSDQIRQIEDARLERLKQAPSDGPHAMVRLLARVIGVGVETADMLVQEVLSRSMRDRRAVARYAGLTGSPDESGRKRREKGLTRSGNARVRRGMIQLAWRFLMFQKDSTLAQWFRVRTESARGTRKTMIVALARKLLIALWRLVREGAVPDGVVLRPA

SEQ ID NO: 476254 - protein, 415 aa, unidentified
MELLYPRCCGLDVHKSSITACVRIQEKSGKPHKVVRRFGAMTVDLRALASWLMEQQVTHVAMESTGVYWKPVWNILEGQFTLILANAQPVKNVPGRKTDTKDSEWLAELLQYGLLSSSFVPPQLIRDLRDLTRTRASLAQESSRIASRIQKVLEDANIKLASVASDVLGKSGQAILAALIAGQDDAEQLADLARGLLRAKIPQLQCALEGLTREHHRFLLERLLVQWQFVESETELLDQRLEQIAQAEPPLAEAVARWDTVPGVDRIAAWGLVAEMGIDMGQFPSAQQAASWAGLCPGNHESGGKRLSGKTRKGNPWLRRILGQSAWAAARTKNTYVAAQFRRLAAKRGRKRAIVAVGHSLLVIGYHLQRKKCSYQDLGPDHFDRMNAEGLKRYLVKRLEGLGQKVTLEPRETAA

SEQ ID NO: 476255 - protein, 373 aa, unidentified
MPRYSTAFGMDVHLRSTTVCALDAETGEAVTRRFRGNPWGEVAEWMSGFPGPSLAAYESGYLGFAPQRELSGLGVDCVVAAVSRVPRSAADFSSKNDRNDAARMAKAILSHDVTPVWVPSPEIEGLRDLAGAHDAATARLAAAKQRLLAFLARRGYVYGGTTPAGNPRKYWTYGFLRWLDGIHPADDGGIRALAALRNEVEAADETREALLAEYRAAVAAGPLSAEVEALQSIKGCGFALAAAFASEVGDFSRFRSGRQVTSYFGLAPKQRSSADSVRLGGISGAGNALVRRLAVEGSWSYVQASHQPKLMPKGSGVPLEVRMHGRKGSERLLRRREEMLARGMPQAKANAATAAELVRWLWALGAMCREATE

SEQ ID NO: 476256 - protein, 380 aa, unidentified
MSKGTKLFVGLDVHKESIAVAVAEEAGGEPRFLGTITPEPQQVTHLVRRLGREQELVCCYEAGPCGYGVYRQLTGLGVNCMVVAPSLVPSKPGERVKTDRRDALKLARLLRSGELTAVWVPDQDQEALRDLTRAREDARQDLMRARHRLSKLLLRLDLRPPAGVRAWTQRHAQWLRQVQCPRQRQQVVLEEYRQAVAETQERAARLEVEIASAAHEGVHAPAIAGYQALRGIGVLSAVIVAAEVGDITRFDTPRQLMAYAGLVPSEDSSGGRVRRGGITKTGNGHLRLVLVEASWHYRHPPQIGPTLRRRQEGQSAAVRAISWKAQQRLHRRFRRLLGRGKVKQEAVVAIARELSGFLWGIGQEVGAPAAAPLAHAPAVA

SEQ ID NO: 476257 - protein, 347 aa, unidentified
MTSTKYIGLDVHKESISIAVMNSVGKVVMECVIETKASTILQFIDGLRGDVRVTFEEGTWAAWLYDLLKPRVTEVVVCNPRKAALLKDGSKGDRIDAYKLAELLYMNSIKSVYHGEHGLRTMKELARSYLTISADLTRVMNRLKSLYRSWGIPCAGTEVYAPRYRAEWLGKISEVGVRQRAEHYYQQLDVMHLLRQKVRKDLLAESRKHKAWKLLRQIPGIGPIRAAVLIAVVQTPHRFRTKRQLWKYSGLGLETHDSAQYHAVEGELRRSKRPATVRGLNNFKGAAMRASTAAGPLRDFYENLLAKGRKPTMARLTLARKIAAITLIVWKKEVRFDANHLKPQQAA

SEQ ID NO: 476258 - protein, 372 aa, unidentified
MIANNTDTVSEVKLSTGPATAATVLSGEEVFLGIDTAKRRHVVSRFVPGEGAKPAEGMNTATLLARVGKWRKAGLAVHAVYEAGPTGFALARKLLELGATCLVVRPRRLDRHGRRRKTDPLDAQHLAEDLAAHRFGRKGLLCPVRLPSLEEELRRLPVRERETLSGVRHQLLNSAKGRALALGHELPKQWWRPRVLPKLIPQLPAAVAQLLQRAADAAAAILQQLEAVEAELTADAPPAPVGVGAVTAGVLDREVCDWGRFDSDKKLASFAGLCPSEDSSGERHRQGAIDKHGSARLRFWCQEAVWRLFKFQPEYRGVIWARERMRHANKGRAKQIAVALARRFLIDWWRVRTGRATCAQLGLVFKKPAATP

SEQ ID NO: 476259 - protein, 422 aa, unidentified
MENIAARKVKQVPEGYLIVGIDPHKKRHAAVAITQDFTTRDKFKFDNTREGLETMLRRARTEMVKLDCRGVMFAIETGGHYWRNIAYFLDEQGVPFRFINQFTLKRRREGKDLNRRKNDYRDSEVAAQLLCTGEFTESTIPQGVYAELRTAHNAYRRLVKERTRITNLIKGLLDGLFPEFTLVFKDPCGLTALSVLSTCAIPSVIAKMMEEEFVAIIEAQHKGRRLMRKKLRALHHMARASIGIAAGARSVSSEISFLVEKLELIRGHICIIERTLVSLVDETEEGKYLLSIRGLNYIAVAGLLAELGCFKSYRTAKQMIKMAGSNPTESESAGKRGSHTPMSKQGRPVLRYCAWTSVIPMLRLNSDFRAWAKQMRERPVHANPLNGREIVGAALNRLFRLAFAMVKNQTYYRLPQLVQVTG

SEQ ID NO: 476260 - protein, 318 aa, unidentified
MAFDVSKRELVGVRADKNGNVKEEFVLPNESAAIELWLRSTKDRYPKLLIGSEATAEYHREIAQQTGAMHIPFRLINPILTKQFTRSTIRKRKTDKTDAAIIAKLIANGEGTLLTPRSLDVLKPINRTANSINVLRKTLSATLAHMQQVCPTEALLHEEIRVSIDMLQKTVKHMRAHVQKQTDPKLKKLLMTIPGVGETIAATLLAEIETIERFKDANKLVAYAGLDPRVRQSGVSLNRNAKLTKRGSPYLRQSAYIAAYIAARHDPELKEYFEKKMNEGKRYKEATVATARKILYRVYAVWKRRTPYEKRGSLQRSP

SEQ ID NO: 476261 - protein, 469 aa, unidentified
MNNAKKKKRKNNGKQHNSLSQLEQINLNAAGIDIGAEEHYVAVPQGRDPEGEDVRHFNTFTVDLLSLANWLKKCKIDTVAMESTSVYWIPLFEILESQGFDVKLVNPRSIKNAPGRKTDVLDCQWIQQLHTYGLLQGSFRPEDQICELRSYLRQRSMLISYASNHIQHMQKALEQMNIKLNHVITDITGVTGMGIIRAIIAGERNPETLARMRDPRCKSSTSTIAKSLHGNWRSEHIFALRQAVELYDFYKSQITACESRIQKRLETFDDRSNGRPLPKPPFRSGGSSNKFHFDARTYLYRMTGIDLTRIEGIDTPTALTIISETGIDMNKWPTDKHFSSWLALCPGSKISGGKVLSSKSKPCANRAAHAFRLAAYSLHKSNSALGAFLRRKKSHLGSPKAITATAHKIARIFYNMLKKGTEYVDLGQDYYERCYRDRVITNLKRKAKQFGYNLVNVKEHELLTTHMQI

SEQ ID NO: 476262 - protein, 418 aa, unidentified
MSRRDSNAVLSVVHHDCCGLDIHKDKVSAALLMTHEDGTIEENICEFGTFTEDLYRLKEWILEQGCHVVAMESTGVYWRPVHNVLEDTCQVILVNARHVKHLPGRKTDVSDSRWLASLLRHGLLKGSFIPEKHIRRWRDLARLRKTYVESLADYKRRVHKLLECANIKIDSVATDLFGVTGRNLMDLLISGDEITLESVIGCTRGRLKGKVGELFKSIKGFFTEHHRFQLVSIFTLIESVEKQIAVVHERLSTLLSDRREKVDQLMQVPGISDVSAQALLSEIGDTLDQFQTAASLASWAGLCPGNNESAGKRHSGRSPVRGSIVKTIMIEITWAAIRKKGSYYREKYYSLRARKGFRKAIVAVAHRILNAVFHIIKFNRPYHELGESYLIQLNNKARLHNLHNQAAKLGYKLVSAQA

SEQ ID NO: 476263 - protein, 355 aa, unidentified
MSQEKYIGMDVHQATISVAVMDAQGKLIMEGLLETKAATILEFVQGLQGTLSLTFEEGTWAAWLHDLLKPHVSRLVVCDPRKAALLKEGNKSDRIDARKLAEMLRTNQLKPVYHGEHGVRTLKELGRSYLTLTKDVTRVMNRIKALYRSWAIPCGGTTVYAPRHRAEWLAKIVEPGVRVRAQRLYQQLDGLQPVRQQARLDLLQESHKHAAVKLLRQIPSIGPIRAALLVALLQTPHRFRTKRQLWAYSGFAVETHDSGEYRWVRGKLQRNRERVTVRGLNDNHNKDVKSLFKRAAISASTRPGPLHDFYVARIAKGMRPTMARLTLARKIAAITLTLWKKGEVFDAEKLKPQAA

SEQ ID NO: 476264 - protein, 332 aa, unidentified
MSTFIGIDIGATAFEVVIRKNDKNGAVKSYQQTPKDHEKLAAQLLKLDPACVVMEATGIYYLNLAVVLFNSGLKVSVINPNSFNHFAKLTLTHSKTDGIDAALLAEYAQRMTPRLWTAPDPKLLSLRDIGRQINRLVGRRTEARNNLHALQAKDSTYQPLIDDELEGIEYLEFRIERMRNMALEIIAGNENLKQKLDNLTAAVGIGTNSAIMIICELELLPEHLKSSQVSRFAGLDVRLTQSGTSINKPGRLSKAGNAYLRVALFMPALSAATHDANTRAFYQSLIQRGKKKMQALCAVMRKMLTGIWACLKLNMPFDSSKLFSEEHKKACA

SEQ ID NO: 476265 - protein, 344 aa, unidentified
MHEPAVAWHIHGVDAEGKAVVARKLRRNEVLTFFGKLPSCLVGMEACGSAHYWAREIIKLGHTVKLMPPKYVKAYVKRGKTDAGDAAAICEAVTRPSMTFVPVKGVEQQGLSMLHSGRSQLIGQHTQLINAVRGHLSEFGIVAERGLLGFAELAAIVRDEKDQRLPVTARAALMVLVRQIEAISAEIAALDTLLRKENKASELGPRLETVPSIGPVIASAFRARVTDAKLFKNGRHMSAWIGIVPENDSTGGKVKQKGLSKKGDRYLRSLLVTGAMAVVRQAQKRPDKHPWVAQLLGRMSAKQAAIAIANKTARIAWAIMVHGGNYEAGHRAIQYRAEARVAAE

SEQ ID NO: 476266 - protein, 402 aa, unidentified
MINAVGIDVSKGFSTIAVVDSLGKVTVSPFDVKHAVSELGELANKLLALKGETKIIMEATGSYYLPIANALHMAGLKVYAVNPILINEFGNNSIRKRKNDKADARKMGRYAVTNWHELPPEYVPEEEIRHMLKAFSRQYSKYNKIKIMLKNNFISLLDQSFPGLNNLFTSTARERDGHEKWIDFAARFWHCDCVASLTPKVFKERYIKWCKRFGYYPVGTDEIHAAARRCVAVMPQNKTTELLITQSVAQVNNIAESLASIAREMKRLAAMLPEYSVAIEFYGVGKILGSQLIAEAGDVLRFNKKSSLVAFAGLEPTDNSSGQFQGKEPISKKGSPHLRKTLFQIMDVIIQNSPQDNIIYQLLDRKRAEGKHYYSYMNAGAAKFLRIYYARVKEHMDKFDNI

SEQ ID NO: 476267 - protein, 356 aa, unidentified
MAEGTWVGLDVHARKTVAGVLDASTGELRSLRVPTSLDETVGWLRGLPAPVRVAYEAGPTGYVLARACARAGIACTVAAPSKIQRPPGDRVKTDRRDAERLARLLRLGELVAVRVPEPHEEAARDLVRAREDARGELMRARHRLSKLLLRHGVVYDARAWTQTHDGWLRRQRFDSRPLQLALEESYAAVVQAKTRREMLDRAIVELAAEAPFADTVGRLCCLRGVSTLTALALTVELGDWTRFQPQSLGPFLGLTPSEDSSGERRRLGSITKTGNTHARRLLVEAAWHQRRPLRESATLARRRQGQPAPVRAQADRSARRLHHRWHALERRGKRRTIVAVAVARELAGHCWALATM

SEQ ID NO: 476268 - protein, 389 aa, unidentified
MSQPFDASKSLATLEQDNTVIAVIEMSQSKWLVAAVVPGVKRQPLKKLQADEEALLKLLYRWRTEAGQTGREIKRVVVAYEAGRDGFWLARWLRTRGVEAYVIHPASNAVSREHRRAKTDRLDTELLMRAFLGWLRGEKRHCSMAAIPAAEEEDARRPNRERENLVTERTRIANQMKAILARFGIRSFKPTLRKAAQKLDGLRTAEGTPLLENTRAELSRHLARLRVVREQIRAIEQKRLHKLAAAPAEENGPHVMVRLIARVFGVGVETADMLVNEVFARHLRDRKAIARYAGLTGSPDESGKRRRERGLARAGNARVRRGMIQLAWCFIKFQKNSALAKWFDARTADGRGSTRKTMIVALARKLLIALWRLVTTGEVPEGVILRPAA

SEQ ID NO: 476269 - protein, 298 aa, unidentified
MRRVIGIDIHRTFGEVVIWDNGVLRHAGRVDLTQTALEGFGKALETTDEVVIEATGNSMAVSRVLSPFVARVVIANPLQVKAIAYAHVKTDKVDAGTLANLYAAGYLPEIWTPDAATERLRRLVARRYQIVRHRTRVKNEVHAVLAAHLVPKCPHADLFNQRGRTWLARQVVPDDERTAIERNVRELDRLTEDQAGLDREIAMTVMDDASVRRLMTITGVNLTVAVGIMAAIGDIARFTSPQKLVSYFGLNPRVRQSGLGAAHHGRISKVGRSHARAMLVEAAWAAAKAPALLISTQN

SEQ ID NO: 476270 - protein, 409 aa, unidentified
MRIIGLDIHRAFAEAVVWDDGKLKRMGRVDMRRPLLEAFAKKLSKEDVVVVEATGNASSVAAVIAPHVKKVVIANPKQVRIIAHAKIKTDTIDASVLAQLYASGFLPEVWIPDEPTQALRRQVTRRNQIVRQRSRLKNIIQSILHSHLIPSCPHADLCGASGRAWLFHQILPEDERLAVERHLREFDRLGEDLKVIERDLARSALGDEGVKRLMTIPGVDMVVGLAIVAAIGDVGRFEQSQKLVSYLGLNPSVRQSGPGPAYHGRITKQGRGHARGMLVEAAWAAARAPGPLRAFFLRVRARRGQHVAAVATARKLAVLIWHLLRKGESYAWARPALHARKLRDLELKAGYKAERGQRGAAHAYNIKSHRDEERRWVEQAETAYARFVAGWNPRGPKRARTGAANEGRQ

SEQ ID NO: 476271 - protein, 344 aa, unidentified
MLYAGLDLSRKRLDFHLLDAKGATVEVGAAPPDADGLRGLSERLASHGEAVRAAIESMNGARFVHDRLELAGWQVEIADAQKVKGLAPLACKTDRIDAWVLAELSRRELVPAIWLPDPLVRAERERARWRLHLVRHRSSLKQRVHAVLLTHGKPCPVSDLFGVRGRQLLARLALPEPWQATLEASLRLIDELDREIGDCERELRRLGADHRYVPLLCTVPSWVLAYTIAAELGDIDRFPTPRKLAGYTGLCPRVYQSGERDLRGPLAKQGPRYLRWALVEAATHACTAPAYRDRYQQTKARIGKQRGAKVAQIDLARRLTEAIWHMLTRNQPFAPKGATDPLAA

SEQ ID NO: 476272 - protein, 289 aa, unidentified
MTYYAGVDVSLRAVNICVVDDDGELVAETKLSSDVQEIVAYLDELEYSIDIVGLEAGTLVQYLTYGLQFAGYDVACMEARQVKAALSAMRNKTDKLDARGIAQLLRSGWYSPVHIKSMQSHHIRMLLTSRKAVLDKCIDLEQEVRGLFKIFGIKLPPKLGHGSFDKVVRATIKTDETLSHALLPLLDARLVLYKTFRMLDNRTRHLAQNDPICQRLMTAPGVGFVTALTYKAGVDDPSRCQRSRTVAAHFGLTPRRRQSGGGHRRAYLQVRRCRGTKNLVHGSQLHAHA

SEQ ID NO: 476273 - protein, 374 aa, unidentified
MKKIIVHSTGVTATAVTGQQYQTPVAAIKLGLDIHQERYVVVAQEDHATPKPARSLRPEEFVPWVETLLARGHRVFVVYEACGFGFGLYRRLTALGATCYVIAPQKLDEQRKGVKTDALDAGTLCQRLSRYVAGNTKELAVIRVPTEEEEQRRHVHRQREALVRARTKLQAQGRALLVTHGQPALQRWWRHQGWQTLGKLVPDWLRARLEVFRPVLLVLDAQIAALTAELEAAAAPELPTGLGKLTEVVISREVCDWQRFRNRRQVSSYTGLCPGEYSSGCKRMPGAVTKHGNPRLRAALVELAWRLVRFQPGYPPVQKRLPILAKGARATGAARKKAIVAVARQLAVDLWRWQTGQCSAEQLGLQPSTSPHQD

SEQ ID NO: 476274 - protein, 360 aa, unidentified
MSFNGTSVGLDVHALSVVAHAFDEETGQVERARLCPDHGEILHWLHQLRSPVRVAYEAGPTGFGLARALAAAEIDCVVAAPSKLIRPSGDRVKTDARDAAHLTRLLRLGEITAVTVPEADVEAVRDLVRAREDARADLMRVRHRLSKLLLRQGRVYSGGQAWNGVHETWLRRQRFDDTHTRATFDHHFDAVLTATAARDRLDEQIVDVAASPRWADQVNRLGCLRGISALTGLALSVEIGDWTRFTGASIGAYVGLVPTEYSSGASRVQGSITKAGNGHVRRLLIESAWHHRAAYRNPGPTMRARWAKVDPALKDRGHAGNRRLHQQWCRFNERKKPHVVANVAIARQLAGWCWSLATLD

SEQ ID NO: 476275 - protein, 338 aa, unidentified
MKKYIGIDLHSNNSVVVVTDEEDRIIYQKRLANTLNEILAALAPHREEAVGVVVESTYNWYWLVDGLMDAGYQMHLANPSAIKKYEGLKYSGDFADAAYLAQLLRLGLLPEGYIFPRELRAVRDLARKRMQLVRFRTTQILSIGGILVRETGGRMSCRKIKVMTTDTVEALGFTPEATLAMESNRVVYQALQQQIELIEKRLETMVKLQPGYRLLKSIPGIGEVLATIIMLEAGPMTRFADVGNFSSYCRCVDSLRESNGKKKGEGNTKNGNKYLAWAFMEAANFALRYCPEAKRFYERKKSRTNRIVALKSVAHKLARACYYILREQQPFDVKRCFV

SEQ ID NO: 476276 - protein, 338 aa, unidentified
MGTYAGIDLHSSNNYIGIMDQDHKRLFGRRLPNSLEKILMVLEPFKSDLKGVVVESTYNWYWLVDGLQEHGHRVHLANPSAIKQYEGIKHTDDKWDSFWLAHMKHLNILPEGYIYPKEQRAVRDLLRRRLFFVKHRTANILSLQSTITRNLGIKISSNEIKKLDMDDACDLLDSSNLVFMAQNNISTIKHLAKIIKGIEKEVKSQVKLRKEFVMLTTIAGIGLILGLTIMLEVGDIGRFSKVGNYASYCRCVGSKRLSNGKKKGENNKKNGNKYLAWAYVEAAHFAKRHIPKAQRFYQQKMAKANGAVATKALANKLARASYFVMRDQVPFDEDMLFR

SEQ ID NO: 476277 - protein, 344 aa, unidentified
MKITRVGLDIAKQVFQVHGVDERGRARVRKQLARAKVLEFFVQMPPCLIGIEACSSSHYWGRELTKLGHTVRLMAAQFVIPYRKRSKNDANDAEAICEAVGRPNMRFVAIKSEEQQSVLMVHRARTLMMANRTAQVNQIRGLLGEFGLVVPKGVARLRRELPGILEDAENGLPALAREVLAGLLDQFQEFDARVSAYDRQIRALAAASEPARRLMQVEAIGPQTATALVASMGDPHVYKNGRSYAASLGITPQQRSSGGKERLGRITRQGDGYLRTLLVHGARAALRVIDTKTDAKSAWARRLRDRRHVNVAAVALAAKHARIAWAILAHGTHYRPAGPELVAA

SEQ ID NO: 476278 - protein, 337 aa, unidentified
MNNNAVGLDISKNVFHLYSQTDDGKVVKKKLKRGELLAYIANMPVSLIGMEACGGAHYWAREFSKLGHEVVLLNARFVKGFVVGNKNDFNDAEAIFTAVTRPNKRVVAVKNETQQDIQMLHCLRQQRIDQRTALVNQVRGLLSERGITLPKGINQVRKQLPWILEDAENGLTSLSRELFAEQYEQLKALEGDIKAQDSRINRLCQQNALSRRFLEVPGIGPIIATIMASDIGDGKGYTKSRDYAASLGVVPRQHSSGDKQVLLGISKRGNAYLRTLLIHGARSVIKCCHDKSDPLSRWLQALVERRGFNKAAVALANKNARILWAMARQDQPYQAAA

SEQ ID NO: 476279 - protein, 343 aa, unidentified
MDKISMIGLDIAKNVFQVHGVDASGRVVVCRQLRRGAVEKFFAKIPPCTVGMEACGSAHHWARVIGSYGHQVRLMPPAYVKPYVKRNKNDGRDAEGICEAVSRPTMRFVPVKSVEQQATLAVHGVRALLVRQRTMAANVLRAALSELGIVAAQGVDGLRKLMARLEAPSEQIPEMMRAALLVLVEQWQALDAEERALERQIVKAARNDRQARRLMEVPGVGPIIASTVLAKVPDAKVFRSGRDFAAWIGLTGRDHGTGGKHRPGRISKQGDRMLRTLLINGASAHLRQQKRRGVSNPWLRELLARRPYKVAMVAYAAKMARILWAMLAKGGPYRDHASALAAA

SEQ ID NO: 476280 - protein, 374 aa, unidentified
MSDHSEAYVAFDTSKLRNAVAIADAGRSGEIRFLCEIENSSAAIAKLVRKLAAKYGRLTFCYEAGPTGYGLYRQIKGLGHACMVVAPSLIPRKPGERVKTNRRDALSLVKQLRAGDLTAVWVPDARHEAMRDLTRARETAVEDLRRKRQQVSAFLLRQGLHYPSERTWTKTHRNWLASQKLEHAEQRLAFEEMLLAMRQAQERIERLEQAIRAAVPDWSLAEVVTALMAMRGIEFISATAFLAEIGDLSRFATPRELMAYLGLVPSEASTGDTVKRGRITKTGNRRARRILVECSWSYQHPPRVGKEKQERVAAAPPAVREIAWKAQCRLTARYRALIRKGKLKTVAVTAVARELSAFIWAINREIANSRAAAK

SEQ ID NO: 476281 - protein, 436 aa, unidentified
MHTSESKRTCPTEGIAAWVGLDWADQQHVICVYEVESGQSEILRLEQKPEAFESWLTQLRQRFGGAKVAIVLEQARGAVIYALLGVDFVVLYPVNPQALANYRKVYTSSGAKSDPADAVLLIEMVRQRPECFRPWKPDDADTRSLQLLTENRRQLVNQKTAFTNQLTSVLKSYYPQALELAGDLDSDQACDFLTRWPRLGALQQARPSQIRKLYQDYGRPRPQRLEQRLEQIRQARPLTQDPAAVLSGSMMVEALVPQVRSLLRAIEQFDRQISVLFQRHPDRFLFESFPGAGAALAPRLLAAFGTDRDRFQSAQEIQQLSGIAPVTEQSGRQHWVHWRWACSKFLRQSFHEFADHSRKWCRWAKAVYQQLRRRGQGHHAAVRRLAFKWIRILFHCWKTRSCYDESIYLKSLQKRNPVLWAEIEALPPRVRRQPAA

SEQ ID NO: 476282 - protein, 367 aa, unidentified
MEKSSTVFVGMDVHKESIDITLAEQGGEVRRLGAIGGDRASLLKMVRKQQSKGGERVFVYEAGPCGFWIYREITALGLRCMVVSPALVPKRAGDHVKTDRRDSERLASLARAGELEAIHVPDIRDEAIRDLVRGRDDAVIAQRRVRQQLKALLLRNDIGYVGKTSWTGAHRRWLSELKLPEPAQQITFEEYVDAIAVATGRIERLTRSIQTEVITWRFAPVVGALQAMRGIQFVHAVTLVAELGDLTRFHSARQLMGYLGLVPRESSSGEQRRQGSITKAGNSYARRALIEAAWAYRHPARVTRIIATRQTGLPKAACDIAWRAQLRLSAKYRRLNARHLNHNKIVVALARELSGFVWAIGQSVKPL

SEQ ID NO: 476283 - protein, 329 aa, unidentified
MLLKQPPLAYLLNSFLGIDVSKLTLDVALIFDNRTLCKQFKNSLEGFKSLAAWLASLQITRVHACLEATGTYSEAVALFLHESGHLVSVVNPLRIKGYAGANMQRNKTDRLDARLIASFCQTQKPDQWQPPSEAVKHLQSLVRRVEVLEEMRQAEENRLANTVLEIKPSIERMVALIKEEILQLEQQIKQHIDRNSHLKEQSELLQTIPGIGRRTANLLLSEVEFDRYASARAIAAQAGVTPRKKQSGTSLKQTSLSKPGNARIRRALYFPAIVARQHNEIIKEFAKRLQKRGKTPMQIVCAAMRKLLHIAFGVLKHKRAFDASLAFSA

SEQ ID NO: 476284 - protein, 428 aa, unidentified
MTVKDCTSVKEFWQLKKEIRGSKDHLIVGIDVAKDEHKAFFGTANGKTLLKRLTFKNDIKGFDKLLARVKEMKVKHSLNELVLGVEPTANYHKPLGDFLIKCSHMVVLVSGVSVKRNRELLDGRWDKNDTKDSANVADLISQGKCLYYEYAPLVLKDLRGLLSLKRRLKKQEHGLRIRIRNSLLAQYFPELDKYYSKWEPEVLSTVRWCLNPSVIAGLEYDQFVSLVCPGRKNIRQQDRLEWIWKKAVDSIGCDAGEAAEFEAKVMVEELGHIRGIIKETDAKIKHICIRFPEYNYLLTIPGFGPDVSSKVLAAIGDPFRFNSGKQVLKMAGMDLNANRSGKSSDTAVPVISKKGSAHLRYAIYQAAFIASVRNKYFIRYYTNTLRGREREKGIKTKMRVKLAAKMLVIAWTLMKQKEPFDPGYLKID

SEQ ID NO: 476285 - protein, 465 aa, unidentified
MSEDTEVIAVGKAKPQVIEDDEHQRVFERVAAVDVAKASGMVCVRGPGADGRRRASRVWEVTAVMGAVTALGRQLARDQIQMVTLEATSDYWRIWYYVLEMCGLAVQLVDPSQARAVRGRPKTDKLDAMWLARLTEWGMLRPCFVPPAPVRVLRDYARARTDLVHERTRCWQRLEKLLEDALVKLSSVASKLTTVSARDMIAAMIAGERDPAVLAGLARTRMKARHADLVAALDGMFDSHHGDLAQLELDQIAFLDQRISWAEDKITAVLAGIPAAWGIDADGSTGPDAGNGPDAAVLPAVRRLAEIHGVTVLTAAQIIAEIGLDMARFPTAAHLVSWTGLCPIDSQSGRRHGKRKGHGNTYLRGYLGQAATGAASTDTFLGERYRRIARRRGKARAQVAVARSILIIIWHLLADPTARYTDLGPDYAATRTSRDKKIRNHLRGLRALDLTDQEILTILTAHQAA

SEQ ID NO: 476286 - protein, 342 aa, unidentified
MQVTSIGIDLGKTNFHLVILGEQSKVLVRKKFSRKQLLAFTANLPSALIGMEACSGAHFIAAAIRGQGHEVRLIPAQFVKPFLKSNKNDFLDAEAIAEAVARKNMRFVPIKSDEQLDLQALHRVRDRLVQRRTAVINQIRGFLIERGITFPKRPSNLRKNMAALLEDAEANLSPGMRRLLEGVWQEWKQLETHIAEADDEIERFAIADAGCQRLRQIPGVGPLASTATVAAIGNGAAFRKGRDFAAWLGLVPKQRSTGGKARLLGISKRGNEYLRRMFIHGARAVLYRVKYDTAGFGRWVHQLEARAPRNKIIVAIANKLARIAWAVLFRGEAYQHQPVAAA

SEQ ID NO: 476287 - protein, 402 aa, unidentified
MYNAVGIDVSKGKSTIAVLQPGGTVIRKPFDVSHTSQNLNELADYLGSLEGPSKIVMECTGRYHEPMLKVLYEAGLFVSVVNPHLIKNFGNNSLRKVKSDPADARKIARYTLDSWTELRQYSLMDEIRNQLKTMNRQFDFYMKHKTAMKNNLISILDQTYPGANTYFDSPAREDGSQKWVDFSATYWHVDCVRKLSLNAFIDHYQKWCKRRKYNFSRSKAVEIYEASKELVSILPKDDLTKLIIKQAVEQLNTASQTVEQLRTMMNEAASKLPEYPVVMAMKGVGKSLGPQLMAEIGDVSRFTHKGAITAFAGVDPGVNESGSYEQKSVPASKRGSSTLRKTLFQVMDVLIKTKPQDDPVYLFMDKKRAQGKPYYVYMTAGANKFLRIYYGRVKEYLSSLPE

SEQ ID NO: 476288 - protein, 414 aa, unidentified
MQHASPRPSSHTQAAAVAGIDWATETNALCIIDRDGQVLRRLTAPADAAGIRRLLKELAHHGVTQVAIERPDGPVVNALLGAGHPVVVIAPRQVKHLRTRHGSAGNKDDRFDAYVLADTLRTDAHRLQPLQPDSPATVALRAAVRARTDLVETRVALCNQLRAHLRTVFPGAVGLFADLDAPISLAFLARFPSAQAAAWLSHRRLGAWLAANHYSGRTPTRVLLARLTDAPAGLGGDHGHAAAHTTTAYVAALRAICEQITALEAQIAEQLTLHPDAVIFQSLPRSGTVRAAKLLVEIGDARGRFPSEAALAALAGAAPSTRQSGRHHVVTFRWACDKKLREAVMDFAADSRRASPWAQAIYQRHRTLGKTHQHATRILARAWLRVIWRCWQNHTRYNPALHGIAKHQHLPLTT

SEQ ID NO: 476289 - protein, 343 aa, unidentified
MENLYYIGLDVHKRKIAYCIKDVAGKIIKEGFIPSQRKSINDWVKTFTTPWIGAMEATMFTGWIYDHLKPHAVELKVAHPEMLKAIIAGKKKNDRVDAAILADLLRTNLLPECYMLPQQTRELRRIMRYRNFVMRMGVKTKNKISGLLMEVGAQYDKQRIHGKKYFHQYLEKVEEVPESVINLLKMSRANLELFKAAQKRLISVLRGHTAIRERVERLMTIPGVGEILALTWVLEIGDHNRFSNVTQAVSYCGLCSAQKESAGKSSRGPISKKRNKHLQCILIEAAKIAPLWNEQLAEVHKAMLVKAHRNTATLAVARKLVAYLLAVDKSEKPFAYREQQMAA

SEQ ID NO: 476290 - protein, 348 aa, unidentified
MITIARIGIDTSKSVFQLHGVDEREQVLLQRKLRRREFLTVVGKLEPTSIGLEACGASHYWARELQALGHRVMLIPPQYVKPYVGRNKNDKVDAEAICEAMSRPKVQQRRVPAKSVEQSAGQMLLGVRDSLIRRRTQLSNAIRGHAAEFGLVAAKGLDKVAPLLARIAAEEAVPALAKELFAVLGQEFDELGPRIAQIDKKLMAFHRSNELCRRLIEVPTIGPIGACLLVTKIVNPRAFRSGRRCAAWLGLTPKDHSTAGKQKLGGITRAGDETLRATLVSGATAYIRHVRSARSTPSPWMAELLKRKPPKLAAVALANKTARIAWKLMTSGERYDPARRAAREALAA

SEQ ID NO: 476291 - protein, 344 aa, unidentified
MWIIGCDYHPSFQQIAFVDQATGEYGNLRLEHKGGEAEKFYRSLTGQQVRVGVEATGSMRWFERLLGELGIELWVGDPGKVRAAAARKAKTDKQDAELLLRLLLEKRFPRIWVPTVEQRDARQLILHRHRLVQTRTRAKNQLQAIARNEGLFPKRRAWSQAGQTELMALPLSPWATVRRQDWQELLSELNQRIDPLDRALQQQAKQRPEVRLLMTHPGVGPVVATAFVLTIGEPGRFQTSKQVAAYLGLVPLENSSGKGRQRLGHITKQGNSLLRGLLTEAAQVASRHDPQWRRKYLRLAMKKNRSIATVAVARCLAVRLWWMWKLGLDYGQMMESRSHAEQLA

SEQ ID NO: 476292 - protein, 337 aa, unidentified
MVYGAIDLHMRYSQVRIIDAEGHLVRETRVATTPERLTAAFAAHGPMRILLETGTESEWVALTLEAAGHAVVVADPNFGPMYGDMRRRVKTDSRDVTALAEANRRGWYRAAHRTSGPQRARRQVLSARRQLVQMRTGTISVIRALLRQSGYRAGTGGSDAFGDRLARLTLPNALTTTIAPLVRTLATLRAEIRALDAQLDQVAAIDPVVRRLQTVPGVGPVVAVTFRAFIDDVTRFGSAAQVSAALGLVPREDSSAERRQRGHLTKTGPRELRSLLVQAAWVCWRTCRHGALRAWTDQLAARRGKRIAVVALARRLSRILFAIWRDATVFDRSRVAA

SEQ ID NO: 476293 - protein, 351 aa, unidentified
MKKFFIGIDFAKEKFDAAIIEACGLKEFGARQFGTFPNDSKGYRQFMKWVKGVAGTTVEEECLFCGEDTGSCSLGLSKWLYGKGYDMWIENAYVIKHSNGIQRIKTDRADASMIAEYAWRHQDKAVPFEPLSDSLTQLREVFLYRHKLVQQRVAMEVRKQDKEASDKTRALNFINRKSKHLMAEIDKAIKECDAMIDRIIESDDELKENYAIVTSIKGVARQNGACLLIFTNNFKRFDMDARKIACYYGVAPFAKESGSSVHTPARTSHFANRLIKSLLSQAAQIARIFNPEIKEYYEGLIKRGKKHSVALNNVKNKLLRIIVALVKKKTMYDPDSYKFYRDRLSKKFSPA

SEQ ID NO: 476294 - protein, 320 aa, unidentified
MSPNTTNTMTETNSVVHAGLDIAKAQLQLHLQNQQHVLPNTVTGHQRLIRLLRVVAGVHVVCEATGGYERKVVSALHSANLPVSVVNPAQVRHFALAQGQRAKNDPIDAALLTAYGHALRPNATPVPQAVLAELRELVQWRDHLKEQLVRARQPAEHATLAFVHRQQSKEVTHLEKQMAAVEKELAAALTRHPRWREQVQRLAELDGVGTLTAVSVLSQMPELGQLNRGQAAALAGLAPWTRQSGPWEGQRHIGGGRAVVRRALYMSAVALARQTGSILGKFYARLRAAGKPAKVALTAVMRKLLLQMNQVLKYHVPDPA

SEQ ID NO: 476295 - protein, 394 aa, unidentified
MDPHKASNTIAVLDSTENLLTRRRFENSDDGFVEMLAAVGEFPNRVWAVEGANGMGRRIAQRLIGFDERVYDVPAKPATRVRVYSTGHGTKTDNTDALAIARAALHSRHLRIVKPDDETVAIKLLLARREELVGLRTQAVCRLHRLLRELIPGGGPALITAEKAFDLVNDLKPDDPDGQMRVEIALEHIEDIMRIDLKIDAAAKRIHAEIKASGTTLTRVYGIGPINAALIIGEVGDVSRFPSRDHFASYTGTAPVAASSGDHQRHRLNRAGNRQLNHALYIAAITQIRNDTPGRDYHRTKLAAGTSTKEALRCLMRRISDAAWRQLQLDRAPDQTQDQAWPRWPSKRGNLQQYRSPDTLRMNGRPQPFKPAAVQPRCRVRDVASPKHQHRGAS

SEQ ID NO: 476296 - protein, 344 aa, unidentified
MKITRVGLDIAKQVFQVHGVDEHGKARVRKQLARAKVLEFFAQLPACLIGIEACGSAHYWGRELAKLGHTVKLMAAQFVVPYRKRGKNDANDSEAICEAVGRPNMRFVAIKTEEQQSVLMVHRARTLVMANRTAQVNQIRGLLGEFGLVVPKGVARLRRELPGILEDAENGLPPLAREVLAGLLEQFRDLDQRVQRYDEKIRELARQSEPACRLMRVEAIGPQTATALVASMGDPHVFKSARNYAASLGLTPRQDSSGGTTRLGPITKQGDRYLRTLLVHGARAYLRVVDKKTDAKSAWARRLKERRHVNIAAVALAAKHARIAWAMLAKGSEYRPVQPEEAAA

SEQ ID NO: 476297 - protein, 408 aa, unidentified
MNTLYVGINVSSKSNVVYLMLPNGDRHSNFSVANSHEGSIRLVKRIHSALTSHSLDTVLIGLESTSVYGDNLVYFLREDATLTPFNRKIHVLNPQQVKKFHDIYNDLPKNDYVDSFVIADCLRFGRINKEVYMGDYRYKALQNLTRARFFAVQNPTKEKQRFINVLFKKYSTMTQEKVFSNTFSTTALAVYDEFESVEALANMDLHELTEFIIEKGKNRFPDPDAVAKAIQKAARSSYRLPKTVNDSVNQVLSISITYMKALESQIKDFDKAIKSQMELLPNVLISIPGIGPVLSAGIVAEIGDINRFENQAGLAKYAGFAWRQHQSGNFEAENTRLIHSGNQFLKYYLCEAAFSLVRCDKEYSDFYYLKYKEVNRYQHKRALALTARKFVRLVFRLLKDNRLYTSAR
